United States Patent Application Publication US 2005/0228172 A9 - sequence listing, part 87

SEQ ID NO: 392661 - DNA, 527 bp, Homo sapiens
tcgctctgggaaaaccaccttcgtgatcatggtatctcccctgccaggtaagtatgaaaccttgtgcctctgccccgacacagcctcatacgcctcactctttacacacacggtcacttgccccgcgcactcccgagccctttccagccctgacacacagctgggattctcacttccgatcagcggtcctgaacccgctcccagggcacgggaactcccttcgtggcgacgcagcaagtggcgaagcagcagcctctgcgctgcctcatctacatagaagtcgccctgtccgtgatgtcaccgacagtgccttgcccagtccccgtctgcctttctgccactcaaccgaccaatctgctgccagagycgccaaggggaagtgacgtctgcctctccctttttccctcccgcccctgcgtctgttctctcccaaagaagctggtccttagcctgtgttaaggagcaacctttcggtggccagatggagccggggcatccttcttcaaataatggcttttaattcgcag

SEQ ID NO: 392662 - DNA, 527 bp, Homo sapiens
tcgctctgggaaaaccaccttcgtgatcatggtatctcccctgccaggtaagtatgaaaccttgtgcctctgccccgacacagcctcatacgcctcactctttacacacacggtcacttgccccgcgcactcccgagccctttccagccctgacacacagctgggattctcacttccgatcagcggtcctgaacccgctcccagggcacgggaactcccttcgtggcgacgcagcaagtggcgaagcagcagcctctgcgctgcctcatctacatagaagtcgccctgtccgtgatgtcaccgacagtgccttgcccagtccccgtctgcctttctgccactcaaccgaccaatctgctgccagagtcgccaaggggaagtgacgtctgcctctccctttttccctcccgcccctgygtctgttctctcccaaagaagctggtccttagcctgtgttaaggagcaacctttcggtggccagatggagccggggcatccttcttcaaataatggcttttaattcgcag

SEQ ID NO: 392663 - DNA, 527 bp, Homo sapiens
tcgctctgggaaaaccaccttcgtgatcatggtatctcccctgccaggtaagtatgaaaccttgtgcctctgccccgacacagcctcatacgcctcactctttacacacacggtcacttgccccgcgcactcccgagccctttccagccctgacacacagctgggattctcacttccgatcagcggtcctgaacccgctcccagggcacgggaactcccttcgtggcgacgcagcaagtggcgaagcagcagcctctgcgctgcctcatctacatagaagtcgccctgtccgtgatgtcaccgacagtgccttgcccagtccccgtctgcctttctgccactcaaccgaccaatctgctgccagagtcgccaaggggaagtgacgtctgcctctccctttttccctcccgcccctgcgtctgttctytcccaaagaagctggtccttagcctgtgttaaggagcaacctttcggtggccagatggagccggggcatccttcttcaaataatggcttttaattcgcag

SEQ ID NO: 392664 - DNA, 530 bp, Homo sapiens
gcaacagagcgagactctgtctcaaaaaaaaaaaaaaaaagaaaagcaagcmaggaccccatggccggcgagatccaaaccagtaaaggggcagctcctcagagataggcatgtgcattagagaaaaaaagtatccttaacatgactccatatgataatcagctcattaaaactcatgcatatggactgcatatcatgcatgtacttaaaattatgggatggaggcaatgtgcaagcacacaagggccaaaataactaagcaacccacctatcaatcaaaaggcaaacactggctaacgattaggcatccttgggaagagaagagaaagaaacacacataaaaagacccaacgtacaccaaactaatactgatctcacatcccagagatcagcccactctccccactctgagactgttactgtgcttaataaattttgctttgctttgctgctttgtgtgtgtcatgtacagttctttgtttgggacaccaagagcctggaaatgcacggcaccatctggcaagaattag

SEQ ID NO: 392665 - DNA, 530 bp, Homo sapiens
gcaacagagcgagactctgtctcaaaaaaaaaaaaaaaaagaaaagcaagcaaggaccccatggccggcgagatccaaaccagtaaaggggcagctcctcagagataggcatgtgcattagagaaaaaaagtatccttaacatgactccatatgataatcagctcattaaaactcatgcatatggactgcayatcatgcatgtacttaaaattatgggatggaggcaatgtgcaagcacacaagggccaaaataactaagcaacccacctatcaatcaaaaggcaaacactggctaacgattaggcatccttgggaagagaagagaaagaaacacacataaaaagacccaacgtacaccaaactaatactgatctcacatcccagagatcagcccactctccccactctgagactgttactgtgcttaataaattttgctttgctttgctgctttgtgtgtgtcatgtacagttctttgtttgggacaccaagagcctggaaatgcacggcaccatctggcaagaattag

SEQ ID NO: 392666 - DNA, 606 bp, Homo sapiens
attgcctaatgaatacttgactgattgagttattagcaagcttacttttaggtctgttctttctytattgtttggatatttgaacgtctttgctgttaagacttctgactcttactgatattactttttcttgtctggcaaacataaggtttgaggaaagagcgggacaacccagacacccaaggaataagaaagggttagttttgatatctaactagtaaaattacatgatttctacctattgtggctttttttgagaaatacttttcatgaatcttttctttgcattttttttctaagcatgtcatacaaatctttttttctttcctgtttatatttggttgtgccattctatataaggaaagctcattatatagcctaacctatttgaaagtttttatcggttctgattctcaggagaaaacttggggtgataaaacactgctaaactataattaaatagttatgaaagaattttttttttttacctttccgaggaaaatctcagtttttagaaacatgaaattttcagttcactaaactcacattggtttacctgatcaaattgaaaccttttgaggttcacagtttttcttgatggcaatt

SEQ ID NO: 392667 - DNA, 556 bp, Homo sapiens
ggacaatcaatctgaaataagaatgcagatggctaccaagttagaaaaaagatttccagcctgttatgaggsctaaattcaaaatgaactttggaacctgaattcattttaagaaaaaaaaaaaaaaaggaaattcagaaaggatcaggaatatgactaaaattgaaaagattaaccagattaagtgatggcaaggatagggagtaactggaaccctgttctactggtggaagtaaattggttcgaccattttataaaaatgttttgctacacctgctaactctaaacaaacatatatcttcacgctatgattcagcagctccacttgaaggtcaaaagaagaatgtttatgtatgccaaaaacatgtacaagaatgttcacagcagcttggtaacgctagaaagaacccaaatatctatcaccagtagaatgggtaatttatggtattttcatataatagaattctacatagcaattagaatgaatgaattattgaatctcaaagacataatattgagtgaaagaagttaaacacagtatacaatgtatgatttc

SEQ ID NO: 392668 - DNA, 556 bp, Homo sapiens
ggacaatcaatctgaaataagaatgcagatggctaccaagttagaaaaaagatttccagcctgttatgagggctaaattcaaaatgaactttggaacctgaattcattttaagaaaaaaaaaaaaaaaggaaattcagaaaggatcaggaatatgactaaaattgaaaagattaaccagattaagtgatggcaaggatagggagtaactggaaccctgttctactggtggaagtaaattggttcgaccattttataaaaatgttttgctacacctgctaactctaaacaaacatatatcttcacgctatgattcagcagctccacttgaaggtcaaaagaagaatgtttatgtatgccaaaaacatgtacaagaatgttcacagcagcttggtaacgctagaaagaacccaaatatctatcaccagtagaatgggtaatttatggtattttcatataatagaattctacatagyaattagaatgaatgaattattgaatctcaaagacataatattgagtgaaagaagttaaacacagtatacaatgtatgatttc

SEQ ID NO: 392669 - DNA, 601 bp, Homo sapiens
atgcacaatgtcttttgggagacactgccgggaatagagaagtcagtgctagcatctctggcaacagggggatcaccatctatttgggagaaaaagctacacatgaaacatctctgtgactcaaatgactcaaccatgtttacctataatataatgacttactcaactatgcagtcaagagagtcaggaaaggtcacagtgtgtggccttttctcaagaaaggcttcccagaggaggagggacttgggcttcaaaagataggcagcatactctgtctgggtagggcagtaaaggcaggacattgtctccacaggacttatgtcaaaatgcacgaggcctcagagggttcttggctgtaaaaaacaaacaaacaaamaaaaaaaaaacttgagccttgtggtaaggaggaaggaaggggatattgtcctgtccagaggacagacctagaggacagtcctagaagatttaatggaagttctatggtgaggaggatgacgaataaggcatctttatgcctaccgcaaaatcaaatcctcctaggtagacagttttcattgaaagcaaaaagtgtcttcccaggtcatgaagagcagggctgtcc

SEQ ID NO: 392670 - DNA, 606 bp, Homo sapiens
acctcttgccagtctccctcttgccagtgggcccccagggctttccagcctgacttctgcctctggaccccaccctcctcccccacttgctctagatcttgtctctgccacagcagtccagctgatcagtcagcaaggatttctgaagcacccagcaccatgattttaccatgatttcccaaagggctacttgggtctcagtcatttcagtcaatccagaccagcaggctggcctacattttctgaggtgttgcagctatgcagaattggttggactttttgctgggcccctctatggtggtgctttgggagggcactctcctgtgttcagatamctggggcagaattagaggaattaacaaaataacagttttggatgccaggttccccattaggagtttgactctgcactccctcagatttggtggcgtgtgctctcctgctggtaatacacttcctgtgacctggaaatcctactgctatattccttaggtttggccagactttaaaacccgccagatcattgcaacttaagcaacttctaagaacatctctttaccaggtgttatttagagaacgcaagagatttacgtctgctctgaaatg

SEQ ID NO: 392671 - DNA, 574 bp, Homo sapiens
aagagaagtttaatttctcacagttctagaagccagaagcttaacatctgtttctctgggctgaattcaaggtgtcagtaggactgtgctttattccttgcctcttccagtttctggtggctgctagcattcctctgcttatggccacatcactaatctctggtcattgccttctcttcttggtgcaccaactctccctcttttataagggcacttgtggtttagatttcagcctgcctggaaaattaagtcaaaaagccttaacttaatcacacctgcaaagaycattttactttataaggtaacatttacaggtttcagggattaggacttgatacatttgggtggccattatttagcttcatacagagtccgaaatctttgcatacaatttcaggaagatcatggattccaggtaggcacatctgctctggagttgcatttcaccacagatacctgtggacagatattggagacaggctcatttacttattcacaaaccttgctacaactcagaaccaaccgcagcgccggttaaaaatactaaatacaaaaccacatcacaaccgctagt

SEQ ID NO: 392672 - DNA, 581 bp, Homo sapiens
gagttgtgcaaccatcaccacaatacagttttaggacattttccctatcccccacgaattcccagaagcagtttgcagttaatctcctctctcatgtttagccctaggcaaccatttgtctgctttctgtctgtatatagttgctttttctggacatttcacatgaatggactcatacaatatgtggccttttgtgtctgggttctttcacttaacatgatgttttcaaggttcatccattttgtaacattatcaatactcccttcctttttctggctaaataatattacattgatggatataccatattttgtttttccactcatcagttgataaacatttgagttgtttccactttttggttgttatgaataattctgtgaatattcgtatacaagtttttgtgtggacatgttttgggttctcttgggtatatacctaggagtggaattgctgggttttataaagtaaytgtatgtttaactttttaggaacttctggattgctttccaaagtggctgcactgttttctatccccactggtaaatgtatgaggatttctatttctccacatccttacc

SEQ ID NO: 392673 - DNA, 581 bp, Homo sapiens
acaggggacatttccataaaaataattcacatttgagtagttgatatacatatttttaaccattttaactgcaagatataataatagaaaaatgcatatcttaatagagtattataaagtaaatacacttttagatatttacttctaggtcaagaaatagaactttgctagctaccttagaagcctggcacatgtcccatcccaatcctaaaattaaccactacgctgacttttayggaaatctcttcctctcttccttgatttcattatagttttatcgctcaggttgcaaccttaaacgtaatagtttagttttgccttttaaaaatattttaagtgtttttcatttagttgctgatatacttgtaataaaaattacaccagattataatagcaatcaacttaaagaagtaaatgcttaaaaatgctcatttttgacaatagtgctttatagacacatgaaaacatatacaatttttcccatggatgtgactaaataaattgctttgtctcaaacttagcatgtcattttgatatggctatatgttttggttcagttttgaagtaatgcctccaacatc

SEQ ID NO: 392674 - DNA, 501 bp, Homo sapiens
tctattgtctataacattcttggcagctaaatgctcactgcatccccatactctgtaggcaaggattaccacagggttctgctgggagcgctgggccagakgccaaaggcccagccagacacaggatatcaaaggaggattgtttagatgctggggtccctgccttttagggatgcctaactatagagttctgcctctgccagattattcactcccatacaatgcacagcagtctccctcagcctgtcccagtgccatttttaatcaaggaaggaggtaataatgtagaattcacaggtcatcatttcattactttggtctggacatcaaagaaccagcaggataatgatgatggaaaagttatttatcatctcgaaatctcgatttgtccattcttaaaataggaagggtaaaagtcgcccctacctagtctccagatatctggagatgataaatgaagtactacagtggaatagtttaatttttaaggtgaattacttt

SEQ ID NO: 392675 - DNA, 501 bp, Homo sapiens
tctattgtctataacattcttggcagctaaatgctcactgcatccccatactctgtaggcaaggattaccacagggttctgctgggagcgctgggccagaggccaaaggcccagccagacacaggatatcaaaggaggattgtttagatgctggggtccctgccttttagggatgcctaactatagagttctgcctctgccagattattcactcccatacaatgcacagcagtctccctcagcctgtcccagtgycatttttaatcaaggaaggaggtaataatgtagaattcacaggtcatcatttcattactttggtctggacatcaaagaaccagcaggataatgatgatggaaaagttatttatcatctcgaaatctcgatttgtccattcttaaaataggaagggtaaaagtcgcccctacctagtctccagatatctggagatgataaatgaagtactacagtggaatagtttaatttttaaggtgaattacttt

SEQ ID NO: 392676 - DNA, 600 bp, Homo sapiens
aaaacttgtatgtgttttcaaagccatcactactaaagtacaaagctaagaaacaagcccagtgctatactgtcttctactgctgaggccacttctcaccaaggaaccgggaaatgaccagtgaatctttatgtcaagtttcccacttagttgaaacactccctggggttttagtcagcttcacagcacctgtaagaacttcctttcctctcccttccatacaatagataatgtttctggaaggagaccctcagactctctttagtgtaacttgaggccagatctttcaaggttggcaaaggaggctggaatcaccatgtgggtgagagggatagctagacctcacagcccygattttttccatacattaagatactctctgctctgctaactgcagaggttctgaattcagttttattaaagggcatccatgggttcccttagagttcattccactcaaacctattggcaacatcccctcctgtgatagctaccttccctgaggattactgggtactacccccaagaaatgcaggtgaataagtacaagtgaactcaactgtcgctaagtactcctagagcaaacttgcaattatttct

SEQ ID NO: 392677 - DNA, 523 bp, Homo sapiens
ggagggacatgccatgctcatggaatgyagtacatttacaccacagaataccattcagcaataaaaagaaacaaactattgataaacacagcaacctgaatgaatctataaggaattatgctgatggaaaaacttcagttccaaaaggttacatactatgagtctatttacagaacattattaaatgataaaattttatatagagagaacaggttagtttgtaaccaggcatgaaggagagaggagagatagaagggaagtaggtgtacctttgtggtgatgacatatatccttactatattaacgtcaatatcctagctgtgatactgtactagtttcacaaaatgttactattggaggaaaatggtgcatggaattactctttattatttcttgaaactgcatgtgaatctacaagtatttcaaaataatttttttaatgggggcagggggaggtctcccaacaacaaataaattaacttgccatcctccagcagcctaggcaggcagagagcttctcgca

SEQ ID NO: 392678 - DNA, 582 bp, Homo sapiens
aatgaaccatgtggaaatcctatctggatttctaaaagttcagaaggtaccactgggcgagtaggcaattaacgggcggaaaggaaggggaaaggcacccttggtctctacaccgagcctggtccctacgctgacaccatgcagccctggaataatgtggctggctggatgagctggagtttttctacaaacagaawcatcaatttgtgacttgcttaaataacctcctgtggagattttcacaataacctgaattaacaaaataacattaattctgacttagcacagaattatggttacaagatgatcatgacaaaacagttgaaggtggtgctgtttctgctgtctccaagaataaatcaacacgcttgcgtcccaccactcacaactaccgcatcaactttggcagaggttaacattatcaagtttttacaaaaggactaaaaagggaccacagggatataaagaggggtatgtatggacccccagagagttaatcaatcaataaatacattatccaatccccaactcaactactcaaatcatgcagctatattaaaaatacgaagaatattaaggatg

SEQ ID NO: 392679 - DNA, 599 bp, Homo sapiens
ctttgtaactgggcataataccaggtattctcgtttaggcattctgctcagtagtattaacctgaagccataggacatgccaatgtttttttccgtgttttttaaaaaaattaaaatggttggctacaaatgcatccttttttacttcagagtaagtcggccttggttaagtcttaatatttctcatgcctatttttttttcttcaaatgaaaacatacggagagaaaayagcatgtttatgccttttggttgtacccagcactgcccagaatggcttacagagtttatacccatggaggtttcgtaaaggtgacattaacttcgcagtaaagtcactgaccccgaacctgtgtcacttcaggcttagccaaatgctaacagagcagctcaaagcttaagcagaggtatgtgcttgctaagtaagtgtgtgttttggactaattggtgactaccattctgaacattaactgccctttgtgttttaatgttgccaggaggccgattgtgtaacctttggaggcttccctgagtttggagaactgaattcatgtggtgacttcctatttataatgtctttgggggagctatgaaataactt

SEQ ID NO: 392680 - DNA, 616 bp, Homo sapiens
cagggtgatatcgtaacttcgtgaaattggaggccacatttaaaaaggcactccttccttttaaaagctttgcaagggggctgcatatattttcctaattagtgggaatattttcttttttcttttttyttttttttttttgagacagagtttcactttattgtccaggctggagtggagtggcatgatctcggcttactgcaacctctgcctcccgggttcaagcaattctcatgcctcggcctcctgattagctgggattacaggcatctgccacctcacctggctgattttttgtattttagtagagacgacgtttcaccatgttgcccaggctggtcttgaactcttaagctcaggcaatccgcctatctcgggctcccaaagtgctaggattacaggcgtgagccaccgagcctggctggtgggagtattttcaaagagaacaacaattcaccacaccccaacatggtaacagtctttttgttttagaagcatctgtgaattgccaagactcgtagaactaagatgtattcaaagtcagtcgattttctggaaacgacccagtccctgaagatagtcttttggggagttgagtgttttgagagggacaccc

SEQ ID NO: 392681 - DNA, 575 bp, Homo sapiens
aattaatttagctgattacttcattttgggaaatgcatttgccrgttttaaatgtgtctgctattaaaacttaaagtatataaacatatgattaaatgcattatatttaaaacaagaggcaagtacttgcctaccaaagtaggcctctgggcctcttagaaatgtttgttaagtccactgcagttatctttctggactaagatggctcattcttttaggttgtgaagtaccctagtccagctgggtggctgagaaccagctagcgctgggggttgcccctaatttctccaggagtgagtttgggaaacagcctgggcttcggggagtagtttatattttcaaattctcacctacacactaaaatttttctgtaaccctaaaatcaatatccaccgtgcattcacagacatgcacagattggcaaaacatttgagccagcagatacatacttcttcagctacagtccgttgtggtgattctctgctttcttgtttcagttctcacaccataaacaagtattctttttgtggtctacttagtgccatgtttttcacatttttacactttttgttggt

SEQ ID NO: 392682 - DNA, 404 bp, Homo sapiens
acatttgaatcaactttgttgatgcattgtaaacatttgaatcaactttgtggaagcctaccctaccttgaggtttcatggttatgtaagccagtaaattcccactctcgttaaaaaaaaaaaaaragagagagagagagaaaagcacttaacacattgcttagggatattctaagaaccacctaacttcatcccataagttattgacattatactcattctgaaattcaagttatttatttaatggaatttggttacgtaatttgatttgaaagtctgtatttaacccagtttttatcttatgaagatcataaataaataggatatcttaagaaaaaccaatgcttgagcaaaaattaacagaagacgaggatggtaaagaccaaagcaacaaagcatagcaa

SEQ ID NO: 392683 - DNA, 538 bp, Homo sapiens
aaaaacaaaatcattaaacataatacacacattaatatggtgtaattaatttagctgattacttcattttgggaaatgcatttgccggttttaaatgtgtctgctattaaaacttaaagtatataaacatatgattaaatgcattatatttaaaacaagaggcaagtacttgcctaccaaagtaggcctctgggcctcttaraaatgtttgttaagtccactgcagttatctttctggactaagatggctcattcttttaggttgtgaagtaccctagtccagctgggtggctgagaaccagctagcgctgggggttgcccctaatttctccaggagtgagtttgggaaacagcctgggcttcggggagtagtttatattttcaaattctcacctacacactaaaatttttctgtaaccctaaaatcaatatccaccgtgcattcacagacatgcacagattggcaaaacatttgagccagcagatacatacttcttcagctacagtccgttgtggtgattctctgctttcttgtttc

SEQ ID NO: 392684 - DNA, 600 bp, Homo sapiens
acaaacaaacaaacatcatacaaataaaatgaaggactaagaatgggtatgaacttaagaatacaacatattaggcagaaggaaagggaagagaggtgagctgagattctgagccccacttctcggtgtttattgagtcccaaagagcagctgaaaggctcaaaagccaagcagtaagtggctgtttaggaacatcaattggagcagactttctgaaatccttaaaaggctagaataaaaactttcctatttatggccccacctggaggaggaaggctaagagttttacctgtagcccctgaagtgctatgtcttagaggagtaaggatgagatgggattaggcaagtcttttcaaagacaagtccagcttcaaatcagagaatctgctgatcagcttctattctatttgcccaggcagagcaaaatatattcaattttaatatattaaatttttataaatttttaaaaatttaaattgtaaactttcaccaaaggaaagttacactatccaaactctaaaattacttcttcaggttttcatagaarctataaaaacttacatataaaacaataaggtgttaaaaaagaaaaatatgagt

SEQ ID NO: 392685 - DNA, 553 bp, Homo sapiens
aggcttacgagcgaatttactttatccttaataatgcctagtttcaaatcatttcaacaatttcagaacaggacccactgttacctgattcagatcatagcaatcattttatactgtaaagaatgttaattttgatggctacttcatgtgttcaaaggcagatgtgaaataggtaaattaagataccactaatatactaaaaaataggagaaaacaataaaaagtttaagtagtatattctgctttaagtttaggacaggaaatcaattaggcctgcaattgctccttggtctcctgtagcatccttccgcttctctgactcttcaactatgttgatacgtgtttggctatgcagtgcagggccctggcttctgtaagataactttattaccaaggttggaagcaagaagaacagatacagatttccttctgtcakcttgaggttccagctcatgcttgtgggttctaatccacttgggatttcactccctgactactgcctgccctgtagacttcaacctgcatcacggaaacacagccttagagagcatgt

SEQ ID NO: 392686 - DNA, 574 bp, Homo sapiens
cctctttggttaaatatattcctaggtactttagttttttgtggctattgtcaatgggattgcatttttgagttcattctcagcttaagcgttattgctgtatagaaatactactgattgttgtatgttgattttgcatcctgaaactgtaatgaagtcatttatcaaatctagtagtcttttagagtagtcttatgattagagtagtcttatgattttctaattataagatcatgtaatcagggaataaagataatttgacttcctcttttctaatttggaagccctgcatttgtttctcctacctggttactyggttaggatttcaagcactatgttgaacaagactgataagattgggcactcttgtattattccagttcttaggcaaaaggcattcaacttttctatatccagtctgatgttggctgtgggtgtgctctgtatgccttttattattttgaggtatgttcctcaatgcctagtttgttgagcattttatcatgaagaaatgttggattttattgaatgctttttctgcattgagacaaccatatggtttttgttttaagtt

SEQ ID NO: 392687 - DNA, 574 bp, Homo sapiens
cctctttggttaaatatattcctaggtactttagttttttgtggctattgtcaatgggattgcatttttgagttcattctcagcttaagcgttattgctgtatagaaatactactgattgttgtatgttgattttgcatcctgaaactgtaatgaagtcatttatcaaatctagtagtcttttagagtagtcttatgattagagtagtcttatgattttctaattataagatcatgtaatcagggaataaagataatttgacttcctcttttctaatttggaagccctgcatttgtttctcctacctggttacttggttaggatttcaagcactatgttgaacaagactgataagattgggcactcttgtattattccagttcttaggcaaaaggcattcaacttttctatatccagtctgatgttggctgtgggtgtgytctgtatgccttttattattttgaggtatgttcctcaatgcctagtttgttgagcattttatcatgaagaaatgttggattttattgaatgctttttctgcattgagacaaccatatggtttttgttttaagtt

SEQ ID NO: 392688 - DNA, 647 bp, Homo sapiens
ccttattgctttttatgatctttcaattcttaaatatgttattaacttttcagagttctttatgtgaataatacaactcaatttatcatttgtactttacaagaaaaataagacttggcttcatatcatataatattttattttcactttatgacttataaaataattttatattcttgaaatgtaatttttgaccaattttgaaatggtcattgaaattaaaatacattcttaatttgaaacccttttttaatggaaccacagaaaggaatattgattagggcttattagawattgagtttcctattacattccattgcactttaataagcatcctcataaggctttccaggatgcagagtctttcattagagatcagcatggagaaggtttatcaagggaggaatttgggatcaacccctattgaagagaaagaatggaagcagaattggccagagggaaaaattagataatgatacagtctcagtgaaggtctcatatgacaccaaaagaaaatacaatgttagaatagccttttagaattatcctatggaagtcattggatggtagcttccttgagattagaccatcactttgggagcagcatctctcttcagccaagataattacagagaatgtggacagtt

SEQ ID NO: 392689 - DNA, 647 bp, Homo sapiens
ccttattgctttttatgatctttcaattcttaaatatgttattaacttttcagagttctttatgtgaataatacaactcaatttatcatttgtactttacaagaaaaataagacttggcttcatatcatataatattttattttcactttatgacttataaaataattttatattcttgaaatgtaatttttgaccaattttgaaatggtcattgaaattaaaatacattcttaatttgaaacccttttttaatggaaccacagaaaggaatattgattagggcttattagatattgagtttcctattacattccattgcactttaataagcatcctcataaggctttccrggatgcagagtctttcattagagatcagcatggagaaggtttatcaagggaggaatttgggatcaacccctattgaagagaaagaatggaagcagaattggccagagggaaaaattagataatgatacagtctcagtgaaggtctcatatgacaccaaaagaaaatacaatgttagaatagccttttagaattatcctatggaagtcattggatggtagcttccttgagattagaccatcactttgggagcagcatctctcttcagccaagataattacagagaatgtggacagtt

SEQ ID NO: 392690 - DNA, 581 bp, Homo sapiens
aggctttccaggatgcagagtctttcattagagatcagcatggagaaggtttatcaagggaggaatttgggatcaacccctattgaagagaaagaatggaagcagaattggccagagggaaaaattagataatgatacagtctcagtgaaggtctcatatgacaccaaaagaaaatacaatgttagaatagccttttagaattatcctatggaagtcattggatggtagcttccttgagatkagaccatcactttgggagcagcatctctcttcagccaagataattacagagaatgtggacagttgagggctctctgctgacattctcaactttggtcctgaaaatggatgtggatggcacatcacagtgttgagtattgtccactctctgtgtatctcactaactccaccacagttttcgaaactcaaacttgtaagaggaagtttagcagaaggaatgaggaaaatgtctttagggcatgtgagaggtcatcacggttatctctaagctaaatggctaagcctaggagtcaattaatctggaaattaagattaccacctggacactttgggctcctgc

SEQ ID NO: 392691 - DNA, 581 bp, Homo sapiens
aggctttccaggatgcagagtctttcattagagatcagcatggagaaggtttatcaagggaggaatttgggatcaacccctattgaagagaaagaatggaagcagaattggccagagggaaaaattagataatgatacagtctcagtgaaggtctcatatgacaccaaaagaaaatacaatgttagaatagccttttagaattatcctatggaagtcattggatggtagcttccttgagattagaccatcactttgggagcagcatctctcttcagccaagataattacagagaatgtggacagttgagggctctctgctgacattctcaactttggtcctgaaaatggatgtggatggcacatcacagtgttgagtattgtccactctctgtgtatctcactaactccaccacarttttcgaaactcaaacttgtaagaggaagtttagcagaaggaatgaggaaaatgtctttagggcatgtgagaggtcatcacggttatctctaagctaaatggctaagcctaggagtcaattaatctggaaattaagattaccacctggacactttgggctcctgc

SEQ ID NO: 392692 - DNA, 592 bp, Homo sapiens
gtgactttttagctataagtagtacttatgcgtactgcattttgtttctaaaacatttaaaatatagttttacatttaatcatgtatcaatccttggtgagaattgttatatttaataaaaactttatggccagaattggaagctcatttttttrgtatggattatatacccttctaaaatgctatgttacctcttatttttataaaaattaaaaataacatctaaaaattaataacatctgttatttggtacatgccagagacttttcactgagtatttctagacctcagtgaaaacttttattcccttatgcaataattttacatcactcttaaaatatatgacgatatcctgtccagtattaaatgactcaagtgctcaaatgcaaacgcttttccttgtacttcaattgcaatttaaataaaaattagcagtaatatcaaaatacaggcatgcaagtattcataagaaacaaggaaagtgtgtattatagtactaacagagatgcatatatactgatcatacattctgacatggatactgtaccccctacttgatgaatatctttaacctacactgagccacccatct

SEQ ID NO: 392693 - DNA, 592 bp, Homo sapiens
gtgactttttagctataagtagtacttatgcgtactgcattttgtttctaaaacatttaaaatatagttttacatttaatcatgtatcaatccttggtgagaattgttatatttaataaaaactttatggccagaattggaagctcatttttttagtatggattatatacccttctaaaatgctatgttacctcttatttttataaaaattaaaaataacatctaaaaattaataacatctrttatttggtacatgccagagacttttcactgagtatttctagacctcagtgaaaacttttattcccttatgcaataattttacatcactcttaaaatatatgacgatatcctgtccagtattaaatgactcaagtgctcaaatgcaaacgcttttccttgtacttcaattgcaatttaaataaaaattagcagtaatatcaaaatacaggcatgcaagtattcataagaaacaaggaaagtgtgtattatagtactaacagagatgcatatatactgatcatacattctgacatggatactgtaccccctacttgatgaatatctttaacctacactgagccacccatct

SEQ ID NO: 392694 - DNA, 592 bp, Homo sapiens
gtgactttttagctataagtagtacttatgcgtactgcattttgtttctaaaacatttaaaatatagttttacatttaatcatgtatcaatccttggtgagaattgttatatttaataaaaactttatggccagaattggaagctcatttttttagtatggattatatacccttctaaaatgctatgttacctcttatttttataaaaattaaaaataacatctaaaaattaataacatctgttatttggtacatgccagagacttttcactgagtatttctagacctcagtgaaaacttttattcccttatgcaataattttacatcactcttaaaatatatgacgatatcctgtccagtattaaatgactcaagtgctcaaatgcaaacgcttttccttgtacttcaattgcaatttaaataaaaattagcagtaatatcaaaatacaggcatgcaagtattcataagaaacaaggaaagtgtgtattatagtactaacagagatgcatayatactgatcatacattctgacatggatactgtaccccctacttgatgaatatctttaacctacactgagccacccatct

SEQ ID NO: 392695 - DNA, 592 bp, Homo sapiens
gtgactttttagctataagtagtacttatgcgtactgcattttgtttctaaaacatttaaaatatagttttacatttaatcatgtatcaatccttggtgagaattgttatatttaataaaaactttatggccagaattggaagctcatttttttagtatggattatatacccttctaaaatgctatgttacctcttatttttataaaaattaaaaataacatctaaaaattaataacatctgttatttggtacatgccagagacttttcactgagtatttctagacctcagtgaaaacttttattcccttatgcaataattttacatcactcttaaaatatatgacgatatcctgtccagtattaaatgactcaagtgctcaaatgcaaacgcttttccttgtacttcaattgcaatttaaataaaaattagcagtaatatcaaaatacaggcatgcaagtattcataagaaacaaggaaagtgtgtattatagtactaacagagatgcatatatactgatcatacattctgacatggatactgtaccccctacttsatgaatatctttaacctacactgagccacccatct

SEQ ID NO: 392696 - DNA, 612 bp, Homo sapiens
ttccaattactattgttaaattgtttctttcttcatttttctcaatgactctgcatgcacttgagtgctctgttgttaggtgcatacatctttatagttgttatacttttctgatacttcaatgcttttgttattataaaaatgttacattttatctcgataacaatttttacactaaaatgtacttcatcttatgttaacatagccactctggtctcatttgattactgtttgcataacatatttttactgcctcctttacttttaagctctttgtgtctaaaatgtttctgttatagwtagcatatagattatggagactattaatattgcaaatgtctgtctttttattcactaatttaatccatttacatttaatcaaatactgatacttgagtttacatctgttactttgctatttgttttctatatttattatattgtttttgttcatctctttctctgttttgtctgcttttatgttaaattgggagtttttttgtacccttttaactacctgcttattttgctttatttggggtaatttttttttctgttgttggccttggattccaatttccattctaaagttaagcaagctagtttatattt

SEQ ID NO: 392697 - DNA, 607 bp, Homo sapiens
ctgcgacaagtgtggcaatgaattttgagctagaagaccttcacagtcagtctattgtagcattcagattttctttagcacttagattcttggtgggcaaaaatgagcgaagaatgctatcagcattcataacccatgataacaaatgaagcaatggctgaccctgtctattttgaagaactgtgcacaatgtaattctcatgacagcaaacgaaactcaggaaaaaaatcaacttaaaattcacaggggagcaaaggaggcttataacaaagaagctaggctttatcaaatggagttttgaagagaaacagggaacaagactttgcccattacagtaaattttatacaatcatataaccagaaattatttgagataaaataagggcttgggacatgggaaatattttggcttataagtcttgttgggaaagaaatccatagtcttasgaaggcagagttttgtgataaaacatgtactgtacatgaccattacattttataaatatttgtgttttactaaattatgggccctgttctcattcaagcaaggcatttattttccaccaatttaaaagtttgtttaaaaaattacacctaaatgtactt

SEQ ID NO: 392698 - DNA, 607 bp, Homo sapiens
ctgcgacaagtgtggcaatgaattttgagctagaagaccttcacagtcagtctattgtagcattcagattttctttagcacttagattcttggtgggcaaaaatgagcgaagaatgctatcagcattcataacccatgataacaaatgaagcaatggctgaccctgtctattttgaagaactgtgcacaatgtaattctcatgacagcaaacgaaactcaggaaaaaaatcaacttaaaattcacaggggagcaaaggaggcttataacaaagaagctaggctttatcaaatggagttttgaagagaaacagggaacaagactttgcccattacagtaaattttatacaatcatataaccagaaattatttgagataaaataagggcttgggacatgggaaatattttggcttataagtcttgttgggaaagaaatccatagtcttaggaaggcagagttttgtgataaaacatgtactktacatgaccattacattttataaatatttgtgttttactaaattatgggccctgttctcattcaagcaaggcatttattttccaccaatttaaaagtttgtttaaaaaattacacctaaatgtactt

SEQ ID NO: 392699 - DNA, 467 bp, Homo sapiens
gattctattttgttaaactgtaagctaaagtattatttgtttcaatagtaaacaaaaggattattttatgttatagaaattttatctttttttagatgtcaaacatcacattgataaaattatactgaaatttggataacatattttgtttgctgtattatataaccacaaagatttaaaaacttgatcaaatctaagtttaagataatgtaatacggattaagtatgcactttagagatagtataggttttgaatattgctctcaccctttactagctgtgattttgagcaacyactcacacataatctgtacattgtcactgagcttgtacacataaagcatttagtacagtgtctattttaaaattttatcagtaaatattaactattaatattttatcatcatcatcgtcatatttcttatcaagacaaaattataatatttatgagaagaaagcatctatca

SEQ ID NO: 392700 - DNA, 545 bp, Homo sapiens
acctttccatcttcaaatttctcacaacagtgcaaatgataccctttatctctgatccttttaaactttacatacatcttccacgaatgwtctcatccccagattactccaaatgtcctgtctgcttggatgttctctgctgttggagcattttagatagatatgctgattgcagctatcacatccaacttcagcttaaatatgcacatcaatcttcttatgtcaactgtttgcaaatcttaagaatttctccaaaccctcacgtcccctcttgccacttgttacacatagcagataactcctacttaaaagtgagaacaggacaataagcaggaatcttcttcaatatctctctctaattacatacttaatctatatcatattttattcttcctctattttcttccctattgccatagattactctgtttctcaaatccatcttgcaacttccaattgcttcactacactttcttgcttctgcctagtacctctcggatattcacctcctcctatattcagccaccctcataaactttcaacta

SEQ ID NO: 392701 - DNA, 545 bp, Homo sapiens
acctttccatcttcaaatttctcacaacagtgcaaatgataccctttatctctgatccttttaaactttacatacatcttccacgaatgttctcatccccagattactccaaatgtcctgtctgcttggatgttctctgctgttggagcattttagatagatatgctgattgcagctatcacatccaacttcagcttaaatatgcacatcaatcttcttatgtcaactgtttgcaaatcttaagaatttctccaaaccctcacgtcccctcttgccacttgttacacatagcagataactcctacttaaaagtgagaacaggacaataagcaggaatcttcttcaatatctctctctaattacatacttaatctatatcatattttattcttcctctattttcttccctattgccatagattactctgtttctcaaatccatcttgcaacttccaattgcttcactacactttcttgcttctgcctagtacctctckgatattcacctcctcctatattcagccaccctcataaactttcaacta

SEQ ID NO: 392702 - DNA, 653 bp, Homo sapiens
tgggaaatatattctatgtaaccaacacaatagttgataaaaccataactttaaacatttaaaaatcggtataatttgcaggacttggtcctctttattgcaaagagctgcatactatctgattatttcattgttccccatctgtttttatcacttgtcaccttcctggccctcatggacactgggaactctcaaactaggatgagaatcctggtctcctacatatcacataatcacccttgtcattataccataccactgcatgtgatgtggcctggccacactctttcaaaaagtaggaagcctgaatgaggaaactacccrcatctcatgaagggcttatgccactccattgctattagaggtattccttttttccttccagttcttcatatattccctccttttgctttatgccttaagacggtatttaattggttctttttaacctggcattaaacaatattttggatcatttatattgaaaaagatcaaacttgaagaattacagatttgccaggttagattaggactggggaatgatcccgagaacaacataccacaagttgcctttttacaggagttgctgtatctgacataattaggaagctgattaatcaggaacttgctgctttaactgctatgttgcagcc

SEQ ID NO: 392703 - DNA, 508 bp, Homo sapiens
tttgtgatcatcagagaaaacggtatgatacattcttgcttctaatctattcacttcctattccttggatattcccttagtttagaaattttggtcttattttttatctttcctatcagaatatctaagtaaattagcctttagatcccctcaaatgtttcctgtctgttccagttccttcacaaagtaatgaattttgcttacaaggtcagaaaatttgagcttattttttattctgaccttaactctcycttcccattcacattgttctatctactcaccattagttcaggaacattgaattctattattttcatcttgcagctgttatttttcttttaattttttattagtctctcttttccttctattccagttctctattttatgatgcgcctacatttacccctttgtataagggaccacagggccatagggctcttgttttatattatttttgaagaaaataatttgtagtgccttttgaaaagacacaatgagcaaagag

SEQ ID NO: 392704 - DNA, 531 bp, Homo sapiens
ttcaccatataaaattcttcccccaccctccctaagcctctctgtgggacctctgagctgcttgcagtctggggctgcctagtttatacatttctgaatgctcaaatatattttctaatgtttcaaagtggctctggtgtaggaggttgttggtggagtgacccgagagtatacaggaattgagggcatatgagatctctggactctgyactccattttgctgtacactcaaaactactctaaaataataatatatctttaaaaatctataactagcacgtagcccttttcaagcctccaactggttggagccagttcgattaaagctcagaagaaaaactggttaataagctagttctgacccaactggcaagaagcggcaggaaagacccaggccaggggagcatattgcacatgcatgcaccaggaaactggaggaagcttggaggccctttagcctggtcctgagcccgctgaaactgcagttacagcacagatgcctggggcaccaatctgaatctgccaacatcc

SEQ ID NO: 392705 - DNA, 531 bp, Homo sapiens
ttcaccatataaaattcttcccccaccctccctaagcctctctgtgggacctctgagctgcttgcagtctggggctgcctagtttatacatttctgaatgctcaaatatattttctaatgtttcaaagtggctctggtgtaggaggttgttggtggagtgacccgagagtatacaggaattgagggcatatgagatctctggactctgcactccattttgctgtacactcaaaactactctaaaataataatatatctttaaaaatctataactagcacgtagcccttttcaagcctccaactggttggagccagttcgattaaagctcagaagaaaaactggttaataagctagttctgacccaactggcaagaagcrgcaggaaagacccaggccaggggagcatattgcacatgcatgcaccaggaaactggaggaagcttggaggccctttagcctggtcctgagcccgctgaaactgcagttacagcacagatgcctggggcaccaatctgaatctgccaacatcc

SEQ ID NO: 392706 - DNA, 531 bp, Homo sapiens
ttcaccatataaaattcttcccccaccctccctaagcctctctgtgggacctctgagctgcttgcagtctggggctgcctagtttatacatttctgaatgctcaaatatattttctaatgtttcaaagtggctctggtgtaggaggttgttggtggagtgacccgagagtatacaggaattgagggcatatgagatctctggactctgcactccattttgctgtacactcaaaactactctaaaataataatatatctttaaaaatctataactagcacgtagcccttttcaagcctccaactggttggagccagttcgattaaagctcagaagaaaaactggttaataagctagttctgacccaactggcaagaagcggcaggaaagacccaggccaggggagcatattgcacatgcatgcaccaggaaactggargaagcttggaggccctttagcctggtcctgagcccgctgaaactgcagttacagcacagatgcctggggcaccaatctgaatctgccaacatcc

SEQ ID NO: 392707 - DNA, 467 bp, Homo sapiens
tctcttggtgtgtcacccaggctggagagcagtgttaggatcatagctcactgcagcctcaaactcctgggttcaagtgatcctcctacctcaggctcctgagtagcctgaactataggaatgagccaccatgcccagccaatrttttcatttttttgtagagatgaaatcttgctatgttgcccaggcgggtcttgaactcttggcctcaaggaatcctcctgccttgccctcccaacatgctgagattacaggtgtgaaccattgtgcccagccaccggattctttattaagaagaaaacttgtttgctgacatgtaggcaatgaattgatgaatagtagttcataaattactaatttacaagtcaatataaatgagttgagtaaacacaaaataacagcataaattaataaacagtttacgacctcaagtttctttttttcctttaaaacattgctctgacaga

SEQ ID NO: 392708 - DNA, 467 bp, Homo sapiens
tctcttggtgtgtcacccaggctggagagcagtgttaggatcatagctcactgcagcctcaaactcctgggttcaagtgatcctcctacctcaggctcctgagtagcctgaactataggaatgagccaccatgcccagccaatattttcatttttttgtagagatgaaatcttgctatgttscccaggcgggtcttgaactcttggcctcaaggaatcctcctgccttgccctcccaacatgctgagattacaggtgtgaaccattgtgcccagccaccggattctttattaagaagaaaacttgtttgctgacatgtaggcaatgaattgatgaatagtagttcataaattactaatttacaagtcaatataaatgagttgagtaaacacaaaataacagcataaattaataaacagtttacgacctcaagtttctttttttcctttaaaacattgctctgacaga

SEQ ID NO: 392709 - DNA, 467 bp, Homo sapiens
tctcttggtgtgtcacccaggctggagagcagtgttaggatcatagctcactgcagcctcaaactcctgggttcaagtgatcctcctacctcaggctcctgagtagcctgaactataggaatgagccaccatgcccagccaatattttcatttttttgtagagatgaaatcttgctatgttgcccaggygggtcttgaactcttggcctcaaggaatcctcctgccttgccctcccaacatgctgagattacaggtgtgaaccattgtgcccagccaccggattctttattaagaagaaaacttgtttgctgacatgtaggcaatgaattgatgaatagtagttcataaattactaatttacaagtcaatataaatgagttgagtaaacacaaaataacagcataaattaataaacagtttacgacctcaagtttctttttttcctttaaaacattgctctgacaga

SEQ ID NO: 392710 - DNA, 467 bp, Homo sapiens
tctcttggtgtgtcacccaggctggagagcagtgttaggatcatagctcactgcagcctcaaactcctgggttcaagtgatcctcctacctcaggctcctgagtagcctgaactataggaatgagccaccatgcccagccaatattttcatttttttgtagagatgaaatcttgctatgttgcccaggcgggtcttgaactcttggcctcaaggaatcctcctgccttgccctcccaacatgctgagattacaggtgtgaaccattgtgcccagccaccggattctttattaagaagaaaacttgtttgctgacatgtaggcaatgaattgatgaatagtagttcataaattactaatttacaagtcaatataaatgagttgagtaaacacaaaataacagcataaattaatraacagtttacgacctcaagtttctttttttcctttaaaacattgctctgacaga

SEQ ID NO: 392711 - DNA, 573 bp, Homo sapiens
tatttttagtagagacagggtttctccaygttggtcaggctggtctcaaactcccaacctcaggtgatccacccaactcagcctccccaagtgctgggattacagaggtgagccactgcacatggccttatgtgagcttttatggtaacaaatattatttatttccatattaagaactcctttgagcatttcttgtaggactggtctagtggtcatgaatttccttagtacttgcatgtccagaaaagattttacttctcctttgtgtatgaagcttagtttggcaggataaaatattctcgactaattttttttttctttaagaatcctaaaaataggccccccaatcttttctggcctgtaaggtttcttccgagaactctgttgttaggctgatgggattttctgcatacgtgattttgcccttttctctagctgcctttaagacattttcttttgcattgatgttggatagtctgataactatatgccttgaagaggcccatcttgtgcagtatctcacaggagttctctgaatttcttgtgtttggatgccaactctctaacaagatt

SEQ ID NO: 392712 - DNA, 422 bp, Homo sapiens
gagtccagctccctttctgtaaagtgaggcatcagtacttacctagcacaactgttgaggaagccatgacataagcattgcttctaaagcacctggcccaggtctggcacacacaaggggcttgaagtgctaacaggagtaatagcagagcgtgactccacaagcaagggatatcgtgtgtgtggacaccgatgagcaatatctgggaccacactggctctctctggatggaatttccataggaattatttctaacaatttctgctgtgaaacatggtgctaagaaatgactcaggaagatctgtcaccagacatttgaaattaaagcaaagagttcagaaagatgccttacctcttactcaaaggaaagatacttacagatataccatccatkggaatctctgtattttcacaatctaacc

SEQ ID NO: 392713 - DNA, 543 bp, Homo sapiens
gcatgcaggcctggctttgctctgttctggggcgtgggcatgctttcctcagtygagctgcttgcacccacacctcgtcccttctgccacctgggaattctaagagcctggagtaagcatgccaggccctttgtttctcctcccacctgcactccacccctaggacaaagcctgacatttgggggtacacagtaaacacaggattaaatatgtgcacagccatggttgcctcaagcctctagtgactcatatcattagtttggagatgtaacgaaggaagatcagctcaaatattctcttggagaacccagtatgcatttttacagtttccctctcttagtcctcacagtgatacattctttgtattcaaacatttggggaaactggcactcagagaggttttaagttgcccaaggtcccagagcctgtaatcaacaaggtggggattaaaatccaggtctgacaaagcccttgatctctctgctgctctgtagatcagctgatgtagcctggtggctcctcgtagcaacatgtgaccttaga

SEQ ID NO: 392714 - DNA, 571 bp, Homo sapiens
atggttgcctcaagcctctagtgactcatatcattagtttggagatgtaacgaaggaagatcagctcaaatattctcttggagaacccagtatgcatttttacagtttccctctcttagtcctcacagtgatacattctttgtattcaaacatttggggaaactggcactcagagaggttttaagttgcccaaggtcccagagcctgtaatcaacaaggtggggattaaaatccaggtctgacaaagcccttgatctctctgctgctctgtagatcagctgatgtagcctggtggctcctcgtagcaacatgtgaccttagaaggaggcacatgtgagacgaagtctttaattcaggcatgcattcattcattgagtgccaagtgacaggtattttatggtgatgccatactcagagcttgcagtctagctagcaataccaayttcattttactgagagcttatgatgtgcccagcactgcactgaatgctgaattgagtcacacacaaccccctaagcaacgggatgaagcaggagcacgtttctctccgtgtaaccggtaaagatactg

SEQ ID NO: 392715 - DNA, 653 bp, Homo sapiens
tgcaccaggcaatgtctgggtgttttggagtcgggacttaatagagtacatcagaagtttctcccagttacaggaccaggcactgccccttcctttccatactgctgtggtccatcggccacagaaccstttctgtgctcagaggcctcacctccctctcctcaccatacttagacagatgcaccggcttggttgcagagcagtctgcctctgtgtggttctaataagtcctgaaagaatccagcaaggctctggaagcctcaggacagtggctttgctggaagtctcccttcttaggattgcttcttgtttagagcttttattttgttgcagtattgacgagaatttaattgaaatttaatttttaattttcctttaatgtttaggttgccaaactgttctacctttctggaatggtgcatggagaatatcaaaaccaagaaatccacaatctgggccattttattacagttatgaagtttaggcctctcatggcaaacttttcacccttatatcctggcagacaggtaaaaagtgattgtaaactttttcttcctgggccatgtatttcaaagctaaaaaggctagaaaaagaacagtgataggatttattttgtgcctatttgaatagtgggggtagaagtgcagttgat

SEQ ID NO: 392716 - DNA, 562 bp, Homo sapiens
ccattttattacagttatgaagtttaggcctctcatggcaaacttttcacccttatatcctggcagacaggtaaaaagtgattgtaaactttttcttcctgggccatgtatttcaaagctaaaaaggctagaaaaagaacagtgataggatttattttgtgcctatttgaatagtgggggtagaagtgcagttgatggaaaatgtctacttatatcattgctcaaagatgctgtgcctttgggagtaaattaattatgagatgtttaggaaaatgggaggacttgraagcatttaaggctacaggatgtggccccatcctacgttcagcctcggttttcagtgatgctgccttcgtgcccgggtgctggagtccttcgtgcgtgccttcagtttccttcctttgtgctcttctttgtgctgtgattttctcagcctggaataccccttttccacctgccagaatccaagccacagtacaaatcccagagcacaggctcaccctcttccagaaacggattttctgcatatgttcttcactcttccctgaccccaggtagacgt

SEQ ID NO: 392717 - DNA, 562 bp, Homo sapiens
ccattttattacagttatgaagtttaggcctctcatggcaaacttttcacccttatatcctggcagacaggtaaaaagtgattgtaaactttttcttcctgggccatgtatttcaaagctaaaaaggctagaaaaagaacagtgataggatttattttgtgcctatttgaatagtgggggtagaagtgcagttgatggaaaatgtctacttatatcattgctcaaagatgctgtgcctttgggagtaaattaattatgagatgtttaggaaaatgggaggacttggaagcatttaaggctacaggatgtggccccatcctacgttcagcctcggttttcagtgatgctgccttcgtgcccrggtgctggagtccttcgtgcgtgccttcagtttccttcctttgtgctcttctttgtgctgtgattttctcagcctggaataccccttttccacctgccagaatccaagccacagtacaaatcccagagcacaggctcaccctcttccagaaacggattttctgcatatgttcttcactcttccctgaccccaggtagacgt

SEQ ID NO: 392718 - DNA, 559 bp, Homo sapiens
agccaccccagcttcaaggaaaggggacacagacccaatctgtcaatgagaagagtgtcaacgaatctggggrctgtttttaaatccaccacaagtggtgctcagaatatttaacaactggtgcagcacaacccactcacctgaatggctgctgtctgcaggggtggagcagagctcgagtagcggcccctgcagggccaggcctcaacccttagtgctggatggcagggtgtctgtggggccccaggggaggctcctgggtgttgggggtgcagcagctattcaccaacatgtcttagtcttttcagactgacatacaaaataccataaataggtggcttaaataacagacacttattttgcacagttctggaggctgggaagtctaagatcaattcagttcctggggagggcctcttcctggcttgcggacggctgcctttttgacacgtcctcccatgacctttcctctgtgcttacacgtgttcacggggggaagagctctctctctctctcctgctcttttcataagatcactataccatcatgagggccccgc

SEQ ID NO: 392719 - DNA, 559 bp, Homo sapiens
agccaccccagcttcaaggaaaggggacacagacccaatctgtcaatgagaagagtgtcaacgaatctggggactgtttttaaatccaccacaagtggtgctcagaatatttaacaactggtgcagcacaacccactcacctgaatggctgctgtctgcaggggtggagcagagctcgagtagcggcccctgcagggccaggcctcaacccttagtgctggatggcagggtgtctgtggggccccaggggaggctcctgggtgttggggrtgcagcagctattcaccaacatgtcttagtcttttcagactgacatacaaaataccataaataggtggcttaaataacagacacttattttgcacagttctggaggctgggaagtctaagatcaattcagttcctggggagggcctcttcctggcttgcggacggctgcctttttgacacgtcctcccatgacctttcctctgtgcttacacgtgttcacggggggaagagctctctctctctctcctgctcttttcataagatcactataccatcatgagggccccgc

SEQ ID NO: 392720 - DNA, 559 bp, Homo sapiens
agccaccccagcttcaaggaaaggggacacagacccaatctgtcaatgagaagagtgtcaacgaatctggggactgtttttaaatccaccacaagtggtgctcagaatatttaacaactggtgcagcacaacccactcacctgaatggctgctgtctgcaggggtggagcagagctcgagtagcggcccctgcagggccaggcctcaacccttagtgctggatggcagggtgtctgtggggccccaggggaggctcctgggtgttgggggtgcagcagctattcaccaacatgtcttagtcttttcagactgacatacaaaataccataaataggtggcttaaataacagacacttattttgcacagttctggaggctgggaagtctaagatcaattcagttcctggggagggcctcttcctggcttgcggacggctgcctttttgacacgtcctcccatgacctttcctctgtgcttacacstgttcacggggggaagagctctctctctctctcctgctcttttcataagatcactataccatcatgagggccccgc

SEQ ID NO: 392721 - DNA, 581 bp, Homo sapiens
gggctcaagtattcccagggctcacaggcaggagccagccaaggctgccgagatccaatggaaccagtgagcgctggcctcattcctgtttcagaatgccactttgtgctctgtgtcccccaccgaggaactcccacgcccacccaatmtgatgggttgtgctttctacctgccagaggaaaagcttcctgcagtgcagggaaggctgcagcctcactttacttatttctctgcaatctcttctgtattgcagagccataaaggtcaaggcaggaatccaggctgctgggcctgaaaacaaaggagacctgtgttagggagttgaggcgcatctgtctggtgggcaggtgtctgtccactccagcctcctagcagtctcttaacaagctcccccgaccccagcagagctttggctggggtacacccccagcaaccacagtggatcatctgggtggtgactttcattagggtgaccacccagacctgtctctctgggaccaacaggctttcagggatgaggtacattttttgctaatagttgactattaccatagtcagctgactaggaggatagctgactg

SEQ ID NO: 392722 - DNA, 581 bp, Homo sapiens
gggctcaagtattcccagggctcacaggcaggagccagccaaggctgccgagatccaatggaaccagtgagcgctggcctcattcctgtttcagaatgccactttgtgctctgtgtcccccaccgaggaactcccacgcccacccaatctgatgggttgtgctttctacctgccagaggaaaagcttcctgcagtgcagggaaggctgcagcctcactttacttatttctctgcaatctcttctgtattgcagagccataaaggtcaaggcaggaatccaggctgctgggcctgaaaacaaaggagacctgtgttagggagttgaggcgcatctgtctggtgggcaggtgtctgtccactccagcctcctagcagtctcttaacaagctcccccgaccccagcagagctttggmtggggtacacccccagcaaccacagtggatcatctgggtggtgactttcattagggtgaccacccagacctgtctctctgggaccaacaggctttcagggatgaggtacattttttgctaatagttgactattaccatagtcagctgactaggaggatagctgactg

SEQ ID NO: 392723 - DNA, 439 bp, Homo sapiens
tatttccttttgtgtatattgtattatatcatattatagatatttccttttttattacgtgtgattacatgtaacatcctaaagttataactatctaatttgagttgctatcaactttaacttaactttaattgtaaacagcagagttgagtatagctttgtgcccctgtacagctttgtgcccctctttatcaaggttttrtgtgcccaataacagatttataatgatttttgtgcatttgccttttaaattctatagaaaaataatagagatacaagccgagattacaatattactgacttttatattttctcatgtatttatttttaccagaaacctatgttcatatggcttccagctattgtctagtgcccttgaattttcacctgaaagattccctttagcatttcttataagacaagtggtaatgaagtccct

SEQ ID NO: 392724 - DNA, 522 bp, Homo sapiens
tttgaaaattgtttggttgtttcttgtaaatttaaacaaataccctattatattatccagcgagtccatccttaggtttttatccaaggataaagaggtgaaaactcatatctaacaaatagacttctgaaaagatgaaaatagaagctttattcataaaagacaaaaactrgaaataacccaaatattcattcacaggagaatgaataaacagactaggttgaatccatacaatggaatggtagcagacaataaaaagaaaatgaactattgatgccccctactgcacagcagaagctctgaatcgtgttcctgaatgaaagaagtcaggtatgaaagaataaacattgtatgattccatttatatgaaaatgaatctgtgatttaaaaatcagactagtattaggttggtgcaaaagtaattgcggtttttgccttttttttttttttttttaaatagttgctttggggtttatggatggagtggcatggtagaggttagctgaagggggcatgaaataa

SEQ ID NO: 392725 - DNA, 522 bp, Homo sapiens
tttgaaaattgtttggttgtttcttgtaaatttaaacaaataccctattatattatccagcgagtccatccttaggtttttatccaaggataaagaggtgaaaactcatatctaacaaatagacttctgaaaagatgaaaatagaagctttattcataaaagacaaaaactagaaataacccaaatattcattcacaggagaatgaataaacagactaggttgaatccatacaatggaatggtagcagacaataaaaagaaaatgaactattgatgccccctactgcacagcagaagctctgaatcgtgttcctgaatgaaagaagtcaggtatgaaagaataaacattgtatgattccatttatatgaaaatgaatctgtgatttaaaaatcagactagtattaggttggtgcraaagtaattgcggtttttgccttttttttttttttttttaaatagttgctttggggtttatggatggagtggcatggtagaggttagctgaagggggcatgaaataa

SEQ ID NO: 392726 - DNA, 522 bp, Homo sapiens
tttgaaaattgtttggttgtttcttgtaaatttaaacaaataccctattatattatccagcgagtccatccttaggtttttatccaaggataaagaggtgaaaactcatatctaacaaatagacttctgaaaagatgaaaatagaagctttattcataaaagacaaaaactagaaataacccaaatattcattcacaggagaatgaataaacagactaggttgaatccatacaatggaatggtagcagacaataaaaagaaaatgaactattgatgccccctactgcacagcagaagctctgaatcgtgttcctgaatgaaagaagtcaggtatgaaagaataaacattgtatgattccatttatatgaaaatgaatctgtgatttaaaaatcagactagtattaggttggtgcaaaagtaattgcgktttttgccttttttttttttttttttaaatagttgctttggggtttatggatggagtggcatggtagaggttagctgaagggggcatgaaataa

SEQ ID NO: 392727 - DNA, 427 bp, Homo sapiens
ccgcaaactgctctgcagagccagggtctccaggaatggggagggcagtcaccctcattccacttgtgttcatgacycaaaggactgcccaggtctccaggcccatagaacccccaaacctcttactaggccacactggggaccttgagcagcaggcttggaatcctaggccttgtctccaggtacatatcagtacccaggcttgggaagctttggtctcaggggggctggcactcaggccctctgcctcaaggaagaagcatgtccagatctctactgtccagccctgctccctgcccctatccttcacggggtccctaggacagggttacagaagcctcatgctgtcaggggatgctgccaccctagttccagggtggctccgcccagccccttcctgctgccgccctcactgactcacctgtcc

SEQ ID NO: 392728 - DNA, 491 bp, Homo sapiens
ctatgagtagtactatgtacaaagcatgtgtatatctcattccttttcaacaaaatagattccaggtagatgaaggacttacatttacataaatgaatttattaacttactaggagataamcatcttagctcaggctgctcttataaaataccataggccaggtgcagtggctcacgcctgtaatcctagcccttcgggaagccaaggcgggtgggccacctgaggtcaggagttcgagaccagcctgaccaatatggtaaaaccccattgctactaaaaatacaaagaccagctgggcatggtggcacatgcctgtaatcccagctactcaggagtctgaggcaggagactcccttgaacctgggaggcggaggttgcagtgagctgagattgcaccactgcactccagcctgggtgacagagcaagactctgtctcaaaaacaaaaacaaaccataaactgggtgacttagaaacaacagaaatttatt

SEQ ID NO: 392729 - DNA, 491 bp, Homo sapiens
ctatgagtagtactatgtacaaagcatgtgtatatctcattccttttcaacaaaatagattccaggtagatgaaggacttacatttacataaatgaatttattaacttactaggagataaacatcttagctcaggctgctmttataaaataccataggccaggtgcagtggctcacgcctgtaatcctagcccttcgggaagccaaggcgggtgggccacctgaggtcaggagttcgagaccagcctgaccaatatggtaaaaccccattgctactaaaaatacaaagaccagctgggcatggtggcacatgcctgtaatcccagctactcaggagtctgaggcaggagactcccttgaacctgggaggcggaggttgcagtgagctgagattgcaccactgcactccagcctgggtgacagagcaagactctgtctcaaaaacaaaaacaaaccataaactgggtgacttagaaacaacagaaatttatt

SEQ ID NO: 392730 - DNA, 606 bp, Homo sapiens
ttttggtcccttttaatttcaccagttttatctctaaacctctaaaacagggagggagggagggaggaacccagtggcttttagggcctcgtttcacaggcccatccaatctattcagctacttcttccaacagatgcctctgctccaaggctcatccaggtcccacaggcacgctgtgctcccgtctttattctytgctccttgtacctggatgtttcccttctcccctcccctactcacattctaaccatccttccaagctattccctcctcctcaaagcttcccagaccactactatcatccctttctaaatccctgtggttgaaataagcatgctgaccgtagctaataacactgtattgaatgctggaaattggcaaagagtgtagatttcaggtgttctcaccacacacacacacacacacacacacacacaaaggtaactgtcaggagatggatatgttaatttgcttgactgtagtattcatttcactatggatatgtactgcaaaatgccatgctgcacacttcaaatatatactgtaaaagaaataagaccttcgagtcggcacaaaatccaacacaatggacttatccccaccac

SEQ ID NO: 392731 - DNA, 606 bp, Homo sapiens
ttttggtcccttttaatttcaccagttttatctctaaacctctaaaacagggagggagggagggaggaacccagtggcttttagggcctcgtttcacaggcccatccaatctattcagctacttcttccaacagatgcctctgctccaaggctcatccaggtcccacaggcacgctgtgctcccgtctttattctctgctccttgtacctggatgtttcccttctcccctcccctactcacattctaaccatccttccaagctattccctcctcctcaaagcttcccagaccactactatcatccctttctaaatcccygtggttgaaataagcatgctgaccgtagctaataacactgtattgaatgctggaaattggcaaagagtgtagatttcaggtgttctcaccacacacacacacacacacacacacacacaaaggtaactgtcaggagatggatatgttaatttgcttgactgtagtattcatttcactatggatatgtactgcaaaatgccatgctgcacacttcaaatatatactgtaaaagaaataagaccttcgagtcggcacaaaatccaacacaatggacttatccccaccac

SEQ ID NO: 392732 - DNA, 606 bp, Homo sapiens
ttttggtcccttttaatttcaccagttttatctctaaacctctaaaacagggagggagggagggaggaacccagtggcttttagggcctcgtttcacaggcccatccaatctattcagctacttcttccaacagatgcctctgctccaaggctcatccaggtcccacaggcacgctgtgctcccgtctttattctctgctccttgtacctggatgtttcccttctcccctcccctactcacattctaaccatccttccaagctattccctcctcctcaaagcttcccagaccactactatcatccctttctaaatccctgtggttgaaataagcatgctgaccrtagctaataacactgtattgaatgctggaaattggcaaagagtgtagatttcaggtgttctcaccacacacacacacacacacacacacacacaaaggtaactgtcaggagatggatatgttaatttgcttgactgtagtattcatttcactatggatatgtactgcaaaatgccatgctgcacacttcaaatatatactgtaaaagaaataagaccttcgagtcggcacaaaatccaacacaatggacttatccccaccac

SEQ ID NO: 392733 - DNA, 551 bp, Homo sapiens
ttacctttaagtctgtgatcaatttcattttaatttttgtgtataatgcaagataaggatagaggttcatttttcctatgtggtatccaggatgttccagccccatttcttgaaagaactatcctttctccattggatcacatgcactataggacccattttttaaaaactatacacaagcatggaggagaatacggaaaagtacacatcaaattgttaacamtgattaccttcaaggaagtggaattggaggggaattgagaggaaactaacacccttttttcttacacatttctttggggactgctcaccttttaatttccaaagaaaggaaacgtaacgtattaccatctgatataaaaataatgtagaattagaaggggtctttgctgaagacagtgagatcatttcagcaccaagcatgaggtgatggagcctagaccaaaggatgccatccaatgagtgggggtgacagagacaacaaatgtttggaaggtagcacagtggactgggtggcttgtaggaggaaggggaagaggaaagcaaacagg

SEQ ID NO: 392734 - DNA, 555 bp, Homo sapiens
agactagaaatagaccaaccgcatatgggaattcaatgtatgatcaagtggaatttaaatcactgggggaatgagatatttcaatgagtatctcagaacaactgggcagccaaatggaaaaataatatctgatgccactttatcacttatctaacagaatttccagatgtttcaaagatttaaatataaaaataatcaaactataaattcctaggagatcacatcagagaatttttctttttttctagaaatgaataccttccgcacggtggctcacgtctgtaatcccagcactttgggaggccaaggcagatggatcacctgaggtcgggagttcaagaccagcctggccaacatggcaaaactccgtgtctactaaaaatacaaaaatggtggcgggcgcctgtagtcccagctacttgggaggctgaggcaggagaatggctggaacctgggaggtggagttgcagtgagccgagatcgtgccgttgcactccaacctgggagacasagtgaaactccatctcaaagaaagaaagaaagaaagaaagaata

SEQ ID NO: 392735 - DNA, 577 bp, Homo sapiens
atatgctcctatggcttcctactgcacttaaatcaaaggcaagytccttaccccagagcctacctagaggtgcaccttatctgaccctttctcctctccagacaccccctggctgtggtcaccttgctggctgccccttgtcttccagctgtcagctcacacaccccattctgaaagagggctccccatcactcactctcacaccaccctgcttatttccttcatggtacttactacaaattggaattcctgtgtgtccatttacatacatggtaattgtgacttctgccctatgatgcaagctccatgagggtagaaactctgtcttgctcagggtctggctcagaattagaactaaatgaatattatttataaccaatcaattagtaattaattagtagaaaaaatagaccaagagagaccgaataaaataaacaaaaacaaaagaccctagaggaaatggataatgcagacaatagaaaagagcttcaaaactttctaaactatctctcagagactttatagtttattcattaaaaaagaaaagaaatacaagctgctcaccaaaaagagtagg

SEQ ID NO: 392736 - DNA, 577 bp, Homo sapiens
atatgctcctatggcttcctactgcacttaaatcaaaggcaagttccttaccccagagcctacctagaggtgcaccttatctgaccctttctcctctccagacaccccctggctgtggtcaccttgctggctgccccttgtcttccagctgtcagctcacacaccccattctgaaagagggctccccatcactcactctcacaccaccctgcttatttccttcatggtacttactacaaattggaattcctgtgtgtccatttacatacatggtaattgtgacttctgccctatgatgcaagctccatgagggtagaaactctgtcttgctcagggtctggctcagaattagaactaaatgaatattatttataaccaatcaattagtaattaattagtagaaaaaatagaccaagagagaccgaataaaataaacaaaaacaaaagaccctagaggaaatggataatgcagacaatagaaaagagcttcaaaactttctaaactatctctcagagrctttatagtttattcattaaaaaagaaaagaaatacaagctgctcaccaaaaagagtagg

SEQ ID NO: 392737 - DNA, 527 bp, Homo sapiens
gtactaggtattatatgtaatctagagatgatttaaaggatatgggaggatgtgggtaaatactatgccattttatatctgggacttgagcatcagaggattttggtatgcaagtaaggtcccagatccattccccacggactacataactatagtcttttgagcgtgatctcttttattsagcataatgtttttgagattcatccatgttggtgcatataccagccatatattcttttttactgctatatattgttccactctatgactgtatcatagtttatccattcatctattgaaggaaacttgggtgggttctttccagtttggggcgattaatgataaagctgctatgaacatttgtgtctatgactttatgtgaacatacattttcatttcctttaaataaatggataggaatggaattgttaggtcatatagtaaatataagattaactttataagaaactgccaagcttctttccaaaatggttgtaccattttacatgcatatcaaaatatatgag

SEQ ID NO: 392738 - DNA, 527 bp, Homo sapiens
gtactaggtattatatgtaatctagagatgatttaaaggatatgggaggatgtgggtaaatactatgccattttatatctgggacttgagcatcagaggattttggtatgcaagtaaggtcccagatccattccccacggactacataactatagtcttttgagcgtgatctcttttattcagcataatgtttttgagattcatccatgttggtgcatataccagccatatattcttttttactgctatatattgttccactctatgactgtatcatagtttatccattcatctattgaaggaaacttgggtgggttctttccagtttggggcgattaatgataaagctgctatgaacatttgtgtctatgactttatgtgaacatacattttcatttcctttaaataaatggataggaatggaattgttaggtcatatagwaaatataagattaactttataagaaactgccaagcttctttccaaaatggttgtaccattttacatgcatatcaaaatatatgag

SEQ ID NO: 392739 - DNA, 566 bp, Homo sapiens
ttgtactattaaaacatgtatgtaaattctacacattaatcatcaaaacaatgttaaaataacctctgaaccctgatctcccaaaataaatgtattataagtgtgtaaaacaacagttacgtttcatcaatagcctcccctcagccaagatcacaccctctgaagggaagatcccggcagaagtttccaccatcccctaaggattctatcatgggctccttcccctccccaaccctgcccatgcataccacacatttcctccagaaggaaatgggaactaggaagaattgcctaaactgctcacacctgggaagytgggtgctcctgaccaaggagaaactaaacaaattaaagtgatgacgatactgctcagcagtgattcaggagcacgtttttcctgaagtcatttgtttggcattgctacatgcctagtcaaagtcagaaacgtcagtttcccactgaataaacagccaggtgggaaagaaagggttggcaatggggcattttaacaaatgagctgaacttttccttcaactttattttctggtagaaatgttgtaagttaa

SEQ ID NO: 392740 - DNA, 578 bp, Homo sapiens
cttgggaggctgaggtgagaggatcacttgagcctaagaggttaaggctgcagcagtgaggcagtaaagctatgatygcgccacggcactccagcctgggtgacagagcgagaccccacctctttttaagaaaaacaaacaacaaaaaaattggggttgtatttttaaagccagaaagaataaaatacgaacattagcttccttggctgtgattgaactctttctaaggtaaaatgtagatgctgggaaacgccagtgaactagtgattcttgttggtcgggtttggttgatagcagatttactttgtttttctctggcaagaatgaggattccaaacaatttgtttccttgggttctagatggaagtgcctggagcctgcagacagggtctctccaccccagctgctggtccaacctgcctcgcagggcgtgacatggctgttgtcctcactgccttgtactctgcctcaccagtcccagtgagtacagtgaaccagtgcctcctccattcctgtcttcccccttcccacgtgcccactcagttgaggtcattttctgcacaaacgttgtgctgtgt

SEQ ID NO: 392741 - DNA, 578 bp, Homo sapiens
cttgggaggctgaggtgagaggatcacttgagcctaagaggttaaggctgcagcagtgaggcagtaaagctatgatcgcgccayggcactccagcctgggtgacagagcgagaccccacctctttttaagaaaaacaaacaacaaaaaaattggggttgtatttttaaagccagaaagaataaaatacgaacattagcttccttggctgtgattgaactctttctaaggtaaaatgtagatgctgggaaacgccagtgaactagtgattcttgttggtcgggtttggttgatagcagatttactttgtttttctctggcaagaatgaggattccaaacaatttgtttccttgggttctagatggaagtgcctggagcctgcagacagggtctctccaccccagctgctggtccaacctgcctcgcagggcgtgacatggctgttgtcctcactgccttgtactctgcctcaccagtcccagtgagtacagtgaaccagtgcctcctccattcctgtcttcccccttcccacgtgcccactcagttgaggtcattttctgcacaaacgttgtgctgtgt

SEQ ID NO: 392742 - DNA, 587 bp, Homo sapiens
agaagtgcctgtcacagtgcacaggatccctgaggagcatgagctgggatttcctctgtgctgtccaycacaggagcctgagtgaccagcgcatcctcgatttgtaaccagaatcctgccctctctcccaagcgggcacccttgctctgaccctctagttctctctcttgccttccagagaataccaagagaggctttcttggttaggacaatgaatgctgagacttgtggagttgggaccaatgggatttctttaaaagcatctttttgcctctggctgggtctatgggggtcaaacagaaacgccttgggccatttgttggtggggtgacaaatgaacttggcctgagaaatggaataggccgggctcagccccgcgaagcactcagaactgcacattttctttgttgagcgggtccacagtttgttttgagaatgcccgagggcccagggagacagacaattaaaagccggagctcattttgatatctgaaaaccacagccgccagcacgtgggaggtgccggagagcaggcttgggccttgcctcacacgccccctctctctgggtcacctgggagtgccagc

SEQ ID NO: 392743 - DNA, 587 bp, Homo sapiens
agaagtgcctgtcacagtgcacaggatccctgaggagcatgagctgggatttcctctgtgctgtccaccacaggagcctgagtgaccagcgcatcctcgatttgtaaccagaatcctgccctctctcccaagcgggcacccttgctctgaccctctagttctctctcttgccttccagagaataccaagagaggctttcttggttaggacaatgaatgctgagacttgtggagttgggaccaatgggatttctttaaaagcatctttttgcctctggctgggtctatgggggtcaaacagaaacrccttgggccatttgttggtggggtgacaaatgaacttggcctgagaaatggaataggccgggctcagccccgcgaagcactcagaactgcacattttctttgttgagcgggtccacagtttgttttgagaatgcccgagggcccagggagacagacaattaaaagccggagctcattttgatatctgaaaaccacagccgccagcacgtgggaggtgccggagagcaggcttgggccttgcctcacacgccccctctctctgggtcacctgggagtgccagc

SEQ ID NO: 392744 - DNA, 564 bp, Homo sapiens
ctactgtggttgtctttaatttatgggaatgarggattttgcggtggtttcctcatggggttcaagggaaggttgcgtgtgattagagtggctacaggtgaatccgatcgcccgcctgggaaagccatggtgctagaactcagcactgctccctcctgctctcacgtcctcactctgctgagacatgcctttaatcagacgtgatttgtctcatccttcttcagctccaacacgtgtgttcccagagctgtcctgccccaatttctctttgcaagacctgctctatgcctgcctccgcccaaccacaaatttgcctaaggtataaaactccacaaataggcctctctcctcttttccctcctgatgcccctttacaggccacctccccgccccaggtcccctccactacccctgccacgaagccacacccagggactgaccttgcaaacacatcctgcattttcttccccctctctgactgtgctctggtggtttctccttgcctagagcactctccccttccccgtacttctgcctgttgaagtcctacttaaaaaccaccca

SEQ ID NO: 392745 - DNA, 577 bp, Homo sapiens
cggcttgtgaccccttccaycttctctcatggcactcccttgactcacccttctacccctatcttccacatctaaggacccttaaatgtgatgacactgggttcccccaatccacctggattaatctggataatccagaatgatcttcacatgtcaggattcttaacgtaatcatacctgcaaagtcccttttgccacataaggtaagataaggtaacgttcaaaagttccagggatgtggatgcgaacatctggggaccattattctgtctaccacattttgtgatctctaatgctccccattcctctccagcctctcgttcctccttttcacctatggggctctgtttgtcctctcccatttgccgtcctgcaagatccagatggcctttcctgaaatagaggcacgagtgtcctggcatgtggggctcttgggaggtttagattaatgtttatgagtgcttagaacagtgtctggggcacagtagggctacaaaagtggttgttagctgccactgttgccattaacgtgctcacaggcctgccctccttgggaatgggacttctactggccttc

SEQ ID NO: 392746 - DNA, 577 bp, Homo sapiens
cggcttgtgaccccttccatcttctctcatggcactcccttgactcacccttctacccctatcttccacatctaaggacccttaaatgtgatgacactgggttcccccaatccacctggattaatctggataatccagaatgatcttcacatgtcaggattcttaacgtaatcatacctgcaaagtcccttttgccacataaggtaagataaggtaacgttcaaaagttccagggatgtggatgcgaacatctggggaccattattctgtctaccacattttgtgatctctaatgctccccattcctctccagcctctcgttcctccttttcacctatggggctctgtttgtcctctcccatttgccgtcctgcaagatccagatggcctttcctgaaatagaggcacgrgtgtcctggcatgtggggctcttgggaggtttagattaatgtttatgagtgcttagaacagtgtctggggcacagtagggctacaaaagtggttgttagctgccactgttgccattaacgtgctcacaggcctgccctccttgggaatgggacttctactggccttc

SEQ ID NO: 392747 - DNA, 577 bp, Homo sapiens
cggcttgtgaccccttccatcttctctcatggcactcccttgactcacccttctacccctatcttccacatctaaggacccttaaatgtgatgacactgggttcccccaatccacctggattaatctggataatccagaatgatcttcacatgtcaggattcttaacgtaatcatacctgcaaagtcccttttgccacataaggtaagataaggtaacgttcaaaagttccagggatgtggatgcgaacatctggggaccattattctgtctaccacattttgtgatctctaatgctccccattcctctccagcctctcgttcctccttttcacctatggggctctgtttgtcctctcccatttgccgtcctgcaagatccagatggcctttcctgaaatagaggcacgagtgtcctggcatgtggggctsttgggaggtttagattaatgtttatgagtgcttagaacagtgtctggggcacagtagggctacaaaagtggttgttagctgccactgttgccattaacgtgctcacaggcctgccctccttgggaatgggacttctactggccttc

SEQ ID NO: 392748 - DNA, 545 bp, Homo sapiens
tgatgggtttggcagcagggaaggcacagaacctttcacgattagcaggctcatgacaatttctctttaggcaagagagaaggttgaggaggaaagactggcagggcttggagagctggaaaggaagaaaggccctacaggcctggggatcccatctctgaccaccgaccccagcccccaactctcatagactctgatttgatattcttatttaccaaagaagctgcatgtatttgcatatcaattctctttcccatatcgacacgcagggaggcttcttcgttttggatcaaccagagatcaccaatgtctgcagggtgctcagcccctggtaccttggtcactctaggcagcctcctagatgtgcctcttaagataggttttctgaaatgggagaggaccacgccccgccccccaccatggactcwggagtctgcggcgcacaaatcctgcgattttacagatggggaaacagaggcacggagaaagtctcagctttcccacggcccactgggaccagaacccaggtcgcaggacggggacag

SEQ ID NO: 392749 - DNA, 638 bp, Homo sapiens
ttgaaactaaaacaaataattccagggagagcaaaaagaggtgtaagagagctttgaataaagtttacatgatccaatcattaaaatataatattgatctaaccaaaattaagtaaaagttcgtcaaaaggatagaaggaattgaaggctacttgcagaagaatgaaaaaaggctacatcttcaatctccacaatggaaggtcaatagataacacttcaatcaaaaaaagaaaaaagaagaaggaagaaaggaagaagaaagaaaggaaggaaggaagaaaaaaaagttttaaaggaagaaagaagaaagtgtcagtaaaacatgttatttaataagcttgttagagctatttgactctttaatcagaaaacagcaatagcaacttgaaaggactcatgtaccactttgctaaaaataaattktaaagactcacacttaactacaaagaaatgagaaacaaactggcaacaggccatcaacaacactgcacactagactaccaagatgcaacaccttcaaagcccaaggaaaaataattttcaacccagagttgtatacatctataaatatacatatatatatgcatgtgtacatctcaactatcaaatattataagaataaaataaagataatttca

SEQ ID NO: 392750 - DNA, 602 bp, Homo sapiens
tatatcgtggctctcccactctagctgtgtgacattggacatgttaccctcactgagcttcagagcgccacatgtaaaacaggaaaagaagccctaatttgtgaatttttttgaggagaagagataatgtataaaaatcccctagcccaaggtccagtcacctagtaatggtgatgatgatgataacatcaacaacctttattgactgcttgcaacttccaggcccttgtctaagcattttacatgaataaacacatttactcaatagatagtagcgggcagaagtaattgtagtagtggtggtactcagtctgaggaccccattcccatgcccaccatttctccatcaaaaacagagcactggaaacttttaaaacatcttgtatttaaaattttgatactcacccaaatgagatgaaaatttacgttaacacaaaaacctgcayacaaatgcttatagcagctttcttcataactgcctaaacttagaagcaaccaaaatgtccttcagtaggtgaataaactgtggtgcatccataccatgaaatatcattcagtgataaaaagaaatgagctatcaagccacaaaaagatgtgaagga

SEQ ID NO: 392751 - DNA, 581 bp, Homo sapiens
catggattggcatcttgtgctttgcagctctcctgtgctggagttgcacactggtggccctacacttctgtggtcttgggttggtcccacttccatggctctactaggcattgccccagggggactctttttgtggtggctctgacctcacatttctactcagcattaccctagctgggactctctgtgatggttctgcccctgtgacaagtctcttcctgggcccccaggctatctgtgaaactgtttgaagyctgcatggaggctgctaagcctccgcaactcttgcattctgtgcttctgcagaattagcatcacatgggtattgctaagcatttatggcttgaaccttctggagtggcaggtagagtcacagctgggctcacctgagccacagatggggcagttgaggagcactgtgtggatcctgagttggatctgggtagtgggtccatggagggtccccaggaaaccattctgctctctgggcctgtggtgggagggacagcttcagagatcttttgaaatacctttgggatcttttccccattgtctttatgaagatacttggctcccttcta

SEQ ID NO: 392752 - DNA, 542 bp, Homo sapiens
attcagccaaggtcctagcaactatataaaaagaatggcctttactccaatttccaatacctcgttcctcatttccccctgagatctagycatactggcctttacttttcatatttctactggttaagtaaccctaagccaaaagtccaaaatctgaaatgctccaaagttcaaaactttttggataacaacatgatgccacaagtggaaaatttcacacctaacctcatgtgaagggttgcagtgaaaactgaggtgcacgacacatggtttattcagcatccttagggataaaagaccctcccagtccccttcatctgcaatatattttttcttgtcatacccagattccctcacaaaagcacacccacaaagggtaatacaatagtttaatgtaaataaattttgtttcatgctccaaattatttaaaatattatataaaattatttcagggtatatgtattaagtgtatataaagcataaataaatttcatgtttatacttgggtcctaaccccaagatacctcattatgtatatgca

SEQ ID NO: 392753 - DNA, 542 bp, Homo sapiens
attcagccaaggtcctagcaactatataaaaagaatggcctttactccaatttccaatacctcgttcctcatttccccctgagatctagtcatactggcctttacttttcatatttctactggttaagtaaccctaagccaaaagtccaaaatctgaaatgctccaaagttcaaaactttttggataacaacatgatgccacaagtggaaaatttcacacctaacctcatgtgaagggttgcagtsaaaactgaggtgcacgacacatggtttattcagcatccttagggataaaagaccctcccagtccccttcatctgcaatatattttttcttgtcatacccagattccctcacaaaagcacacccacaaagggtaatacaatagtttaatgtaaataaattttgtttcatgctccaaattatttaaaatattatataaaattatttcagggtatatgtattaagtgtatataaagcataaataaatttcatgtttatacttgggtcctaaccccaagatacctcattatgtatatgca

SEQ ID NO: 392754 - DNA, 509 bp, Homo sapiens
ccttatcctcagacaatatattccaaggccctcagtggatgcctgaaatcatggatggtgccaaaccctatatatactgttttttcctatacatacataccaaagataaagcttaatttataaattactcacagtaagatgaataataactaataaaaataggacwattataaaatactataataaaagttgtatgaatgtgatctctctcaaaatattgtaactagaaccacagaaagtgaaaccagctataaggggggactactatattaagagatgagacctttaagaggtgattaggtcatgacacctccatcatcatgaatggattaatgccattaccatgggagtgggttagttattatgggaatttgaccctcttttcctctctgtctctctcacatgcacttccttgccatgtgacgccatccacgacattatgacacagcaagaaggccctcatcagatttggaccccttatcgtggacctcccagccaccagattcatg

SEQ ID NO: 392755 - DNA, 509 bp, Homo sapiens
ccttatcctcagacaatatattccaaggccctcagtggatgcctgaaatcatggatggtgccaaaccctatatatactgttttttcctatacatacataccaaagataaagcttaatttataaattactcacagtaagatgaataataactaataaaaataggactattataaaatactataataaaagttgtatgaatgtgatctctctcaaaatattgtaactagaaccacagaaagtgaaaccagctataaggggggactactatattaagagatgagacctttaagaggtgattaggtcatgacacctccatcatcatgaatggattaatgccattaccatgggagtgggttagttattatgggaatttgaccctcttttcctctctgtctctctcacatgcacytccttgccatgtgacgccatccacgacattatgacacagcaagaaggccctcatcagatttggaccccttatcgtggacctcccagccaccagattcatg

SEQ ID NO: 392756 - DNA, 586 bp, Homo sapiens
cagatcagaatagagtacatataatttagccttctgagttgaatcatcgtctgccatcagtctcctctcctctcttatcagtcatggtggtttcaagcccaccaccctccagagcattaggctgctgctgtttttttagatctcaaaattttgtttgcctctgacatctattatatcaatacacttttagttttgtttgtttacttgcttgggctacatttgtatataggtttcagaacagtctccaagcttttaagttttgaactagatatatgcaatatattaaatatataatttttaactagatacatcccaatatgaaattggaagatagtgtattttcctccaaactagccaaaataatccaataattggtctatttttcagctgctgttttctactcaaaggtgaagcaagtacccatccacccaatcatccccaatcattgaagtaaaacagatccacatgacagataaacatattyactggaaatatatatatcaaggtgtgatctatagactgcccacctcaaaatctacctgagaaacattaaaatgaggatttctagagctatcaagagccccca

SEQ ID NO: 392757 - DNA, 566 bp, Homo sapiens
agcaaagcaagatcctgcctctacaaaaaaaattaaaatttttaaacttctaaaataaataaataaataaaaattagcaggcaatgtggccttgcacctgttgtcctagctactcagaaaactgaaacaggagtatggcttaagcccaggtgtttaaggctgcagtgagctatgatcatgccactgcactccagcctgggcaacagaacaagactttgtctccaaaaaaaaaaaaaaaaaaaaaaaagataactttattagatcatgtcatgggaacctaaaagagtaagtaaacagtctgtttcaaacagtttaagacatattcatccaattcttaacaagagccaagttttcaraacctttgtttcaattcaatcagacagttattcagaactgaatatcaatcaggctcaaaactgatttaacaagcaattttgaggtaaaactaaaaaaatcaaccatatttgttcaaaagccaaaagtagtatttggcatacttgccttatgaaatgaggacaaaacataacaattctgtaaatatcttcagaattaggaggacagacaag

SEQ ID NO: 392758 - DNA, 566 bp, Homo sapiens
ctttgtcttacaatttggatactggctcagccacagtagaatagggygcccatcaaagtcctaaggccccattccagcacctagctgccagataacatttctagacaccctgggccagaaagtaacctgctgccttgaagggaaggatgcagttgtggcaggattcatcacccgctgactaaagagcacttgggccctgaatactcagcagtggtagccaggtaatactcaccacagaacttgcgtgagactcagagctgtgttgccttcagttatgacccaccacattcctacttgtagtggctatggggagataccctttctgcttgaagaaaggagagggaagagtaaaggaaacttcatcttacagtttgggtaccaacatggccacagtgcagtacaaaaccaagtgggtttctggggtctcttattccaggccttaattcctgaaactgctgtgagccagagggatgcccactgccctgaaaggaaaaacccagacccagaagcattcaccacaagctgatggaatagcccttgggccttaagtgatcatcaacaacagc

SEQ ID NO: 392759 - DNA, 596 bp, Homo sapiens
tatttaatatgtaatgtaaatatttaggtgtattgacatctaaaaagtgtgccaccattcttattgatgtcatttgttactactgacaatgctgaaagcatcaatagttttctgtctcctgtaatcttttcttctttaattattgttgtcttttgggtttttagttttttgtttttttgtttttgacacagagtcttgctctgtcgcccaggctggagtgcagtggtgcaatctcggctcactgcaacctccacctcccaggttcaagtgattctcctgcctcagcctcccgagtagctgggattacaggcatgcaccatgacgcctgggtaattgttgtattttcagtagggacaggttttaccatgttggccaggctggtctcaaactcctgacctcaggtaatcttcccacctcggcctcgcaaagtgctgggattacaggcgtaagccaccacaycaggcctttaattgttataggctgaattgtgtccctaccccaactccaaaatttatatgccgaatttccaacccccagtacctcagaactgactgtatttgaagactgggtatttaaagaggtaatgaaagttaaat

SEQ ID NO: 392760 - DNA, 578 bp, Homo sapiens
aatatgtaatgtaaatatttaggtgtattgacatctaaaaagtgtgccaccattcttattgatgtcatttgttactactgacaatgctgaaagcatcaatagttttctgtctcctgtaatcttttcttctttaattattgttgtcttttgggtttttagttttttgtttttttgtttttgacacagagtcttgctctgtcgcccaggctggagtgcagtggtgcaatctcggctcactgcaacctccacctcccaggttcaagtgattctcctgcctcagcctcccgagtagctgggattacaggcatgcaccatgacgcctgggtaattgttgtattttcagtagggacaggttttaccatgttggccaggctggtctcaaactcctgacctcaggtaatcttcccacctcggcctcgcaaagtgctgggattacaggcgtaagccaccacatcaggcctttaattgttataggctgaattgtgtccctaccccaactccaaaatttatatgcygaatttccaacccccagtacctcagaactgactgtatttgaagactgggtatttaaagaggta

SEQ ID NO: 392761 - DNA, 498 bp, Homo sapiens
gctgaattgtgtccctaccccaactccaaaatttatatgccgaatttccaacccccagtacctcagaactgactgtatttgaagactgggtatttaaagaggtaatgaaagttaaataaaatcattaggatgggtcctaatccatctggactggtatcattataagaaaaggagattagaacatagaatacatagaaggaagatcaggtgaagatatgggggaaaacagccatctacaagccaaggagagaaggcttagaagaaaccaacccttctgacacctcaatcttggatttctagcacctagaactgtgagaaaataaatttctgttgtttaagccacccagtctgtggtactttgttatggcagccctagcaaatttatacagattagtatgatgttaaatacggtacaggcatatctcatttgattgtgyttcactttactgttctttgcagatattgcattttttacaaattgaaggtttgtatcaacca

SEQ ID NO: 392762 - DNA, 592 bp, Homo sapiens
gaggactgtccaggagatggttaaaatggtgcccaaatgggtaccattacgccacctgcaactcagtgcctttgaaaagctatctgtgaagggaagtatgttttcctattaacttccattaataattccaaaggtgcatttatgaaaaatagagacagtagaaaaaggtgacactgtcagagcttggagaatactgttcttcagggagtgtcttactgacaaagattctaatgttattgctaggcagtatagcccaagtgttaggatttttttttaactccctaggagatttcaaatttcagtcataattgcaatcatctgatatacaacagcgcatctccaacatgaataaatatacagataacctggggatcttattaaaatgcagattctgattcaggaggtctaaagtgatgcctaagaatctatgtttctaaaaagttcagggaatgccaggactgctggtctgtgaaacacacctggagyagaaaggctccagtagacagcaacatgcaagggtggcattaatttaatcagaaaaacccagagggcaatttggagacacaaaaagtggaacctgtaggaaacagaa

SEQ ID NO: 392763 - DNA, 578 bp, Homo sapiens
tgaaaccagctgcgacacatcwctaacgctgaggctttggctccagagactgctgcctgcatggagtaaatgcatcattttttaaagctttgtcagtgcagtctaagagctgtgtacagtgtaattggggatctttgaaaaaaatatatatttgaaaccattttacaagaatcatcaggggaggcttgcttgaaactttttcttcttaacatctcactgccccagaaacaggtctatcactttgggtagtttttgcttttgagcagattgtttcttttcttcaaccatcttttctttttcagtaagctgaagtaaatacatttgagaagggagacattcttctctgtagtcttagaatgacaaatcttggaaggaagaacctggtacatcctatcgtaggccattgcttctccaggtgtggtccatggatcaacagcatcagtgtctcctgggaccttactagaatgcaaattatctatggggagcacccagggatctgtgttttaataagccctcaaggtgattctgctcaacattaaagtttgagaatcatagctctaggttatctgaattcagaa

SEQ ID NO: 392764 - DNA, 578 bp, Homo sapiens
tgaaaccagctgcgacacatctctaacgctgaggctttggctccagagactgctgcctgcatggagtaaatgcatcattttttaaagctttgtcagtgcartctaagagctgtgtacagtgtaattggggatctttgaaaaaaatatatatttgaaaccattttacaagaatcatcaggggaggcttgcttgaaactttttcttcttaacatctcactgccccagaaacaggtctatcactttgggtagtttttgcttttgagcagattgtttcttttcttcaaccatcttttctttttcagtaagctgaagtaaatacatttgagaagggagacattcttctctgtagtcttagaatgacaaatcttggaaggaagaacctggtacatcctatcgtaggccattgcttctccaggtgtggtccatggatcaacagcatcagtgtctcctgggaccttactagaatgcaaattatctatggggagcacccagggatctgtgttttaataagccctcaaggtgattctgctcaacattaaagtttgagaatcatagctctaggttatctgaattcagaa

SEQ ID NO: 392765 - DNA, 586 bp, Homo sapiens
gccatgttcaacatttctaaggagaaaaaatacataaatcataagaatcaagaaaaaaagaggagatatcactaccaactgcacaaacattaaaataagagaaaaccgcaaataactctatgctaaataaatgtcacaacctagatgaagtacaccaatcttatgatagtcatattaccaaaattcacacargaagatatagataatatgtataatcttatatttattaaaaattacattcagctaggtgcaatggctcacgcctgtaatcccagcattttgaaaggctgacatgagaaggtcttttgaacccaggagttttttaagaccaatcgggtcaacagagtgagatcttgtatctaaaaaaaaagaaaaaaaaatcaataaaaattacatataatttattattaaaagtttttggaaaaaaaagtctccagacctaggtagtgtcacgagtgattgctaccaaatatttaaagaggaattaataatatgtctacacaatttcttccaggaaataggaagaaacacttcccaaatgattttatgacactaaattatcctggcaccaagaccaaacacaaac

SEQ ID NO: 392766 - DNA, 550 bp, Homo sapiens
ctttcctccacttggtctgtttggctattgatacttgtgatcgcattgtgaagtactcatgttgtgtttttcagctccatcaggtcatttatgttcctctttaactggttattctggttatcagctcatataatgttttatcatgattcttagcttctttgcattgggttacaacatgctccttagctcagcgaagctcattatacccaccttctgaagcctagttctgtcaattcatccatctcagcctcagcacagttctgtgtccttgctggagaggtgttgcagtcatttggaggagaagagacactttggctttttgagttttcagcatttttgtattarttctttatcatctttgtcagcttatctacttttgatctttgaggttgctgacttttgaatggggtttttgtggggtctttttgttgatgttattgttgctttctgttttgttgttgttgttgttgtttttcagtttgtcccgtcttccatagggctgctgcagtttgctggggttccactccagaccctagtcacctcatgctct

SEQ ID NO: 392767 - DNA, 582 bp, Homo sapiens
agctacattttgaatatttccttggcaaaaatcattaagaatgactcatttctctaattcttcttttccagggcaccgttgagctgttgcaactgttmtgctggtaagtgcttttatgtgcttgagagaagtggagtggaaactaatttttctgtgacccataattttataatttgtatttttaagaaataatccattttcaaagtcactctcccttaagtcttcatcttttgttctaacttacttcctgtattagatttgtcttaaaattaaatgaaaagtagaaaagaaaaatattaaaatctcagaaataaacatagagctttttaaaatattagagctggggacaaacttgtttgatacctggagacataatcttaggttgagtggcttgtttaacataacatggttgtctgctaatggctacaacagaattcaaaattcctaattgttcagtgtattatctagtaactgatagtggctaattcctgccatgaagtaaatagaaaatataaatatatcttaggtactagaaaaacaaactctattgaggatggttttatatttgcacgttattatgtt

SEQ ID NO: 392768 - DNA, 559 bp, Homo sapiens
gatgatatttaaagataaaaattttaaatattttaatataactgtcagcaatctctatgctagacaacaaatgcttgcatgtgctatgatatatgatttataagatttagaattcttcaaggtgccctttccacaccctaagatgaagaaataagtgaaaataagatacaccaaaagtcactcaagtgtctattggcttaacagcaagtccagtcctaagtaacttttgcctgccacactgtccaaccaatgatattaatatgttaaaacagttttttctagagacctgctataggttagaacagctttacacatgtagaaaacaccagaaggacattttaaacagagatgttacctattaaattcaatcttcatgtttacaataagaatattgtgacttccaaaataaagccagatcttactgatgggctttatttctcactgatgggaatagcaatgggaatttgaatcaggtccaattaycgactacttgaaggagtgcttgtacctagcttgctttctcatatcacagcaatgtgcactttctctttgctgcata

SEQ ID NO: 392769 - DNA, 561 bp, Homo sapiens
aaccaacaccagcagcatttactgaggtaatactctcctcagtgaatattttactcaactacctgccgtgaacacaccctgatgtttagaattgatttttagcaatattgctcattagactagtacatcaactcattccctcccccatatctcatcagaagcagttccaatttatacaaaagctacttgttttagagtaactcatcatcctttcagaatctgaagtatgtcycccctggagaaccatatgaccattttatttaatttttttaaaaaaattgaattaaatattgtttttctccctcaaaggaaaacaggcttcacaagtgaagaattcccatccaaagaagctgtaagccctatatcctgtcaagaagttcatttgcatacatcctcttctattctattgacacataaaactgagtttatatttatcttccacttaaacattccttattaaatatcaatagcacagaggggtaggtgagaaccattttctgttttttatataatgaggccaatttgggaactgagaaagaaaggaaaatcaggcacaacgag

SEQ ID NO: 392770 - DNA, 618 bp, Homo sapiens
gaaagatgattctcagcaaggatgattgtacattccaatttgaatgccctttctcctaacttagaggatagagtgtgtgtccgtttcagctacagagttaatggccagactttagattacgaagccccaaagagtctgagggtggaggtgagagaattgatcagctgtaggatgaagagcttcaggcaacagraaactacaaatccaccacctttaccaatctgttttgttaaacttgagaggcttttgagagagaagcagcatctagaaggggcaaatttgcttagcatgtaaatagattgtaattcaagatgctcagattttactcctgaagaatcttatttactatagctgtgcaggaccctcctgcgctaggccagaactagcacccctcacagtccaattcaaaagtgtcccaacctgccttaacttggtcacccagtcagccctgagtgctgtcagaatttcctgggtgtctttgtgttttccttttacaggtccttcagagtgaccttgaggagagaccaccagtctagaaagtgaatttggtaggaactagaagctcattcattttctggagatgggggtaaacttagttaccttcacaccacactcaat

SEQ ID NO: 392771 - DNA, 638 bp, Homo sapiens
ttatttactatagctgtgcaggaccctcctgcgctaggccagaactagcacccctcacagtccaattcaaaagtgtcccaacctgccttaacttggtcacccagtcagccctgagtgctgtcagaatttcctgggtgtctttgtgttttccttttacaggtccttcagagtgaccttgaggagagaccaccagtctagaaagtgaatttggtaggaactagaagctcattcattttctggagatgggggtaaacttagttaccttcacaccacactcaatcactattccaacttcaatcccgaagtaggcttcttcctctagtaaggtctcagcgtatcgccttgaagtacacctacatttcactgacttccagcagtagagagtctgttatactcaaccaattcacatcatcatgtgttttgttttactaattttctgtattggattaattttagaataggcaatatatgtgcacacaagaccacaaaacaaaatgataaatatgcaaaaaatatacagttaaagtttytattgcttccctacccataatccttgttctgcttcccagaggcaaactcagtttacagtgtgttttaggcatatacatggggtgtgtgtgtgtgtaaaagagagaaag

SEQ ID NO: 392772 - DNA, 638 bp, Homo sapiens
ttatttactatagctgtgcaggaccctcctgcgctaggccagaactagcacccctcacagtccaattcaaaagtgtcccaacctgccttaacttggtcacccagtcagccctgagtgctgtcagaatttcctgggtgtctttgtgttttccttttacaggtccttcagagtgaccttgaggagagaccaccagtctagaaagtgaatttggtaggaactagaagctcattcattttctggagatgggggtaaacttagttaccttcacaccacactcaatcactattccaacttcaatcccgaagtaggcttcttcctctagtaaggtctcagcgtatcgccttgaagtacacctacatttcactgacttccagcagtagagagtctgttatactcaaccaattcacatcatcatgtgttttgttttactaattttctgtattggattaattttagaataggcaatatatgtgcacacaagaccacaaaacaaaatgataaatatgcaaaaaatatacagttaaagtttttattgcttccctacccmtaatccttgttctgcttcccagaggcaaactcagtttacagtgtgttttaggcatatacatggggtgtgtgtgtgtgtaaaagagagaaag

SEQ ID NO: 392773 - DNA, 473 bp, Homo sapiens
taaatgtagatacatatcatgttaatggattggaagacttgatatagttcagaagttaattctcttcaaattgatccctagagctaatgcaatgccacataaaatctcagaaaaatataactttaaaaaatacaaattgattctataatatatatggaaaggaaaaagacctttaactgccagaacaattttgaaaaaaagaacaaagatratggactcatacaacttgattttaacaaccactatgaagctacaaaaccaagagtgtgatattgatgaaggtaaagtcacataaatcaatgaaacagaatacagtccaagaataaatcaacagtatagcaaactggttttgacaaagatgaaagtcaattcaatgaataaaggatcatattctgaaaaatagttttgggaaaactggaccttcacaagtaaatgaataagcaaacaaacagcaagcctgcttcaatctatac

SEQ ID NO: 392774 - DNA, 581 bp, Homo sapiens
cagaaattgtaggatttagaatcccatgtggtattccagttaggaagggaggcggtagaattttcagcacacatttctcgtaccttttcctgtgcctcatcgacctttctttcaaactaggcaagagcatgcattaacccaagctggactttaaaacctcctgagaaacagccacacactggcactggattggccaggactctacttaaattatacttattgaatgatagaagagtagaaaacattctccggtctcttttatttatatagtgatttgaggtgataatgttttattttgatttgagtttcaacattttaactacttaagaccaacatagccaaatatttttattgcctttgcttttgagggcagcttttttgaaaacctgtctttgatgcagggcaggtttccctctccctatgggtggggttttaacaccagtttttctacagccactctgaagggaaccaataaatctcagcaagttcgtaaggtttcacattctattagagaaagagaacaaaggaacaacagaattagagacaaatgatttgacrgagtgccacgaagaaggttcatt

SEQ ID NO: 392775 - DNA, 609 bp, Homo sapiens
aatttgaaattttatgatgatctgtatattttaagtccaaactagagacagatactggagattctacctcaccatagtctgtattcacaatgcacctacctgtcttctctgagacatacacagataacttaaccatcagcttttgtttcctccaagtacaatgatgactaactcactgctttctctgccccttgccaactttcagattcttgttatagaatcccytgggaaaatctatgcttcatacataagtgattatcaaaggggttagttgttaatatctttatcatagttaaataaataaatgatggcagaaccacaatgggcactaggaagctagtttttcactatacattttgcagtctacaatattacctggagtatcttatatttgcaaaacaggttttcattacttctgaaactctcacacacacacttttttaagagtaatacgcaaaatttaactaagtttaaataattaccataaacctattgttattatggaatgtcactcttcagttaagaactggctctaagtagatgcagtaaaccatcaatgaaataaagcttctgacaaaaccagaaaagctaattaatgattttaacttc

SEQ ID NO: 392776 - DNA, 609 bp, Homo sapiens
aatttgaaattttatgatgatctgtatattttaagtccaaactagagacagatactggagattctacctcaccatagtctgtattcacaatgcacctacctgtcttctctgagacatacacagataacttaaccatcagcttttgtttcctccaagtacaatgatgactaactcactgctttctctgccccttgccaactttcagattcttgttatagaatcccctgggaaaatctatgcttcatacataagtgattatcaaaggggttagttgttaatatctttatcatagttaaataaataaatgatggcagaaccacaatgggcactaggaagctagtttttcactatacattttgcagtctacaatattacctrgagtatcttatatttgcaaaacaggttttcattacttctgaaactctcacacacacacttttttaagagtaatacgcaaaatttaactaagtttaaataattaccataaacctattgttattatggaatgtcactcttcagttaagaactggctctaagtagatgcagtaaaccatcaatgaaataaagcttctgacaaaaccagaaaagctaattaatgattttaacttc

SEQ ID NO: 392777 - DNA, 593 bp, Homo sapiens
aaaggaagaatagacaatcaataataatggattttaataatagattgattgaacaagtaggcagaaagatcaacaaagaaatagaagacttgagaaatactatagccaaccagacctaacagatccctatggaaacactccactcagcaacagcagagtatattctcctcaagtgcatgtggaatatcctctaggataaaccgtatgtcaggccataaaacaaacctcagtaaatttaagaggatagaaataatgcatgtgttctatgagcacaatggaataaagttagaaatccgtaacaacaatttatttgggaaatttgtaataatggaaattaaataacacattcataagcagtcagtggttaaaaaagaaatcraaacagttgaaaatacttttagatgaacaaaactgaaggcacaaaataccaaaacttataggattgcagataaaactgtgtatacagggaaatttatagctgaaaaacctatatttaaaacagaagaaaggccccaaatcaattaccttcctgtctaccttaacacactgaaaaataagaagaactaaatctaaaggaggaagatgaaaggata

SEQ ID NO: 392778 - DNA, 552 bp, Homo sapiens
cagcccctgaccctatgctttcatgttcgcaagtccttcgagtcagcacagtcggaaataggaaaagtcctggatagccatgcatcctctgatctagtaagaacttaatcatccataaaaggattgcaaatcacttaaccatatcccactatatcaatccaaatgtatcctcaaatcaactttcccttagctcagtgcaaatttgcctgcagccattttaatgccatcttgagaaagagcaagtgtgaaagggagaaaaactcaaagtagaaatagataatggtcttaattaatggaagttcaaatatcttagtctgcaaatttgtgaagctcaaaggctttattcttaaccattctactatagctgccctccatagagactaggccacaacattaaatcctgaggtctggttggttttgaaaaactcattctaatcccatgtctctytcagagctcctgttctgaggatgggaaatgtcaggaactacggagaatagtatacttctaatttctctcttgggttttagagagtggttctcaagataaaattc

SEQ ID NO: 392779 - DNA, 587 bp, Homo sapiens
gttgcatgaaatataatacttccatgattgcacaggagagagtgtagaaaacttagctgaatctatttctaatttcaagtgagatttgtgtccttcaatatgctcaacaccccaccccacactgccactcctttttgggactgtttatacacacacacatgtatgcactctcacagagacamacaaacacatttgtcttacctttgcctttccaattgtttatacctaaccccttattctgaccctaaaagtaatgattaaaatcatcttcctggattctcctgtctccaggtgaagggtgtgaactttcctgctcctgtaacctgccttccagatctgcttccgggtctggattctaatactatcatgatcttatctgtgctgcctttattcgcagacttctctcaggtctgatgaggatgttcttaccatagcccagctcctctggtcttaaaattccctgtgattccccttcctctgtgatatctacttctttgatctttgggttcctcattatctcattaaattttctcatttaacacaatttcctccttaaattttctcatttaacacaattttatgattca

SEQ ID NO: 392780 - DNA, 560 bp, Homo sapiens
agaatagagagaattgagatggtcttattcatcaaattccagaacaaagggtcccctttgaagcttaaaaaaggaggatttaggataaatggaaagaactattttttaacacagtgggggataaacttatggaactcattatccaaattttgctattcattaaaaatataaatagactcagacaaagattcatatctgaataaagatcagtaatgggttactaaggaaggtctggttttagtttaatggtagagagcctttgccttattttcacctatgtcgggttttaagttctagctcagccctcactggaaagatgacttaaccttcaatgtcccagtttgtattagaggtaatagtacttatgtgtccaaattgttggaataattaaatgagatgaggcacattaacttcattgcagcacctgatgacgatgaaggagacaaaggagataaaggggatggaagggataaaatggtagaaaaaaggagatgaagaggaagaggatgaggaaatgatgaatgatggtgrtaaaatctttccaggttgatgtctcgcca

SEQ ID NO: 392781 - DNA, 507 bp, Homo sapiens
aaatatcttcctgaatgatgaaaaactctttttattttatgagtagtttctggaatttacgtatgtggaaatattacacagtcaaatttaatttctcaatttaaatagaaaatcagtaaaagaaaaagacactttagcagtctttaacttaggtgtaaatttgagggttttttttcaaacttcacttctttcctcttttcatcaattacaaagagagctaatgtcaatgaattagtttttgtttttatgtaactgatttaatgttgtaattttggagactcgagtagcttaatgtaaaccctatcatgacataaagataactgatttctgatcttaaaagtgctgaactgaatgaaaggraaaataaagtgcagctttgaattaagattttggtcacaaaccttcagactatggaattccagttccatttttggttttgattgtctagggctccaagcaagatcaaagacctctttccaatttcatttttaatgagttacttcttaa

SEQ ID NO: 392782 - DNA, 471 bp, Homo sapiens
tccaagattgtgtgcagtgaatttgttgataacaataagcaaggctggatgatttccaccaacattgtcttgttccctggctctaggagaaaagaatgcagattgtagttttgatctttttctatgctctctataagtttccagttagggttatgctttttccagaagagaaggtgggagggctcttagtaakaatgattcaggtgaccaagcttgggggtcaggctggcaaggcttatggcaagagctaggtggggaacaaagagaagctgattttcaggatagtgtgaggatcactcaagcagaggactttatgaggttgaagaattggcggaatgagagagattattagaaagctataagatgaggtgatgtggtgagtcaacagtatagtatgagactgctggaattactgatgtgataataattctggggttgatgctacaggaagctagagctaataatagttca

SEQ ID NO: 392783 - DNA, 596 bp, Homo sapiens
gttttattgttctacattggctctattactatgtcttcttttatctgcaatatctgcattttatcagcattttatgaatataacctcatttaatcctcactatgaccctattgttttgtccatgttatagttgatgaaaataaggggcaaaaattaacttgtctaaaattacccatattataagtgacagggtcatgatttttgctgtcagtatggctgtgaacccctatgctattctgactccttttaaattttcatattgttaaatagagtagctgtagtagcagcagcagcaggcattcacagagcacttactatgaatgagccacacttctaagtgctttacatagaggacaatatgaaacttcctaaataaataccaactcttattaataactgcttaatttgcttctatattctgttkttctgctctcagaataaagctcttttcctctcacctgcggctgcactgccatggaattggagattgctccccagtgtttcttccctgtgttgctggcattccttcctcatgctcactgccttcccaacattcctcatttacccccctcagctttcttgacacccaatttcca

SEQ ID NO: 392784 - DNA, 452 bp, Homo sapiens
tctaggtttgctgatacaattatctgcctagcttttatcattaccaacctcatgtctccttctccctctccttctttttgttctgtcctcatggtttatactttcctcactggtagtaaagacagtatagggttgagagtatgactgcctggaattttgagaaacaaactaccagtttttagctgtgtgaccttgagcaagtttcattatattatctatgcctcactttttcatctgtacaaagaggctaataaaagcacctaactcatatgattgttatgaaaattaaatgaaacaatgcagaccaagtattgtttraaagatattatttttgcatttttccttttaaaaattgtggtaaaatgcacataacataaacaggttatactgtacatttaccatcttaaccatttaagtactgtacattgttgtgcagccaatctccaaaaccc

SEQ ID NO: 392785 - DNA, 568 bp, Homo sapiens
tgtgcagccaatctccaaaacccttttcatcttgcaaaatcaaaactttataccccttaaacaacaactctccattccactctcttcccaggctttaggaaccaccattccctatgattttgaccaaactagatacctcatataagtggaacttagagtatttgtccttctgtgactggcttatttcacttagcataatgccctcaaggttcatccgtattatagcatatgtcaaactctccttccttttaaaggctgaatattatttcatggtatgtgtataccacattttgtttatccgttatctgtcaatagacacttgggttgcttccaccttttgcctgttgtgaataatgtagccataaacatgggtgtaaaaatgtctcatctagaygctgttttcaattactctgagtacccagaagtagaatcgctgaatcgtatgataattctatttctattttattgaggaaccaccatactattttctataatggtgctatcaatttacattccaaccagcagtgttcagtggttcccttttcttcacacccttgccaacacttgc

SEQ ID NO: 392786 - DNA, 568 bp, Homo sapiens
tgtgcagccaatctccaaaacccttttcatcttgcaaaatcaaaactttataccccttaaacaacaactctccattccactctcttcccaggctttaggaaccaccattccctatgattttgaccaaactagatacctcatataagtggaacttagagtatttgtccttctgtgactggcttatttcacttagcataatgccctcaaggttcatccgtattatagcatatgtcaaactctccttccttttaaaggctgaatattatttcatggtatgtgtataccacattttgtttatccgttatctgtcaatagacacttgggttgcttccaccttttgcctgttgtgaataatgtagccataaacatgggtgtaaaaatgtctcatctagacgctgttttcaattactctgagtacccagaagtagaatcgctgaatcgtatgataattctatttctattttattgaggaaccaccatactattttctataatggtgctatyaatttacattccaaccagcagtgttcagtggttcccttttcttcacacccttgccaacacttgc

SEQ ID NO: 392787 - DNA, 530 bp, Homo sapiens
ttttgtagtttccagtgtacaagcttttttcctctttggtaaagtatattcctaagtattttattgtttctgatactattgcaaatgaaattgttttcttaatttccttttcatgttgttcttgtcagtgtatagaaatgcaacttatttttgtgtgttgattttgtatcctgtaactttgctagaattgcttacgagtcatagcagttttttgtgcaatctttaggtgcaattattttttaaacataagttacctccagtcttttattatggtaattaacatggataaaaatacccaatatatacaattacrtaatctctctcattctctctcttttgctgaaagcacttttcacaaaaaatcaatttattttgggcttcctgaaattactctttttagatatttttgtatctgttcgtatacataaataaacatatatatatacatgtatacacacacacacatccctcatataatttataaaattcctgctctgtagcagagtccagaatattgattccatgcaaac

SEQ ID NO: 392788 - DNA, 404 bp, Homo sapiens
tgctgagagggaaatttatggcactaaatgcttacattaggaaagagaaaaagttccaagtcaataattaaagtttccacctcaagaaactagaaaaagagtagcaaaataaactgaaagcaggtagaaggaagaaaataataaggataagagcagatgtcaataarattcaagagaaaataatagagaaaataatagagaagttgttagctaagaattgtttctttgtaactagcaataaaatagccaaacctctaactagattgacaaaagagagagagaaggcaaaaattataaaatcaggaatgagacaggggatactcttcagccatacaaaggatattaagagaatactattaacaactctacacacataaattcaaaagaaatttatcaattcttaa

SEQ ID NO: 392789 - DNA, 404 bp, Homo sapiens
tgctgagagggaaatttatggcactaaatgcttacattaggaaagagaaaaagttccaagtcaataattaaagtttccacctcaagaaactagaaaaagagtagcaaaataaactgaaagcaggtagaaggaagaaaataataaggataagagcagatgtcaataaaattcaagagaaaataatagagaaaataatagagaagttkttagctaagaattgtttctttgtaactagcaataaaatagccaaacctctaactagattgacaaaagagagagagaaggcaaaaattataaaatcaggaatgagacaggggatactcttcagccatacaaaggatattaagagaatactattaacaactctacacacataaattcaaaagaaatttatcaattcttaa

SEQ ID NO: 392790 - DNA, 600 bp, Homo sapiens
tctctaccaaattaccatgtcattatccagaaaaatagaaaaattatcctaaaatttgtatggaaccacgaaagactccaaatggccaaagtaatctttggcacaaagaataaatctgaaggcatcacattacctgaatttaaaatatattacaaggctattgtaacaaaaacagcatggaattggtaaaaatatatacacatagaccaattgaacagaatagagaactgagaaattatgtatttacagccaactgattttcaacaaaggtgttaagaacatacagtctcttcaataaatggtactgggaaaactagttatctatacatagaagaataaaacaacccctatttctcaccatatacaaaattcaacccaagatgaattaaatacctcaakgtaagacctgaaactgtaaaactagtagaagaaaaaataggtgaaacacttcaagacatcgtcctagacaaagattttatggttaaaatcttaaaagcataggaaataaaaacaaaaatagacaaaagggactgtactaaactaactaaactaaaaagcttctgtacagcaaagtaaacaactgacagagtgaaaagatag

SEQ ID NO: 392791 - DNA, 529 bp, Homo sapiens
atatatacataatggacaagtaatattatacagcctttaaaaagaacaaaatcttgtcatttgtaacaacatggatgatcccggagaayattatgtgaaattagccaggcacataataaatattgcatttttctcactcttatgtggaagctaaaaaagttgatctcacagaaatattgagcagaatagtggttactgggaagtagctgggaagagtggtggggacaataggaagaggctgattaaaggatacaaaattacaggtagataagaggaataggttcaagtgttttgtagcattgtagcatgactatattaataataattgcaagcctactgcagggtatcttcccaaaggaacagaaatcataatatcaagaagatacctgcacttatatgcttatcactgcactattcacaatagcaaagatatggaatcaactaagtgaccatcaatggatgattggataaagaaaatacagcacatacacatcatggaataccactcaaccattaaagaatacaatca

SEQ ID NO: 392792 - DNA, 529 bp, Homo sapiens
atatatacataatggacaagtaatattatacagcctttaaaaagaacaaaatcttgtcatttgtaacaacatggatgatcccggagaacattatgtgaaattagccaggcacataataaatattgcatttttctcactcttatgtggaagctaaaaaagttgatctcacagaaatattgagcagaatagtggttactgggaagtagctgggaagagtggtggggacaataggaagaggctgattaaaggatacaaaattacaggyagataagaggaataggttcaagtgttttgtagcattgtagcatgactatattaataataattgcaagcctactgcagggtatcttcccaaaggaacagaaatcataatatcaagaagatacctgcacttatatgcttatcactgcactattcacaatagcaaagatatggaatcaactaagtgaccatcaatggatgattggataaagaaaatacagcacatacacatcatggaataccactcaaccattaaagaatacaatca

SEQ ID NO: 392793 - DNA, 616 bp, Homo sapiens
ggaataggttcaagtgttttgtagcattgtagcatgactatattaataataattgcaagcctactgcagggtatcttcccaaaggaacagaaatcataatatcaagaagatacctgcacttatatgcttatcactgcactattcacaatagcaaagatatggaatcaactaagtgaccatcaatggatgattggataaagaaaatacagcacatacacatcatggaataccactcaaccattaaagaatacaatcatgtcttttgcagcaacatggatggaattggaggcaattatcttaagtgaaataacttagaaacagaaactcaatactgcatgttctcacttataattgggtgctaaataatgtgtatgcatggatgkagagtggaattatagacatgaaagatgcaaaaaggtgggactgtaggaaaggggtaaggatgagaaattacctaatgagtacaatgtacattggttacactaaaaacctggacctcactgttacacagtatatccatgtaacagaactgcactgtacccctaaatctataaaaataaaaattgagaaaaaccccagtaatttactgaatattttcaagtagccagaagagaga

SEQ ID NO: 392794 - DNA, 506 bp, Homo sapiens
agaattaaactataataaagaaaagcagaggagcatcatggcagatgggaggcaggactagcttatagctccaacttggatggatagagcagtgtgtggaagctcacatcataaattttagctgcagaacaattgcaagaacaaaccaggaatcccaagaggacctacagatcctctgaaggaagtggactactcctgcaggacccgagcgacaccccaaatactgtgagtgcccaaactgccaaaatagggaagggagagcctctgctcctgaacacacctgccccccaactggagaaactgaaggtctagtttgcatgagaaatttctgaccttacctggacctgagtcaattgagagagccgagagaaatacaggggtagaggaagcagcgggaaaggctrtggaagctcacaggccattcctggctggcatcacagggatcctttgaaaaagcagccagaggtgcaggggaaaacactacaggaagaaggaagtctccagct

SEQ ID NO: 392795 - DNA, 506 bp, Homo sapiens
agaattaaactataataaagaaaagcagaggagcatcatggcagatgggaggcaggactagcttatagctccaacttggatggatagagcagtgtgtggaagctcacatcataaattttagctgcagaacaattgcaagaacaaaccaggaatcccaagaggacctacagatcctctgaaggaagtggactactcctgcaggacccgagcgacaccccaaatactgtgagtgcccaaactgccaaaatagggaagggagagcctctgctcctgaacacacctgccccccaactggagaaactgaaggtctagtttgcatgagaaatttctgaccttacctggacctgagtcaattgagagagccgagagaaatacaggggtagaggaagcagcgggaaaggctgtggaagctcacaggccattcctggctggcatcacaggsatcctttgaaaaagcagccagaggtgcaggggaaaacactacaggaagaaggaagtctccagct

SEQ ID NO: 392796 - DNA, 557 bp, Homo sapiens
atctcattaagaaactaaatgggagatattacaaaggacaccactgaaatacaaacgatcattcaaggctactatgaacaccttttgcccataaactagaaagcytagaagagatggataaattcctggaaaaatacaaccctcctagcttaaatcaggaagaattagacaccctgaacagaccaataacaagccacaagaatgaaatggtaccaaaaaaaattaccgacaaacaaaagtccaggaccagatgaattcacagcagaattctaacagacattcaaagaagaattggtaccaatcctttcaacactattccacaagaaagagaaagaggaaactgtccctaattcattctatgaagtcagcatcaccctaataccaaaaccaagaaaggatataaccaaaaaagaaaactacagaccaatatccctgatgaacgtagatgcaaaaatccataacaaaatactagctaactgaatccaacaacatatcaaaaagataacacaccatgatcagatgggttgcataccagggatgcagggatggtttaacat

SEQ ID NO: 392797 - DNA, 583 bp, Homo sapiens
catgtatttttttatttctcatttttaatttattctaatattatctcttcctcattttctactatatttttctgatttaattataagatgttagaacttgtcatcataaattacaggtctstttaacactcatattttctaagcccttttctatatgagctgcctaataattttttttccaatttcttaatttgttttcagctgtgcctagtcttttatttatcaactgagattataactccaactctttttcattactaggagtttgatcttttccaaggttatctggcattgttggtggtaattttttgcttaatcattttttttacttccttaaacataaagggatatactactttttactctgtggctgataatttcaatatctgcagttctaggtggggaaggagattctaatactattggtggttgtttctgtaatttcttgctctggtgtttgttcttcttgtgcttctataatttggagttatggattcatatgtccctgttcttcgtaagtgtaagaatcttgaaagtgttgaggtttgtttctttagaatgggtataattttgcttctaccag

SEQ ID NO: 392798 - DNA, 583 bp, Homo sapiens
catgtatttttttatttctcatttttaatttattctaatattatctcttcctcattttctactatatttttctgatttaattataagatgttagaacttgtcatcataaattacaggtctctttaacactcatattttctaagcccttttctatatgagctgcctaataattttktttccaatttcttaatttgttttcagctgtgcctagtcttttatttatcaactgagattataactccaactctttttcattactaggagtttgatcttttccaaggttatctggcattgttggtggtaattttttgcttaatcattttttttacttccttaaacataaagggatatactactttttactctgtggctgataatttcaatatctgcagttctaggtggggaaggagattctaatactattggtggttgtttctgtaatttcttgctctggtgtttgttcttcttgtgcttctataatttggagttatggattcatatgtccctgttcttcgtaagtgtaagaatcttgaaagtgttgaggtttgtttctttagaatgggtataattttgcttctaccag

SEQ ID NO: 392799 - DNA, 583 bp, Homo sapiens
catgtatttttttatttctcatttttaatttattctaatattatctcttcctcattttctactatatttttctgatttaattataagatgttagaacttgtcatcataaattacaggtctctttaacactcatattttctaagcccttttctatatgagctgcctaataattttttttccaatttcttaatttgttttcagctgtgcctagtcttttatttatcaactgagattataactccaactctttttcattactaggagtttgatctttyccaaggttatctggcattgttggtggtaattttttgcttaatcattttttttacttccttaaacataaagggatatactactttttactctgtggctgataatttcaatatctgcagttctaggtggggaaggagattctaatactattggtggttgtttctgtaatttcttgctctggtgtttgttcttcttgtgcttctataatttggagttatggattcatatgtccctgttcttcgtaagtgtaagaatcttgaaagtgttgaggtttgtttctttagaatgggtataattttgcttctaccag

SEQ ID NO: 392800 - DNA, 601 bp, Homo sapiens
aaaatttaaaatgtatatagtgttcagtaatatctactaggtattatatgtttctcaattttaattttggaaaaagaacaattaaaatgtttaaagtgtatttgggcattaaaatgcttttaagaccatgctgtttttcaggcagggcatccggacaagtaacagcctttcccaggatcatctgtggatgatatcttttccttcttatttccatgctagtgattgaccaagacttggaaagcattttggtgtcacttgatggaatgagataatatgtccattcactgaacaaaaacctagacaacctttggtgaaagtctcttctactcttasgtccatttaaattttttcctattacctctaagaaaaccttaaccttagggggcatcaaaaccaaagatagcctggaaattctgcatatacttttgcatagtcttcaaatataaagctttttaatatattagaatatttaaggtagcacttaaatataaaatataacacatttttaaagacatatggaattgcaaatcctctatctcagatttgtaactatgaggattcaattttaagacaagatagataggacaatggtagctgccta

SEQ ID NO: 392801 - DNA, 502 bp, Homo sapiens
aaattataaagtcttcaatattyctctcagagaaaaatgtcaatttcctgggatctgagattattttaagtgctttatctttacataaccaaaatgtccccagttttcttccaacgttaacattctagacgtaaatttccttggtttattagcctccatctgctgcctaggactccatcggatcccctaggcctcctctgtctcctcgggactttctttaggttgggtctcagttgtgctggctgccaaatttaagctagctcctccaccactgcctcttcactgatgcctgagacctattcttcccaaagcagaagtggggagatccccctcaaactcccttactcaattccatcttgtatttggttatttagtcccctaagcagcacttggttaccctaaatgtgataaaaagcccccctggaagtgtgttagcttcttctcactctctagcaggttctctgttgtcccgtcaggttgaggaacagacataattaccctc

SEQ ID NO: 392802 - DNA, 502 bp, Homo sapiens
aaattataaagtcttcaatattcctctcagagaaaaatgtcaatttcctgggatctgagattattttaagtgctttatctttacataaccaaaatgtccccagktttcttccaacgttaacattctagacgtaaatttccttggtttattagcctccatctgctgcctaggactccatcggatcccctaggcctcctctgtctcctcgggactttctttaggttgggtctcagttgtgctggctgccaaatttaagctagctcctccaccactgcctcttcactgatgcctgagacctattcttcccaaagcagaagtggggagatccccctcaaactcccttactcaattccatcttgtatttggttatttagtcccctaagcagcacttggttaccctaaatgtgataaaaagcccccctggaagtgtgttagcttcttctcactctctagcaggttctctgttgtcccgtcaggttgaggaacagacataattaccctc

SEQ ID NO: 392803 - DNA, 502 bp, Homo sapiens
aaattataaagtcttcaatattcctctcagagaaaaatgtcaatttcctgggatctgagattattttaagtgctttatctttacataaccaaaatgtccccagtyttcttccaacgttaacattctagacgtaaatttccttggtttattagcctccatctgctgcctaggactccatcggatcccctaggcctcctctgtctcctcgggactttctttaggttgggtctcagttgtgctggctgccaaatttaagctagctcctccaccactgcctcttcactgatgcctgagacctattcttcccaaagcagaagtggggagatccccctcaaactcccttactcaattccatcttgtatttggttatttagtcccctaagcagcacttggttaccctaaatgtgataaaaagcccccctggaagtgtgttagcttcttctcactctctagcaggttctctgttgtcccgtcaggttgaggaacagacataattaccctc

SEQ ID NO: 392804 - DNA, 579 bp, Homo sapiens
  misc_feature (1)...(579): n = A,T,C or G
nnnnntatctgttgatggacacctaggtgcttccaaatcctggctattgtgaatagtgctgtaataagcatgagagtacagatatttsttcaatatactaatttcctttcttttgggtgtatgcctagcaatggaattcctggatcatatgatagttctacttttagttgtttgaagaacctttgaactgttctccattgtgattgtagtaatttatgttcataccaacagtgtatgagagttctttctctgtgtccttgtcagcatttcttattgcctgtcttttgaataaaagccattttaattagtaagatgatatctcattgtagttttgatttgcatttctctgatgatcaattatgttgagcatcttttcatatatctgtttgccatttgtaagtttttttttttaggaatgtctattcagatcatttgcccatattttaatcagatcatttgttttttcctatagagttgtttgagctaattacatattctggttatttatcctttatcagacacagtttcaccttaacatttggcttatgataaggagtccagcaaccaccatgagacaca

SEQ ID NO: 392805 - DNA, 551 bp, Homo sapiens
tggcttatgataaggagtccagcaaccaccatgagacacattttgtcccaaactcaattctaaacttcaggtcaaagccctaggaaagaaaactggatctaagggatccagaggcagatgacaatagaagttaaaaggcacagtgcaagtaaacatggctgattcctgccaataaagccaaacccaagcttcttgtttcatggataaaggccatgttagtatctgtggcataaatgaggtctagggaattcaaggctactgamaccaggagaaatacggtgtatgtgggtaaaagcagacgatttccaccttctaggcccccctgcttcatgggtgcaagtcactttaacacccgtggcggcacctgccaagttcgctgggacttgggaatggaagagggaaagaggatactcttccctctctccctcatgtaccctgggtatctgctaggaagagaagggaaccaggcatacctgctcccctctttctagataggaagccattcatcttcagtctgtacccctttcaaatgcatcctgaacccctgggat

SEQ ID NO: 392806 - DNA, 497 bp, Homo sapiens
tgtctttctgctccaccaggtcatttatgttcttttctacactggttattctagttagcaattcatctaacattttttcaaggttcttagcttccttgcattgggttagaacatgttcctttagctcggaggagattgttattacccatcttctgaagccttcttctgacaattcgtcaaactcattctccatcttcaaactcattgctggtgaggagttgtgatcctttccaggagargaggcattctggtttttggaattttcagcctttttgtgctgctttctcctcatcttcatggatttgtctatctttggtctttgatgttagtgaccttcagacagggtctttgaatcgacgtgctattcctttctgtttgttagttttccttctgacagtcaggccctctgctgccagtctgctggagtttgctggagctccactcccaaccctgtttgcctgggtatcaccagcggaggctgcagaacagcaaaggtt

SEQ ID NO: 392807 - DNA, 497 bp, Homo sapiens
tgtctttctgctccaccaggtcatttatgttcttttctacactggttattctagttagcaattcatctaacattttttcaaggttcttagcttccttgcattgggttagaacatgttcctttagctcggaggagattgttattacccatcttctgaagccttcttctgacaattcgtcaaactcattctccatcttcaaactcattgctggtgaggagttgtgatcctttccaggagaagaggcattctggtttttggaattttcagcctttttgtgctgctttctcctcatcttcatggatttgtctatctttggtctttgatgttrgtgaccttcagacagggtctttgaatcgacgtgctattcctttctgtttgttagttttccttctgacagtcaggccctctgctgccagtctgctggagtttgctggagctccactcccaaccctgtttgcctgggtatcaccagcggaggctgcagaacagcaaaggtt

SEQ ID NO: 392808 - DNA, 585 bp, Homo sapiens
cataatgaagcagtagctcaagagttactaattacaattgaaagtttagaagttactattgacaaaacccatgtgtgctagaaaataaaccttgtgtatttattaggatgataaaccacatctgagagttagcctgactgtgtgacaaaaagaggaggtggatgataatggaatgtgagcagttactgaagttggctgacatttcaaacacctgaggcatctttcacatggaaaatttgattcacagtaaaatgaggctctgcatgacaaattgcaaakcttcaatcaaagcaacaaaagtggtcctcggtgtagggggaaagttagaaatccaagttaacaataatggataacatttatcaagtgcttatatgtgctgggtaccattttatgctctttgcatctagacatttaatgaggaaactattactgttttcctcttcattttatttataagtacacttaacaacagagatgctatgtaattttcctaaggtcatgcttattaagtggtggatggagaatctgaatatacatagtctggttcaggaacctctgcacttaattgctaagaatactaaaatc

SEQ ID NO: 392809 - DNA, 384 bp, Homo sapiens
tgagctcaggcaagcctagccctgcccccacctagtggtccttccctgtccaccatggtagctgaagacaaaggtcttatactcttaggagtaatagcaccccacccatcacctcttcctcccgacactaccacagctgatgctctctggaaagcaccacctctgggcaggaggccaaccagcacaaaaatrgtgcattaaacaaccaaagcagagaaccctcacagagtctatttcacccaactgccactcccactggaagaggtgctggtatccatggctgagagactcacagatggttcacatcacaggcctctgtgcagacaaccaccagtaccagcccagagccaagtagacttcctgggtggctagacccaggagaga

SEQ ID NO: 392810 - DNA, 567 bp, Homo sapiens
atgcccaattgtagagtgtttttccaggccaccctggactgtaggcatgatgttaccacacccgtattcatacagagccatcctactgattcctgcccttgtaacgcaggacctcaagctccctcaacccttttgtggcaagttcccagtctgaccccagctgaatgttccttgacttgattatgacttgattatgaaaatgataacttcagccagttatcatttagactttctcgctgtctsgttgcttttctccactccagtgcaggcttttctttttcccttcttcaccattccctttatttctgttctgcctctctctctttctccttcaattcagtcttattcatgcaactatcccatcctgatattccccacaatctggataattaaatggccagtacagggaaatattcagcaaggctttctcttagtgaaagagtgaagggtggaagagagaaagaagctaggaaaactcatacattaataaattttagccctgttatactaacttgtcttcaggttttctactttctcatagtccctgtggcccctcactcttactct

SEQ ID NO: 392811 - DNA, 623 bp, Homo sapiens
attaacattctgttttcctttgataacttttacaaatggtttatttatttttgttattttattattttgtcttctagcaaaccattttttcaacagataacttttacagacattttaattgggctataccatatatacaatgaagtayatcaatcttaagagtaaagctagaagaattttaaaaatgagtatttccaccaatcagaccgtgaatggagagcattatgcagaaagcttccttttgctgtctcccagtcagtaacccttaaaaagtaaatgctatcccagctactattactggaggttagttttgcttgctttttaactgcacacgcatggaatgatactatctgtgatttttggtgtctgacatttttcgctcaacatagtatctgtgagattcatccatgttgttgtgtgtcacagcagtttgttaatgctaattttccaaagcagtaagtattaatttacattccctccagcagtattagaaagccaattactccctcacccaaacccggggttgtcaaaccttttacttttgattggttttaattgtgatgggtttctagtattatctcacagaggttttaatgcattttcatctcatatgtaatgttttt

SEQ ID NO: 392812 - DNA, 623 bp, Homo sapiens
attaacattctgttttcctttgataacttttacaaatggtttatttatttttgttattttattattttgtcttctagcaaaccattttttcaacagataacttttacagacattttaattgggctataccatatatacaatgaagtatatcaatcttaagagtaaagctagaagaattttaaaaatgagtatttccaccamtcagaccgtgaatggagagcattatgcagaaagcttccttttgctgtctcccagtcagtaacccttaaaaagtaaatgctatcccagctactattactggaggttagttttgcttgctttttaactgcacacgcatggaatgatactatctgtgatttttggtgtctgacatttttcgctcaacatagtatctgtgagattcatccatgttgttgtgtgtcacagcagtttgttaatgctaattttccaaagcagtaagtattaatttacattccctccagcagtattagaaagccaattactccctcacccaaacccggggttgtcaaaccttttacttttgattggttttaattgtgatgggtttctagtattatctcacagaggttttaatgcattttcatctcatatgtaatgttttt

SEQ ID NO: 392813 - DNA, 622 bp, Homo sapiens
taagagtaaagctagaagaattttaaaaatgagtatttccaccaatcagaccgtgaatggagagcattatgcagaaagcttccttttgctgtctcccagtcagtaacccttaaaaagtaaatgctatcccagctactattactggaggttagttttgcttgctttttaactgcacacrcatggaatgatactatctgtgatttttggtgtctgacatttttcgctcaacatagtatctgtgagattcatccatgttgttgtgtgtcacagcagtttgttaatgctaattttccaaagcagtaagtattaatttacattccctccagcagtattagaaagccaattactccctcacccaaacccggggttgtcaaaccttttacttttgattggttttaattgtgatgggtttctagtattatctcacagaggttttaatgcattttcatctcatatgtaatgtttttgaccactttttcatatgcttattagtcatttgatcacactactttgtaaagtattttgctcatttaaaaaattgggttaattttacttattgctttgtagaaattatttatgtcttcccactctgtagcttatgttttcacttcctaaatagtgt

SEQ ID NO: 392814 - DNA, 580 bp, Homo sapiens
ctctgtctcaaaaaataaaaataaaaataaaaataaaaataaataaatacttacattttataatattagctgctttgtaaaactaagcaaaatattaagctaataatgccatatttttcattataaatacttacatttgataatattagctactttgtaaaattaagcaaaatataaaattaggataaaaacatactattgtgcaaatattttccactgtattatttcagtccacacaaattagcattctctaaggaataatgggaacttgctaacttaaagtgatgacggtttgtttaggatttagaagcagggcaatgagcattatacaaaaagtgatgtgttgcrtgttcccgttgtccttccagtggtgtaggagctcaataattaacctcagacagtggataatgacataaaagggaaatttggcacctagaaaataaagcttattggggtgggctaggcattataaatagtacaatctccaataggcctgatttcataagctttgggtcccattctggataaacagtagactgattggaactggcatcttcaaagccaccaaagcattcattca

SEQ ID NO: 392815 - DNA, 580 bp, Homo sapiens
ctctgtctcaaaaaataaaaataaaaataaaaataaaaataaataaatacttacattttataatattagctgctttgtaaaactaagcaaaatattaagctaataatgccatatttttcattataaatacttacatttgataatattagctactttgtaaaattaagcaaaatataaaattaggataaaaacatactattgtgcaaatattttccactgtattatttcagtccacacaaattagcattctctaaggaataatgggaacttgctaacttaaagtgatgacggtttgtttaggatttagaagcagggcaatgagcattatacaaaaagtgatgtgttgcatgttcccgttgtccttccagtggtgtaggagctcaataattaacctcagacagtggataatgacataaaagggaaatttggyacctagaaaataaagcttattggggtgggctaggcattataaatagtacaatctccaataggcctgatttcataagctttgggtcccattctggataaacagtagactgattggaactggcatcttcaaagccaccaaagcattcattca

SEQ ID NO: 392816 - DNA, 580 bp, Homo sapiens
ctctgtctcaaaaaataaaaataaaaataaaaataaaaataaataaatacttacattttataatattagctgctttgtaaaactaagcaaaatattaagctaataatgccatatttttcattataaatacttacatttgataatattagctactttgtaaaattaagcaaaatataaaattaggataaaaacatactattgtgcaaatattttccactgtattatttcagtccacacaaattagcattctctaaggaataatgggaacttgctaacttaaagtgatgacggtttgtttaggatttagaagcagggcaatgagcattatacaaaaagtgatgtgttgcatgttcccgttgtccttccagtggtgtaggagctcaataattaacctcagacagtggataatgacataaaagggaaatttggcrcctagaaaataaagcttattggggtgggctaggcattataaatagtacaatctccaataggcctgatttcataagctttgggtcccattctggataaacagtagactgattggaactggcatcttcaaagccaccaaagcattcattca

SEQ ID NO: 392817 - DNA, 566 bp, Homo sapiens
tgttttgtttaagatatctttgcaaacctgagttcttgaagtcatcctcctagattttattttagaagacttattgtcttatatttcatatttagatttgtaatccacctgaaatttatttttgtgaacagagtgaaatagtagtaaggcctagtattcaactgatgcagcactgtttattgaaacaaccaattttccccattgcattacaatgacatctttatcataattcagatggccttataagtatggatacaatttgaattctcttctattccttggttaatttatctaaacttgcttcaaaaatcacagttttaattaaygtagttttataagacttaaaaatccagtagtgtaacacctccagctttgatcttcaagatcatctttattaatctgggttttttcatttttatatacattttatacttgttttgttgattttcacacacacacacacacaaacacacacaccccattggaattattttgaagctacagattaatctggagagaactgacagatttaaatattgtttcttctaatccataaatatgttaaa

SEQ ID NO: 392818 - DNA, 534 bp, Homo sapiens
taaaaatccagtagtgtaacacctccagctttgatcttcaagatcatctttattaatctgggttttttcatttttatatacattttatacttgktttgttgattttcacacacacacacacacaaacacacacaccccattggaattattttgaagctacagattaatctggagagaactgacagatttaaatattgtttcttctaatccataaatatgttaaacatatccatctatgtaggtctttcttaatttttcttggtaatagctaatagttgttagtgtagagctcatacacaactttcattagtttttctcctagcgtttggtgctttttgatggtcttaaaaacagtatttttcttaaattggtatttgtttgttgcacacacacacacacacacacacacacacaccataattgattcctgtatattgacaatacatccagtgatctcacaaaatgtatttactgtatttgttttaaaaacttatatgttgattgttttcaattttccaagtgcacaattacagc

SEQ ID NO: 392819 - DNA, 534 bp, Homo sapiens
taaaaatccagtagtgtaacacctccagctttgatcttcaagatcatctttattaatctgggttttttcatttttatatacattttatacttgttttgttgattttcacacacacacacacacaaacacacacaccccattggaattattttgaagctacagattaatctggagagaactgacagatttaaatattgtttcttctaatccataaatatgttaaacatatccatytatgtaggtctttcttaatttttcttggtaatagctaatagttgttagtgtagagctcatacacaactttcattagtttttctcctagcgtttggtgctttttgatggtcttaaaaacagtatttttcttaaattggtatttgtttgttgcacacacacacacacacacacacacacacaccataattgattcctgtatattgacaatacatccagtgatctcacaaaatgtatttactgtatttgttttaaaaacttatatgttgattgttttcaattttccaagtgcacaattacagc

SEQ ID NO: 392820 - DNA, 541 bp, Homo sapiens
taaattgcaggatcttcttttctgtggctgaatagtcttgtattgtgtrtgtatgtgtgtgtgtgcatgtgtggttgaatactagtctagtgtgtgtgtgtggctgagtagtattcttgtgtgtgtgtgtgtctgaatagtattctagtgtatgtatgtatgtgttgctgaatagtattcgtgtgtgtctgtgtgtgtgtgtgtctctgaatagtattcgtgtgtgtgtggctgaatagtgtttgtgtgtgtgtgtgtgtgtgtgtgtcacattttctatatccatccacccatccatggactcttaggttgatttcatatcttggctatcgtgaataatgctgcaataaatgtgaaagtgcaggtctctttgacatgttgatttcatttcctttggatatatacccactagtgggattgctgtatcatatggtagtcccatttttaatttttctgaggaactgccatattattttacataatgactgtattcttaaaaaatgcttaaaaagtggatattaagtgttcttgccacaaaaat

SEQ ID NO: 392821 - DNA, 422 bp, Homo sapiens
caaactatgtgtattagtcagggctctctagagggatggaactaatggaatatatatatatatgtrtatatatatatatatatatatatatatatgtaaaggggagtttattaagtattaattcacatgatcacaagttcccacaatagggcatctgcaggctgaggaggaaggagagccagtccgagttgcagaactgaagaacttggagtccaatgttcaagagcagcaagcatccagcacaggagaaagatgtaagctgggaggctaggccagtttctcttttcatatttttctgcctgcttatgttctaccatgctggcagctaactagaattgtgcccacccagattaagggtgggtctgcctttgactcaaacgttaatctcatttggcaacaccctcacagacacgcccacgatc

SEQ ID NO: 392822 - DNA, 533 bp, Homo sapiens
  misc_feature (1)...(533): n = A,T,C or G
acaagttcccacaatagggcatctgcaggctgaggaggaaggagagccagtccgagttgcagaactgaagaacttggagtccaatgttcaagagcagcaagcatccagcacaggagaaagatgtaagctgggaggctaggccagtytctcttttcatatttttctgcctgcttatgttctaccatgctggcagctaactagaattgtgcccacccagattaagggtgggtctgcctttgactcaaacgttaatctcatttggcaacaccctcacagacacgcccacgatcaatactttgtatccttcaatccaatcaagttgacactcagttttaacaatcaaaagtccattcttgtcaacttgaacccatacacattttctgagatcatacgtaattttcaaataaagacaataataaggtcataattatgcctaacataatacaactgtcctatgtacaactggaaatgcaccaatccccaacctagtaactattnnnnnnnnnnnnnnnnnnnnnnnnnnnnnnnnnnnn

SEQ ID NO: 392823 - DNA, 422 bp, Homo sapiens
caaactatgtgtattagtcagggctctctagagggatggaactaatggaatatatatatatatgtgtatatatatatatatatatatatatatatgtaaaggggagtttattaagtattaattcacatgatcacaagttcccacaatagggcatctgcaggctgaggaggaaggagagccagtccgagttgcagaactgaagaacttggagtccaatgttcaagagcagcaagcatccagcacaggagaaagatgtaagctgggaggctaggccagtttctcttttcatatttttctgcctgcttatgttctaccatgctggcagctaactagaattgtgcccacccagattaagggtgggtstgcctttgactcaaacgttaatctcatttggcaacaccctcacagacacgcccacgatc

SEQ ID NO: 392824 - DNA, 533 bp, Homo sapiens
  misc_feature (1)...(533): n = A,T,C or G
acaagttcccacaatagggcatctgcaggctgaggaggaaggagagccagtccgagttgcagaactgaagaacttggagtccaatgttcaagagcagcaagcatccagcacaggagaaagatgtaagctgggaggctaggccagtttctcttttcatatttttctgcctgcttatgttctaccatgctggcagctaactagaattgtgcccacccagattaagggtgggtctgcctttgactcaaacgttaatctcatttggcaacaccctcacagacacgcccacgatcaatactttgtatccttcaatccaatcaagttgacactcagttttaacaatcaaaagtccattcttgtcaacttgaacccatacacattttctgagatcatacgtaattttcaaataaagacaataataaggtcataattatgcctaacataatacaactgtcctatgyacaactggaaatgcaccaatccccaacctagtaactattnnnnnnnnnnnnnnnnnnnnnnnnnnnnnnnnnnnn

SEQ ID NO: 392825 - DNA, 628 bp, Homo sapiens
acaaatgggatcacatcaagctaaaaagcttgtgcacagcaaaggaaacggtcaacaaagtgaaaacgtaacccacaaatgggaggaaatatttgcaaaatacccatctgacaaaggattagaaactagaatatagaaggagctcaaacagtttaataggagataaacaatctgatttaaaatgggcaaaagatctgaatagatatttctcaaaagaagacatgcaagtggccaacagttatatgaaaaaaatgctcaacatcactaacattggagaaccacaaatgaaaaccacaatgtgatagaatcttaccccagttaagatggctttcatccaaaagagaggcaataataaatgctggccaggatggggagagagcagaaacctcatacastgttggtggaaatgtaaattaatatagctactatggaaaacagtatggaggttcttcacaaaactgacaataaaactaccatacaatccagcagtcccactgctgagtatacatccaaaagaaaggaaatcaatatattgaagagatagctgcattcccatgtttatttcagcactcttcacaatagccaagatatggaatcaacctaaatatccaccaatggatgaattgat

SEQ ID NO: 392826 - DNA, 548 bp, Homo sapiens
tccaaatggctttctagtgctttgttcattgagtagctcttgaagcctgtttgcatccctgcccttggattaaatgaaatattaacatatacctagaataattcctgtttaatgctaagttaggaaggtcactgccatgcagaatattctttcccatggaagacatgtggattatgaatatgagttgttaatggctcctcctggaacatgtttgctggcawagttccacacactggaaaagcaggaagtagagttgggactcaaggtatcttaagactagaacagatgtggagccagcctgatcctatgaaggggcctcatatctcttatagtttcccctgtgtgaatacacacatactcagcaaaccagcactgaagacaagcttttccctcttcctctgcatcaggccctttacactggaattgaggggcttagctgtcttttggttatgttttcctaagacctggccacaggaatggggatttaattatagccttaactgttcatccttagtgaggtaagtcatttatagccttaactaattatc

SEQ ID NO: 392827 - DNA, 578 bp, Homo sapiens
ttttggagtaaaatatgtaagaagatggctagtcagggtctagagaaaccaatttcagatggtattttaatgtgttgtttcagaaagatcccttataaaagtaatatatttgacattgttataagcttcagataaattaacttattcagtatttgtgccttatctatttccacatggatttgaagcaaacataaagaactaagttgctccayaatatccatgaaagttttcttgatttattccccacatacatttcatatttttctgctaacaggaaaggccactgacatatttaattaaaatgataaaagactgaatttggagtgtgctcatttgtcattattttctacttattaagagaatttgagccaccttaaaataaaactcgtatcacaaaatggctaaggagaatctcagagatattaaaaaacatatggctatttgaaacaggtagtcctagattataattctttttcagctgcctattactgctgaatttagagaaatgaattagctggcacagtcttcaattttctcaaattgtccagtggagttctcttttgaggtaatggagctat

SEQ ID NO: 392828 - DNA, 578 bp, Homo sapiens
ttttggagtaaaatatgtaagaagatggctagtcagggtctagagaaaccaatttcagatggtattttaatgtgttgtttcagaaagatcccttataaaagtaatatatttgacattgttataagcttcagataaattaacttattcagtatttgtgccttatctatttccacatggatttgaagcaaacataaagaactaagttgctccacaatatccatgaaagttttcttgatttattccccacatacatttcatatttttctgctaamaggaaaggccactgacatatttaattaaaatgataaaagactgaatttggagtgtgctcatttgtcattattttctacttattaagagaatttgagccaccttaaaataaaactcgtatcacaaaatggctaaggagaatctcagagatattaaaaaacatatggctatttgaaacaggtagtcctagattataattctttttcagctgcctattactgctgaatttagagaaatgaattagctggcacagtcttcaattttctcaaattgtccagtggagttctcttttgaggtaatggagctat

SEQ ID NO: 392829 - DNA, 488 bp, Homo sapiens
caaggaagacaacacaagtcttacccaatcacagcatcaagatcaaagattagtttgttttattttttcaagatggcagattagaggcttttagtgtgcctcagccacttggaaatagcaagatagtgcataaagataaactccctaagctttaattcaagaaggaawgtaggaacccaccagaattatgaaggacatcccagatcccggggaggagtgagtgaagtgagtgaagcccccatatgcaaaagaggcagagaacctccctctgtgacttacagggagagctgagtgacctaggccaagggagaacacttcatttctcccaagtcttgaagctaacttggggagaggcttggaaatgctgtgagggaaacacaccaggaaaagctacaggcaatttccaagatttaggaccaaaagcagaaggccacttttaatccaggctgatacaaagtcagccattctttggtgcctcagcagtatgg

SEQ ID NO: 392830 - DNA, 620 bp, Homo sapiens
caaccacagggtatacattcttctcttctgcatacagaacatactccaagatcaaccacatgctcagctataaagcaagtcctattgagttgaaaaaaagagtaaatcatatcaaccatgctatcaaaacacagtggwataaaagtagaaataaataccaaaaaactctcaaaactatacaattacatggaaattaaacgacataatcctgaatgacttttgggtaaacaacaaaattagggaagaaattaaaaaaattctttcatgaaataaaagcagagacacaacataccaaaactctgggatgcagcaaaagtagtgttaagaagaaagtttatagcactaaacacctaacttgaaaagttagaaagatttcaaattaattatctaacatcccacctagaggaactagagaaacaagagcaaactaacctgaaagctagcagaagaaaactaaaagagcacaactgaacaaaattgagacctaaaatttcatacaaagaatcaacaaaatcaaaagtttgtttttgaaagtataaacaagattgttaagctattagctaggttaaaaaagaaagaggagagaagatccaaataagaacaattagaaatgaaaaaga

SEQ ID NO: 392831 - DNA, 620 bp, Homo sapiens
caaccacagggtatacattcttctcttctgcatacagaacatactccaagatcaaccacatgctcagctataaagcaagtcctattgagttgaaaaaaagagtaaatcatatcaaccatgctatcaaaacacagtggtataaaagtagaaataaataccaaaaaactctcaaaactatacaattacatggaaattaaacgacataatcctgaatgacttttgggtaaacaacaaaattagggaagaaattaaaaaaattctttcatgaaataaaagcagagacacaacataccaaaactctgggatgcagcaaaagtagtgttaagaagaaagtttatagcactaaacacctaacttgaaaagttagaaagatttcaaattaattatctaacatcccacctagaggaactagagaaacaagagcaaactaacctgaaagctagcagaagaaaactaaaagagcacaactgaacaaaattgagacctaaaatttcatacaaagaatcaacaaaaycaaaagtttgtttttgaaagtataaacaagattgttaagctattagctaggttaaaaaagaaagaggagagaagatccaaataagaacaattagaaatgaaaaaga

SEQ ID NO: 392832 - DNA, 636 bp, Homo sapiens
tcaccttaactctagacctaactgcaatcacaatggtccatgaagggaacttgcactgtgtttgcaagtgccctgagaaacctccsattctcagcaggattaggctcttggctttcatttctcacgctagttaataggttggctccctaaaatgcttcccccagcatccacttcctaatttccactaatgtctgacacggtaatacagagataatcaagacacaattctcccccagatcagaaaatttcctattagaacagaaacagctactgagtttatgcctgaagtcgtaaagctttcattgctaatgacacatttacatcactcaaatcttacaaaaatctcaggcaacacagtttttcttaaagtagtaatctcaactttctcaatgtcataaacctaatggctgtaagactttttcttattttgagatacacttagtactacttatcttggtgatttataattaaattttaataataataaaatttcaataagatgaaataaaaacaaatgctgtttcaaattactataaaatctcttttaccataaatattatgcttataacttagataattctcctaaaagtttatttttccagagttggatcatgtagtttattattctataaagtt

SEQ ID NO: 392833 - DNA, 621 bp, Homo sapiens
aatcacatcacacttgctcagatgttacattacagcagaatctcatcaaggtttgggtgtaagagtacatcaggttgtatattagaagaggcataatcactattcccatcagacaatatcttatgtgtaggaaaaggcaaggctagggacacttattgtttcaggaatacagtaactcaggcaatacatagagtagaccacgtgctctctcctgttttgtcttcaaagcatcttttgggagagctgcacctcctcacagaatctggggctttgtgaaattatgttggcaggcagaaattagycaacagtttgttactttgcctaacatttctaattctaaaatcaagctctctgcactttcctggtcatttgtggacagcacatgagcagagaaacaagcaacttgcaacacccaaagcacacattgccagctgaggtgctcagtggtcttgtttaagctctgatactgtgagaaagtgtccttcttatggtctatttagtgccatggttttctttttcactgttatgcattttcctgctgattttgcagcttaacacgacccccaagagtaatgctgaagtgttgtgtgaatttccaaagtttaagaaggctgtgatggg

SEQ ID NO: 392834 - DNA, 566 bp, Homo sapiens
ggtgttacgattctacacttttcagaatccatcgttttaaatagtttttacttatgataaatgatatcataaaagagaagggttatttcttcaaattttagtatctaaaaagtttacactgactcacataattatgtttgagcaatgaacaatgaaatgtactgtaatgaaattataaagtcaatggtcactatattttatatttttcctttggttgtatragtaataggaaaatatagaacaagtaaataataataataatattgagaatatttattcactcatttatctattcattcagaaatatatttataattactctattgtcctcacaggtaaatactggtctagaccaaaatgcagtagtcaaaaacagaaacaagatcctgcttgtgtgtgaagtttacattataatgtgaaaggcctgcataatacacaaataaacaaaattatataaacatttacctatcttctaaagtaaataaataggctaatatgatacacaatagtgggttagagaggaaagctgtagagtgggtgattatggaaggtttccatgtagaagt

SEQ ID NO: 392835 - DNA, 551 bp, Homo sapiens
acgacaaaggtcttgcatacctagttarggaaaacaataaaatatcagtggggattaaaaagacatgaccagccataataggaaaacttaatagatgaacagagactaattagcctattaatttctaagtaggtgttggtgttaaatggtttctgttccagtgcttcttctctgcttcttcattcagtcatctcttctgacatacgacagaatcaaaatggtagccacctactctgaatacctcttagatatcctgcagatgagacatttaaaaagtactgtggtccaaactgaactctttataatattttattcctccttcttctctcactcgcattcactacccaatacaaactccataaccaagttaactatctttcaaaatatttagttctttccatttctgaagtttattttttaagcattatctgtcatcaaaattattgccacagctttctacctccatctccatataattctttctaggaacattcagaaacaataattttcttaatatgcaaatgttaaatgacatttcctgatttaaaaat

SEQ ID NO: 392836 - DNA, 551 bp, Homo sapiens
acgacaaaggtcttgcatacctagttagggaaaacaataaaatatcagtggggattaaaaagacatgaccagccataataggaaaacttaatagatgaacagagactaattagcctattaatttctaagtaggtgttggtgttaaatggtttctgttccagtgcttcttctctgcttcttcattcagtcatctcttctgacatacgacagaatcaaaatggtagccacctactctgaatacctcttagatatcctgcagatgagacatttaaaaagtactgtggtccaaactgaactctttataatattttattcctccttcttctctcactcrcattcactacccaatacaaactccataaccaagttaactatctttcaaaatatttagttctttccatttctgaagtttattttttaagcattatctgtcatcaaaattattgccacagctttctacctccatctccatataattctttctaggaacattcagaaacaataattttcttaatatgcaaatgttaaatgacatttcctgatttaaaaat

SEQ ID NO: 392837 - DNA, 580 bp, Homo sapiens
tacttttgtgtgacaaagttgttatcagctcaaaataattaattataactagaagactctttatgttagccctgtggtaactacaaagaaatgaaatacaacagataccacaccaaaaaagagagggaaacaaagcttagcatcatggaaaatcaccaaacaacataggtaaataacaataaaggagaaaagaatctacaaaacaaccagaaaacaataacaaatggcagaagcaaatatttacctataaataatcatcataaatgtaaatgaattaaacactccaattagatatagaatggctgaatagattcaaatatrtatattaaaaaaacaaggcccaactgtatgctgcctgcaagagatttatttctctgttaaagacacacataggttgaaaatgaaggcagagaaaaaaatatttcatgcaaataaagctaaaagcaagcagaagtagtcatacttatatcagataaaataaactttaagtaaaaactgtaaaaatagacaaagaaggtcattatataaagataaaaatattaactcaacaagacaatataaaaatatatatgcatccaac

SEQ ID NO: 392838 - DNA, 580 bp, Homo sapiens
tacttttgtgtgacaaagttgttatcagctcaaaataattaattataactagaagactctttatgttagccctgtggtaactacaaagaaatgaaatacaacagataccacaccaaaaaagagagggaaacaaagcttagcatcatggaaaatcaccaaacaacataggtaaataacaataaaggagaaaagaatctacaaaacaaccagaaaacaataacaaatggcagaagcaaatatttacctataaataatcatcataaatgtaaatgaattaaacactccaattagatatagaatggctgaatagattcaaatatgtatattaaaaaaacaaggcccaactgtatgctgcctgcaagagatttatttctctgttaaagacacacataggttgaaaatgaaggcagagaaaaaaatatttcatgcaaataaagctaaaagcaagcagaagtagtcatacttatatcagataaaataaactktaagtaaaaactgtaaaaatagacaaagaaggtcattatataaagataaaaatattaactcaacaagacaatataaaaatatatatgcatccaac

SEQ ID NO: 392839 - DNA, 589 bp, Homo sapiens
cctgtaatcacaacattttgggaggccgaggtgggtggatcactttagctcatgagttcgagaccagcctgaacgacatggagaaaccctgtttctaccaaaaatacacacacacacacaaataggcatggtggtgcatgcccatagtcccagctacttgggaggctgaggtaggaggatcgcttgagcccaggaggaggaggttgccgtgaactgagattgggccactgcaccgcattccaacctgggagacagagtaagacccaacctaaaaaaaaaaaaaaagattacaggccactgtgaaataatagtcattcatttaaccacagtgatgattaaaagacttcaaaggcaaacacaaagttatatagttgtagcaaaaccttagctcttttagtagagmaaacttagttttaagtgaccaaaaacctaacaaatacaacatgaagaacagaaaattatcttggtaaaacacagaatctctgtttctcaggtaaattatccaaaaggtaaaaaccaaccaaccaaacaacaacaaaaaaaccctttcataatttcctattaagagcaaaccaatactgccccccaa

SEQ ID NO: 392840 - DNA, 589 bp, Homo sapiens
cctgtaatcacaacattttgggaggccgaggtgggtggatcactttagctcatgagttcgagaccagcctgaacgacatggagaaaccctgtttctaccaaaaatacacacacacacacaaataggcatggtggtgcatgcccatagtcccagctacttgggaggctgaggtaggaggatcgcttgagcccaggaggaggaggttgccgtgaactgagattgggccactgcaccgcattccaacctgggagacagagtaagacccaacctaaaaaaaaaaaaaaagattacaggccactgtgaaataatagtcattcatttaaccacagtgatgattaaaagacttcaaaggcaaacacaaagttatatagttgtagcaaaaccttagctcttttagtagagaaaacttagttttaagtgaccaaaaacctaacaaatacaacatgaasaacagaaaattatcttggtaaaacacagaatctctgtttctcaggtaaattatccaaaaggtaaaaaccaaccaaccaaacaacaacaaaaaaaccctttcataatttcctattaagagcaaaccaatactgccccccaa

SEQ ID NO: 392841 - DNA, 547 bp, Homo sapiens
ctgcagcctaatttgagactatattctcacaataaatagctgagtctcagccaaccacagcagctgagtttcagccaatcccaggctgtcaactgttcagaccatgtccctataagataaatgcctcattacatcattctcaaataaggcaaatgctgaactataggcaatcaacttgattctgtatgtcattttgtttatctgtctataaatatcaccttcccatgttactgggtagarcgctctgaacttctcctggttctcattgctactcaattcatgaactattctttccttaaataaactctggtaaatttgtgattctaagtgttttttttaaacaacaccaacatgttataaaaatgaagtaaaaaaaactaggaaaaggttttacaaatatgaaatatagctacaatgtccttaatatttgaagagtatacacatgtgcaaacatacaaataagaaaagaaatgggactttaaagaaataaataaaaggacaaaaagatcgatggagtatttaaagattacttattgaaggaatgtgt

SEQ ID NO: 392842 - DNA, 562 bp, Homo sapiens
gggtgaccttggagaaatttaaactcctctttaactatgtctagacagagtagagaaacatttagaatgctgagagaatgttgcaatggagacggtggtggaatatgagctataatcactactcaccaccatsatgctagtctccactcacacagccttgcatctacaaattactcctccatctaccttgaaatgatttttatgcttggttttgaccattataactatatattgacattattatttgaatacttgtgatgtgtcaatgcagcatatcccttttaatatataatctaatataattgaaagtaacaacataaaaaattttaaccatatacataacgttttatcatcttaaatgtttttcagaactcactgaaacaccttaaagtcactaagattccttattgtaaagcacttctaaaaacatatgcatatcagttctaattccctttaggaaaagaactgcaactttgaggaagaaattggaagagaataaggactgaatagactgtttttctttagaaagagaaccagcaaagcataagcccaaggtataaac

SEQ ID NO: 392843 - DNA, 581 bp, Homo sapiens
ctaaaaacatatgcatatcagttctaattccctttaggaaaagaactgcaactttgaggaagaaattggaagagaataaggactgaatagactgtttttctttagaaagagaaccagcaaagcataagcccaaggtataaacattccagcacactrctgttgttgttttcttctgaatacaataattataacttctctgagcttcaattttcttacctgtaaaataaggaagtgggttagaatgtctctaattccttttcaagaataaattcaatgaagctctctctctctgcagtcttataaagcagcatagtgtaatgctttttatttacttccacaatagagagaaaaatatttctgaatttacactaaccaaaatctatggacctgctgatgtgtcatcatgcccattaaccaagctcattatgtgttaaaagttacagaaatgaagatcccagaggctcttattttctttatatgagaagaacattttgtttgctactaagagaaaataagtcatcatttaattataataaattagttcttatataagaaaattttttctctaattattgcttaat

SEQ ID NO: 392844 - DNA, 636 bp, Homo sapiens
tcaattgtaaatttttattagatttttttactatggttgttctgttttattgtcatccacagttattgttttaaattctctggaaacatatgcaatcagctgtggtccaaaattgcttttcatggaactgctaatcaaaatagcagttttgattagagcaaaacaaaattaattwcatgaaattaagtaattgatggggcaacatttttgtcttttttttttttgagacggagtcttgctctgtcacctaagctggagtgcagtggtgcaatctcagctcactgcaagctccacctcccggattcacgccattctcctgcctcagcctcctcagtagctgggactagaggcatccaccactacgcccggctaagttttttgtattttttagtagagacgaggtttcaccgtgttagccaggatgctcttcatctcccaaccttgtgatccacccgcctcagcctcccaaagtgctgggattacaggcatgagccactgcacctggcaataggaacaacatttttaagactgtattcaaaatgttagttctcccttaaaagattgttttctagattcaaggaattttctttcaaaagttatctatttttatatctattttaatagtttgcaattatt

SEQ ID NO: 392845 - DNA, 636 bp, Homo sapiens
tcaattgtaaatttttattagatttttttactatggttgttctgttttattgtcatccacagttattgttttaaattctctggaaacatatgcaatcagctgtggtccaaaattgcttttcatggaactgctaatcaaaatagcagttttgattagagcaaaacaaaattaattacatgaaattaagtaattgatggggcaacatttttgtcttttttttttttgagacggagtcttgctctgtcacctargctggagtgcagtggtgcaatctcagctcactgcaagctccacctcccggattcacgccattctcctgcctcagcctcctcagtagctgggactagaggcatccaccactacgcccggctaagttttttgtattttttagtagagacgaggtttcaccgtgttagccaggatgctcttcatctcccaaccttgtgatccacccgcctcagcctcccaaagtgctgggattacaggcatgagccactgcacctggcaataggaacaacatttttaagactgtattcaaaatgttagttctcccttaaaagattgttttctagattcaaggaattttctttcaaaagttatctatttttatatctattttaatagtttgcaattatt

SEQ ID NO: 392846 - DNA, 636 bp, Homo sapiens
tcaattgtaaatttttattagatttttttactatggttgttctgttttattgtcatccacagttattgttttaaattctctggaaacatatgcaatcagctgtggtccaaaattgcttttcatggaactgctaatcaaaatagcagttttgattagagcaaaacaaaattaattacatgaaattaagtaattgatggggcaacatttttgtcttttttttttttgagacggagtcttgctctgtcacctaagctggagtgcagtggtgcaatctcagctcactgcaagctccacctcccggattcacgccattctcctgcctcagcctcctcagtagctgggactagaggcatccaccactacgcccggctaagttttttgtattttttagtagagacgaggtttcaccrtgttagccaggatgctcttcatctcccaaccttgtgatccacccgcctcagcctcccaaagtgctgggattacaggcatgagccactgcacctggcaataggaacaacatttttaagactgtattcaaaatgttagttctcccttaaaagattgttttctagattcaaggaattttctttcaaaagttatctatttttatatctattttaatagtttgcaattatt

SEQ ID NO: 392847 - DNA, 620 bp, Homo sapiens
ttttactcatatatatttcttcttaagaaaattgttcagctgaactttgctatgtaaagtttgtgactttttttgttttcaaataattagtaatatttaaatacagaacatacgtaacttcagattcatatttaaattgtataaattaaaaatgtaaaggtttttggatataaattatacctcagtaaagtaatacgtttttttgccaaacctaaaaaaaacagaaaacatgtccaaacatcaacatgaataagttaaatgggtgaaattttttaatatattattatacttcaataaagctaaaaaacacaaatagattttatggatgaagaatggtatattatttgaaaatagtaatagcattaactggcattgtaattgtgtcctgttgtaaatatatagacctaatagcaaagtatgctccaaggaattaaagtgtaacattattgacyagaaatattttctacatttttttccaaatatgagaggcagtctcattaaaacatgttacaaaatgataatctaaaataggcttattcttttgttgtccaacatggctaccaaactatgcaattcagaagctataattttcaaacaagtgaaaatactcaccgatgaaa

SEQ ID NO: 392848 - DNA, 608 bp, Homo sapiens
ctcatataaaccactattaaatattattataattctaatattaatgacaaaaatgtgattcaaagtgcttcattttacatgtatatttatttttgtttcttatataaaggttagaaatatttttaaaaagacaaatcagtaaatcatttagagataacactgtattatatgtcataagcaaaacmaggtttaaactaaactgaaggcagaagaattatcccttcataaataaatataagaaatagtataaaataaaaatgtaaaattataaaaccatcttataactagtcttggcataactagctctataccacaggcaagttacatgagagattattggttttcttccatttaaacatttctgaatctatcaatcagacttatttctgtaatataattacatatccctgtatctgagaaaaatgtctttgaataaaaatttttattagtaaaatagaaatgtgtttggtgtagtgttaaaaccaataaaataaatgtttgattaggcatgtttttctaatatctctcttaaatttcatatcatacaaatagaatttaatgtactacaattgattattaaatgttttctaagagtggatgagtgaaac

SEQ ID NO: 392849 - DNA, 607 bp, Homo sapiens
aaagaaaattactcacagggaaagtaaaaagcagaatactttatgttttattcttcctactctcaattgttaggaattgagggaatatttgttttttgttttgttttgtttttttgtttccttgattttgaatatttgtttcgtgctacgttttaaayaaaatactgacagtagttagtactaatgttttaagccatactttatccaaaatagatgaaatgttcatgagatagagatggaatgggcaattcataaaatctgttaaagaagagatctaaaagcttatatttcacacacactcaaatattgcttaaattaaactttcagcagtaaagtgtggtttatctctcacattttatttactggttttggctttcatttcaaactgagaaatccaatggatttcagtgcctgatcaagtagcctgagagtaaatctttgtctttgattgggcctatgagcctggagaatatttagccagtttttctacatcttcttcctgtactattgcatagattcatattgaaaatctgctctttgaaatctctatttggactttgatgtgtttaactttcttatttgttgtcctcatattgaaaggggagtt

SEQ ID NO: 392850 - DNA, 607 bp, Homo sapiens
aaagaaaattactcacagggaaagtaaaaagcagaatactttatgttttattcttcctactctcaattgttaggaattgagggaatatttgttttttgttttgttttgtttttttgtttccttgattttgaatatttgtttcgtgctacgttttaaacaaaatactgacagtagttagtactaatgttttaagccatactttatccaaaatagatgaaatgttcatgagatagagatggaatgggcaattcataaaatctgttaaagaagagatctaaaagcttatatttcacacacactcaaatattgcttaaattaaactttcagcagtaaagtgtggtttatctctcacattttatttactggytttggctttcatttcaaactgagaaatccaatggatttcagtgcctgatcaagtagcctgagagtaaatctttgtctttgattgggcctatgagcctggagaatatttagccagtttttctacatcttcttcctgtactattgcatagattcatattgaaaatctgctctttgaaatctctatttggactttgatgtgtttaactttcttatttgttgtcctcatattgaaaggggagtt

SEQ ID NO: 392851 - DNA, 541 bp, Homo sapiens
tatttacagtaactgtatataaattcattatggttaaatattctctcttcttctgtcttctttctctgtgtatctatctctatctctctttctctctctctctctctctctgtcagtcagtctttctattattttcccatttacctggataaaagccacaagcaaataatggtgccaaccacagaaaaacacatttttcaaataattgtgaaaaatatcatttctctagagacagggtttccactgaagtgtttaagggaacagtatttaatgtggggaaaaagagaatgactgttttccttggtgatamtaagtcctatttgtcccaattacagcagcaggggagggaaaggtgtacttaaaatgcaaataaactatccaggtgcagagtgtgcatataaaaggttagctggatagtggctgagtaattacagtaattcaggacatgtaaatatatcctgtggaccaaagaaacagaaatatgttataatagaaatggagcaattaagaaaatatgcctttaggtccaataacagaacac

SEQ ID NO: 392852 - DNA, 541 bp, Homo sapiens
tatttacagtaactgtatataaattcattatggttaaatattctctcttcttctgtcttctttctctgtgtatctatctctatctctctttctctctctctctctctctctgtcagtcagtctttctattattttcccatttacctggataaaagccacaagcaaataatggtgccaaccacagaaaaacacatttttcaaataattgtgaaaaatatcatttctctagagacagggtttccactgaagtgtttaagggaacagtatttaatgtggggaaaaagagaatgactgttttccttggtgatacyaagtcctatttgtcccaattacagcagcaggggagggaaaggtgtacttaaaatgcaaataaactatccaggtgcagagtgtgcatataaaaggttagctggatagtggctgagtaattacagtaattcaggacatgtaaatatatcctgtggaccaaagaaacagaaatatgttataatagaaatggagcaattaagaaaatatgcctttaggtccaataacagaacac

SEQ ID NO: 392853 - DNA, 473 bp, Homo sapiens
attttcttcattctcccttcaatcatttcctagaagcttttctcataagagatgttcaagaaatgctgtttgattatttattttcatgtttagtacattaatcacttargtttttttctacttgttattttaaaatgggtagtaataggaattattcttggacaggttagatttggtgaacctccaataatacccagtgaataattgaatactatgcatgtaattaaggctgaaactaatactgttgataagtaattaaaattttcccaacatcatatagaaattcaatattaaggaagagggtagaaaaattatgctattagaggatttttaaagggttattgcttgcactatttcaaagaaattctgatacttttggttattaaattttttacatataataattagatgtaaagcatagagataatatgtctgttttcctgctagagcaatttgcattattgagaaaaagg

SEQ ID NO: 392854 - DNA, 473 bp, Homo sapiens
ctgtttggttattcagaaaaatatttagcagcttttaacayattttccactacattttttggacccttagaaagaagagagggaggccgggcacggtggctcacgcctgtaatcccagcactttgggaagccaagatgggtggatcacctggggtcaggagttcaagaccagcctggccaaatggagaaaccctgtctctactaaaaatacaaaaattagttgggtatggtggtgggtgcctgtaatcccagctacttgggaggctgaggcagggagaataggttgaacccgggaggcagaggttgcagcgagccgagatcgtgccattgcactccagcctaggcaacagcagactgcaaactgagactccgtcaaaaaaaaaaaaaaaaaaaaaaaaagaagaagaaagggaaagcaggtgccagacttgtggagttaactgtgtctatccaaattgcacatttagtgtgga

SEQ ID NO: 392855 - DNA, 473 bp, Homo sapiens
ctgtttggttattcagaaaaatatttagcagcttttaacatattttccactacattttttggacccttagaaagaagagagggaggccgggcacrgtggctcacgcctgtaatcccagcactttgggaagccaagatgggtggatcacctggggtcaggagttcaagaccagcctggccaaatggagaaaccctgtctctactaaaaatacaaaaattagttgggtatggtggtgggtgcctgtaatcccagctacttgggaggctgaggcagggagaataggttgaacccgggaggcagaggttgcagcgagccgagatcgtgccattgcactccagcctaggcaacagcagactgcaaactgagactccgtcaaaaaaaaaaaaaaaaaaaaaaaaagaagaagaaagggaaagcaggtgccagacttgtggagttaactgtgtctatccaaattgcacatttagtgtgga

SEQ ID NO: 392856 - DNA, 473 bp, Homo sapiens
ctgtttggttattcagaaaaatatttagcagcttttaacatattttccactacattttttggacccttagaaagaagagagggaggccgggcacggtggctcaygcctgtaatcccagcactttgggaagccaagatgggtggatcacctggggtcaggagttcaagaccagcctggccaaatggagaaaccctgtctctactaaaaatacaaaaattagttgggtatggtggtgggtgcctgtaatcccagctacttgggaggctgaggcagggagaataggttgaacccgggaggcagaggttgcagcgagccgagatcgtgccattgcactccagcctaggcaacagcagactgcaaactgagactccgtcaaaaaaaaaaaaaaaaaaaaaaaaagaagaagaaagggaaagcaggtgccagacttgtggagttaactgtgtctatccaaattgcacatttagtgtgga

SEQ ID NO: 392857 - DNA, 473 bp, Homo sapiens
ctgtttggttattcagaaaaatatttagcagcttttaacatattttccactacattttttggacccttagaaagaagagagggaggccgggcacggtggctcacgcctgtaatcccagcactttgggaagccaagatgggtggatcacctggggtcaggagttcaagaccagcctggccaaatggagaaaccctgtctctactaaaaatacaaaaattagttgggtatggtggygggtgcctgtaatcccagctacttgggaggctgaggcagggagaataggttgaacccgggaggcagaggttgcagcgagccgagatcgtgccattgcactccagcctaggcaacagcagactgcaaactgagactccgtcaaaaaaaaaaaaaaaaaaaaaaaaagaagaagaaagggaaagcaggtgccagacttgtggagttaactgtgtctatccaaattgcacatttagtgtgga

SEQ ID NO: 392858 - DNA, 614 bp, Homo sapiens
atcctcatctgtaaaaagctttacgatttgatgaaactagctcaattgaaagttgaaaaagcaaatgtaggtggaggaaatactgagaaatcaccagctaacaaggttgattttgtatttcattccaaaactgatattgagaatagacatagaatatggtaaatgtgggagcagagactggatgaatgttagacaaacccttcccttttccctgtgaaaacacagmaagaccacatttttaaggttgtcctttagttgactatgacaatgtgacttatttctcttcactgtatgtatatctatctatctagatagatagatagatagatagatagatagatagatagatagatagatatcttgtgtactctttttatgcctggttcataaactcagccacagaaaatttatttctatttctccatcaccctgctgtgttttgattctccttacaaccttggaatcctggcactgaggatgacagtgacttggttattatcttacggagtacctttttttttttttttccagcgagggggatggaaagttgtgctacttattctacatcagcactgcttttcataattttggaggtcctctcctgctgtgcaact

SEQ ID NO: 392859 - DNA, 614 bp, Homo sapiens
atcctcatctgtaaaaagctttacgatttgatgaaactagctcaattgaaagttgaaaaagcaaatgtaggtggaggaaatactgagaaatcaccagctaacaaggttgattttgtatttcattccaaaactgatattgagaatagacatagaatatggtaaatgtgggagcagagactggatgaatgttagacaaacccttcccttttccctgtgaaaacacagcaagaccacatttttaaggttgtcctttagttgactatgacaatgtgacttatttctcttcactgtatgtatatctatctatctagatagatagatagatagatagatagatagatagatagatagatagatatcttgtgtactctttttatgcctggttcataaactcagccacagaaaatttatttctatttctccatcaccctgctgtgttttgattctccttacaaccttggaatcctggcactgaggatgacagtgacttggttattatcttacggagtacctttttttttttttttccagygagggggatggaaagttgtgctacttattctacatcagcactgcttttcataattttggaggtcctctcctgctgtgcaact

SEQ ID NO: 392860 - DNA, 459 bp, Homo sapiens
ttacccttatgatggcataactgatgaggagctgtatctgcccagcatcctgagactgtatcacatagcactagctttggaaaaaatcaaaattcaaaattcaaagtatggcttttcactttcacaccatcgtaaagtagaaaattataagtgaaaccattgtaagtcaggaactgtctgtacagctttttatcagtgccagaatgatagcataagaaaaggagacatcaaagacacattgattcatttatatatcaattcaccaaacacatagagagcatattctaagggtaatccagtgtgctaggaggtgggggtgcyacaatgaaaagttggatcaaactggcacagtctttgttctcctgaaattaattttatttggaacacagagtcacacataagaagaggagaaaataaaaatggaaagccttggatttggggaaagagacaatcatgaaa

SEQ ID NO: 392861 - DNA, 577 bp, Homo sapiens
aggcaagcatcagagaaaaaaggttttccaggcttcaggtactgtaaagagagaagggtcacattaagtgagcaggcaaatgggcaggagaaaggaagttaatgaggaaaaggaaacagggaccagattatggagggacacagagggcagataggaagtttgaatttaatttgaaagatcgtttccaaaatcctgctttcataaatgatggggaaataagattttaaagagataaatataggaaaaggagcatatttgagtaaaaggaagaaagaaaatgaattcagtgtggacaagttgaagttgaaggtgtgtctgtgtatcacattaagctgatggatgacaggtgggaaggataacgggctttcacttcagcagctgcagtgatcaaataaaaagattttttacctcttaaaatgtccctctgatgagacttagaaaatgacataaaaaataggaacaatacctatagtcattacaaagcatcattgtccaaactaattaatttaaaaggctgtaggccatgygtggtggctcatacctgtatccaagcactttgggagggcgagatgggcag

SEQ ID NO: 392862 - DNA, 713 bp, Homo sapiens
ggatacttcatcactaatgagtgggtagtgtctacagcatggacacactggacaaaggcatgattcacatccccggtgggacagagtgaaataccatgagatttcatcatgctactcaaaatggtgcaccatttaaaacttctgaattatttctggaattttctatttaatattctcagactgtgattgatcacaagtaactacaactgtgaaaagtgaaacttcagataagcaaagattattgtatttctttcaatwacagtaaaaaataaactgctaagatatacgctgacatctctgagaagcccaggtgtgcctccttctctaggccagagctgacattagaagacactgccatggaactgagctccctaggaccactgggcttggattctgtaattgaagaggccagaagatcaacacttatcatcagaaatagtttcaaagtaactgtcataatgagcatcaagattagaaagtcaaccaggtgcctttacccacaaggacctgcaagaatgactaatagatcagaatattgcttaatgttaagacagatgggagctaattaaggtgttaattgatttccctaaccagaaaaaaaattgaaagctgctgagcaaatgtctaacttagctgccatattaaaaattgagatctatacccccttttcagaccaaagctagaaaattctaccactgagaaaaggacttaat

SEQ ID NO: 392863 - DNA, 490 bp, Homo sapiens
aatttatgactaaaatctcaaaagcaaatgcagcaaaaacaaaaatgacaaatgaaacttattaaaattaaagagcttctgcacaggaaaagaaacagtcaacagagtaaacagacaacctagggcaatagtgaaactggaaaagttcccttgttcccttcgcagggcatgcaatgggagtgtggcttgctgcttcttcagtgccctgctkctcaagctcctagcgggagcatgcagatgggcaggttgtggggctctgaccccacagcagtgtctaggggtggaacgtttacagctgaagtcccagtggccgtgtgttacaatatgctgtttcattttagccttctgtaggcagcttgtgctaggcagctcagttaggctccctgccttatcgcaaggacagagggctttctgtatcccggagtttcttgccttggtgcaccagaagaatcagatcacacgtgggctttgagaatgagtgcaaggtttt

SEQ ID NO: 392864 - DNA, 490 bp, Homo sapiens
aatttatgactaaaatctcaaaagcaaatgcagcaaaaacaaaaatgacaaatgaaacttattaaaattaaagagcttctgcacaggaaaagaaacagtcaacagagtaaacagacaacctagggcaatagtgaaactggaaaagttcccttgttcccttcgcagggcatgcaatgggagtgtggcttgctgcttcttcagtgccctgctgctcaagctcctagsgggagcatgcagatgggcaggttgtggggctctgaccccacagcagtgtctaggggtggaacgtttacagctgaagtcccagtggccgtgtgttacaatatgctgtttcattttagccttctgtaggcagcttgtgctaggcagctcagttaggctccctgccttatcgcaaggacagagggctttctgtatcccggagtttcttgccttggtgcaccagaagaatcagatcacacgtgggctttgagaatgagtgcaaggtttt

SEQ ID NO: 392865 - DNA, 591 bp, Homo sapiens
aggtcatctaagctccgtaagcttgtttccttatccataaagtggagataataatggtacctacttcaaaagggtattggatcaaggagataatgtttgtagagctcttgacacagatttggcatatagccagcgctcaataaataatagctattactattcttcactttattaaatgatcaccactcctgtaaatagtaaaaaccytttatgaatcttttaaaaggtttttttaaagaaaatactgaagaacaacaagaaaataaaagttgcctcaagttctaacatttataatgattaaagaaagaagtggaaattacagcctcttctccaatcccaccctctgttagttaaatgcttttaacagaatcttttccaacattttgctgtcctttattacatatctgtaggtctgtatctatttctttttatataaaagtgagattaccctatgcatattggtctggaacttgtttatttcacttgacaatacatcatggagaatgttcctaaccagttcattcatgtctactaggttcttatttgaacagctacatcgtactttatggtacaagtacgcagtcaattatt

SEQ ID NO: 392866 - DNA, 591 bp, Homo sapiens
aggtcatctaagctccgtaagcttgtttccttatccataaagtggagataataatggtacctacttcaaaagggtattggatcaaggagataatgtttgtagagctcttgacacagatttggcatatagccagcgctcaataaataatagctattactattcttcactttattaaatgatcaccactcctgtaaatagtaaaaaccttttatgaatcttttaaaaggtttttttaaagaaaatactgaagaacaacaagaaaataaaagttgcctcaagttctaacatttataatgattaaagaaagaagtggaaattacagcctcttctccaatcccaccctctgttagttaaatgcttttaacagaatcttttccaacattttgctgtcctttattacatatctgtaggtctgtatctattyctttttatataaaagtgagattaccctatgcatattggtctggaacttgtttatttcacttgacaatacatcatggagaatgttcctaaccagttcattcatgtctactaggttcttatttgaacagctacatcgtactttatggtacaagtacgcagtcaattatt

SEQ ID NO: 392867 - DNA, 597 bp, Homo sapiens
gttcacacagctggaccaactcagagcatttctgctgttttcccctctgagcttccccaactcaaatggccaattatgcacacagtagaaggaggtcaggagcatctctagggagaattcctaacaggtatcagtccccagagacaaatgcagaaagytgctgatgctctttagccttcccttgcttaggaagaacatcccccacaacaagaccccaaggtcaccccaaactccatcagttttgattctcgtctgcaagtatgatgacacatactccttgagaacagccaggaccaagccttccaggcaagcaggcctcccgtcctcagcctccaccaacagcaggtgaaacaagattaaaagggacaacaaggcagacatgagggagacagtaattcaattcagtaggcattgaagttataactgagcttctgaggaggggtgggggtggggacagagagtaagtagtcttctcattttgccctgacaaatgtgtgcagcatcatctcctatcactgtctcctggcaggaaatgaaggtacttgaggaaagggtgagcataggttagggggactaacaagggataatgcagtcccc

SEQ ID NO: 392868 - DNA, 583 bp, Homo sapiens
ggtacattcattaaaattgatacacctacatttatagaccattatcacccagagtccataatttacatgagggttcacttttggtgttgtacattctgtgggttttgacaaaagtataatggtgtgtattcattattatagtatctgagtattcttactgccctaagaatcctctgtgccgcacctgttcaycccccgttttcccctggcaaccactgatctttttactatttacatggttttttgttttctggaatgtcatatagttggaatcatatcagtatgcagtcttttcagattgtcttcttttacttggtaatatacatttaagcttcttccatgtcttttcatagcacaatcatagcttaccacggcctcgatctccagggtccaagcagtctttccagcttagcttcctgagcagctgagactacaggctcatgccaccacacctggctaattttctttagttttttgtagagacagggtctcactatggtgtccaggtaggtctggaacccttggcctcaagtgatccttctaccttggccacccaaagtgctgggattataggcatgaacca

SEQ ID NO: 392869 - DNA, 583 bp, Homo sapiens
ggtacattcattaaaattgatacacctacatttatagaccattatcacccagagtccataatttacatgagggttcacttttggtgttgtacattctgtgggttttgacaaaagtataatggtgtgtattcattattatagtatctgagtattcttactgccctaagaatcctctgtgccgcacctgttcatcccccgttttccccyggcaaccactgatctttttactatttacatggttttttgttttctggaatgtcatatagttggaatcatatcagtatgcagtcttttcagattgtcttcttttacttggtaatatacatttaagcttcttccatgtcttttcatagcacaatcatagcttaccacggcctcgatctccagggtccaagcagtctttccagcttagcttcctgagcagctgagactacaggctcatgccaccacacctggctaattttctttagttttttgtagagacagggtctcactatggtgtccaggtaggtctggaacccttggcctcaagtgatccttctaccttggccacccaaagtgctgggattataggcatgaacca

SEQ ID NO: 392870 - DNA, 583 bp, Homo sapiens
ggtacattcattaaaattgatacacctacatttatagaccattatcacccagagtccataatttacatgagggttcacttttggtgttgtacattctgtgggttttgacaaaagtataatggtgtgtattcattattatagtatctgagtattcttactgccctaagaatcctctgtgccgcacctgttcatcccccgttttcccctggcaaccactgatctttttactatttacatggttttttgttttctggaatgtcatatagttggartcatatcagtatgcagtcttttcagattgtcttcttttacttggtaatatacatttaagcttcttccatgtcttttcatagcacaatcatagcttaccacggcctcgatctccagggtccaagcagtctttccagcttagcttcctgagcagctgagactacaggctcatgccaccacacctggctaattttctttagttttttgtagagacagggtctcactatggtgtccaggtaggtctggaacccttggcctcaagtgatccttctaccttggccacccaaagtgctgggattataggcatgaacca

SEQ ID NO: 392871 - DNA, 539 bp, Homo sapiens
tgtactgtctagctgtctggaaaaacatatgcagtgcagctgcctggaaaacagattttggagagaaggtagcaggcctgtggttgggtttggagttgagcagctgaatcacagaccgactctggtgtaaaacagctcccaaaacaatggttctcaactagagctgcacaattttttttcttttctttttttttttgagacagagctttgctctgtcacccaggctagaacgtggtctcgactcactgcaacctccgtctcctgagttaaagcgattctcctgctcagcctcccaagtagctgggattacaggcacccgccaccacgcctggctaatttttgtatttttagtggagacrgggtttcaccatgttggccaggctggtctcgaactgctgaccttgtgatccacccgcctcggcctcccaaagtgctgggatcacaggtgtgagccactgcgcctggcccagagctgcataatgttattacctgggaagctttagaaattagtgatgtctgagtcccagccccagaagtat

SEQ ID NO: 392872 - DNA, 539 bp, Homo sapiens
tgtactgtctagctgtctggaaaaacatatgcagtgcagctgcctggaaaacagattttggagagaaggtagcaggcctgtggttgggtttggagttgagcagctgaatcacagaccgactctggtgtaaaacagctcccaaaacaatggttctcaactagagctgcacaattttttttcttttctttttttttttgagacagagctttgctctgtcacccaggctagaacgtggtctcgactcactgcaacctccgtctcctgagttaaagcgattctcctgctcagcctcccaagtagctgggattacaggcacccgccaccacgcctggctaatttttgtatttttagtggagacagggtttcaccatgttggccaggctggtctcgaactgctgaccttgtgatccacccrcctcggcctcccaaagtgctgggatcacaggtgtgagccactgcgcctggcccagagctgcataatgttattacctgggaagctttagaaattagtgatgtctgagtcccagccccagaagtat

SEQ ID NO: 392873 - DNA, 541 bp, Homo sapiens
aattactccctaaaaacttgagtgattctaatcatgtacatttattggaaaggattctcactaaagtaaggggaaattaaagtaggctacattatgaagtcttagggatatcccttggtacattagcataatctccaagaaatgtggtctttcaaggggctctctgggatcccaagccacatggggaagaattttccttcaaccctcctccatgacaaaggtgcttcagggtaccaaggtcaaagaatgagaggctatgaggcagccattgcagaaggttccaygaagagcaccagaattatttccacagtgtgcaattaccatcgcttcagctatttgtctgaccctggcccaaagggagaacctacaccttttggcatcttctggtccacaccattgctggttccctcgctgaggcctgcctcagtgcctcacagtttccacaaggaagtgatgtatctcatcatatccactaattgttttggctttctttctatcccagtgcatgaaagaatatgtttccttgctctcttgaaacttg

SEQ ID NO: 392874 - DNA, 541 bp, Homo sapiens
aattactccctaaaaacttgagtgattctaatcatgtacatttattggaaaggattctcactaaagtaaggggaaattaaagtaggctacattatgaagtcttagggatatcccttggtacattagcataatctccaagaaatgtggtctttcaaggggctctctgggatcccaagccacatggggaagaattttccttcaaccctcctccatgacaaaggtgcttcagggtaccaaggtcaaagaatgagaggctatgaggcagccattgcagaaggttccacgaagagcaccagaattatttccacagtgtgcaattaccatcgcttcagctatttgtctgaccctggcccaaagggagwacctacaccttttggcatcttctggtccacaccattgctggttccctcgctgaggcctgcctcagtgcctcacagtttccacaaggaagtgatgtatctcatcatatccactaattgttttggctttctttctatcccagtgcatgaaagaatatgtttccttgctctcttgaaacttg

SEQ ID NO: 392875 - DNA, 552 bp, Homo sapiens
caacaacaaaaaactggtactaatatgtgattataacaaggctgcaggatatgaggttaatatacaaakgtcaatgaacaagtaaaatttaagttaaaaacatgaaatacttaggtataaatctaacaaaatgtgtgtaagatttatctgagtgatacgaaactctgcttaaaaaaatcacagaaataaataaatggaggaatattccatgttcatggatagattcaataatgtcaaaataccagttcttcccaacttgatctatagattcaatgcaatcctaatcaaaatcccaccaagttattttgtggatattgtggatattaacaaactggttccaaagtcaatatggagaagcaaatgacccagaattgccaacacagtactgaagtagaacaaagttggagggctgacagtacccaacttcaagactttaactataaagttacagtaattaagccagtgtggtattaatgaaaggacagacaaattaagcctgtgtggtattagtgaaaaaacagacaaataattcagtggcacaaaatagagatc

SEQ ID NO: 392876 - DNA, 552 bp, Homo sapiens
caacaacaaaaaactggtactaatatgtgattataacaaggctgcaggatatgaggttaatatacaaatgtcaatgaacaagtaaaatttaagttaaaaacatgaaatacttaggtataaatctaacaaaatgtgtgtaagatttatctgagtgatacgaaactctgcttaaaaaaatcacagaaataaataaatggaggaatattccatgttcatggatagattcaataatgtcaaaataccagttcttcccaacttgatctatagattcaatgcaatcctaatcaaaatcccaccaagttattttgtggatattgtggatattaacaaactggttccaaagtcaatatggagaagcaaatgacccagaattgccaacacagtactgaagtagaacaaagttggagggctgacagtacccarcttcaagactttaactataaagttacagtaattaagccagtgtggtattaatgaaaggacagacaaattaagcctgtgtggtattagtgaaaaaacagacaaataattcagtggcacaaaatagagatc

SEQ ID NO: 392877 - DNA, 576 bp, Homo sapiens
cagacttcaagcgtggaaacttcaaaaactaatggcttcttagacttctgggggaaaaatgggtagcgtggagtccagcatttccaagttgaatcatgaatttacaacttactaattgtgtgaccttaagcaactgacaccrttactcaagttaagtaactaagtccaactaattctaaatgccatctacaagacggagacatcaaataaataaagcaggtaaaaaaaattaccctgcatttagtagaacttgagaaacataagtccttccttccaccctcttcttccctttcttctaagtaatcacatgcttgctcctgaaaacttctgaatgcaactctgcctcttcctgtctctcttttggtctagtgcttttagcgctttggggagagagttttacggtcttgatgacagctttcttttcgtgttttttgtccctttattaagaagagaggacattcactctctattttaatttgcaacatactatggggatggaccctaattgcactttggtggaggaaagggaaagacaacccaggtggggaatagtagggtgcaccccaaataaacagg

SEQ ID NO: 392878 - DNA, 576 bp, Homo sapiens
cagacttcaagcgtggaaacttcaaaaactaatggcttcttagacttctgggggaaaaatgggtagcgtggagtccagcatttccaagttgaatcatgaatttacaacttactaattgtgtgaccttaagcaactgacaccgttactcaagttaagtaactaagtccaactaattctaaatgccatctacaagayggagacatcaaataaataaagcaggtaaaaaaaattaccctgcatttagtagaacttgagaaacataagtccttccttccaccctcttcttccctttcttctaagtaatcacatgcttgctcctgaaaacttctgaatgcaactctgcctcttcctgtctctcttttggtctagtgcttttagcgctttggggagagagttttacggtcttgatgacagctttcttttcgtgttttttgtccctttattaagaagagaggacattcactctctattttaatttgcaacatactatggggatggaccctaattgcactttggtggaggaaagggaaagacaacccaggtggggaatagtagggtgcaccccaaataaacagg

SEQ ID NO: 392879 - DNA, 576 bp, Homo sapiens
cagacttcaagcgtggaaacttcaaaaactaatggcttcttagacttctgggggaaaaatgggtagcgtggagtccagcatttccaagttgaatcatgaatttacaacttactaattgtgtgaccttaagcaactgacaccgttactcaagttaagtaactaagtccaactaattctaaatgccatctacaagacggagacatcaaataaataaagcaggtaaaaaaaattaccctgcatttagtagaacytgagaaacataagtccttccttccaccctcttcttccctttcttctaagtaatcacatgcttgctcctgaaaacttctgaatgcaactctgcctcttcctgtctctcttttggtctagtgcttttagcgctttggggagagagttttacggtcttgatgacagctttcttttcgtgttttttgtccctttattaagaagagaggacattcactctctattttaatttgcaacatactatggggatggaccctaattgcactttggtggaggaaagggaaagacaacccaggtggggaatagtagggtgcaccccaaataaacagg

SEQ ID NO: 392880 - DNA, 511 bp, Homo sapiens
attatattcaccctgtagttctatagaacgctagaaattattcctcttatctagctgtaatttcatatccattaaccagcctctccttattccccctctttccgacctttcctaccatgtaataaccacagttctattctctacttctatgagctcaactatttagctcccacatatgagtgagaatatgcagtatttagttttctgacctgcgttatttcacttaacataatatcctccattcttatccatgttgccctgaataacaggaattcattcyttttttatggctaaatagtatttcatttgaatgaatgaatgttgtatataccacattttatttatccattcatctgctgatagacatctagtttgattctgtatcttggctattgtgagtagtgctgcaataaacatgagggtgtagatatctcctcaacataacaatttcctttccattggataaatacccagtagtgggattgctgagtcatacgataattctactttt

SEQ ID NO: 392881 - DNA, 591 bp, Homo sapiens
gaaaacaattatctacatattgttacatgcttttccattttcctttaatatccagtcatcaaagtacctacctagtaaaaattctactcatctttcaagtttcaactcaagcattacctcctctgtgttgcctaccctgatcctcccaacaaattctattttgttgcttctattatttcttaatcatgtattcattacagcagtgatcacatttcattacagttgttttgtttgcacatctctatttgtattagtctgtgagatccgtgagaaaagaaactatgtttactcttttctgcaccttcatcctctggcataggccctaagcacatatttgtagctcaagggatgctttttgaatgaagaaagcattttaggaagtcaggaatggcaccgtcaaatgaaagagggggatgaaagaggtgtgttctgtggttacagaacaaagccatactgcaacaatatatactataaggaaccaatgatgacctataggtttttgaacatagtatggtggtgctattgggatgggcagtggggagaaartaggtaagtatggaaaagacataggttttaggagaaggataactt

SEQ ID NO: 392882 - DNA, 525 bp, Homo sapiens
tctcatatttttacttcagctaaaaggtaatagtttgtttaaaataatagcaacaatgtattaaattatatatgtgtatgtatatatattatatatatatgcttgtatatgcttagccataagtgaaatgaatgatgccaatgttacaagggatgaaagggaggaattaaaattattttattattattttttcttcttttttttcttttttcttttactttaagttctggggtacatgtgcagaacatgcaggtttgttacataagtatacatgtgccatggtggtttgctgcacctatcaacccgtcatctaggttttaagccctgcaggcattaggtatttgtcctaatgctctccctcctcttggcccccacctcctgacaggccctggtgtgtgatattcccctccctgtgtytatgtgttctcattgttcaactcccacttatgagtgagaacatgtggtgtttggttttctgctcctgtgttagtttgctgagaatgatgacttccagcttcatccatg

SEQ ID NO: 392883 - DNA, 525 bp, Homo sapiens
tctcatatttttacttcagctaaaaggtaatagtttgtttaaaataatagcaacaatgtattaaattatatatgtgtatgtatatatattatatatatatgcttgtatatgcttagccataagtgaaatgaatgatgccaatgttacaagggatgaaagggaggaattaaaattattttattattattttttcttcttttttttcttttttcttttactttaagttctggggtacatgtgcagaacatgcaggtttgttacataagtatacatgtgccatggtggtttgctgcacctatcaacccgtcatctaggttttaagccctgcaggcattaggtatttgtcctaatgctctccctcctcttggcccccacctcctgacaggccctggtgtgtgatattcccctccctgtgtctatgtgttctcattgttcaactcccacttatgagtgagaacatgtggtgtttggttttctgytcctgtgttagtttgctgagaatgatgacttccagcttcatccatg

SEQ ID NO: 392884 - DNA, 578 bp, Homo sapiens
tagctcttccttgggctcacctgtgttttggcttccacctatgatagcacttgaagaattggttctgttgctaagaaaagttgaaacatcactggcctgtccaaccacccccacrctcccattatatagatgtaacaaactgaggccaaatgccttgccattagcagagtgctcttcaggtacactagaatcctaaaagcaaatttgcttgtaagagggaacaaaaagattcaaactcaccctgaaggtttataaaaccaatattgggttcttccatgaaaatggaagttgagagatcagagaagaaaggataaaagcattgagatggtggtggaagaatggtttattgagaggaagccacaaggattaaaaataaaaatggatttctgtgacttcatgcttctgcataggatgggttctgctgttggccatgagcttttctcttgcaactctcagtagggtggactcctctgagtcagtgagaatgggacagttgaatcaacagtcaaaacgctcaattatctgtaagttctgctttgctgccatgatgtttacactcagcctacttcattgaaagt

SEQ ID NO: 392885 - DNA, 606 bp, Homo sapiens
cagcgtaatcgttggcccttcaccttcaactcaactttaatctagttcttggcttcctttttctgctaagaactaccaggatggacaggatttagccctatttcatttccctccttgcctgagctctggaggaagtgctaatgagcagtggcttggctaaaaggaaggctgcagawgtcaggtgagacatcattaaactggacgcccaaggccagcccagtcccacatcactgcactgcctatactgtccatctacatgcccagggccctgcagccttatggtccacagccttcctcccccactcccacaggtagtgagagctttatctataggagcatcctgtccaaaggcaaacttagatcactggaatctattagcatagattctactagcaaacagtgctgagtctttactgtgagccaggcactgagctaaacatttcacatgctattttgtttaatccccacatcagccttctaagggaggtaccattattagtcccattttctgttcaggaaactgaggcttagaggggttaagtactttgtctaagcttgtgaaggctgagctgggactggaacctgagacctgcttttcatagcaca

SEQ ID NO: 392886 - DNA, 606 bp, Homo sapiens
cagcgtaatcgttggcccttcaccttcaactcaactttaatctagttcttggcttcctttttctgctaagaactaccaggatggacaggatttagccctatttcatttccctccttgcctgagctctggaggaagtgctaatgagcagtggcttggctaaaaggaaggctgcagaagtcaggtgagacatcattaaactggacgcccaaggccagcccagtcccacatcactgcactgcctataytgtccatctacatgcccagggccctgcagccttatggtccacagccttcctcccccactcccacaggtagtgagagctttatctataggagcatcctgtccaaaggcaaacttagatcactggaatctattagcatagattctactagcaaacagtgctgagtctttactgtgagccaggcactgagctaaacatttcacatgctattttgtttaatccccacatcagccttctaagggaggtaccattattagtcccattttctgttcaggaaactgaggcttagaggggttaagtactttgtctaagcttgtgaaggctgagctgggactggaacctgagacctgcttttcatagcaca

SEQ ID NO: 392887 - DNA, 606 bp, Homo sapiens
cagcgtaatcgttggcccttcaccttcaactcaactttaatctagttcttggcttcctttttctgctaagaactaccaggatggacaggatttagccctatttcatttccctccttgcctgagctctggaggaagtgctaatgagcagtggcttggctaaaaggaaggctgcagaagtcaggtgagacatcattaaactggacgcccaaggccagcccagtcccacatcactgcactgcctatactgtccatctacatgcccagggccctgcagccttatggtccacagccttcctcccccactcccacaggtagtgagagctttatctataggagcatcctgtccaaaggcaaacttagatcactggaatctattagcatagattctactagcaaacagtgctgagtctttactgtgagccaggcactgagctaaacatttcacatgctattttgtttaatccccacawcagccttctaagggaggtaccattattagtcccattttctgttcaggaaactgaggcttagaggggttaagtactttgtctaagcttgtgaaggctgagctgggactggaacctgagacctgcttttcatagcaca

SEQ ID NO: 392888 - DNA, 588 bp, Homo sapiens
ccaccacactttgcaaactgtaaagtgctatctaaatataagtttagtatcatggctatcattgccctatccctaccttccctgcattggcgtaagcatattcctggataagactgtccgtcatttggtttgttgaaaaggctgatgtgaaaggaatcacctttccctgccaccccacctgcctactgctgtcatcacattgttgtatttataatgaatttgttcttttctttcttagttacttgggtcttgtatggtctgtggagatcattttatttctattccatttccatctgctcaccagtttgtactaattgaggtgctgcctgtctttccattcctctgcttacctggcgctaactgagaaactaatctagtctgttctttccactggaagatgasaggcttccaggaaggtcaagaatatgtgattaacatggacacaggaaggggaacatcacacactggggactgttgtggggtggggggagcggggagggatagcattaggagatatacctaatgcaaaatgacgagagttaatgggtgcagcacaccaacgtggcacatgtatacatatgtaacaaa

SEQ ID NO: 392889 - DNA, 507 bp, Homo sapiens
gttcctgtcagattaaaggtttgcatctgttttttccagctcagggaattttttattattattctttcattattccaaacttattccttattaattctgtctttattgaatctctgttaaatagaaattgaaacttttaaatctatactttattttttctgtttcttcacactttctacacctttacccttctcaatgcattctgacagaatggtttgcttgatctttgaggttgctaatctgttcattattgtgtycatgcaaaaaaaaaaacaaacagatttttcttaaaaactgaaaatcagcaaaatttacaagagcgttctcttgagtatatattgggtcacagattcctaagtgttgctgtgaacatatttttaccttcatttttttttcctgtgatttggaagggacagtactggttaaatgttttaaccaaccatcttgaatctggaatctgctgattgctatctagtatgtgtcaggttccatgttaatcactggata

SEQ ID NO: 392890 - DNA, 557 bp, Homo sapiens
tatgtgtttgctgctgtggttgtgtgatataatgtttgcttttcttgatgttgttacatatcttacaactaatgacctgttttttaaaatgtacacatatgacactaatgctgaaacactaatgttatgctttattaggatttaatgtatggcaaataatgttcaatttttagcctccacttattatgcagatttaaaaaaaactcgtactatttgctcagccccagaaatgcacagaaacaaataggggaaggcttttgacctcagtgaattcccaggttattggcaaagtcaaaggggctacagaagtcagtatcatagtgcactgagggaagctrtagccactatgaggccatgtaaaaagaaatgtctaattcagggggtgaagcagttgggagaggggcatttcagacaaaggcccctggaggagatggattctgagctgagtgtctagggaaagcaggatttagttaggtgaagaaggtatagggaagacctttcagtcagggaaaacacagtctacaaagcagggatgcaagagagaacatttgaaacac

SEQ ID NO: 392891 - DNA, 557 bp, Homo sapiens
tatgtgtttgctgctgtggttgtgtgatataatgtttgcttttcttgatgttgttacatatcttacaactaatgacctgttttttaaaatgtacacatatgacactaatgctgaaacactaatgttatgctttattaggatttaatgtatggcaaataatgttcaatttttagcctccacttattatgcagatttaaaaaaaactcgtactatttgctcagccccagaaatgcacagaaacaaataggggaaggcttttgacctcagtgaattcccaggttattggcaaagtcaaaggggctacagaagtcagtatcatagtgcactgagggaagctatagccactatgaggccatgtaaaaagaaatgtctaattcagggggtgaagcagttgggagaggggcatttcagacaaaggcccctggaggagatggattctgagctgagtgtctagggaaagcaggatttagttaggtgaagaaggtatagggaagrcctttcagtcagggaaaacacagtctacaaagcagggatgcaagagagaacatttgaaacac

SEQ ID NO: 392892 - DNA, 572 bp, Homo sapiens
tgtttatctttactaagccattattacactatcttcaacttgcatctgttactattcacaggagaaaatatcatcattctatatgaacagagagcaatcctaagcaaaamgtagtataaatgcatttgtctatagcaacgttccctttaaacatgttgggagtaaaagccctcaaattccttcattgtttataagtccaaagctaggattccttcaagaatctggctgctcaaaaccgcaaattaaaaagcatgctctgaatgtagctggatatcttccaccatactactttaaagaatatattaaagagagggcgaaggcaggtggtacatttttaactggcagttgaatatttgcttggcttaaagccaaatgaaataacataatcctaactgactggtacacttctccctgatctctttaaattcctctttttcaaattctttatgacatttaaatattcttagaattcatcaatattataaaacaatgagatggttataaatgaagacagctagtaacaataatcataataaaatgactatcttttactgaggatttagaatgttctt

SEQ ID NO: 392893 - DNA, 572 bp, Homo sapiens
tgtttatctttactaagccattattacactatcttcaacttgcatctgttactattcacaggagaaaatatcatcattctatatgaacagagagcaatcctaagcaaaacgtagtataaatgcatttgtctatagcaacgttccctttaaacatgttgggagtaaaagccctcaaattccttcattgtttataagtccaaagctaggattccttcaagaatctggctgctcaaaaccgcaaattaaaaagcatgctctgaatgtagctggatatcttccaccatactactttaaagaatatattaaagagagggcgaaggcaggtggtacatttttaactggcagttgaatatttgcttggcttaaagccaaatgaaataacataatcctaactgactggtacacttctccctgatctctttaaattcctctttttcaaattctttatgacatttaaatattcttagaattcaycaatattataaaacaatgagatggttataaatgaagacagctagtaacaataatcataataaaatgactatcttttactgaggatttagaatgttctt

SEQ ID NO: 392894 - DNA, 555 bp, Homo sapiens
tagaaaatcgaatggaagtaaaggagtcattgaataaatgtaaaacagataggcttttgtggtggtttgagtgattgacctcttcttcgaagaaaaaaaaatagatttaacactcagtcttggtgagtgaaattagagattaaaagaaaaaaaaataccctgcctggagaattaagaaaagggtaagtacattaagtttgagccagcattgttaccattttatgataagccacctgtacacactatatagcactaaacgttagatggcctccatgccctaaaacacttgaagtcgatgcktatctcaaagaagtggaatttttaaccccaaactgaaaaatgtatatccttctcataaaacctttttgacattcaaatactaagacgacagataatttagacccattaattaccaactacaccaactttactactattacataccaaccttgaaaatgaacaacagcatatgtactaggagagtgaaaagccttgaaagaacgcttgaggaaatccaacagaaagccttaaatacgtattgccaaaggtgattac

SEQ ID NO: 392895 - DNA, 581 bp, Homo sapiens
aagccattgtaagttgtctaaggaataatacctttaggtcaagtgccccaaaggccaaaagtcactccttctataatagaaaatacacacatgccaccttcataatgctaacagacaaaccaaagaggataactttatacaggtagaaaatcgaatggaagtaaaggagtcattgaataaatgtaaaacagataggcttttgtggtggtttgagtgattgacctcttcttcgaagaaaaaaaaatagatttaacactcagtcttggtgagtgaaattagagattaaaagaaaaaaaaataccctgcctggagaattaagaaaagggtaagtacattaagtttgagccagcattgttaccattttatgataagccacctgtacacactatatagcactaaacgttagatggcctccatgccctaaaacacttgaagtcgatgcgtatctcaaagaagtggaatttttaaccccaaactgaaaaatgtatatccttctcataaaacctttttgacattcaaatactaagacgacagataatttagacccattaattacyaactacaccaactttactactatt

SEQ ID NO: 392896 - DNA, 565 bp, Homo sapiens
gctgtgccactcatgtggctaaaccatgtgggttcaggagtcaacctgatgtatacgttacctcctggcatgagggtgagagtggatggggaaaccatcctaatgacatcctaatgacaccttgtatgtgatgatagaacggtgattttaatcccctctgaacagtaaaattctaagggaaaggagtaggaaatttccttttaataggacagaaaattgagatatttaatttcaattaaatacaaataataattctgtatgacaaaatcctcctgctataggttgaattatatccccctccaaaaaaaatgatgtcataagtcctagcccctagtatttcasaatatgaccccatttgggagttgggtattcatagagataatcaagttaaaatgaagtaattagggtgggccctaatcctgtagcagagctgtccttatatataggagaactgtagccactgacagacacattcagatgtaaagacacagggaagacaccatctacaagacaacgaatgccaatgctaccagaagctagaagagaggcaggaacaaattctccc

SEQ ID NO: 392897 - DNA, 573 bp, Homo sapiens
gttttataaaggggagtttccctgcacaagttctctctcttgccatgtaaaacgtccctttgctcttccttcatcttctgccatgattgtaaggcctccccagctatgtggaactgtgagtccactaaacctctttcctttataaattacctagtgttaggtatgtctttattagcagtgtgagaacagactaatrcaactagttttccactaatgtccgtttttcattctagggtccaactcaggattcacatagcatttaattgctgcatcttcttagtttgctccaatctggcacagttactcaatttatcattgtttttcatgaccttgaactttttgaatactgctcagaaaatgtgtagaatgtacttcaagttgagtttgtctgatgtgttcccatgattagactaagattatgagacttggagaagaatatcacacaggtgagacggccctctcaatgcatcatatcaggaggtatatgatattgctatgctttattattggtgatattcaccatgacggcttggttaagatagttttctgccagttttctccactgtaacgtgt

SEQ ID NO: 392898 - DNA, 573 bp, Homo sapiens
gttttataaaggggagtttccctgcacaagttctctctcttgccatgtaaaacgtccctttgctcttccttcatcttctgccatgattgtaaggcctccccagctatgtggaactgtgagtccactaaacctctttcctttataaattacctagtgttaggtatgtctttattagcagtgtgagaacagactaatgcaactagttttccactaatgtccgtttttcattctagggtccaactcaggattcacatagcatttaattgctgcatcttcttagtttgctccaatctggcacagttactcaatttatcattgtttttcatgaccttgaactttttgaatactgctcagaaaatgtgtagaatgtacttcaagttgagtttgtctgatgtgttcccatgattagactaagattatgagacttggagaagaatatcacacaggtgagacggccctctcartgcatcatatcaggaggtatatgatattgctatgctttattattggtgatattcaccatgacggcttggttaagatagttttctgccagttttctccactgtaacgtgt

SEQ ID NO: 392899 - DNA, 603 bp, Homo sapiens
gttgagtttgtctgatgtgttcccatgattagactaagattatgagacttggagaagaatatcacacaggtgagacggccctctcaatgcatcatatcaggaggtatatgatattgctatgctttattattggtgatattcaccatgacggcttggttaagatagttttctgccagttttctccactgtaacgtgttatcttttttcttttcctactctattgattagaagtgagtcactagttccagcccttacccaaggaaagaagaaataagctttccttcctggaggaagatgaatcaaagaattcatgaatgtgatgaaaaccaccatagtaattaatgaatattttggagagatactttggggtgatgcaaaagtttctcctttaacttttgccccactcattttagcattcattaatgtgtcttggctgagcaattattactatagtgttctagyaataattttctatttctcttattcttcctgtatttattattgggaatttctgtgtaagaaagtttttattcatttatttatataaatatgctctcataaatatctatttcctcctttgggctataatccagtactactgct

SEQ ID NO: 392900 - DNA, 596 bp, Homo sapiens
acagttggtacacaatcaaccagttgaaaagctggcagaagtaccctctggggaaaaaacggtgtgttagaaagcaacggtttaaatgagcaaggccgcaggaactcaatgactcagtgaaggtggaaaaccaaggaggtgaaccatggctcctaagtattcatcaggcagccaccatgttcatgtgtcaaggtgtgtgattgtttctagtcttagaaaggtcaactctttctttcctagaccactggtaatttagctaaaaagtaaggtattactgttagtcagggcctttggcctgctttgttcatcacatttcctatgttggtggatggaattgttgaggctgcccaccagacaagttcaaygtggatacattaagaaaaccctaaatacaggtctgcatccagaagcagtatttgagagtctattgagattagtgctgtaaaattgagcaagtaaacaaataaaaaaaggtaaaaataaaaagggaaaaggcaagtaagactctgggaagtacaactaatttgtggatcagtcatcctgtttctaccacacagtgcagtgtgatctgacaaggctgagcaaatgtggttttg

SEQ ID NO: 392901 - DNA, 596 bp, Homo sapiens
acagttggtacacaatcaaccagttgaaaagctggcagaagtaccctctggggaaaaaacggtgtgttagaaagcaacggtttaaatgagcaaggccgcaggaactcaatgactcagtgaaggtggaaaaccaaggaggtgaaccatggctcctaagtattcatcaggcagccaccatgttcatgtgtcaaggtgtgtgattgtttctagtcttagaaaggtcaactctttctttcctagaccactggtaatttagctaaaaagtaaggtattactgttagtcagggcctttggcctgctttgttcatcacatttcctatgttggtggatggaattgttgaggctgcccaccagacaagttcaatgtggatacattaagaaaaccctaaatacaggtctgcatccagaagcagtatttgagagtctattgagattagtgctgtaaaattgagcaagtaaacaaataaaaaaagrtaaaaataaaaagggaaaaggcaagtaagactctgggaagtacaactaatttgtggatcagtcatcctgtttctaccacacagtgcagtgtgatctgacaaggctgagcaaatgtggttttg

SEQ ID NO: 392902 - DNA, 507 bp, Homo sapiens
tgaatgtatgccagttaatcagataggacagtttgtttttaccctttttaaaggaatattgaccaacactatggacaatatttttaacaattttttccacatgaacttggtcttaattgtcctcaatgaaagccaaagccatactcttgacatgcaactttgagagagttgttctgagaggcccacattaaggagtttcaaacatggaactttccgattgtttaacttgatgacaaaaatggcatgtcccttaacttaaactccacaaacaatarttgttttactaaatgtttcaggcttctagtcataattttacagtaggttctaggaagacaatgtgtattaattaccaaaaaagagcctgaaatgggtcagcccatggacctagcaattctgtgtctggaaatgtaccctatccatgtcagtaataatctggaacacccaaaagtgttcattgcagtattatcgataatagttaaagaaggaaaagaacaaacatgcgattgt

SEQ ID NO: 392903 - DNA, 507 bp, Homo sapiens
tgaatgtatgccagttaatcagataggacagtttgtttttaccctttttaaaggaatattgaccaacactatggacaatatttttaacaattttttccacatgaacttggtcttaattgtcctcaatgaaagccaaagccatactcttgacatgcaactttgagagagttgttctgagaggcccacattaaggagtttcaaacatggaactttccgattgtttaacttgatgacaaaaatggcatgtcccttaacttaaactccacaaacaataattgttttactaaatgtttcaggcttctagtcataattttacagtaggttctaggaagamaatgtgtattaattaccaaaaaagagcctgaaatgggtcagcccatggacctagcaattctgtgtctggaaatgtaccctatccatgtcagtaataatctggaacacccaaaagtgttcattgcagtattatcgataatagttaaagaaggaaaagaacaaacatgcgattgt

SEQ ID NO: 392904 - DNA, 586 bp, Homo sapiens
aaaactacatattcacaagtaattactaatacaaataaaatggaattgtaataccakgtacttctcaaattttcatcagttgacattatatcaaaacattttcttaaaaatatatctgagagggtttacaatcaggtccccaaccctcctgaaatggagcctttttgagaagccagtcatacattaattctattgaaataaatgctttacttgttagtgaaacaaaacagtttgaattcactaaggtcacactaaaccaggcctttgctctgaagttaaaggctctaaatagatcaaaacattctttgtaatgcccttgagtgatccatttattgcacttaactttctcattacttaaatgcaaaagactaaagttgaagaggccaaaacatacatttggaaatttcagaaaacataatagactgagagagataatgtaatacttctccatgaagaggagagcttgaatatctcgattacagcttcgctatccatccctcacacattcaaatccaatatatgtgcttttattaatgcgtgagtgcagagatatgcataactgaacattgataaggcaggatactgt

SEQ ID NO: 392905 - DNA, 586 bp, Homo sapiens
aaaactacatattcacaagtaattactaatacaaataaaatggaattgtaataccaggtacttctcaaattttcatcagttgacattatatcaaaacattttcttaaaaatatatctgagagggtttacaatcaggtccccaaccctcctgaaatggagcctttttgagaagccagtcatacattaattctattgaaataaatgctttacttgttagtgaaacaaaacagtttgaattcactaaggtcacactaaaccaggcctttgctctgaagttaaaggctctaaatagatcaaaacattctttgtaatgcccttgagtgatccatttattgcacttaactttctcattacttaaatgcaaaagactaaagttgaagaggccaaaacatacatttggaaatttcagaaaacataatagacygagagagataatgtaatacttctccatgaagaggagagcttgaatatctcgattacagcttcgctatccatccctcacacattcaaatccaatatatgtgcttttattaatgcgtgagtgcagagatatgcataactgaacattgataaggcaggatactgt

SEQ ID NO: 392906 - DNA, 586 bp, Homo sapiens
aaaactacatattcacaagtaattactaatacaaataaaatggaattgtaataccaggtacttctcaaattttcatcagttgacattatatcaaaacattttcttaaaaatatatctgagagggtttacaatcaggtccccaaccctcctgaaatggagcctttttgagaagccagtcatacattaattctattgaaataaatgctttacttgttagtgaaacaaaacagtttgaattcactaaggtcacactaaaccaggcctttgctctgaagttaaaggctctaaatagatcaaaacattctttgtaatgcccttgagtgatccatttattgcacttaactttctcattacttaaatgcaaaagactaaagttgaagaggccaaaacatacatttggaaatttcagaaaacataatagactgagagagataatgtaatacttctccatgaagaggagagcttgaatatctcgattacagcttcgctatccatccctcacacattcaaatccaatatatgtgcttttattaatgcgtgagtgcagagatatgcataactgaayattgataaggcaggatactgt

SEQ ID NO: 392907 - DNA, 445 bp, Homo sapiens
aactctttccacccaactggtgatgtatgagtaatgggttgcctcttggatagcatcagctgtggatggtatgcacttccccaggtttgtgggaattctagctccttctgtcttcttctactcatgagaacatgttggaactcaataaagtaaaaaaaaaaaaaaagaaaggaaaagaaagaaaaaaagcattattaaaaggaatactttaaattcacaaagcatttgccagttttagtgcagttttacttgtgataagaaaatgttgatttttataactaatsccaaatttatatctgcctatacaatgtaatcgagatttgctgatctataaaatcatttttatcttattgtcacaatcatcaataccttaaaaaagcctattttaattacacaaataatatgttattaatccagaaacacgaaaaataaattaaaaacattt

SEQ ID NO: 392908 - DNA, 595 bp, Homo sapiens
gtgggtacaactatagctcgtcttaaaaccataccagaggctcagcagaaccctggtatgaggtgggcccaagayattttcatattgcatttcagagattaaacaaaaaataaatttttaaaggatgtcatatggcttccttttatctgtccctatgacacttacccatacctgaattgaatcctgccttttcagaaagaaactcttggccatagaagaaattgcatttgaagaaagcaaaacactgctagagccagaagtctacctgaatggtaggagtctataagcgtgcgggcaaagaggcttaagtcccaaccttgccaatggacacagagcccatgtggccatgggtattttaaagacattttctaatcctgtgagaacttttcatccatctgtgtgatttttgatttaagtgaccagctgctttaaaatagactaagcatatgacatgggcagtcagtacatcttgagaagcaggagggattttattcatttaaaattgcatttccctcattcctgcatgactcacccctgtattatctttcatcagagcatcaaatgttactaagaaagactgtttccactccactct

SEQ ID NO: 392909 - DNA, 620 bp, Homo sapiens
tgtggaaaacagtttggcagtttcttatgatgttaagcatgcacctgtcacatgacttaccaatcctactcttaggtatttaacgaagtcagttgaaaactttacagaaaaaacatgtacgtgaatgtttataaaagccttatatataattgctaaaaaattggaaacagctcagatgtcctgcaacaggagaatggattagcaaactgtagtttatgcttgaaatgcaatatgtatcagcaataataaggaacaaattgttgattcatgcaatgacatkaatgagtgttaaattcattttatttaataaaagaagttagatatagaagtctacatgttatgtgagtccttttatataacattttatataacattctggaaaaggcaaagttatagccatagaaagcagatcagtattgagggagtagagacagaggtgaactacaaaggagtagcatgagagattttaggggtgatgctctgaatggtattgtgatggtgtatatatggctctatgcatttgtcaaacccatagaaccgtacatcacaaaaaattaattttacttatgcaaattcaaaaaattaaccaggatgccaggggaagccaagaaggaacacag

SEQ ID NO: 392910 - DNA, 608 bp, Homo sapiens
aataaatttgctgatgggtgaaactatgagtcttagcttttcaytgaagccttcttatttgtgattagcatgtaccttcacacatttcctttaacttctttctctggggctacaggaaactaggagtgaatagatgtggaaaacattaatggtaggatgacaggtgctggcattgtaaaggagaggtaaacagcattctcttgagtagaatcctcagagtggaattgctgtgtcatatggttagtttatgtttaaccttgtaataaattgccaaattgttttccaaagtggctgccccattttacatttcctccatcaatatctgaggtttccaatttctccacatcctcaccaatacctggcattgtttctttttgattatactattttagttgatgagtagtgggaatgtaaataattcattatgcttttaattagcatttgcctaatgactaattatgttgtgcatgtttttacatgcatattggccatttgtatattttcttggtggaaacctgtattcaaataatttgcccatttttaaaatctgagttttgtcttcttattgagttggaagagttctttacatattctgaatacaagtattt

SEQ ID NO: 392911 - DNA, 593 bp, Homo sapiens
tgattttgctttttctcccactactttgtatattcaactgttatattagaaaatgattgcagaagtagagaaaaaaaggctaaagcgaggaaaaccaaaaatatagtagttttttgctcattcatttattctctcagaaaatatttatagagcaccatcaagaactaggtactgtagagagtacaaataatatttttttctcatttgagaggaaaaataattgctgatttatcttaaaacaataaagtcctcatgtaagaaaaaagatttttaaatgatcacacacaaccatttcccrtttgtacaaatatctgggcaccatgttgcacaaccctacagggtgacttctgcatgtggacctctgtaagaggtccctgctgatgttgtgtaatgcccaaacaactcagtcctctgaggcagctctttgatacttactttaggggcaatgaaaaaatgactctttgtctctaatatatttctctagaaatttttcttctttgttaatatgataaccaaattccctcttactcttaaaaaaaatcaaccaaaaaaatttcaaattaatccagatgctctaaagtgttttctcttta

SEQ ID NO: 392912 - DNA, 593 bp, Homo sapiens
tgattttgctttttctcccactactttgtatattcaactgttatattagaaaatgattgcagaagtagagaaaaaaaggctaaagcgaggaaaaccaaaaatatagtagttttttgctcattcatttattctctcagaaaatatttatagagcaccatcaagaactaggtactgtagagagtacaaataatatttttttctcatttgagaggaaaaataattgctgatttatcttaaaacaataaagtcctcatgtaagaaaaaagatttttaaatgatcacacacaaccatttcccatttgtacaaatatctgggcaccatgttgcacaaccctacagggtgacttctgcatgtggacctctgtaagaggtccctgctgatgttgtktaatgcccaaacaactcagtcctctgaggcagctctttgatacttactttaggggcaatgaaaaaatgactctttgtctctaatatatttctctagaaatttttcttctttgttaatatgataaccaaattccctcttactcttaaaaaaaatcaaccaaaaaaatttcaaattaatccagatgctctaaagtgttttctcttta

SEQ ID NO: 392913 - DNA, 611 bp, Homo sapiens
tttatggcttatctattaataaaataagtcattatggtattttacacaaccctttcttgccttgttttagaacaactacctaattttctattttcaaaatcaactacttattatggaataactaatatataaagttattaaattttcaaaggacaaatggaagcatattaatggaattcattttttaaaggtgaatgattattttccttattaaaaacataatgcttgttagttgaagggtcaagaatatacatatgagaaaaaaatgtatttcataatccmacaccccaaaccagagactgttaacatttcattatataacatactataagtatatatatgggggggtggtgtatgagatgattttatgcaaattattttgtaacttacctttttcacttaatatttagtattttctcacattactaaatatgtttctacattatctctttgtggttgtgaatagaatgtcagattggatgtatcttcatttactaaacttccaatatatgccatgctgtgataaacattcttatgctaaattgggaacacaaccataattatttcattagcgtaaatttataaaagtaaatctctctgtatgaatagct

SEQ ID NO: 392914 - DNA, 504 bp, Homo sapiens
ttgtatatgatggaatactctacagtaacaaatayacgcaatcacaggaatgaatctcataaatagaaattgaagtaaaagaaaccagatgcaagaaacacagttaataatttacctaaataaaattttaaaaacaggccaaagtaatctatagtgataaaagtctgaatagcgctttgtgtgtgcacggtatggcggtgggtaaaaggagaggcatagggaggcacctgagcgctagtaatctctatttcttaatcttgatggtggttaaccaggtatgattacatggtaaaaacactttgagctgcacccttatagtttttgcacttttctgtctgcgtgctatatgtcaacaaaatatttactttaaaaaatactctattaaaatttatgaagcaggtcaaagtgtgatagcaggaaccttaaagtgtgaatgacaaagaaggcctagatcaatcataaaagattttattttcgtttgtatggcatgttgcatggcaaagt

SEQ ID NO: 392915 - DNA, 504 bp, Homo sapiens
ttgtatatgatggaatactctacagtaacaaatatacgcaatcacaggaatgaatctcataaatagaaattgaagtaaaagaaaccagatgcaagaaacacagttaataatttacctaaataaaattttaaaaacaggccaaagtaatctatagtgataaaagtctgaatagcgctttgtgtgtgcacggtatggcggtgggtaaaaggagaggcatagggaggcaccygagcgctagtaatctctatttcttaatcttgatggtggttaaccaggtatgattacatggtaaaaacactttgagctgcacccttatagtttttgcacttttctgtctgcgtgctatatgtcaacaaaatatttactttaaaaaatactctattaaaatttatgaagcaggtcaaagtgtgatagcaggaaccttaaagtgtgaatgacaaagaaggcctagatcaatcataaaagattttattttcgtttgtatggcatgttgcatggcaaagt

SEQ ID NO: 392916 - DNA, 578 bp, Homo sapiens
gtctaatcatgaaaaaacattaaacaaactcaaaatggggacagtctataaaatacctaaccagttctcttcagaacagttaaggtcctgaaaggcgaggagagaagaagaaacaatcacaacttggaggacattaatgcactaaatttaatatggtttcataagttgggctgaaaagaaaaggacagtagaaaagctgggatatgagaatacagtctaagtgtagtactaatgttaagtttttaatctctaacttgatggcatggttatagaaaatagaaacattaggcaaagctgggtgaaaggtatacaggaactctactatctatacaacttttctgtaaacataaaattatttcaaaataaaactaatataagaaaaaaacatggccgacataacagatagaatggatatcttctctagtctatgaaaaaccctgtgtccyacattcacttgctttgtgatataataaaagggggaaaggaagggatgatagaaacattattcctcttaataaacttggattttaaaatcttttatcttttcacagcataaaacattccacttaggatgctat

SEQ ID NO: 392917 - DNA, 569 bp, Homo sapiens
ttccaaagttctgggatcacaggtgtgagccaccgtgcccagcccagagcaatacttttaaatggcagccatatcatgttacttatccaatgttttctcatttcacttaagtataatccaaattctttacaatggttcaccatctaccaccacgaacatcagatttcatctctcctctgtcccttctgctcactctcctccaccacactagcctccctacttctccttgagcatgccaagcaagccctcattcayggctttgtcacagactgttctctctgccttaaaagctcttcccctccatatgcacatggctcactctctaacttccttcagattccttctgtgacaatcttacataaaatagaacacccacctcccccatcactttctatggccaatactctgctttattttctctttactacctttatttctctattttcagcacaattctaaattaagcgggtattttaaaaaattatctgcctcctccattagcatataaaatttatgaggacagggattattttcttagtcatcttcagtcttctgcccctacagcagta

SEQ ID NO: 392918 - DNA, 630 bp, Homo sapiens
atattatcgtaagactgacccatcacaagtgcactcgttgcatcttcaaaaaggtttgaccaagaagaatctcctgatgtactatgagttgatgtcaggctagtagccactggtgtctctgctggcttttctgcaggtttctcttgtttagttgcactagcagttgcaggttcagakgacactgtcactgatactggagtgatgaatgcaggtgtgaaagggggagccaaagcagggacaggggttggagcctgagccacagttgttgttgtggaggaagtaactgctgtagtgctggcaggagctgactgctgagttgtagctagtgctggtgtggacactgctttgggttcggtcaccataaccaccacaaagtttttctcatcaattttatattctttgagagcagtatcatcattgaggattttgcctgcataaattaatgtttgacctgctaccagagaggcaactttccccttttcagattccgtcttctctttcagtgctttcactgtctcctcggggtcaatgtctatcttgcaggtcaaggtctgcggctggagggtcttcagggtgacctgcatggtgccactgtacagctcggctgcagggcctgtgccaggtgctggc

SEQ ID NO: 392919 - DNA, 609 bp, Homo sapiens
acggttttgattcatggcacaatactttctaaataccaaggtgatttattatttgaacattgtgggttctttgtgtaattgtatactccagttcttagacatacagcatacaatttattaatggatagmaggttttgcttttgaacttcagacctgttaaatggaggaaaagcagtagtttgaatctttggaatttacatcacaatagtgcaatatttagtatgttaaaaatttgaatttcataatcaaatttttcttatagttttgtttgatcattgatgatctattatcattctttgggacatgttggcaaagatgcggtcttcttcacgtagatgtccttagaaggttacaatttataatacattggaactttgtatggaacaacaacagagacttcaggtaaagttgctacttcctaagaattcagaatccaaaagagagaataacagatgtattcctaagcatacttctctatacaaagaaaagaaatgaagaatattaagaggtcagggtatatacagataagatagaagttgaaaagagatggagtcaacctgaaaaagctcagaaaataggtatacgtgaaacatttagacataagataca

SEQ ID NO: 392920 - DNA, 596 bp, Homo sapiens
ctagctccatgatttagaatgttttgttctccaactttgggcctccggagacaacagaaaataattttagtgaacatcctttggcttacctaaaaatgtttcaataattcagaggttcagaaaatttaactatcagccttatcagccttgtgaacccctagataattcaagtcggggctaaatctctattttagactgtgagagaacagataagtctccagcatagattgagaaggtgataatctctaagttccttttagctcctaggatttgctgatccacaggctgcctctgtcagatgagcygagtggtctcctagtcttcaaaaacaaacaaaaggaagaacatcaacagaaaaccagaatgtgatgcaactcaataaacatctccacatatcctacttggctattatgtatttgatctcttctcattttgtttgagttggcaaatcatgatagcaccaagattgttatttcaactctaaaatgaaatctctagagggataaaaggagagttctgagttcagatgtaataagtattaagataatcagtagaggcttagaaaagaaaatagtaacaacattggaacaattaag

SEQ ID NO: 392921 - DNA, 359 bp, Homo sapiens
gagttctgggatcttgctcaagaaagaatttggggtgagtccayagagtaaagtgaaagcaagtttattaagagagtaaaggaatgaaataatggctactccagaagcagagcagccatgagggcagctggttgctgatttttatggttatttcttgattatatggtaaacagggggtgaattattcatgcctccctttttagaccatgtaagtaaattcctgacattgtcatggcatttctaaaccgtcatgtcgcaggtcaaagtataacagtgaggatgaccagaggtcactcaagtcgccatcttggtttcagtaggttttggccaacgtctttactgcaacctgttttatcagc

SEQ ID NO: 392922 - DNA, 359 bp, Homo sapiens
gagttctgggatcttgctcaagaaagaatttggggtgagtccacagagtaaagtgaaagcaagtttattaagagagtaaaggaatgaaataatggctactccagaagcagagcagccatgagggcagctggttgctgatttttatggttatttcttgattatatggtaaacarggggtgaattattcatgcctccctttttagaccatgtaagtaaattcctgacattgtcatggcatttctaaaccgtcatgtcgcaggtcaaagtataacagtgaggatgaccagaggtcactcaagtcgccatcttggtttcagtaggttttggccaacgtctttactgcaacctgttttatcagc

SEQ ID NO: 392923 - DNA, 359 bp, Homo sapiens
gagttctgggatcttgctcaagaaagaatttggggtgagtccacagagtaaagtgaaagcaagtttattaagagagtaaaggaatgaaataatggctactccagaagcagagcagccatgagggcagctggttgctgatttttatggttatttcttgattatatggtaaacagggggtgaattattcatgcctccctttttagaccatgtaagtaaattcctgacattgtcatggcatttctaaacygtcatgtcgcaggtcaaagtataacagtgaggatgaccagaggtcactcaagtcgccatcttggtttcagtaggttttggccaacgtctttactgcaacctgttttatcagc

SEQ ID NO: 392924 - DNA, 359 bp, Homo sapiens
gagttctgggatcttgctcaagaaagaatttggggtgagtccacagagtaaagtgaaagcaagtttattaagagagtaaaggaatgaaataatggctactccagaagcagagcagccatgagggcagctggttgctgatttttatggttatttcttgattatatggtaaacagggggtgaattattcatgcctccctttttagaccatgtaagtaaattcctgacattgtcatggcatttctaaaccgtcatgtcgcaggtcaaagtataacagtgaggatgaccagaggtcactcaagtcgccrtcttggtttcagtaggttttggccaacgtctttactgcaacctgttttatcagc

SEQ ID NO: 392925 - DNA, 638 bp, Homo sapiens
ttttcagttccacatggctggggaggcctgtcagtcatggcggaaggtgaaaggcatgtcttacatggcggcagacaagagaagagagtttgtgcagggaaattcccccttttaaaaccatcagctcttgtaagacttattcactatcacaagaacagcctgggaaagacctgcccccatgattcaattaccttccagcaggtcactcccacaacatgtggggacacagccaaaccatatcaccttgcattgatacatgtaatctcaatgaaataatgcaaattttctttatgctttgtttctctgttctgccaactgaagctgagtggataatttggggtattattttcctcggtagtcacagtaatcactttcaaccagatggcacaaatatatgaggaagcagttgtgcaaagtgaagagggttcttggatctygcacagctttcctgtgctctgcattttgaagatttctgagtcagcaagccctgaagacatcaccaataggatgctatttcttcccagggtctgcccatatttctcatggctccaagaactacattccacaagattatttttatgtccaaccatacatctagaaacttgtttagatggaaataatgacaaaaatgacccaga

SEQ ID NO: 392926 - DNA, 638 bp, Homo sapiens
ttttcagttccacatggctggggaggcctgtcagtcatggcggaaggtgaaaggcatgtcttacatggcggcagacaagagaagagagtttgtgcagggaaattcccccttttaaaaccatcagctcttgtaagacttattcactatcacaagaacagcctgggaaagacctgcccccatgattcaattaccttccagcaggtcactcccacaacatgtggggacacagccaaaccatatcaccttgcattgatacatgtaatctcaatgaaataatgcaaattttctttatgctttgtttctctgttctgccaactgaagctgagtggataatttggggtattattttcctcggtagtcacagtaatcactttcaaccagatggcacaaatatatgaggaagcagttgtgcaaagtgaagagggttcttggatcttgcacagctttcctgtgctctgcattttgaagatttctgagtcagcaagccctgaagacatcaccaataggaygctatttcttcccagggtctgcccatatttctcatggctccaagaactacattccacaagattatttttatgtccaaccatacatctagaaacttgtttagatggaaataatgacaaaaatgacccaga

SEQ ID NO: 392927 - DNA, 637 bp, Homo sapiens
tcttggaacattttattccttaggcaaatgtggcccaaaataaaattgcatatccccaaaatgcatctgttccagggttcaggcccatccacagaaaaatacagctgcctctctgtggcttaccctgcctggatccctaatgaggctctgctaatctccaattcctataagcggctcatttcttactacatcttgggcttacagctgtgtggcttttgggatgagattctttttaaaaagctatgttgaaaggcaatccatttgatcagagggaaatatcttgacttcatcttttatcagttcccagtgatacttgggctgcaggtggaatcctgcagttaccttgtttaacattaaaaataatttcattttcctgccagaagctggtcttactgatcatgttgctgcttagaagcctggagaatcatgacttttacctaacttttagtagtgagagatggcagataattctaattaagaaagaaacacagatggggagaaagactgcaatgcagaacaagaataacaagtctactgtagyagtgatttccataatccaaaagagaaagggaaattgtcaaggcagcaggaattgctttcaagagcagtctctactccaagaataaagcagagatgc

SEQ ID NO: 392928 - DNA, 578 bp, Homo sapiens
actgaagacaattattctaagtgaagtaactcaggaaaggaaaaccaaacatcatatgttctcacaagtgggagctatgaggatgcaaaggcataagaatgatacaatggactttggggactcgggggaaagggtgggagtgggtgagagataaaagactatacattgggtacagggtacactgcttgggtgatggttgtaccrtaatcttagaaatcaccactaaagaacctagtcatgtaaccaaataccacgtgttcccaaaaccccattggaaaaaaaaaaagaaataaacgaaaggaggaacaattaaaaacaaaacagtcctgttctagaaaaaggaatacaaagcataactaaactaggcatgaacttttgggtggtaaagttacaaagaaaataaagacttgattaccgtaaagatcaggactgtgattacttttgaaaagagggaagggactgtgattaggatagatggatggaaaaattatattttttaaacctagctatggttataagggtatttggtttattttatatagtcttctatatctgttagattttacaataaaaagttt

SEQ ID NO: 392929 - DNA, 578 bp, Homo sapiens
actgaagacaattattctaagtgaagtaactcaggaaaggaaaaccaaacatcatatgttctcacaagtgggagctatgaggatgcaaaggcataagaatgatacaatggactttggggactcgggggaaagggtgggagtgggtgagagataaaagactatacattgggtacagggtacactgcttgggtgatggttgtaccataatcttagaaatcaccactaaagaacctagtcatgtaaccaaataccacgtgttcccaaaaccccattggaaaaaaaaaargaaataaacgaaaggaggaacaattaaaaacaaaacagtcctgttctagaaaaaggaatacaaagcataactaaactaggcatgaacttttgggtggtaaagttacaaagaaaataaagacttgattaccgtaaagatcaggactgtgattacttttgaaaagagggaagggactgtgattaggatagatggatggaaaaattatattttttaaacctagctatggttataagggtatttggtttattttatatagtcttctatatctgttagattttacaataaaaagttt

SEQ ID NO: 392930 - DNA, 487 bp, Homo sapiens
gaactcataagttgagccaaagascccactcagataggaaactgaatgaattataaaggacgattattctttcaatattaaataacattttcctcctcacagtattttttttttaattatgaagaaaaatggctgatgttagactaaaaaccaaaaggattgtactttcatgtaagatagaggccaccactcagaatgtttgcaaagctgcacattgctgctaagggcaccagtgtacctcttctaagcaccccaaaatctgtagaaaatgcagtttataaagaaaatgttgaattgccttgaactcttaaaattgccagttctaagcttgtaaactaagagtttggatggtcctcaaatacttgtgtatcataaaaatgtgttcaaagcaaatgaatacatatttttcatcctgtattaggccttattttaagtatagctgtcaaattatgagactatcctagtgctattcgcaaatacttattta

SEQ ID NO: 392931 - DNA, 453 bp, Homo sapiens
tgtgatgtatgtattcacctgtgaaactatcaccacaatcaagtacccagcaatgggattgctggatcatatgatagatttatttttagttttttgagrcacttccatactgttttctatagtggctatactaatttacattcccaccagcagtgtactagcatcttaatgagaatttttgttaagctatctgagaggaaagcagggtgagatgatcaattcataatatctgtttaattttgtcttccatttgcctaagaaaactttacaaagtattttttaaaatcccaaatacccagtttttttaatatttcaatagacattaggtacttatactctttatgaaagtaacaaaacctctttcttattttcaaacatatagttagttgttccaaaaataagaatgcctctctctctctccttccttcctccctgcctgcctcttttcgtttt

SEQ ID NO: 392932 - DNA, 610 bp, Homo sapiens
tagcactaatgaactacttttgtgagctccctaagcaataagggtaatatttgaattgaaatggacactggttctttatttctagatgtgcaaaaattgcacttgtaggtgtgagattctgtccttgcctgtgattgatatgttttttgaagaaagaatgccattctgctgaaattcccagaatttttattttagtcttatcctcatctcaatcttaatttcctatacttattggacattttaggtgttctctttcctttaaagtaatgagagaaagataaataacaaatataaatatgatttatctatagaacttttaatttttaatgtcttagccttaaaagaatctatcacagaaatagtagtcccaggaatgtctgtctacacaacattaaataattagcagttcaccaacataataccaccamcaacaacatcacaaatcatataattgagagtctgcagtagaagcagacatcagtaattatagcaaaggttatttaattatagatgaaataagtgctatgaacaaaatgagtatataacgcagacctgatcagtctgggagggacaggggagttaggggaggtgcagggctagggaagcttct

SEQ ID NO: 392933 - DNA, 512 bp, Homo sapiens
tcaacaaaataaaaagttattttttgaaaagataaacaaaattgacaaacctatagacagactaagaaaaaaagagagaagatccaaataaataaaatcagagatgaaaaagaagatattacaactgataccacagaaattcaaaggatcactggaggctacactgagcaattatatgccaataaattggaaaatctagaagaaaaatggattaattcctagacacatagagcctacccagattgaaccataaagaaattcaaaacctaaagmgaccaaaaacaagtaacaagatcaaagttgtaataaaaattctcatggcaaagaaacacccaggaccagatggctttactgctgaattttaccaaacatttaaagaagaattaataccaatcctattcaaactactccaaaaaatagaggaggaggatgtacttcaacctcgtcctatgaagccagtgttaccctgataccaaaaccagacaaagacacatcaaaaaaaggaaactaga

SEQ ID NO: 392934 - DNA, 533 bp, Homo sapiens
gttaattagcacaaataaaatacacgttgccaataaacagaaraaatagttaaccaaaaaaattttctaaaatttatcttatcttgaggcaatctggggagcttggacattgggtatatacaaataccggggctatttaggtaattgtatcacaggaacccagcatttttcacttttctccagctctgttaaaaaggaaggaaaaatgtgtatactcagtacaacattcacttaatgccaccaattcacttaatgcattgtttacatgtgcaatagatactagttacagtgttgaatatagaaatgtgtacatgtgagttatatagttcctatccaaaagtcaggaggcccaagacccaggaagagttgatgttctttgtaacatatgacatcagatcacaaaaaataccagaatagttttgttatataattttcttgagtactaaaattttataaaattattctatttttaaaatatgttatcttaacatactaatattttgaaaaattacttggctgtattagatatattc

SEQ ID NO: 392935 - DNA, 533 bp, Homo sapiens
gttaattagcacaaataaaatacacgttgccaataaacagaaaaaatagttaaccaaaaaaattttctaaaatttakcttatcttgaggcaatctggggagcttggacattgggtatatacaaataccggggctatttaggtaattgtatcacaggaacccagcatttttcacttttctccagctctgttaaaaaggaaggaaaaatgtgtatactcagtacaacattcacttaatgccaccaattcacttaatgcattgtttacatgtgcaatagatactagttacagtgttgaatatagaaatgtgtacatgtgagttatatagttcctatccaaaagtcaggaggcccaagacccaggaagagttgatgttctttgtaacatatgacatcagatcacaaaaaataccagaatagttttgttatataattttcttgagtactaaaattttataaaattattctatttttaaaatatgttatcttaacatactaatattttgaaaaattacttggctgtattagatatattc

SEQ ID NO: 392936 - DNA, 543 bp, Homo sapiens
ataatgatgatttggtcagaagaaggaagggcctggtgtactctctaatgcacttggacatatctagtgtaacgctgccaaatagtacattctgcaatgagggaaatcttctgcatctgcaggtgggttagataaggtggtcatagctctcttaaagaggaacaaaccacccaacagtgcacaaaccacatcttgggctcatggttagaacatcctgccacaagctggtaaaagagaaggggagaaagtccccaaatttttrcaagcacagaatcccatgatcagtgtctttgggctgacctatgctcattataatagttaaaaacattgctatgtagagaattaagatgctaaggaggcatgcaatatatgtactaggatggcagcaatagtgcatatgtgtccagaagaccacagacaacatgcatagcaacaatgcccattcccatcccttcatgaaaatcatgtaagactctcataaagggagtttccccagcatcagtcggtgctgtcttacttttgagcagcctactttgatcagct

SEQ ID NO: 392937 - DNA, 568 bp, Homo sapiens
agaggcaaaattaacagatcttgataacaaaatcagatgtaggtgatgggaaagagaggctttgaggatgatgttcaggtttctgacttgggtaattctttctagctatattatagtagaaactccagaggcatgagctgtggcttggatcaaggtggtccttatamttatcaagttagagccagtcctgactttacgaggtgggcgctctgctatatcacatcactgtatcatattaccttcctgtgataagcagaataagggtcccacaaagatgtctatgttctaatcctggaaactaaatatgttagggtacctagcaaagggaattaaggttgcatgtgaaattaggttgctaaccagctaaccttaaaataggtgttgcatcctggatttatccaggtgggcccaatgtaataaaaaggccctcaaacttgaaagagggaggccgaagagtcagtcttatggtgatacaatgtgagacttgaacagcctttgctgaatttgaaaatggaagggagccagaaatggaagaacataggcaggcttcaaagctggaaaaaaaaaa

SEQ ID NO: 392938 - DNA, 568 bp, Homo sapiens
agaggcaaaattaacagatcttgataacaaaatcagatgtaggtgatgggaaagagaggctttgaggatgatgttcaggtttctgacttgggtaattctttctagctatattatagtagaaactccagaggcatgagctgtggcttggatcaaggtggtccttatacttatcaagttagagccagtcctgactttacgaggtgggcgctctgctatatcacatcactgtatcatattaccttcctgtgataagcagaataagggtcccrcaaagatgtctatgttctaatcctggaaactaaatatgttagggtacctagcaaagggaattaaggttgcatgtgaaattaggttgctaaccagctaaccttaaaataggtgttgcatcctggatttatccaggtgggcccaatgtaataaaaaggccctcaaacttgaaagagggaggccgaagagtcagtcttatggtgatacaatgtgagacttgaacagcctttgctgaatttgaaaatggaagggagccagaaatggaagaacataggcaggcttcaaagctggaaaaaaaaaa

SEQ ID NO: 392939 - DNA, 586 bp, Homo sapiens
atgcacttatcatttatcctttctcagcaaatccctactctcagattcatccacatttctaatttgtttacgtctaactaatgctttatttatagttttcttgacttgttatttgcaacttatttaaacagtattataagctagtcattgtgtgcctactgctgtgtaactatcactggagtaagttaaaataccaggtgtattccctatgaagagttaggcccatcaaattatctcagtgcaaacatgaacaataagaacaccttgtgttgcagtccctttttttctgcttatctgatcgccgtacaactaaaacatttcccaagtaataaataatttagttataaaatttgggcagctttctgtcataagatayaatatttattttgctgctgaattaattaatgtttgggaaatgccgtgtaaatgttagctcttatcctcttcttatttatagtaagtacataacctgaaactttagtccatgcaacagaaaatgctgtggactgtaagtgataatgatggattatttgtccttatgattttatctgtaacctgcatataaaattcagaacttgaaatgatg

SEQ ID NO: 392940 - DNA, 519 bp, Homo sapiens
agtagttaactgtggaccacacccaggtatacctctgaagtagccttagcrtaagttcagttagtagatacaacccagatcctctctacctcacgacaatctagctaaaggaaaggccacagggctaccaagggctcctaagaagtttccagcttttcattggccatttgaaaaacatcatatcatttgtgggacttggaacaatgaggactctgttcttcatgaatggaccttgagattgttttacaggtaaaaggagggaactcagctcattacaaagacttcattcaagggcaggatgtggctggaagagcagcctctctaagaacatggcttgaaaggaaatctgtgaggaagtaagagaaaatgactcacaagccagccacatgcacatcaatgcacgttagcaggatggcagatgtcacagggaggtagagtgcccttggtgccttttggatcccaatattttaatttttaccccttattgttatatagtaatatccctaaccctgcatgtgg

SEQ ID NO: 392941 - DNA, 581 bp, Homo sapiens
actctgtgagggagggacatattcacttttgcatgcccagaatctagcatgatatttggcagacagtgggtgccagagaagtgtttattaatttggattttttaatgtcccttaattgtttaatgtctgtcttccttagcataggtatttcctagtctctacaaactgtgaataatgaggtataaagcacatacttatggtaacatcatacacagtgtcacaagattgatcctaacatagcttcacttttatgtaccttttatttcacttattacatagatgtgagtgaacaccccaaggaaagacaggtrttagggctttagacatatttaagaacgtgaacatgcacattagcctatagtttgggagcaacataaacactagaaaacttcattagtctccttcaagggtgtgttcatagtaggtactcaatagatgtcaagtgactgactgctaaagcaataatgggggctttgggcacttgtcaaaaataaaagctgaattaatgatgagaataaatttttgaccaacatgggaaaaatacctgtactattaaatcctagataactataattgtgccc

SEQ ID NO: 392942 - DNA, 607 bp, Homo sapiens
gttgcaggccatgtctgttgcttgcagaaggcccctgcaagcctcattgttgctggtcaaggccctgactccctctttttttgtgtcccatctttcacctcaacacatgatccagagcactgactctgcccttcctcccctttcccatgacaggacccacacccactccactctatcaaggcatgtctggaccatatgtgtgtctctttgttggtaaaaaagataaaatgatttaattggctttttcttttgacttcatagagctgatttattattmaaatgttcattttatgggtaaatatgcatggaaatttatacaaaaatgttaatgatgtgagagtaacattcttacactttgtttgatgattatggagttgctatttcacctttccctatttttatctttatgtttatatgttcaatggaaaaacatccagtgaagtctcctcagtatgatagacaaaagttgtgcaatcaatcattgatagatgcacagtgaagcgacttccagttcccatttggagctagaattaaaaactcctgatggtaaactcacatgatgaggagttatagaatgctatcattttctacacgtccatctgccttc

SEQ ID NO: 392943 - DNA, 599 bp, Homo sapiens
tttagagacaaaatttttaacattatatgcttcacaaattctaataggaaatggcattttatttatgtaattactaatgtaattaataagcgtattaaagaagtaaataattgaagtaaatttagtttatattatatgaattattttacattttatcttctatcttaaaaaaattttaactagttatgcaattcaaaattgacagatattttaactcagaactttaaacataatatccattgatttgtgaattctatgaagatgtcaaaatatgagttaaaaatctgttgttgctttgtagttagcattttatatttcaatgattctaaatcacttcattttggtgttaagctttttagttattatgatgtttttagatatttgttgtactttccttggttgatattttattagttctttaaaatgtttaagcatgccatattttctctattttgttcaaaaatcattagacaaggccaggcgcggtggttcacatttgtaatcccagcactttgggaggccaaagygggtggatcacctgatgtcaggaattcaagaccagcctggccaacatggttaaacctcgtctctactaaaaa

SEQ ID NO: 392944 - DNA, 544 bp, Homo sapiens
accctgtctcaaaacagcgataacaataagatacaaaattgagaaactgttacttgatttacagtatatattctgtccagcagtgatggaataacaaggactggatttaccttgctattttaagcaactagaaaactggacaatatacgaaataccaatttgtaggaattaggtaacaggcaatgcaagactgtggtcactgaaaggtgggaaacaaacttactgagctctgcggtttccccaatttattatctggagctgcttttcaggctacagagcrgggatggggaagccaaatagagcctggtatcttagaattgagaggacaaggtgggggttggcggggagggaaggtcaccatcatttgtggcgcagagtaccagagaggcaggagttgtacacagaactccagagataggtggtggagtctcccaaagtctggttgagtcctgatgtacacatgcatgagaggagagcacctgaggccagagaaagaaccctcagccttacttttagatatctaaagagcccagtctgccctaaa

SEQ ID NO: 392945 - DNA, 544 bp, Homo sapiens
accctgtctcaaaacagcgataacaataagatacaaaattgagaaactgttacttgatttacagtatatattctgtccagcagtgatggaataacaaggactggatttaccttgctattttaagcaactagaaaactggacaatatacgaaataccaatttgtaggaattaggtaacaggcaatgcaagactgtggtcactgaaaggtgggaaacaaacttactgagctctgcggtttccccaatttattatctggagctgcttttcaggctacagagcggggatggggaagccaaatagagcctggtatcttagaattgagaggacaagrtgggggttggcggggagggaaggtcaccatcatttgtggcgcagagtaccagagaggcaggagttgtacacagaactccagagataggtggtggagtctcccaaagtctggttgagtcctgatgtacacatgcatgagaggagagcacctgaggccagagaaagaaccctcagccttacttttagatatctaaagagcccagtctgccctaaa

SEQ ID NO: 392946 - DNA, 544 bp, Homo sapiens
accctgtctcaaaacagcgataacaataagatacaaaattgagaaactgttacttgatttacagtatatattctgtccagcagtgatggaataacaaggactggatttaccttgctattttaagcaactagaaaactggacaatatacgaaataccaatttgtaggaattaggtaacaggcaatgcaagactgtggtcactgaaaggtgggaaacaaacttactgagctctgcggtttccccaatttattatctggagctgcttttcaggctacagagcggggatggggaagccaaatagagcctggtatcttagaattgagaggacaaggtgggggttggcggggagggaaggtcaccatcatttgtggcgcagagtaccagagaggcaggagttgtacacagaactccagagataggtggtggagtctcccraagtctggttgagtcctgatgtacacatgcatgagaggagagcacctgaggccagagaaagaaccctcagccttacttttagatatctaaagagcccagtctgccctaaa

SEQ ID NO: 392947 - DNA, 544 bp, Homo sapiens
accctgtctcaaaacagcgataacaataagatacaaaattgagaaactgttacttgatttacagtatatattctgtccagcagtgatggaataacaaggactggatttaccttgctattttaagcaactagaaaactggacaatatacgaaataccaatttgtaggaattaggtaacaggcaatgcaagactgtggtcactgaaaggtgggaaacaaacttactgagctctgcggtttccccaatttattatctggagctgcttttcaggctacagagcggggatggggaagccaaatagagcctggtatcttagaattgagaggacaaggtgggggttggcggggagggaaggtcaccatcatttgtggcgcagagtaccagagaggcaggagttgtacacagaactccagagataggtggtggagtctcccaaagtctggttgagtcctgatstacacatgcatgagaggagagcacctgaggccagagaaagaaccctcagccttacttttagatatctaaagagcccagtctgccctaaa

SEQ ID NO: 392948 - DNA, 564 bp, Homo sapiens
tctcacctcactgcaacctctgcctcccgggttcaagcaattctcctgcctcaggctcccgagtagctggaattacaggcatgcgccaccacatccggctaattttgtatttttagtagacatggggtttctccatgttggtcaggctggtcttgaactcccaacctcaggtgatctgcccactttggctaagtgctggcattacaggtgtaagccatcatgcccggcttagtatgagtatgtcttaaggctcccctaggtaattctattatatagccggggttgatagatactggattcaacaagtaagaggtgatgatcttgcctagagatctttagggagcaatggaacaatgagtcttgggtatttcagatggactgatgggagtagggcacatagayggctctgtcaagtgatgggctgagaggccatgtgccatttctcattgtgggtgttgtcagtcctcagagcagttgttcactctctgctctgagcacccccatatctcctctacagcactcaacattttattttagttttgctatctatatagatatgtgtct

SEQ ID NO: 392949 - DNA, 607 bp, Homo sapiens
cagcacaacggggcctgaaatcaggcttcctgattcccagtcctgggtgttcctttttgcccacagcctcccccacttcccctgggacacctgaggggcaggagtggaggtggggctcaggttagggagcagagcctctgtccatcatccctccgtcttcctcttcccacaggccagaagcaggtgtggtggtgacagctgcccccagtcctccacaaggctccattgtccccggcagggagcccctccccagctgcaggccagaagtgtgyctccccgggccctcctgtcgtgactctgccacccgcttcctcctgctgccccttccctcttctcatctccgcttgccctcaggccctccccatccccgtgaggtctcgtctctggcgctctctgggtttaagcctctctccagtgaaagttagatttggaagggccctgggagatcaccaagtccaacccttttattcttcggataaggaggccaggtcagagaggggaaggtcctgtccaaagctgcacagtaggctgaggcagagcccagtgctgtgctcccttcagcgctgggtcatgggtgcacactgcccttggcatcaggcgtccaggg

SEQ ID NO: 392950 - DNA, 518 bp, Homo sapiens
tgccttggccctcgtttcctttgttctgttacctttctctttgatccccatggctctggccaagttaatagagcgagaagcagggacttttgtctccgttccggctctgcaaggacgagttctgttcctgggatgggaaggctgtgagacagtcaaggctgacgtctccttctcctcctatagttgccaggggtggcccagctgttctcccaccttatgggttatgcacmccataggctcttgctactctcaacccagcccctcactaggctggaaaatgagactaggtgagaccaccttccttctggggaaagtgagcgggacccagcttcagcgaatattcagctgagcatctactctgtgttgggcattctgtgaggcacttttaggactctgatttttattttcatttttaagggctcaatttcattttatcttcatgtcagcctgtagggggcaatagccccagctgcttccaacttacagataggagactgaggctcagtgactgaaccaag

SEQ ID NO: 392951 - DNA, 637 bp, Homo sapiens
agggcttccccccagcctggcacttcatgcctaggccactctgaactcctatagtgctaagtgaacaaaatcctgcttgcccttaccttgaggcctttgcaaatgctcttccatcttcctagtgctgtccctcaactcagcctgaagtggctcttccttataaggccagccccaatggcccctcctcctaaataccttcctgcgacattaacacaggtaggaaagactcggagcttccatccacgtggtcactggctctgtccatctgcccccaggggtgtcatgtttggtagggccagtgaacggctgctgaatgaatgaatgatgagtcctgatctccctcctctgttccctctccctggatgacttcactcactcacctatgggagagtcagaggctgacagtgcctctgcctccaattccccctcttgtcctctgagaccctccctttcacacgtacagcccactctcataaaaccaagagactcacagcccttctgcattggtaggaagttcttcctgctgtctgtcctcactcccttatttgrccatgcctgcttctttatcattatttttggagaggagtcagggcctgcacccatctcagatttttgttaataaaggctgcgcatttct

SEQ ID NO: 392952 - DNA, 570 bp, Homo sapiens
cctgggccagggtcttcctgaaaggaggcttcacttccctcttgttggtgccccacctccatctcccagactgtttcaggccccagctctgccgccttcctcttcttgtgtctcctgctatcttaaagcctctgattacctgatgctgagtgcagcaaaaatctcaggcctttcagctgcaactgaagcacccaccgcccacctcggcccaggctggctgtctccctctgctaccattttggggtccccagggcccatycctaagaaatttcttcccctaagctgaccaggtcttctttcattgcagaatctgaccatccctaggggttgtctcagaggacaccgggaacggtctgctcccatctcgggatcctcacatgctgggggaaggagggcaagaagagggtccaggtcctgggggctcagtgagagtggggggcttagtgaggggatgggggcccagtgacagtgggcagcctcagtgaggtgatgggggcccagtgaggatatgagggctcagtgagagtggggtggcccagtgaggggattggggcacagtgagagtgaggg

SEQ ID NO: 392953 - DNA, 580 bp, Homo sapiens
tttttaatacaaaactcttgggaccagaaatatttcatatatatgagttaagagtgggaatacagtgtatacataatatatattatagtataccttcctatacaaaaaaataaaacacaaaaaatattagttacctaagtggaaaaacttaagatgataaatacttcacatcatttgcagtcaattttcagcataaatgagttcaggtagggtgagctacttctattgccaatacaaaaataaaaataaagataaaagaaagaaaagcttttagttttctgagctttatggatttcagaattttgtataaattgttgtgggcctgtaatacattttggacaactctttcatattcawgtgtgtacacatataccttattttatgcagcagctatgttactaaggaatagtatctatataaaaatcttttcttatacattaaaatgtcaactctttcttctcacttgcaaccagaactatacaaccagttaacaaggtgtagaggttttctctctgaaggtgtttaaattcctctaactttgctgacagagtgtttttctaaaacacaaatttatgcacag

SEQ ID NO: 392954 - DNA, 580 bp, Homo sapiens
tttttaatacaaaactcttgggaccagaaatatttcatatatatgagttaagagtgggaatacagtgtatacataatatatattatagtataccttcctatacaaaaaaataaaacacaaaaaatattagttacctaagtggaaaaacttaagatgataaatacttcacatcatttgcagtcaattttcagcataaatgagttcaggtagggtgagctacttctattgccaatacaaaaataaaaataaagataaaagaaagaaaagcttttagttttctgagctttatggatttcagaattttgtataaattgttgtgggcctgtaatacattttggacaactctttcatattcatgtgtgtacacatataccttattttatgcagcagctatgttactaaggaatagtatctatataaaaatcttttcttatacattaaaatgtcaactctttcttctcacttgcaaccagaactatacarccagttaacaaggtgtagaggttttctctctgaaggtgtttaaattcctctaactttgctgacagagtgtttttctaaaacacaaatttatgcacag

SEQ ID NO: 392955 - DNA, 571 bp, Homo sapiens
acattgtgaaagttctgagactagcccttgagtggctttgcatattctgtcctcaatgtcttgraatgctgtcctaatatgttcatgtctaatgtattgaattatgaaaggctgcatagaggagaaactgaggcttatcagccactagccaacaacaacttttggatatgtgagtgaggtcatcattccagaagctgcacgtctaagaccaagataaaccaacaaaaaactaacagaactataagaagtttgttcttgtttttttgtggggagggtattatgcagtagagactattatgtggaaaaagtagtatgttttcttggctaaaaatcactgataattacaagagttgatgctggtgagaaaatgacagaaatgtgagccaattgtggaggtagtgaaataaggttgatcactgctgtgttctactggggccattaaattggggtatctcaatcaaagcagcatatactctaccctgatactatttcaaaattcttttaaaacttaaatatgataatttctgccaaatagatactcaacatttaataaatttaaggttaaatttaa

SEQ ID NO: 392956 - DNA, 574 bp, Homo sapiens
ggtctctgggctgtcttggggaatgaagtagaggatgcatgtgatcaataccttccaacgtttctgtctccaatagctgtttgttttctttttctatgttttgcaaaggaagttctgacattgtaactgcattaactatcagtcatttttaagtataagtttcaatcaattaaccaactaaaatgtttgagccatttccagagtccttagtaagtgcattcaygtcaataaaatagacataattcctagctgctggcattattattctatcaactgaccgtaacctgttgcggtctgtctcctccatctaacaccctttgaatgcattgcatacatattccttgggtttcttctcatttaagttaataatggcttgcaatactttaggtgtatacattgcctcctactagatcagagtttgtacttgacccctggaatatccttacatctgacccttgttgttggtccagtggcaataaactgttgttaaggtggtatcttctggaaaattaatatctaaatataaagcaactggcctatgtaaatttattacaggatggtcaagaacaggagg

SEQ ID NO: 392957 - DNA, 574 bp, Homo sapiens
ggtctctgggctgtcttggggaatgaagtagaggatgcatgtgatcaataccttccaacgtttctgtctccaatagctgtttgttttctttttctatgttttgcaaaggaagttctgacattgtaactgcattaactatcagtcatttttaagtataagtttcaatcaattaaccaactaaaatgtttgagccatttccagagtccttagtaagtgcattcacgtcaataaaatagacwtaattcctagctgctggcattattattctatcaactgaccgtaacctgttgcggtctgtctcctccatctaacaccctttgaatgcattgcatacatattccttgggtttcttctcatttaagttaataatggcttgcaatactttaggtgtatacattgcctcctactagatcagagtttgtacttgacccctggaatatccttacatctgacccttgttgttggtccagtggcaataaactgttgttaaggtggtatcttctggaaaattaatatctaaatataaagcaactggcctatgtaaatttattacaggatggtcaagaacaggagg

SEQ ID NO: 392958 - DNA, 325 bp, Homo sapiens
cagaactgaaggggaagactgcacatcacccagacagcctacacccagagctggatgttgtgactagatggggctttgagttgtcttccttagagagggttaaataggtattacatgtgagaaggatcttcactgataattctgtcagagggacagaatatgacaaaatggtagctgttcatcaacatgtgctgtctctctcctattacatagagaaatacatgtaaagaagttgcccaggcagacatcacacttaccagcccccyaccccaccctcatttctaggtgtcattttgggactaattttgtcaataaagtgttaagg

SEQ ID NO: 392959 - DNA, 547 bp, Homo sapiens
tgtttctactcaaagataaacaaataatgtaaaccaataaaccataagaccttgaaaatcctttttgaaaagaaaaggaaaaaaatactaagtgaatttttagagaygaatatagttagaaaaaaaatcagctctagaaaatcacataattctaagcagaaactattttactctctaaaggaaaacaattgaaatattaattcaatgaatcaatagataaaagttaaaatttaaaaatgtagaccaaaaaaagtatatggcattgaaagtagtgaagtgctccaaggaagacaaacaatttataaacttggagcttctcaaacagagaacatgattacaaaaagggtaattttataaaatgaaattagagaaacaaatttctatgctaaagggatttgtagataaacatagtctagtacgtccccaagatagatggaggttaacaggcatggggttatgttgttgagtatttaattttaagcacagttaaaaaaaatcctacaaacatgtaataatgaaccaaaatattaaagtaaaaaaaaattag

SEQ ID NO: 392960 - DNA, 457 bp, Homo sapiens
gtttttgcacctggcctcacagaagtcagatctcatatcatagaccctggagagatgttaaacaaatatataaacattatatgcatgatttgcctgcagtatgaaacttgactattggatttttaattcaattcaatgaactcaaggattacatccttgtcatttcattaaagtctcagaaagtgattgcgctttaaactttcacttttatttgctggctttgatcaacgactcaccctcatctttctctacatgcatcccaactgcagttctacyttctttcctggtaatccctagattttggtccatgaatttaagctctgtgtgattctcttgtcctggagactacactttcataaggtctgacttatgaaagagcaaaaaaaaaaaaaaaaaaaaaaaaaagactcaattcccaccaaaaacaaagaaaatattaacgaaagaaagaaggaaa

SEQ ID NO: 392961 - DNA, 613 bp, Homo sapiens
aaatgagtgctggttcttttcctttggaaaaaaaaaaccatgtgtattgcagtgatatcacacatgtcttagtttagtartaatgagtatttttacttaaggacccctcagaggcagttgctgaggcatgccctaaaataaaatgttcacggggttagggggctgggggcaggtaacctaactaatcttcgcagattgcctaaaataaggaaaacatgatggggtcagataatctggaaagtgagtactccgcatatagaagacacctccactcagcccaggctaagtgatgccataagggccctctattaccagactcttatttttcaagggaagttagaaatctttatttaatgtaaattttcctgatttttaagttagtaattaatccaagtataaaattattttgcagactaaaatgcttaaggaaaacaaaacacatctatggtttagattcagcccaagatgattgctgtataatcagtccatgaattccaattacaactcaacactcaatacaactcaacactgcttgattgaaagcagtggctggttgataagataggagaaagaggtagtgtttgtagtgctacagagaacagcatatggaaaa

SEQ ID NO: 392962 - DNA, 565 bp, Homo sapiens
ccatatcttctaactctaagtcgatatttttaaagaaaaaagcagcataggtacctgatagatgatattagatagacaatctgagatggaaatcttgctcacagaatactggcagtaactgtatctgcagtaattaataacttctataagaaatgccattctatgcccctgttatcatttactgggttttgagtataaaagattttgaccataagaaaataataaatacataaatattaaaggacagtggtatgaataagataaagaaataaactttaatattttaatcaaaatttagaaattttataattaagatggccatcatttgtgatggaatatgaaaatgagctttttaatgagataaatggcaagatagataacaatatgtatccaatttaaagtggcagtagattttgtaagcttctttggaaagtgaaaaacttattgtaacaactttttttttkctgtaaatgacaaagctacagaaacataaaagaaaggcagtatgtaagtaaaacaaagtaaaatatttagtagacatagtccattgccctccatgaaatat

SEQ ID NO: 392963 - DNA, 608 bp, Homo sapiens
tgctttgcaatgctgtgaaaattacgtagaaaacacctctctcagtgctctatatgcattctttgagtttagtcgtatcatttttagaggggaaatttcatttcatctaaaaaactggctgccgttatctcataggatgaattagttaatttccgtctaacccctcagacaatgagagacaattaaataacagacacattatataaaattaagtgctttaacagtgccttgcacatagccaacattacccatacatataataaactacctaagcatgtacatataatctatccattagcctattttctatgtatttatgtatccatttatctgtgaagagggacaagaaagtaaatccattttatgtaagttggtgtaagtgatctttcaaggacgggatacagasagatatataaaaacaaataaaataagccctttagggatgtatgtgtaagaattatacaaaaaaggcttagaaatactcaaaaaatataaagtgcaggccaaatctgagatgcagttggaacacattctgtgtgctcagaagagggagaattgcaggctaaggaaatcaggaaagcctttggaatatggaacttaaaagatga

SEQ ID NO: 392964 - DNA, 626 bp, Homo sapiens
ctacgttagtggatatgagggggttggtctctcttttattagtatttaaattattattagtattgaaattattattgatttgaaatttgaaggtgatcctgacatggattattgttctagaatgtagtagttggaagtgtaccagggtataaattcatggtagaatttactctgcagtcacaagaaccaaaagacacagtcatctcatggggtaggaagaagacatataaccctattccctggctaggctcagcaggctgcagagtagaatggacatagaaatatcacttttatcactrattttcaccatgaacatcaggaagcttgaacctgagaggagctaatgtgctggctcaggaagaaaaagccagctcacccttctctccatcttgaccatggacagctcatcgttttctctaccaagaagactttcatgtgcctatactctctgtctccttctctcttactctctttttattttttttcacctctgtctcacacacacacacactcagaggtgaacacttgcatgcacactaacattcagatctacaaagagaatgcactcattcctgaaatcaatccaaatgtttcactgttgttgaactgctttgaactctacatgt

SEQ ID NO: 392965 - DNA, 404 bp, Homo sapiens
tcacacacacacacactcagaggtgaacacttgcatgcacactaacattcagatctacaaagagaatgcactcattcctgaaatcaatccaaatgtttcactgttgttgaactgctttgaactctacatgtattatcaatgaagacactactctgtgctttgtatgtaaataatcacacttattctgcctcctggctcastaaatattataaccattttttttcagatgaggaaattgagttcataaagtgaaaacaacttgttcaaagtcatacccagtgttgacttcaaatcttttgagagcttctgtgcgtcattcactcattatcatgattaaaagtctcctgactctagatggaactttgaaattgctactgagataaatgttgctctcatgtgttatt

SEQ ID NO: 392966 - DNA, 551 bp, Homo sapiens
gtgggcagaggccttacttattttctgaaagaaaataacatacagaaggcagaacatattattgggaagcagtggcaattgataacagtatctgggacaggtaagctttctgtagcacataaggtgttagttaggtcctaaggatgctctgtcagcyactggaatatgaaaatgttactgtctatgcaagttagacacagaagcccacaaagacggtcaggttccggagccagtcaattctcactgcaggtaaccagaactcaatcaccagtcagaggcttagaggtaggactcaaaaattggacaggttctgaatacagtatggcaggccatcattacaagaaaaggcacagaaacagacaagaataaggcttgggattccccgacttttcaagaatctctagcctcacgtaagaaaggactttaatgttgctcttcatttctctagtctcattgcccaggagctcatgaaacactgtgactacataacactgataactgacttcaaagaaaatcagatgagatgtgtgtttatgagaaaaggaatcata

SEQ ID NO: 392967 - DNA, 592 bp, Homo sapiens
taagacacatgtccttgagggaatgcattaattaatgatggcaaagcaattttatcccaaagcactgcattattgttaaaagtgttattataattgaattacttgttgtatgggggaagaaaaagctcactctgaatgtacaatgatcattttctgatgcttccaacagtgtcagcaatcctggaattttaaaaaaataaatttcttattccaaagaagttccaaaatccaycaagaggatgatttagcagtggcaattctaatttcatttggcagacttgaatcatggaaatagttgtgatctgggtatttggagtacagtctcagccacttgatagccataagcattggtccttttttataccataattttttcatacaaaagattgagctaatccatctgctcttcctacctatagggattagttgagaatgagataaaatctaagagttttaaaattactattacggtaactcttcctcagcaaagtctacatgagctggatctcttttggacctgggtgccaggtttgaaatgaagcatccttgctgaggagaggtaaaatatagaggctaagagccaaacctctca

SEQ ID NO: 392968 - DNA, 560 bp, Homo sapiens
cttcacttaaaaggaattgttggctttcctttgactttagaatcaattacatcagggtttaaatcttcacatagcttattatttgcattatagtattggataagttccatatttttctgggttcccattttctttcttgtaggatgaaaataagactacaacttcatggatctaagataaaaataaaattacctatattttaaagcaccaaacatagtaccttgacataaataaaatattcaaattagaaaaaaattggaatatgaacaaaagctactggttattgactgcatttgcttgtcaagcatcctgatcttcttaatctcaatcaaaatgactctagattattgcctactccatttatattgccttatattatcaccacagagaaggagctcctataggagtaaaggataaaatcaggttctcaaattaggtctttccccctttccttgttgtcrcattaacacagagcaagtgtgtttaactctctcagccaagaagggctcagagaaaccattgtaacatctccaaaggtagatattgaattagcagaattt

SEQ ID NO: 392969 - DNA, 561 bp, Homo sapiens
aacctgtttggcctgcaggattttttttttgtaacaaaatctaaaaaatgggagaaaatatttgttaatcatatatttgataaaggtcttgttgaagagacaattgttgggtgagatatgagcatccagatcaaggatgctcaaagatccatgaatacatacaactcacaaaggtcacaaagrcacattataagcaaacagtcaaaagtcaaagacaaggaaagaattcttaaagtagcaaaagtgtcaagtcacatataagaaaagactataagaatattagactatcagaatattttttaggctgtaagaatacttatcagcagctaattctcaggatgataattcctgtaatgaaaacatgtgaaagtaaaaaacccactagtagagctaaacttataatcaaacaggatacttcagtaccataatcatgctatgtaaatctttcaaacctctaccatagaggttacaagtcagaatggtcaaaaatgattagagctacaatcagttgctaagaaacacactatacataaagatgtaaatttagaataacaaatataa

SEQ ID NO: 392970 - DNA, 561 bp, Homo sapiens
tgtttttcaaaataatgctttttgataaaagtcctttataggcttaagcaaattttaaaagcttttaatttgcatgtaatgtactttgatttttaaagaatttggatgtctattttcaatgctattttaaaaactttttttccagtctacttaagattttattattattctcccactagaattgtagtggacatttaatttcttgcataattatayccatgccaataatacttgtcatatgtttaacactttatagtataagcatgtgatgcataatgacattttggccaaggagaaaccacatatatcatggtagtattgtaaaattataaaaccttatgtttcttgtcccttttgtatgtttagttatgtttaaatacacaaatacttaaacattttgttacaattgtctattcagtgcagtaatatgctgtacaggtttgtagcttaggggcaataggttatactacacagcctaggtgtgtagtaggctataccacctagatttgtgtaagtacactctatttatgtttgcacaatgatgaaatcatctaatgacac

SEQ ID NO: 392971 - DNA, 561 bp, Homo sapiens
tgtttttcaaaataatgctttttgataaaagtcctttataggcttaagcaaattttaaaagcttttaatttgcatgtaatgtactttgatttttaaagaatttggatgtctattttcaatgctattttaaaaactttttttccagtctacttaagattttattattattctcccactagaattgtagtggacatttaatttcttgcataattatacccatgccaataatacttgtcatatgtttaacactttatagtatargcatgtgatgcataatgacattttggccaaggagaaaccacatatatcatggtagtattgtaaaattataaaaccttatgtttcttgtcccttttgtatgtttagttatgtttaaatacacaaatacttaaacattttgttacaattgtctattcagtgcagtaatatgctgtacaggtttgtagcttaggggcaataggttatactacacagcctaggtgtgtagtaggctataccacctagatttgtgtaagtacactctatttatgtttgcacaatgatgaaatcatctaatgacac

SEQ ID NO: 392972 - DNA, 561 bp, Homo sapiens
tgtttttcaaaataatgctttttgataaaagtcctttataggcttaagcaaattttaaaagcttttaatttgcatgtaatgtactttgatttttaaagaatttggatgtctattttcaatgctattttaaaaactttttttccagtctacttaagattttattattattctcccactagaattgtagtggacatttaatttcttgcataattatacccatgccaataatacttgtcatatgtttaacactttatagtataakcatgtgatgcataatgacattttggccaaggagaaaccacatatatcatggtagtattgtaaaattataaaaccttatgtttcttgtcccttttgtatgtttagttatgtttaaatacacaaatacttaaacattttgttacaattgtctattcagtgcagtaatatgctgtacaggtttgtagcttaggggcaataggttatactacacagcctaggtgtgtagtaggctataccacctagatttgtgtaagtacactctatttatgtttgcacaatgatgaaatcatctaatgacac

SEQ ID NO: 392973 - DNA, 614 bp, Homo sapiens
atttaagaagaagagccattatctgctagactcttcaataccaatttggcatgtgtgtcactcagaattctttgtatttcaattgatagaaaaaatgaacaaaaatatacataagcaaaatgtaagatttttttttttcagaaaaaaatctcaatggtagacgtcatgactggttgattcaaatgcccaaaatatgtaaacagagtctaatttctctctctgtgtctcttggtctcattttatttgtgctgattttatttttagataatttctctccttctattttagataaaatctcctggcagagaaaatggacagtcgttccataccatatgtcttctcagcttcaaaatcaacaacaacaacaacaacaamaaaccccaaaacttccatcatctgcagaagtcaaataaaactttcaaacttgactcttattggccccaaatagagcatataatcattcttgatcaattgcaattatccaaagcatggaatatattgattgacttatgccaattaagccctatctctgaagattgaagaacaatctgcctactctaactgggcttgagagaaaaagatgttgtcaccttgttttgccaggttacaaaagt

SEQ ID NO: 392974 - DNA, 550 bp, Homo sapiens
ggttatgttttagaaagtttactatgcacttccagtcaaaataactaagtaagacttgtctttctgaaaccaaatcaaaacagaaagaacaagaaacagtaaatgtcatctataaaaacagaaaaattgcccaactgcaaaccttaatctatgaaattctgccagttgtagtgaacataggctaagtaaggaagttgagaacaaacctgtgctaaagagggactgaccacaaagatttccaaaaggtagtgttcttactagaatttctttgttaagatcaacwtgttctaggtgagtggacaaatttccaaagcgtcctgaactcctattgaggctgcagagtaccacggaaggactggctgaataaagaaatagagggacactatatttttgtaaaaatacaattttaggatgaaggatggcaatcacttcttcagttgaattccttattttagctaaaaagaagtaaacataaaatggcctccaaaggatctgtgacataaaaggcatcatttctactcaagtgatttcctgctggcccacagaagac

SEQ ID NO: 392975 - DNA, 615 bp, Homo sapiens
attgaatcatgggggcaggtctttcccatgctattctcatgataacaaaagggtctcacaagatctgatgggttaaaaagggggagtttcctgcacaaacaattttctgttgtctgcctccattgagacgtgtctttcaccttccaccatgattgtaaggccttctcagtcacatggaacaataactccaattaaacatctttcttttgtaaattkcccagtcttaagtatatctttatcagtagcatgaaaacggactaatacatatgtcctgcttatatatttaagcctgtatgtctttcaacaataacaaaaaaatctctgcttttcttaggaccaattcctctgtgatttaagtaatttaatgtcccataatgtttggtctataattttctttttctggtgtttttttgtttttttgtttgtttgtttgtttgtttttgagaaagtgtctcactcagtcacccaggctggagtgcagtggcaggaacagagctcactgcagccttgacctcatgggctcaaggtatcctcccacttcagcctccaaattagctggaaccacaggcacatgccaccatgcccagctaaatttttgaattttttatagaaatg

SEQ ID NO: 392976 - DNA, 630 bp, Homo sapiens
gggccatccggtgagtgttacagctctattagaagctgtgggtcatggaagagaaccatggaacccaacgactagtgttcagctctattaggaaaaacccaggcacttagctgtgcatgaacaatggtaagcctttagcccaattgggagtggcaatggmtgcctcgctggatcaggagcacagcggacaccctgccagatctggaggggtggaagtcagcagcaggtctgtgacggcggcaaacagctgtggtggacggtgagcgaaaactcagctggagccataacaaacatggactagaagagtatgcagttgcaagatttaatagcgtgaaaacagagctcccatatcatgggaggggacccaacgggggttgctgctccctgcttgaatatctgggtttatatcctgatgattgtccctccccttgtgctctcaggcaatagatgatttcactatttctttacctctgctttagcctaatttgtattttagtgagccctcttgactacctgattggtcaggtgtgagctgagttacaagctccatgtttaaaggtaggtgcagtcaccttccccagctaggcttaggaattcttacttggcctaggaaatcctgctagtcctgtc

SEQ ID NO: 392977 - DNA, 579 bp, Homo sapiens
gctttgtggtcggaattcttacacaagagctgggactgcaccctgtagcctttctgtccaaacaacttgatcttactgttttaggctggcctccacattattcctgataccacacctgacacccatgactgtatctctctgatccaccagacattcactccatttccccatatttccttctttcctattcctcaccctsagcacacttggtttattgatggcagtcccaccaggcctaatcgccactcaccaacaaaggcagactatgctatagtatcttccatatctatcattaaagctactgctctgccccactccactacttctcagcaagccaaactcattgccttaacttgagccttcactcctgcaaaaggactgtgtgtcaatgtttacactgattttaaatatgccttacatatcctgcaccatcatgctgttatatgggctgaaagaggttccctcactatgaaaaggtccccccatcattaatgcctctttaatgaaaactcttctcaaggctgctttatctccaaaggaagctggagtcattcactgcaaaggccatcaaagggcctc

SEQ ID NO: 392978 - DNA, 579 bp, Homo sapiens
gctttgtggtcggaattcttacacaagagctgggactgcaccctgtagcctttctgtccaaacaacttgatcttactgttttaggctggcctccacattattcctgataccacacctgacacccatgactgtatctctctgatccaccagacattcactccatttccccatatttccttctttcctattcctcaccctgagcacacttggtttattgatggcagtcccaccaggcctaatcgccactcaccaacaaaggcagactatgctatagtatcttccatatctatcattaaagctactgctctgccccactccactacttctcagcaagccaaactcattgccttaacttgagccttcactcctgcaaaaggactgtgtgtcaatgtttacactgattttaaatatgccttmcatatcctgcaccatcatgctgttatatgggctgaaagaggttccctcactatgaaaaggtccccccatcattaatgcctctttaatgaaaactcttctcaaggctgctttatctccaaaggaagctggagtcattcactgcaaaggccatcaaagggcctc

SEQ ID NO: 392979 - DNA, 575 bp, Homo sapiens
ttagaaaataaacgtaaggagaaaggattttaatttagtccaacatatgataataatagtaattctaccaacatttattttaatgtaaaatatattagagtttatgctatagttttttatatttgcaaatatatttcatcatcacaataatgtatataggtagttacyaaccattttccccacgataaagtttgtgcaacttccccaatgctagctagccaataagtggcagaatctgaacatggacctaagactgtgcatccaaagagcttactctcaatgctctctatagggaaaaacattttagtacttatgtagaagttctgtaagagacagaagattaaagaattaaaaccaaaaatcatctaggtattagagtagggatgcatgtaaaaatttctaattttaatctagatattgcctatacacgtcaaaaaataaatttaaaagttaaaagaattcaattgatacttttgtaacctcagacacatccaagccagccccagcctacctagtgaaccaagttacagaaccacaacaaataagtgaactgtaaaactggtttctgaaatttt

SEQ ID NO: 392980 - DNA, 575 bp, Homo sapiens
ttagaaaataaacgtaaggagaaaggattttaatttagtccaacatatgataataatagtaattctaccaacatttattttaatgtaaaatatattagagtttatgctatagttttttatatttgcaaatatatttcatcatcacaataatgtatataggtagttaccaaccattttccccacgataaagtttgtgcaacttccccaatgctagctagccaataagtggcagaatctgaacatggacctaagactgtgcatccaaagagctkactctcaatgctctctatagggaaaaacattttagtacttatgtagaagttctgtaagagacagaagattaaagaattaaaaccaaaaatcatctaggtattagagtagggatgcatgtaaaaatttctaattttaatctagatattgcctatacacgtcaaaaaataaatttaaaagttaaaagaattcaattgatacttttgtaacctcagacacatccaagccagccccagcctacctagtgaaccaagttacagaaccacaacaaataagtgaactgtaaaactggtttctgaaatttt

SEQ ID NO: 392981 - DNA, 575 bp, Homo sapiens
ttagaaaataaacgtaaggagaaaggattttaatttagtccaacatatgataataatagtaattctaccaacatttattttaatgtaaaatatattagagtttatgctatagttttttatatttgcaaatatatttcatcatcacaataatgtatataggtagttaccaaccattttccccacgataaagtttgtgcaacttccccaatgctagctagccaataagtggcagaatctgaacatggacctaagactgtgcatccaaagagcttactctcaatgctctctatagggaaaaacattttagtacttatgtagaagttctgtaagagacagaagattaaagaattaaaaccaaaaatcatctaggtattagagtagggatgcatgtaaaaatttctaattttaatctagatattgcctatacacgtcaaaaaataaatttaaaagttaaaaraattcaattgatacttttgtaacctcagacacatccaagccagccccagcctacctagtgaaccaagttacagaaccacaacaaataagtgaactgtaaaactggtttctgaaatttt

SEQ ID NO: 392982 - DNA, 629 bp, Homo sapiens
aaagttaaccaaaactattaacctgcatatccaaaaatctcaatgaaccccaagcatataacacatgaaggaaaatacaccaaagtacactgcaatcatattgctcaaaactaacaaaaaagagaaaatattaaaaactaaagaaaaaaggcacawtacattcataggaaaaagtgcaaatttctcatcacagacaatgaaagtaagacaacaatgaatgaagatttttaaagtgctaaaagaaatgtaaactgtctgcctagaattttatatgtagtcaaaccgccagcagtgacatagaatacttaagcaatactatcgagtgacttgacctaacttaattttatagaacactctacccaagaatagcaaaatacacattcatctcaagtgcacataaaatatttattaagatacaggacattttaaaacaaaaagcccaactctcaataattttataaaaatttaagtcatacaaagtatgttctctaaccacaatgaaattaaattagaaatacataaaaaagatttctgaaaaatccccaagtataggaaactaaataacagattgtaaaatatatgtaagacaaaaaaaaactaaatgaaaattcagatgtattttgaattga

SEQ ID NO: 392983 - DNA, 582 bp, Homo sapiens
atgctgtcaaaaaattggtatgaggtataactctttgttagctgggagtatctttgagggattcctattttttccaaatttattattaatgaaaaatatcaagcattcataaaagttgaaagggcactctgtatactgcccacttagatttaaaagtcagcattccatgatatttgtactcattccctctgtctctttgtatgtttgtatatatttgcatatatacaatacatatacaggcgtagacactttgtgtttgaaatattttagtatttgaagacatcattacattgcatccctgttgcakcatgcacctcataaggataaggaatactgtagctggaataaattagttcttacatgatgttatgatatggtattatacctaaaatatttaaagttacactgtctaatatccaatacattttcacattttcccagttgtcctgatgagacaattggctgtttttatttttgcttttttttttttaaagagacagtgtcttgctctgtcacccgagctggagttcagtggtgtgatcgtagctcactgcagcttcaaactcctgggctcaagtgatc

SEQ ID NO: 392984 - DNA, 569 bp, Homo sapiens
ttattagtgtattaaatatgttaatacataggttatatgtattaataaaaaatttaggttaactaaatatgttattatttacagtggttacttttggtgatctaactgtcctaaatttgcccagcggtgttccattacagtggcccrtaggtcttgtggacgtgtcccattaggccttgagcatttttttttttattgctttctggagtgagatgtctcaggatcaccttgcactttccttgcactacttttatttggtgatggggtggctttctatcttatacattccttgttagatttattaaccctagctccagttccaaagagtcttggagcacatggttctgaatttaaccagcaatgtaatctgattatctttcaaagtactttaaatatatgggctttaaatttgtgaaggatcaccataaggaaatacaggccattgatttcagtagtctaaaattggattttatattaagttaaacagagctgcatacaggtaatgttggcccccttgggccctcgcagagctgccaatattaaaggttctggcaataccatagtgtgtc

SEQ ID NO: 392985 - DNA, 576 bp, Homo sapiens
cagtaggtttgtttacaccagcatcaccacaaacacataagtaatatgttgcagtaggacgttatgatggctatgacatcactgggcaataggaatttttcagctccattataatcttataggaccatagtcatatatgtagtccctcagtgaccaaaacatcattgtgcagtgcatgactgtaattgagcaactactagttatgtaagctgccaaatagagggaataatgtatgcattaggcatcagacaatatagcctctataaaataaacttattytttcataattcagatagaagataggtaaaaagggttactgtgttttatacattttatatatatatatatatactgtgttatatgtatatactgtgttttatatatatatactgtgatatatatatatatatattttattgtctctataaaataaacttccttctttcatatttcagatgaaagataggaaggattactgtgtttcttgttggtttatcctgtgtgaggtacccttacagtacagggtggacgttgcaactgagcaccctgaagccggggatggtaaaactctttaca

SEQ ID NO: 392986 - DNA, 576 bp, Homo sapiens
cagtaggtttgtttacaccagcatcaccacaaacacataagtaatatgttgcagtaggacgttatgatggctatgacatcactgggcaataggaatttttcagctccattataatcttataggaccatagtcatatatgtagtccctcagtgaccaaaacatcattgtgcagtgcatgactgtaattgagcaactactagttatgtaagctgccaaatagagggaataatgtatgcattaggcatcagacaatatagcctctataaaataaacttattctttcataattcagatagaagataggtaaaaagggttactgtgttttatacattttatatatatrtatatatactgtgttatatgtatatactgtgttttatatatatatactgtgatatatatatatatatattttattgtctctataaaataaacttccttctttcatatttcagatgaaagataggaaggattactgtgtttcttgttggtttatcctgtgtgaggtacccttacagtacagggtggacgttgcaactgagcaccctgaagccggggatggtaaaactctttaca

SEQ ID NO: 392987 - DNA, 495 bp, Homo sapiens
gtaaaattatcaagtttcattttagctctttcaaaagactagtgctcattaattaaaagggagaataaaaaatagctaccacaagcttggagcaattacgtatctttctctctctttctgaataaacaaaattttcactttattcacagtgcacagagaaacatagttttgagctcaattttccttccattctgcccakatttttgcagtgaatttgaaaaagtgatttctttttgtacttcttttaccaacaaaaatgagtttaaaggataatcttttgaccctggtatttgatggctttaaaagtgctggaatttcaggaaaaactgtgttatataaattttaatattgtcaggttgttctttgacaatgtattattttagatatgctgttttggggaatcacatagagaaaacacattttaggaaaaatgaaattgtgttaagaaactattatttacttgttactgaattggtaaatgcttattgagtacct

SEQ ID NO: 392988 - DNA, 609 bp, Homo sapiens
agactacttgatcttatcttccaggttactgacattctttctttctttctttctttctttaaggtattttgatctttctgcctccatttagaaaatttctaccgatatatcctcaggttcactgagccattcttctgcagtgtccaatctgctattaagctttccaatgaagttttgatttttgaaatttcattttttagttctaggattttttcatttggttcttttcttaaaaaaaattctatttatttcatgaaatatattaatactgccttactacttatatccatcttttcctgtaaattctttaaaatatcttataataatgttcttaaagtccttgtgtgcatattctataactgggcttacttatrttgattacattttttctcgattatatttttgattattttgttcttgattattgtggtttttttcctaacatgaatgcttaaatagcacaggcctcagcccttaacagcttgagttcagtgtcagccccagacatgttgtctgtggtattcagatctgcctatttagatagaagtcttgatgtctcacatcttaggatcctggggaggggaggactccttctgacacctggcaaca

SEQ ID NO: 392989 - DNA, 547 bp, Homo sapiens
acttgtgataaactttaatttataaattaggcacagtaagagattaacaataactaataatagaacaattataacaatgtgttataataaaagttacacaaatatggtctctytctctctttctgtaaatatcttattatattgtacttacctatttcagaccacagttgattgcagataagtgaaactgtggattgggggtactactgtatagggtttttggcaagtgtggaaattaggattggtggattttcaggtgtttgagcaaatgcctgaatggattgagatcatctgaaggagagtagtcactcaagtgagatggctgttgattggctggcactcagggacatgtttatcagaccacccttttttatgttttttttggtgctccaagtgaggcatgaagtgaacgcattcttggttggccagagtgaggggttgtcactgattggtgggcttgcaaaagtgagtttattgaggcaaattgccagttgattgaacacatttataattagttatgctctgttttcataactacagaataatt

SEQ ID NO: 392990 - DNA, 604 bp, Homo sapiens
gttggccagagtgaggggttgtcactgattggtgggcttgcaaaagtgagtttattgaggcaaattgccagttgattgaacacatttataattagttatgctctgttttcataactacagaataattgattttttcctaagagtgtgaggttcccccactgccccgcaacataggatgggaatacctgtagaattcataacagagattggtcatcagattgtgaactgacctttttcagggaaatctttcaaaaaatgtggagaaagaaagaataggcccaacttcaggtaatagggcttttgtaacacagtagattaacaaacccaagacctatttcctgctattttccaaacaacctaagtgtatagactagtacctctatgtgaatatgaggactcttatgcccwctaatgttcttgaatagcctagatcaagagttggcaaactttctctataagcagtcagacagtaaatattttaggctttgcgggccatgggctccatctctgttgcagctgctcaactctgccattgtaggtgccaaagcagacatacacttacataaacatgtgggtgtggctggatttggctcacaggctgtag

SEQ ID NO: 392991 - DNA, 577 bp, Homo sapiens
tcaccatgcactccagcctgggtgacaagagtgaaactccgaatcaaaaaaaaaaaaaaaaagaaagaatattttatttttgcaagtgaagtctagtcatcacagagaataataattacarataaaaatttggtaggcacaggactaattttactttataatggtataagaagttatgaaaattaagacttgattttttaaatcctaatatcagccttaggaaataatataatagttaaaataatttgtatatacctattataaataacagaaatatattagaaataaaatgtatgtatacttatgagaaacaatgacaagatgtgtaacttttgtggtatgatctgctgacaccaaatgtgtggagttttttctccacaccaaccaattctccaataccagctgggtgttctagaattcagttcaattctggcactatctggagtgagtatcataatctcacaagctaagggctcagtcccgtgagactgctcccgcttcagatgtcccacaagactcctacaaagcttcctgtacttctcagccacaaatggggattcttgcaagtctctgcttg

SEQ ID NO: 392992 - DNA, 541 bp, Homo sapiens
tgcctttgttagaatttttgtcaaatttgcttctgtctctctctccctctcttaatctctctctctctctgtgtttattcatttattttgctgtaccatttgaatttgctgcagatatcatgaatgacccttcatctttaaatactttggcctgtaccttgtaagaaaaaggaaattcttatacataatcattatttaaaactaccctcacataaattatcattaatataatactactatataattgtagcctgtattagctcattttcatgctgctgataaagacatacccaagactgggtaatttataaagaaaaagaggtttaatggactcaaatttccacgtggttggggaggcctyacaatcatgatggaagaaaaaaggcacatcttacatggaggcagacaagagagaatgagaaccaagtgaaaggggtttcctcttatgaaacaatcagatctcatgagatttattcactactatgagaacagtatgggggaaactgggaaaactgtccctgtgattcaattatctcccact

SEQ ID NO: 392993 - DNA, 541 bp, Homo sapiens
tgcctttgttagaatttttgtcaaatttgcttctgtctctctctccctctcttaatctctctctctctctgtgtttattcatttattttgctgtaccatttgaatttgctgcagatatcatgaatgacccttcatctttaaatactttggcctgtaccttgtaagaaaaaggaaattcttatacataatcattatttaaaactaccctcacataaattatcattaatataatactactatataattgtagcctgtattagctcattttcatgctgctgataaagacatacccaagactgggtaatttataaagaaaaagaggtttaatggactcaaatttccacgtggttggggaggcctcmcaatcatgatggaagaaaaaaggcacatcttacatggaggcagacaagagagaatgagaaccaagtgaaaggggtttcctcttatgaaacaatcagatctcatgagatttattcactactatgagaacagtatgggggaaactgggaaaactgtccctgtgattcaattatctcccact

SEQ ID NO: 392994 - DNA, 465 bp, Homo sapiens
ataatgttagcataagttaattagattatgctgactttttccaaattgtaccatctgtacaatgttgtcaaaaattttaaactcactttctggctactggaattagcacctcgactgtatttttggactatggccaaatctgctatctacaggattgctttaccttgtgatagccaaccatttacaattttatcctcacttgaacccactgttagctgaaattgctactacagaggtttgagatgaaatttytaatacttcaggacattgtggaaagtaacccaacacattcaagaagtatattgcttcctgtggaattgatctgcaagaaaaaaaaaaaaactacattccatactaaaatttctgataaatttttcataatttgtcactaataaaaaaatcaaaaatacattgtttgtagtaccctaaaagcttaaaatccgtaaatttacatctattacttta

SEQ ID NO: 392995 - DNA, 465 bp, Homo sapiens
ataatgttagcataagttaattagattatgctgactttttccaaattgtaccatctgtacaatgttgtcaaaaattttaaactcactttctggctactggaattagcacctcgactgtatttttggactatggccaaatctgctatctacaggattgctttaccttgtgatagccaaccatttacaattttatcctcacttgaacccactgttagctgaaattgctactacagaggtttgagatgaaatttttaatacttcaggacattgtggaaagtaacccaacacattcaagaagtatattgcttcctgtggaattgatctgcaagaaaaaaaaaaaaactacattccatactaaaatttctgataaatttttcataatttgtcactaataaaaaaatcaaaaatacattgtttgtastaccctaaaagcttaaaatccgtaaatttacatctattacttta

SEQ ID NO: 392996 - DNA, 465 bp, Homo sapiens
ataatgttagcataagttaattagattatgctgactttttccaaattgtaccatctgtacaatgttgtcaaaaattttaaactcactttctggctactggaattagcacctcgactgtatttttggactatggccaaatctgctatctacaggattgctttaccttgtgatagccaaccatttacaattttatcctcacttgaacccactgttagctgaaattgctactacagaggtttgagatgaaatttttaatacttcaggacattgtggaaagtaacccaacacattcaagaagtatattgcttcctgtggaattgatctgcaagaaaaaaaaaaaaactacattccatactaaaatttctgataaatttttcataatttgtcactaataaaaaaatcaaaaatacattgtttgtagtaccctaaaagcttaaaatccrtaaatttacatctattacttta

SEQ ID NO: 392997 - DNA, 567 bp, Homo sapiens
gggtcacttgcagaatactacagtaattggagacagcatacattcttgtgaggaggaatattccctgggaggctctggagcctgtttcagcatttggtataacagccaacattggtgaaagtgccttatgcgatgtggatgttaaaaaaatcagtcattagtcagggttggtggcacatgcctatggtctcagctacctgggaggctgaagtgggagaatcacttaagcctggggaggtcaaggctgcaatgagcagggaggggccactacactccagccttaggaacagattctgtctcaaaaaaaaaaaaaagaaaagaaaaaagaaaaaakaaaggtcagaattttatagctgaaagggacttttgagatcaaagtagctgattattatgaacattttccctcctgaaaacacagtgaaaggaaacattagcaaaatgaattttcacacatttagtaccatcagaattttaaaatctgcttcttggggcataaagcagtagttttggggatactcctaaaattcaaaacatgatgcctcttcattttattgcctgttgactgga

SEQ ID NO: 392998 - DNA, 633 bp, Homo sapiens
actcccatctgtctcctattttaggctcccaacaggatatagtcttatagattggcatggcaagtgaaattgaccatgctatttgttamtttttaggcttgtactttaatttttcacttctgagtctctaaataaacaaaatttacagtttacatttatttacattttatcataagtgtaaaactccgctattgtttctcaaatccttctttaaagagacagtttgctaaaaaagaatccaagctgaaaatacagacagaggttaaaaagtcttacttaacacagggagagagagctggtagttaccagctaaagtcaggacaaagctaaaaagggacagagcctgaatcagaacaaactttttctgttctgtggactcagtttcagagttaaagaatcaaatacaaattgtgaggagacttagagcaagaactgttctggttttccactgcatgcctgataatgtgaatgaatttcattttgcatctttatacataataatctgaaataaaatgagagtaacatttaaatgagaaaatatataagaactttatgctttaattcatactgtttacatagctcatttaatcttcacaataattcagtaaggtagatatcattattgtcctaatt

SEQ ID NO: 392999 - DNA, 633 bp, Homo sapiens
actcccatctgtctcctattttaggctcccaacaggatatagtcttatagattggcatggcaagtgaaattgaccatgctatttgttaatttttaggcttgtactttaatttttcacttctgagtctctaaataaacaaaatttacagtttacatttatttacattttatcataagtgtaaaactcygctattgtttctcaaatccttctttaaagagacagtttgctaaaaaagaatccaagctgaaaatacagacagaggttaaaaagtcttacttaacacagggagagagagctggtagttaccagctaaagtcaggacaaagctaaaaagggacagagcctgaatcagaacaaactttttctgttctgtggactcagtttcagagttaaagaatcaaatacaaattgtgaggagacttagagcaagaactgttctggttttccactgcatgcctgataatgtgaatgaatttcattttgcatctttatacataataatctgaaataaaatgagagtaacatttaaatgagaaaatatataagaactttatgctttaattcatactgtttacatagctcatttaatcttcacaataattcagtaaggtagatatcattattgtcctaatt

SEQ ID NO: 393000 - DNA, 545 bp, Homo sapiens
atgtatgccaaaatacttgattcaatggaatgctaggttacaggtacattttgctgaaagatatctggaccagtcatgcacttgtacagagttagaaataaagaagaccttacaaacattacctattctacaaataatgctggacaaaaacagcatgacaaaactcaatggctaaaaacagtgkatttattgctcatacatctggaatcagctgcagttcagagacttaggctgggtgattcttctggcctcaactggcctctcccatttgtctgggtgtagactgactattggtggggatctcatttttctaagttttatctggcttggagaatccagcttatcttaacaggtctcatacaccatgtatatgtcacatccttccagcagactaactcaggcatgtcctctcatgagatgcaaatacaagtaagctcagtgcccagtcctgaaagcagacagcaaaaggaaacacattctactggccagagcaagtcccaagaacaattcaaattcaagagatggagaaataaactgtgcctttt

SEQ ID NO: 393001 - DNA, 545 bp, Homo sapiens
atgtatgccaaaatacttgattcaatggaatgctaggttacaggtacattttgctgaaagatatctggaccagtcatgcacttgtacagagttagaaataaagaagaccttacaaacattacctattctacaaataatgctggacaaaaacagcatgacaaaactcaatggctaaaaacagtgtatttattgctcatacatctggaatcagctgcagttcagagacttaggctgggtgattcttctggcctcaactggcctctcccatttgtctgggtgtagactgactattggtggggatctcatttttctaagttttatctggcttggagaatccagcttatcttaacaggtctcatacaccatgtatmtgtcacatccttccagcagactaactcaggcatgtcctctcatgagatgcaaatacaagtaagctcagtgcccagtcctgaaagcagacagcaaaaggaaacacattctactggccagagcaagtcccaagaacaattcaaattcaagagatggagaaataaactgtgcctttt

SEQ ID NO: 393002 - DNA, 517 bp, Homo sapiens
ctgttaagtagggttgtatggttcatttagatgtccaactatgggtacctagaatagtattctggttatggcataatcaaygttctttctctcaacattcattggataatagtctcttgatcatacttttattgtgtaaaaaattttacatttttgatttttaaaaattttaatattttttgaattgttaataaaattatgtggttaaaaatataggagagtatatggtgaaaagtctatccctacaaagtgtctcctgacctttgttttctctctctaaaacagtattgctatacccgtttctggtatcttcttaagatgtttcgtgtatatataagtatgcgtctgtgtgttcttttttcccttttatcacaaatattgcacactgttctgaatcttttaaatatcagtgtattttggagattgttccatattgcataaagagctttactcatttttaattattttcttttcctctgcacaccgttttaccacatgtatatatcatatctttaag

SEQ ID NO: 393003 - DNA, 515 bp, Homo sapiens
gatctacttcctgagaatctcatcaaataaccatgaaaaattaaccatcagaaaagagactaaaagctgwcaccatatccacactgacttttcatctattcttctgaggacagctccaagagattggctgggagactttatctgcataaaaacacaaccttcattccacccctcacctttccaccacctcaccatagctcagggaaacgctgtcccaggccatgctctttgaacccattcattcactttaaaaattatttactacctctctaaaattacctgcagctccctacttctctcttccccaaaaagaaggcatttaagcttcaaccacctggcccttctttgaatctcatatttgaggggctctcatatccatatacatattaataaatttgtaactctttttctcctattaatctattgccaattgtttcaataaaattgcagaaagggcagaggaaaagctttctcttcactcctacacaaagtaaaaagtagtgtatcagctcatt

SEQ ID NO: 393004 - DNA, 474 bp, Homo sapiens
ctgtgtgatttttatgtcaactttaactgaaattttatacatgctttggatataaattaagggaaaatataaagttttatacatgagtcagtgtgcattccagtcaaggtagagatcaatatattgcaggtcaagggaaagaagtaaagatctaatcagacaatcagagatgactaccaatcttcatgacctatctgctgcctcattctacacattttcagttctgtattgtttcttttataaagctagaaaaatagaagggccacctctgcagtaaartaaaagtcagtattttacacatagataaatcagattctgaaggaaactccttggggtgataaaaaaagaataaccacatggatacctggatgctactaagcctcagagttaaaaggaagacagagtgacacacagggtgctgaaaagttttgagcctggaaacaaggtcatcctgcagtttcactaagaaaactt

SEQ ID NO: 393005 - DNA, 474 bp, Homo sapiens
ctgtgtgatttttatgtcaactttaactgaaattttatacatgctttggatataaattaagggaaaatataaagttttatacatgagtcagtgtgcattccagtcaaggtagagatcaatatattgcaggtcaagggaaagaagtaaagatctaatcagacaatcagagatgactaccaatcttcatgacctatctgctgcctcattctacacattttcagttctgtattgtttcttttataaagctagaaaaatagaagggccacctctgcagtaaaataaaagtcagtattttacacatagataaatcagattytgaaggaaactccttggggtgataaaaaaagaataaccacatggatacctggatgctactaagcctcagagttaaaaggaagacagagtgacacacagggtgctgaaaagttttgagcctggaaacaaggtcatcctgcagtttcactaagaaaactt

SEQ ID NO: 393006 - DNA, 557 bp, Homo sapiens
cttgctggcttgcttattgattgattgattgattgattgtattttgtagagacagggtcttgctgtgttgcccagactgtcttgaacttctggactcaagcaatcctcctgcctcagtctctcaaagtgttgggattacaggcatgagccactgctcctggccatggtgtcttttgatgcacaaacatttttagttttgatgttcaatttatctttttgttgttgttgtctgtgcttctattgtcacatccttattaaaattttgttstttttgttagtttatagtttccgtctgcttcttggcagcatttttctgatgagttgttgtaggaagattgtgatgcttttttatacttaaaaaaatactgtttctatataaatgctgtccatgatccttttttcctactcatcctgagtaagatgaatttttgcaggttagtagcaagagtttcctatggggtatagtaataatgggccaaagtagcctttcaggtttcacagctcaggagattcccccctctattgctacaaaaatgactgttttcttaatacagccc

SEQ ID NO: 393007 - DNA, 578 bp, Homo sapiens
caaactcaagttccctaatttcagatctagtcctttcccaatgatgccaaccttatccaagctagtatgattgtctatgtctctataaaatagtaatcctccaattgttattgttaatttttaaattgcaatttggaaagaacatgttccttttcctcttatgctgtcaaaaaattggtatgaggtataactctttgttagctgggagtmtctttgagggattcctattttttccaaatttattattaatgaaaaatatcaagcattcataaaagttgaaagggcactctgtatactgcccacttagatttaaaagtcagcattccatgatatttgtactcattccctctgtctctttgtatgtttgtatatatttgcatatatacaatacatatacaggcgtagacactttgtgtttgaaatattttagtatttgaagacatcattacattgcatccctgttgcatcatgcacctcataaggataaggaatactgtagctggaataaattagttcttacatgatgttatgatatggtattatacctaaaatatttaaagttacactgtctaatatcc

SEQ ID NO: 393008 - DNA, 582 bp, Homo sapiens
atgctgtcaaaaaattggtatgaggtataactctttgttagctgggagtatctttgagggattcctattttttccaaatttattattaatgaaaaatatcaagcattcataaaagttgaaagggcactctgtatactgcccacttagatttaaaagtcagcattccrtgatatttgtactcattccctctgtctctttgtatgtttgtatatatttgcatatatacaatacatatacaggcgtagacactttgtgtttgaaatattttagtatttgaagacatcattacattgcatccctgttgcatcatgcacctcataaggataaggaatactgtagctggaataaattagttcttacatgatgttatgatatggtattatacctaaaatatttaaagttacactgtctaatatccaatacattttcacattttcccagttgtcctgatgagacaattggctgtttttatttttgcttttttttttttaaagagacagtgtcttgctctgtcacccgagctggagttcagtggtgtgatcgtagctcactgcagcttcaaactcctgggctcaagtgatc

SEQ ID NO: 393009 - DNA, 580 bp, Homo sapiens
agaatccaagtttcctcatttttcagatatcaacaagatgtaccgaaattcacatgggaattagaaggggcccaggagagccagagcaatcttgaaaaaaaagaataatgttgaaagactcacacttctcaattggaaaacttgatacacagctacagtaattgagaaaaggtgatactggcataggrtagacatatagatcaatggaatagaattgagagtctagaaatatatccttatatttatttccattgatttttcctcaagagtgccaagataaacaaatggtgaaagaatagtcttttcaatgaatagtactgaaataactggatattcacatgaaaaagaaagaagtttgagcccttcctcacaccatacacaaaattaactcaaaatggatcacagacctaatgcaggagttaaaactataacactcttagaagatagcatagcagcaaatcctcatgaccttggattaggcaatggttccttaggtatgataccaaaagcaaagataagctggacttcattaaaattaaaaacttctgtgcttccaaggatgtcgtcatcaagaaagtta

SEQ ID NO: 393010 - DNA, 597 bp, Homo sapiens
aacattaaaataatatatgtgtatggtttaaaaattgacatgaaaagaagagacaccctacttctccacccctgctaactccctatattatayatcctaccaggtagcacatgtgccttcgtgtgcacacgcacatatccacaagcacgtgcatgtatatatatgggtttgggccataatcccaaaagataaaaatcccaaaaatatacttctggacaaaataatttttaaaattatttaaaagacattgatttacatttttaaagggggattgatttgagaaacatataaaaacatgacagaacacttcataggccactttacacaataaaataggcaataataacatacatatttctgtatagacactcagatatactaacaacatttgcaagggtgtaacagctacgagcagctgagccatattccaaaagaaatagcttatataactgcatacatctgaaatattgtgacagacaacccaagttttttgatgagattgatcaaaaacctccatgggtcaccaaaacacccaaaatacagaggtataaaaaggacatcgcttcacttactaaggaagtttgaacatttttatgt

SEQ ID NO: 393011 - DNA, 556 bp, Homo sapiens
tctgcagtggtgctgatgacggaaggtgtttcttcatgcaattttttaaaatatgaaattaatacaacagtgaaataattagctcaccccaggcagcctcagctataatttatggctccatgtctcccattttaactttgttttgcattcattagtatacaatttwaaaaaaaatctcaaggaatcacagttctgacgactaacattaaccactctgtcactcacagatattgctaaggctatcattctgaaaagtaaattaatttcccttgggtgagaactgtctgaaaaacattcaggctcctctctagggtcggctgattgactctggaaagaactcgcggcttctatggcaacgcattgtgctaggaggccctgtccacaccactttcctaggtttttgttttgtccaccctgtctctacatggaatttgggaagaagaaaattggctggtgttttggggaacataaaaggtgcaggtgctgttagaaagcttttcaacacacacacacatacacacacacacacacacacacacacacacacacacacaca

SEQ ID NO: 393012 - DNA, 556 bp, Homo sapiens
cacttacaagctctcttgaatcctgcctgtggtcaggttattaatgaaggaaggtggccacaaaggaaggtggcctgagcccaggaaggaactgagcttttatctacagaggtcagcaccttgacggtggaggaggttttgttcctccttcttctggttgcagggatacctgcaaacaagtttgcaccctaagaagtctcagagtccagggtgaggcttagccccaaagctcctctcctttgaagttgactggwtgcaatggtactgcagagcaggaaacatgggaagtaattatctttttagtaggtcactggcctcctttgggagaagagaccagagggagaggggagaaggcgaatggcgcggcccccccagaggctgcgcctgcagtagctgccttggtgattaatagccatgtcacatccgacgaatattgccttaagcagccgcgttcaaaattgagtgggaatgaaataaaacaacccaaaataaatgtttcctctattccttaggagttgctggaatctagaaatagcttttcaaatctataatttta

SEQ ID NO: 393013 - DNA, 459 bp, Homo sapiens
cacaggaagagatgggcagggttggtaagcaggtttaagactggctagtatggataacttcagaaggctctgaggcataggatctgtctgtcytgagttgtctggtacctgggccctggggagactaggttaggccctgagtggaagagacagataaaggaagcagcgggaatggggtcctgaactgattcatttgcatatgaaaaatgcactcaaagggagtcgtttgctgtcttcagcaattagctggccctgggagcccctgtccctccagggtcagtaaagtctcagatgtccaagcatcagaggcacatggttaacacaggtgcacatgacaccagctggaaagggaaggtgctgggcctcgcaggaggggcaacatgaaatgctcagggcattccagggaaaagcaacttcctgctttggttggtttggttctgtttagttttgaaggggtgt

SEQ ID NO: 393014 - DNA, 459 bp, Homo sapiens
cacaggaagagatgggcagggttggtaagcaggtttaagactggctagtatggataacttcagaaggctctgaggcataggatctgtctgtcctgagttgtctggtacctgggccctggggagactaggttaggccctgagtggaagagacagataaaggaagcagcgggaatggggtcytgaactgattcatttgcatatgaaaaatgcactcaaagggagtcgtttgctgtcttcagcaattagctggccctgggagcccctgtccctccagggtcagtaaagtctcagatgtccaagcatcagaggcacatggttaacacaggtgcacatgacaccagctggaaagggaaggtgctgggcctcgcaggaggggcaacatgaaatgctcagggcattccagggaaaagcaacttcctgctttggttggtttggttctgtttagttttgaaggggtgt

SEQ ID NO: 393015 - DNA, 614 bp, Homo sapiens
tccccaggccccccggacatacgcgccacgcctgcccgccttaccatgtaccaggtccccaggatgatcgtcccggtgcggacatggcaacagccgcagcaccgggtgctgtagaaccggtcactgcggttccgcttgaaactcatggacaccatcgtaacaggcgggcctccttcttggccgggcccctgacaaacgttctccacccgcagccaaactcaaacggctgtttcacggcctccaaaacccaacgacgcgtcttcaaacccgcccccggctcgtgcccctgccagcttcttcgcgcctgcgcactgagcgcagcgacttcggcttacccacccctcttcctccacacaggccaatggggagcggaaggctggatggaccggacttctgattggaagaacttggggattgacaagacctcacgcccaattagaagtgcaactcgcctcagcgagtctccgcctgttacgcgaaggcaagggctggttctcgggcctaggatagttggggataggtatgtccccgtagtgcactattcccgasatgagacccgcaagaaaagaggcatttaatggaaaaagggagacacgagacagcgcggatggcag

SEQ ID NO: 393016 - DNA, 388 bp, Homo sapiens
gagatgagacccgcaagaaaagaggcatttaatggaaaaagggagacacgagacagcgcggatggcagaaagcgggcacaaggggcttttctgagcaatgtgtgccacgtactggatgggaagcgtcacaggctgataacgtgacctttgcgcgcagctcaattattgcgcgggctgggggcggggcctgcggggaagggacagagccaagcccagccttgagccatcctcgcccctgtggcggaaatgggagggtgcctggaggagtggagggattggatttacaccctcttttccctccgaagcctccttggtgggggcgaagaaagaccatccaacccygccaaaggcaaaaggattaaggataaatgaaagcaagataatgtag

SEQ ID NO: 393017 - DNA, 558 bp, Homo sapiens
tcagtatgaagactgtacattaggtgtagaggtcaaccatttcagattggagcacgatcatcatttttgccttctgtaattctactgagtttttatcttaatgaagctacttgaggatgtactccaccaaaaaaaaggagaaaaccaagaggaagagatgagaaccaaaaaaccagaaatcaaacttaggacaaaagccgaggaaatttcataagatgaaagcaaaaggaagtctcaggatgacagctgtgcagggggcctaggaagccaccagtactaatagaagagaatgaaggtatcagggakcaagaaagaaattagcactgataggctacctaatcgggtagatctggcaggaaaactacaatgaaaggcattgggaaagtgtggcaaaactgagcaaatgacaagcacaaagaaaattaagcaatttagtaaacaaggcaattagtataagttcaagaaaaacaaaaatttagaaaagcaatgtaatcagagtgtaccacagtgtgtagctgtgaatagtaattacatgggcataatcaaataaacattgaa

SEQ ID NO: 393018 - DNA, 543 bp, Homo sapiens
tggaacactatgcagccattaaaaagaaaagtagctctgctaggcacrgtggctcacgcctgtaatcccagcactttgggaggccgaggtgggtggatcacctgatgtgaggagttcaagaccagcctggccaacatggtgaaacccatctctactaaaaacacaaaaattagccaggcatggtggctggtgcctgtaattccagctacttgggaggctgaggcaggagattcgcttgaacctgggaggtggaggttgcagtgagctgagattgtgccactgcactccagcctgggagatagagcaagatttcatctcaaaaaaaaaagaaaggtagctctaaatgtactaagaacataatatatatctccaagataaattattattaaaaaagccagatatagaacagtatataaaatatgctaccattaaaaaattttttttaaataatacagtcatgcattgcttaatgatgggcatacattctgagaaatgtgtcattaggcaatttcattgttgcatgaacatcataggatatactta

SEQ ID NO: 393019 - DNA, 543 bp, Homo sapiens
tggaacactatgcagccattaaaaagaaaagtagctctgctaggcacggtggctcacgcctgtaatcccagcactttgggaggccgaggtgggtggatcacctgatgtgaggagttcaagaccagcctggccaacatggtgaaacccatctctactaaaaacacaaaaattagccaggcatggtggctggtgcctgtaattccagctacttgggaggctgaggcaggagattcgcttgaacctgggaggtggaggttgcagtgagctgagattgtgccactgcactccagcctgggagatagagcaagatttcatctcaaaaaaaaaagaaaggtagctctaaatgtactaagaacataatatatatctccaagataaattattattaaaaaagccagatatagaacagtatataaaatatgctaccattaaaaaawtttttttaaataatacagtcatgcattgcttaatgatgggcatacattctgagaaatgtgtcattaggcaatttcattgttgcatgaacatcataggatatactta

SEQ ID NO: 393020 - DNA, 612 bp, Homo sapiens
acaacgaaggtcattagaagcctgagtagacctgaactacagctgcctgggcaccatagtgaaggttataagataagcccgtgcccaggcaaacctagataacggacatctgggttgcttggcaacggtcatgtgcaatcctgtatttgtcctgcctctgtgtccctgctttcacaccaccrtaagcttgcttcaagctagcccacccccttttgtgaagtgtgtataaaagtcaggtgctgtctttgttctgggcccagtcttttggatgtgagtcagctgggcctgagtgcactcaataaagattctcctgtttcaacgtgaggtctctctcgtcctcctgagtcccacaacaaaggaagcggactttacctgcagagagtcactaaagggggcatgctagtcttggacagtcagagcacctgttataatcatgccaactagaggccctcaccatgtttcatgagtgtcaaataaggattcccttgtgatcctgaaaggaaaagtggtctcaaatatgacgtttcaggaagggaggggcttaaggcaaaattaggctgagctactggaaataaagtggtgtttcctgaagacctaaatgtggaccaggat

SEQ ID NO: 393021 - DNA, 612 bp, Homo sapiens
acaacgaaggtcattagaagcctgagtagacctgaactacagctgcctgggcaccatagtgaaggttataagataagcccgtgcccaggcaaacctagataacggacatctgggttgcttggcaacggtcatgtgcaatcctgtatttgtcctgcctctgtgtccctgctttcacaccaccgtaagcttgcttcaagctagcccacccccttttgtgaagtgtgtataaaagtcaggtgctgtctttgttcygggcccagtcttttggatgtgagtcagctgggcctgagtgcactcaataaagattctcctgtttcaacgtgaggtctctctcgtcctcctgagtcccacaacaaaggaagcggactttacctgcagagagtcactaaagggggcatgctagtcttggacagtcagagcacctgttataatcatgccaactagaggccctcaccatgtttcatgagtgtcaaataaggattcccttgtgatcctgaaaggaaaagtggtctcaaatatgacgtttcaggaagggaggggcttaaggcaaaattaggctgagctactggaaataaagtggtgtttcctgaagacctaaatgtggaccaggat

SEQ ID NO: 393022 - DNA, 612 bp, Homo sapiens
acaacgaaggtcattagaagcctgagtagacctgaactacagctgcctgggcaccatagtgaaggttataagataagcccgtgcccaggcaaacctagataacggacatctgggttgcttggcaacggtcatgtgcaatcctgtatttgtcctgcctctgtgtccctgctttcacaccaccgtaagcttgcttcaagctagcccacccccttttgtgaagtgtgtataaaagtcaggtgctgtctttgttctgggcccagtcttttggatgtgagtcagctgggcctgagtgcactcaataaagattctcctgtttcaacgtgaggtctctctcgtcctcctgagtcccacaacaaaggaagcggactttacctgcagagagtcactaaagggggcatgctagtcttggacagtcagagcacctgttataatcatgccaaytagaggccctcaccatgtttcatgagtgtcaaataaggattcccttgtgatcctgaaaggaaaagtggtctcaaatatgacgtttcaggaagggaggggcttaaggcaaaattaggctgagctactggaaataaagtggtgtttcctgaagacctaaatgtggaccaggat

SEQ ID NO: 393023 - DNA, 603 bp, Homo sapiens
gccctcccaccaattatatgaattcagtaagtaattcagattgcaaatgagattgtacattccttcttcctctgaccktctgtgactcacttttggttaaacagttaattatcttttattattattttttagagacagggtctttatcacccaggctgtagtgcaatggtgcaattatagctcactgcaccctcaatttcctgtcctcaagcaatcctccctccttggtctcccaaagtgctgagattacaagtgtgagccaccacatccagccagttcatgatcttttaaagataaaaagataatttaaaaaactacataggtaccctcttagttaccatttttggtgttcttcattcccttgtgtagatacatatttccatctggtataatttttcttctttcagaaagactttaacattttttacagtgtggttctgctggtgataagttcttttgggttttgtatatctaaaaatatttttactcactttgggaggttaaggcgggcagatcatgaggtcaggagtttgagaccagactgaccaacatagtgaaaccccatctctactaaaaatacaaaaagtagccgggcatggtggt

SEQ ID NO: 393024 - DNA, 603 bp, Homo sapiens
gccctcccaccaattatatgaattcagtaagtaattcagattgcaaatgagattgtacattccttcttcctctgaccgtctgtgactcacttttggttaaacagttaattatcttttattattattttttagagacagggtctttatcacccaggctgtagtgcaatggtgcaattatagctcactgcascctcaatttcctgtcctcaagcaatcctccctccttggtctcccaaagtgctgagattacaagtgtgagccaccacatccagccagttcatgatcttttaaagataaaaagataatttaaaaaactacataggtaccctcttagttaccatttttggtgttcttcattcccttgtgtagatacatatttccatctggtataatttttcttctttcagaaagactttaacattttttacagtgtggttctgctggtgataagttcttttgggttttgtatatctaaaaatatttttactcactttgggaggttaaggcgggcagatcatgaggtcaggagtttgagaccagactgaccaacatagtgaaaccccatctctactaaaaatacaaaaagtagccgggcatggtggt

SEQ ID NO: 393025 - DNA, 603 bp, Homo sapiens
gccctcccaccaattatatgaattcagtaagtaattcagattgcaaatgagattgtacattccttcttcctctgaccgtctgtgactcacttttggttaaacagttaattatcttttattattattttttagagacagggtctttatcacccaggctgtagtgcaatggtgcaattatagctcactgcaccctcaatttcctgtcctcaagcaatcctccctccttggtctcccaaagtgctgagattacaagtgtgagccaccacatccagccagttcatgatcttttaaagataaaaagataatttaaaaaactacataggtaccctcttagttaccatttttggtgttcttcattcccttgtgtagatacatatttccatctggtataatttttcttctttcagaaagactttaacattttttacagtgtggttctgctggtgataagttcttttgggttttgtatatctaaaaatatttttactcactttgggaggttaaggcgggcagatcatgaggtcaggagtttgagaccagactgaccaacatrgtgaaaccccatctctactaaaaatacaaaaagtagccgggcatggtggt

SEQ ID NO: 393026 - DNA, 566 bp, Homo sapiens
cagcccagggacttgctgctttgtgcagtctgggtacttggtgctctgcatcccacctgtggctaaaaggggccaacaaagagctcaggccattgcttcagagggtgcaagcccgaagccttgttggcttccacgtggtgttgagcctgcaggtgcacagaaatcaagaattgaggcttgggaacctcctcctagatttcagaaaatatatggaaaggcctggatgtccagacaaaagtttgctgcaggggcagagccctcatggaaaattcctaytagggcagtgcagaagggaaatgtggggtaggagcccccacacagagtcccaatggggcactgcctactggagctgtgagaagagtggcaccatccttcagaccccagaatggtagatccactgacagcttgcactatgcacctggaaaaactgcagacactcagtgccagcctgtgagagcaaccaagaggggggctgtaccctgcaaagccacagcagcagagctgctcaaggccatgggaatctacttcttgcatgagtttgacctggaatgtgagacacagagtca

SEQ ID NO: 393027 - DNA, 527 bp, Homo sapiens
gtgaatccatgttattaatgagtaaactgaaacttgctaaagaaacctacccatagttttcaatctgtaaccgttagaggcaagatttgaacctgtgtgtgtctggctccagggaatgtccttccccagcccatttctttatatatggaaaatggaaatagttgtccctgctctgccatttttgcagggtgttttttggaaggcccaaggaattaacagatatggagttgtttgggtttgagatagtgaaattttatgccaatgtaaaaagagtacattgaagattggtgtcttcctactggggtgtgaagtttgaggtagaaccaggattccttagtcctgctcaaaagcatttttactggactctggtggttctccttggataggtcttaggagtgggtagagcakcctcataaggatacagaaagtcacagcacgaggctgggcttgcctccttactctgcctgctcaacttctcccactgtaactcctttttaatgaacaatctcttgattgctttcctttct

SEQ ID NO: 393028 - DNA, 550 bp, Homo sapiens
tgagccgctgtgcctggccccattatattttcttgacgttattggtttatttaagttttttatgtatcttccagttagtttttaggatttatgttgttacagaaaattgttcatgtctcattgacttgaagttcatatttttcttgtgtggtttcaagtatttattgtatcctttttccttgtttgaggtttgtctatattgttgatcttttaaagagtctgtttttggtcaatcctctctaagactttctccctttcattaatttctgctcycatttttattatttcttttattctaccctgattttcttttcctagcttcttcagttgaacaaggaactcatttatttttaatctttcttcatttttaataaatacattgaaggctaaatttttcctctaggcagagctttaatcatgtcctgcagattttgcatcaagcatagtgattgtcatttagcgctaaatatttcataagttttcattgtgaatttcttttttaacccatgttatttgggagcatattttttcttctccaaatgcatcttaa

SEQ ID NO: 393029 - DNA, 550 bp, Homo sapiens
tgagccgctgtgcctggccccattatattttcttgacgttattggtttatttaagttttttatgtatcttccagttagtttttaggatttatgttgttacagaaaattgttcatgtctcattgacttgaagttcatatttttcttgtgtggtttcaagtatttattgtatcctttttccttgtttgaggtttgtctatattgttgatcttttaaagagtctgtttttggtcaatcctctctaagactttctccctttcattaatttctgctcccatttttattatttcttttattctaccctgattttcttttcctagcttcttcagttgaacaaggaactcatttatttttaatctttcttcatttttaataaatacattgaaggctaaatttttcytctaggcagagctttaatcatgtcctgcagattttgcatcaagcatagtgattgtcatttagcgctaaatatttcataagttttcattgtgaatttcttttttaacccatgttatttgggagcatattttttcttctccaaatgcatcttaa

SEQ ID NO: 393030 - DNA, 561 bp, Homo sapiens
cagcaatcaccttgctccgccatccaccgctgagccatctgccccacgtcactgaagcaacaggttccctctgcaaagccaccaacccacgtgcccaatcatccagccccagaaaaatttgagatctccccaccctctctccagagtctgctatggtttgggagaggaaccctaaagccatgtccatacaataatacatggaaaatatgtgcaatctttttttgttgttgttgttgagacggagtgttgctctgtcacccaggctggagtgcagtggcacgatcttggctcactgcaagctccacctcctgggttcacaccattctcctgcctcagcctcctgagtagctgggactacaggtgcccgccaccacgcctggctaatttttttgtatttttagtagaaacggggtttcaccttgttagccaggatggcctcgatctcctgacctcatgatccgtccrccttggcctcccaaagtgctgggattacaggcatgagccaccacgcctggccaatatgtgtaatcttaagtaaaaacattacatctacatatttgt

SEQ ID NO: 393031 - DNA, 589 bp, Homo sapiens
tacagtaaacacctaccttgcccttcctccctccccatatactgttctgaagagcaggagtctcatacagcctttctggaagcgtttcacaagctcaacacatcctcttgtatgtgctctctctcctttctccttcccttgcttttatgttgsctcattcttccttccctggaattacaccattcaacaaagcattggatgtaagtttttgcctctaggatcttgctctctagggaaactgaactaagatacacttctatttctcttcccaagaaacagagaaaacagtcagagcagcaccttccccttgcctatatgtgacccaaaaggaaatgatggttgatggaatggaagtggcaaaaaggagagaggaaaggtctgtgtcttcttgaaatccaaaattcatagcagaagagatgtggccttacaaggtgttaaaaagggagaccacaggcaatatagcaaaaatagaagggtaatttcaagaccagaaactctaaaggggaatttatcttagaatgataagaagtaaagagcaaggtagaaggtaaggaacagaaggagatgagtttagaggtttacagccaaa

SEQ ID NO: 393032 - DNA, 589 bp, Homo sapiens
tacagtaaacacctaccttgcccttcctccctccccatatactgttctgaagagcaggagtctcatacagcctttctggaagcgtttcacaagctcaacacatcctcttgtatgtgctctctctcctttctccttcccttgcttttatgttgcctcattcttcmttccctggaattacaccattcaacaaagcattggatgtaagtttttgcctctaggatcttgctctctagggaaactgaactaagatacacttctatttctcttcccaagaaacagagaaaacagtcagagcagcaccttccccttgcctatatgtgacccaaaaggaaatgatggttgatggaatggaagtggcaaaaaggagagaggaaaggtctgtgtcttcttgaaatccaaaattcatagcagaagagatgtggccttacaaggtgttaaaaagggagaccacaggcaatatagcaaaaatagaagggtaatttcaagaccagaaactctaaaggggaatttatcttagaatgataagaagtaaagagcaaggtagaaggtaaggaacagaaggagatgagtttagaggtttacagccaaa

SEQ ID NO: 393033 - DNA, 589 bp, Homo sapiens
tacagtaaacacctaccttgcccttcctccctccccatatactgttctgaagagcaggagtctcatacagcctttctggaagcgtttcacaagctcaacacatcctcttgtatgtgctctctctcctttctccttcccttgcttttatgttgcctcattcttccttccctggaattacaccattcaacaaagcattggatgtaagtttttgcctctaggatcttgctctctagggaaactgaactaagatacacttctatttctcttcccaagaaacagagaaaacagtcagagcagcaccttccccttgcctatatgtgacccaaaaggaaatgatggttgatggaatggaagtggcaaaaaggwgagaggaaaggtctgtgtcttcttgaaatccaaaattcatagcagaagagatgtggccttacaaggtgttaaaaagggagaccacaggcaatatagcaaaaatagaagggtaatttcaagaccagaaactctaaaggggaatttatcttagaatgataagaagtaaagagcaaggtagaaggtaaggaacagaaggagatgagtttagaggtttacagccaaa

SEQ ID NO: 393034 - DNA, 604 bp, Homo sapiens
tcctcattgtccccataaacctgctctcccacagtctcccaactcagtgaagtgcagctctgtccttccagctgcttcagccaaaacctcaagtcagccttgacccctctcttcccactttctactgcaatccattgggaaaacatgtggctctgtcttcatgacatattcaggaatctctgggcttctcccaacatcatccacctagtgaggctcccggaagccacccctaatcaccctacaggctctctccacccaacagccagagggatctcttgtggtatgagtcagatcaggacactctgctgctcaaaactcccctgtgactgcccccagtaagccctacaatgacacaaagaccctacggacttccccttcccggtctcagcttgcacagctcctctttctccttgctgcactccagccactctggattcccagctgtgtctcaaacatgctaggcacactcccatctcaggacccttgcacttgctgttccccccacccagaaagctcctcacccagagccatgtgttctcctctctcccrccctgttggactctgctccattgccctgtcttcagagtccttcctgggctacccc

SEQ ID NO: 393035 - DNA, 477 bp, Homo sapiens
agaagggctttacaagctgtaattcacatactatacaattcactcacctaaagtgtctgattcagtggtatttawtattgtcacagagttatgcaaccatcactacaattttaggacattttcatcatcctcaaaaaaaacaccacacctattcacagtcacacctaatttcccccctgccgtctccaatccctggtaaccatgaatccactttctgtctctgtggatttgcctattctagatatttcattttaaataaaatcatatatagccttttgtgtctggcttcgttcacttagcataacttctcaaggttcatccatgttgtagtattcattggtactccattcctttttgtggctaatattccattgtatggatacactacatgttgtttgtctattcaccagcagatagacatttgagttgtttctattatgaataatgctggtatgaacatttatgtacaagtttttg

SEQ ID NO: 393036 - DNA, 485 bp, Homo sapiens
tacttcaatttttctctaagacttttatcattttagctcttacatttaggtctctgatccattttgtatttagtgtgaggtaggggtccaatttaattttttttgcatatggatacccagttgttgtagcaccatttgttgaaaagaccatcctcatatatttttgatgttaataaatacattttaaatttcacttttaaaacttttaagtgcttttgtaaatttctttgggatccgttgtgaagaaaattatcaaaataatgtaattcctcaaagggtatcwtttgttactatgtgatcctgaatgaggaatcaattgatttcttatctgtctatatttgaaactaacattcataaaaggatatttaaccattgaattctggctcttaagacaataaaatctggcctctaaacacctttttgttcctattttttagtggctgcatttcatcttattttacttcatttattttttatgttaattg

SEQ ID NO: 393037 - DNA, 519 bp, Homo sapiens
gcaacactggctctctcctggatggttctgtctacatccaccactttggccccaactggcttctcctctcccagtcacaacatatgggggctacacttggtgttcagtttctgtgtcaccagctcacattatctgtactctatctcaatgcattcatggtcagtaatgatttttgtgttgctttatattcataggatgttcttgtttttgtttcttgaaacagggtcttgctctgtctcccagcctggagtgcagtagcacrattatagcttactgcagcctcaatctcctgggctcaagccattctcccaactcaacctcctgagtagctgggactaaaggtgtgtgccactgcccccagcccaaaggatgttttatagtgatctaagtttatataacatcttatggatggtattatctagaaaggaaacaagttatttaaggtcaatatttaagagttagaactaaaactgaattgtagatcctctagaatcaaccttccttttctttatcaacctt

SEQ ID NO: 393038 - DNA, 413 bp, Homo sapiens
cctggggctcttggcacctctgtgttggacttttgcatcgctctccctgtggattctctcccagctctcccttcctccatatgctttgcagggtgatctttctgaaatgcagatctgattgggatrctttgtcgcttaaaacctttgaaagccagcccctgctcccttgccttcaagccacctctgtgtccttagaagagtgtacaagcgcttcctcctgccagcccagtctcctttttccaagcagttcaaagccagaggcatctatttcttcaattctacttcattcccacccaccactcccaccctggctcttgggtgagaagtactgaaggaaatcagaacatatagatatatatacacatacacacacgtacatacacatgcacagttttttatatatacacatattt

SEQ ID NO: 393039 - DNA, 577 bp, Homo sapiens
acaaaatcaccagtgtaagactctgttcaaggggtcttttttcctagcaaagtgggcagggatgactcagccaacttaatctcacatggaggaggggaggaccagcaggcttctagaatgggcctctaatggcagcctggcagctgtgactcagggaacccttgcatgtatgctgggtgtccagttctgcccattcttctcaggccatgatggggtcacacatggaagggaggaagcaggcaagcaggaccaagactgtgcttgagctcatgggtcactgtcaactgcagaggacagtaaatggctccttcttgctggttttgaaaagcagatgcttaactcatatataacaatgggtgcgtcttgacttttgttcactgctctttatcatatgtttggacttcatttgggagcaagggasagcgtagcttttatttttggttttatgattttctgccttttaaatgtaaagccatatctttctgtttcccatttccttcagttattcaaatgtcttaatgtctttagcccacacattgaatcttgtacataatcatttctatgaccccggcttggt

SEQ ID NO: 393040 - DNA, 614 bp, Homo sapiens
agaagtttcatgcttattttgtattttctctgcccaatcctgaaatcagccatttctctaaggagccatgtttccttttaatggagaacggtgtttagaaaccaagatcttgaaggctggatgtgctcattgatactggggtgttgctggttttatacctcctgagatcacggagctaggaaatacagctatatacaaatatatgcatatttactttcctgtctctattaacaacactgagtttgtactgatgtgacctattttaatctgaccccacagaccttagtctagtctttcccttttatttgtagctcctctcttcatcaataagaaactcagcttccattagccacaatgtttgtttattyagtcttcaaatacatatattttcagaattgttaacctatgtgtctgtagaaaaaactcccaaggcaggcagatcacgaggtcaggagattgagaccatggtgaaaccccgtctctactaaaaatacaaaaaattagccgggggcagtggcgggcgcctgtagtcccagctgttcaggaggctgaggcaggagaatggcgtgaacccgggaggtggagcttgcagtgagccgagatcatgcccctgc

SEQ ID NO: 393041 - DNA, 631 bp, Homo sapiens
ttgtttattttaaatttttttwaattaagtaagtgaagcaactgcttactgagcagtgaaccctggaaagctgcagctggcttccagtctctgaggtcttacatcagaataattggtaatcatgtctgttcgttatttattcctactacagtagtctttcaatttcatttctttttacaagccaaccatatcacacatttacattgttaatatttgcattgttaattttcttagcaaatgacttttatttcttctctttactcccagagaaaatagataatggcaaaatcagttgaaaaactaaatactgatgaccttgttatgactgatcccaaatcaatctaatgaacatttcatggctccatggtggtcatcactaattgtaatatgacagatacaggaaagacagaactacttggtacataatgttaaaatagctgatgtcacagactagagttgacccactcctgtgttgtgtatagccttacgaagccagtaccagttaaagaaagcatccaatggccaaaagtcatttcaaaagcactcacactggtaatttgctttcttggaagtggtcataaatccccctttctctctatccgtgtctattggaactcaaagctgccagagg

SEQ ID NO: 393042 - DNA, 631 bp, Homo sapiens
ttgtttattttaaattttttttaattaagtaagtgaagcaactgcttactgagcagtgaaccctggaaagctgcagctggcttccagtctctgaggtcttacrtcagaataattggtaatcatgtctgttcgttatttattcctactacagtagtctttcaatttcatttctttttacaagccaaccatatcacacatttacattgttaatatttgcattgttaattttcttagcaaatgacttttatttcttctctttactcccagagaaaatagataatggcaaaatcagttgaaaaactaaatactgatgaccttgttatgactgatcccaaatcaatctaatgaacatttcatggctccatggtggtcatcactaattgtaatatgacagatacaggaaagacagaactacttggtacataatgttaaaatagctgatgtcacagactagagttgacccactcctgtgttgtgtatagccttacgaagccagtaccagttaaagaaagcatccaatggccaaaagtcatttcaaaagcactcacactggtaatttgctttcttggaagtggtcataaatccccctttctctctatccgtgtctattggaactcaaagctgccagagg

SEQ ID NO: 393043 - DNA, 631 bp, Homo sapiens
ttgtttattttaaattttttttaattaagtaagtgaagcaactgcttactgagcagtgaaccctggaaagctgcagctggcttccagtctctgaggtcttacatcagaataattggtaatcatgtctgttcgttatttattcctactacagtagtctttcaatttcatttctttttacaagccaaccatatcacacatttacattgttaatatttgcattgttaattttcttagcaaatgacttttatttcttctctttactcccagagaaaatagataatggcaaaatcagttgaaaaactaaatactgatgaccttgttatgactgatcccaaatcaatctaatgaacatttcatggctccatggtggtcatcactaattgtaatatgacagatacaggaaagacagaactacttggtacataatgttaaaatagctgatgtcacagactagagttgacccactcctgtgttgtgtatagccttaygaagccagtaccagttaaagaaagcatccaatggccaaaagtcatttcaaaagcactcacactggtaatttgctttcttggaagtggtcataaatccccctttctctctatccgtgtctattggaactcaaagctgccagagg

SEQ ID NO: 393044 - DNA, 622 bp, Homo sapiens
agaatccaatccagatggagaaccaattgttatttccaaccattttagttcccagggttaaagtcagcaaatactggctgagaggataaaatcctcaaactcagataatgatgttgcttgaaaaaatggaagtctctaaccaaaactgaaaagaatattaattgcaaattccacttctccatagtgcatactttgctgtaatcttaaatatataagttacttggcctacatgatttctattaagatgcagcttttataaactttcgagtatgaattagcatctggtggtgttttcgatgaatrcttctgaaggctttgtgtgaggaagcctgttagggtaatggcaacctctctctcacaatagtcccttgtagaatactcctgtgtcatccctgttttatggatgagaaaaaaccaatttgtctaagatcaaatatttaacatgtgaaggagctagaatttttaaacagcttattgagatataatttacataccataaaattctcccttttaaagtgtgcaattcagtggtttttagtagattcaccaaattttgcagccattgccagtatctaattccagaacattttcatcaccccaaataaaaaccttatacccacta

SEQ ID NO: 393045 - DNA, 617 bp, Homo sapiens
gtccctgtgacttgaccatctgagtaattagatgcatcttatgcagagatcagttgcttcagccccmttgacagcctctgcctgactcatctctgtccctcacaagcagacctcatcatctcataggattctgaaatgcctctaaaggccctttgtgccaggattctttcacagctgcaagcataaatgatattttggaatcttcacccaaattttacacttttgtttaactcaatattggacacttgaaaggacaggcctcctggaacccagagaatcaatcgccagggttttactttctaaatgggaagacaaaatctgcttcagaaaattgaagcccaggggtttttagcccaacaaaatgccttcaaagccagccagtaaaaaacactcacatattaactttagggtcttaacgacttcaaaccttatttttttaagtcctagattccattccttaccccacaattctttagttcctttctcttcatgatgagatttagttatcagagccagttggccctctgaacatttttctggtgtctggaaacaggatcacttttcagggaccaaaaaatttattttctctagctaacctcataaaatgcagacttctc

SEQ ID NO: 393046 - DNA, 344 bp, Homo sapiens
ttcagagccactacactaccagaaaagacctgcttcagctgctagctgtaaccatcgaagcagagcccctgtggccttcakttttcgtgagggttgctgggctgctaaccataaaggctcacccaccacactctcatcccaaagggtgctggattccaaagttaacactggagaattccaaaagcacctcacctccaactcattaacatgcagtcctggattctaaacattcctctacttaataaaaacaggaatgaaggagaagagaatgtagggtgaggaaagcattatttttgagacatttacttgatagcattttaagcccaggagacaaaccctggtcc

SEQ ID NO: 393047 - DNA, 584 bp, Homo sapiens
attcttgaaaaaggctaaaataaaattgatagatttctagtcactgaccaagtaaaatagaagacacaaattaccaataccaggtataaaaggacattgctacagttaataaaaggatgacagagaatatgaacagctttatgcccatacatttaacaacttaaatggacaaattccttgaaagacacaaatgaacaaacttcattgaagaacaaagagataatcagaatagccytacattaatgaagaaattgaataaataacacaaagtctatacaaatcccttctgaaagcagaaggggaaggagtacccccaactcacaaaattcgcattgtctcaatattaacaccattgcaagaaaagaaactataaaccagtatttcttatgattatagatgcagaaattttcaacaaaatattagcagtcattctcagctgatttttttctaatatttaatttgtattttaaaaactgattattttgactacagcaccaagtagtaaaaccttaatgatcagaacacaactaatgatgatcttcatttagatgaatcagaaacaataatatgtcactagtaactaa

SEQ ID NO: 393048 - DNA, 354 bp, Homo sapiens
aaactcttattctgtatgatactgtaatggtggatagtaccattatacatttgtcaaaacccayagaatatacaccataaagagtgaaccttaatgtaaagtatggactgcacttaataactatctgccaatattggtttatcagttataacaaatgtatcacattcatgcaagatgttactaatgggaaattggagaaggttgagggggtatatgggaacaaatttttgcccaatatttttttctgtaaaatttaaactactctttcccaaaatgaagtctgcttaaaaaattatatccaaaggcaagcctacaggaagtgggagagtccccaggctcatggagggcacaact

SEQ ID NO: 393049 - DNA, 612 bp, Homo sapiens
actatctgccaatattggtttatcagttataacaaatgtatcacattcatgcaagatgttactaatgggaaattggagaaggttgagggggtatatgggaacaaatttttgcccartatttttttctgtaaaatttaaactactctttcccaaaatgaagtctgcttaaaaaattatatccaaaggcaagcctacaggaagtgggagagtccccaggctcatggagggcacaactctttacaaccccttccgcaaacacatgcagccccaggcctgggatttggcattttctgccatgaatcatcgcttatctgtccatgcacacttctgtgatctccccacaccagggccagctctcatccacagtggtttccctccagcccctggcagtgtctggctggggtaggtgcctggtgttcatgctgatgggcaagtgtatgtgttctaaggcgtgagttaacccgggattccatagatgagcttcagacacatctgtatctactctgagttcctaaagggaagggtacaagtaatttttaggacactggatgttccagatgcttctttgttaccttcagcaggcaatcctaactcctcctgtctttccttctt

SEQ ID NO: 393050 - DNA, 612 bp, Homo sapiens
actatctgccaatattggtttatcagttataacaaatgtatcacattcatgcaagatgttactaatgggaaattggagaaggttgagggggtatatgggaacaaatttttgcccaatatttttttctgtaaaatttaaactactctttcccaaaatgaagtctgcttaaaaaattatatccaaaggcaagccyacaggaagtgggagagtccccaggctcatggagggcacaactctttacaaccccttccgcaaacacatgcagccccaggcctgggatttggcattttctgccatgaatcatcgcttatctgtccatgcacacttctgtgatctccccacaccagggccagctctcatccacagtggtttccctccagcccctggcagtgtctggctggggtaggtgcctggtgttcatgctgatgggcaagtgtatgtgttctaaggcgtgagttaacccgggattccatagatgagcttcagacacatctgtatctactctgagttcctaaagggaagggtacaagtaatttttaggacactggatgttccagatgcttctttgttaccttcagcaggcaatcctaactcctcctgtctttccttctt

SEQ ID NO: 393051 - DNA, 666 bp, Homo sapiens
ctaattgctattcttatctttattattttcttctgtattctctgtgtttgrcatgttttttcctaacctctaaaatcttaagattttcagcctttcttcttttcaattatgtgcatttaagactataattttcacaagacctcatctctactaaaaattttttaaaagtagctgggtgtggtggtgcacacctgtagtcccagctactcagaaggctaaggcaggaggatctctttagttcagaagttcaaggttgcagtcagctatgatcgtgccactgcactctagcctgggcaacagagagagacactgtctcaataaataaataaatatgaaaaagactataattttcctctaagtaaattttagctatagtccacaggatctgatgtgatgtattttcattatgttcgattcaaaataatttctaaatttcactgggatttcttctttgatccaaaaattatttaaaagtatattaagtaatttccaaatatttaggaattttctaataccttcttttattgtagatttcttgcttaatttcaccgtgataaaaaaaaacatactctgtatgattggaattcttcgaaatttcttgagacttgtgttatggcccaatacatgaaaataatgcatcctaacagttgcagtgtttgttaaatg

SEQ ID NO: 393052 - DNA, 666 bp, Homo sapiens
ctaattgctattcttatctttattattttcttctgtattctctgtgtttggcatgttttttcctaacctctaaaatcttaagattttcagcctttcttcttttcaattatgtgcatttaagactataattttcacaagacctcatctctactaaaaattttttaaaagtagctgggtgtggtggtgcacacctgtagtcccagctactcagaaggctaaggcaggaggatctctttagttcagaagttcaaggttgcagtcagctatgatcgygccactgcactctagcctgggcaacagagagagacactgtctcaataaataaataaatatgaaaaagactataattttcctctaagtaaattttagctatagtccacaggatctgatgtgatgtattttcattatgttcgattcaaaataatttctaaatttcactgggatttcttctttgatccaaaaattatttaaaagtatattaagtaatttccaaatatttaggaattttctaataccttcttttattgtagatttcttgcttaatttcaccgtgataaaaaaaaacatactctgtatgattggaattcttcgaaatttcttgagacttgtgttatggcccaatacatgaaaataatgcatcctaacagttgcagtgtttgttaaatg

SEQ ID NO: 393053 - DNA, 526 bp, Homo sapiens
actaatttaaatgtctaatatgtgaattcagtgtcgatttaatggcacggcatcaagcctctgaacagtaatctaggggtgtatctgtaaaatggaagttattttggcaaatactgtaaatacgatattcattgtcacacagaatatgtagcttaaataactgttagcctgcaagttcagcctgtggtatcttaatagtatttatcccgagtgactgtactacttgaaggacaagtgccccctaataatgtttggctgattagcagaactctgtcaaacaagcagaaaacactctataggggcggcctttttactcacccctcccatttccatcactgttaaaatgaaacttgagcttgtctttgtgcattctcatgtcaacartgaagaactagaatatctttctgtccctggtgctatacccctggaccacttaaccaaaaattgcgagagtatattacaaggttaaagagcagagagctcagagattgttatagttctcattaagtgatgtttctatgcactg

SEQ ID NO: 393054 - DNA, 580 bp, Homo sapiens
tcatattcttaaaatgcacatagtacccaaagtcatctacagattcaatgcaatctctgtgaaaatcccaatgacatttttgcagaaataaaaaaaatgactccaaatagccaaaacaatcttgagaaaaattttaaaaacctggagccctcgtgtttcctaatttcaaaacatattaygtaactactataatcaatatagtatggtaatggcataaagatagaccaataggtctatgaaacaaaacagaaaaaaatgctttacaaaaactgttaacatttataatgaaatgatctttgacaaactgctaaggctttgtaatggagaagaatagtctcttcaacaaatagctgtaggaaagttaacgtatattcgtaatgcttgagtttgttattgaaaatgcaattgcttattgtattgtgcctgttttcaagaagaaaatggagtttataaaggataagtcaactctagatatttttgttcatgtctagtttcttaatgtgtttattaattaatgttattttaaatacaactatagtactattaaagtagatatttactcggggaatatttagtgtga

SEQ ID NO: 393055 - DNA, 518 bp, Homo sapiens
gtttattgtaatgtaaaatgcactgttgattgtaatgtaaaatgatacggttgctatgaaatacagtatggaggttcctcaaaaaattcaaaatagaactaccatatgatccaactaccccattattgagtatatatccaaaggaaatgaaatctgtacattaaagagatatccaccttcccgtgtttattgcagtactattcacaatagccaagatatagagacaacacaagtgcccattgatgaataaatggataaagaaaatgtggtacatacacacaaaggaatacaattcaacaacaacaaaaaataatgaaattctgccattggcaacaacatggatgaacttgaaggacattatgctaagtataataygccaggcacagaaaaacaaatactgcatgatctttctcatatgtggactcgaaaatagttgatctcatagaaacagagtgtaattatagttatcagagactggggatttagagcacacgggaggatgggaagatgtatgtatt

SEQ ID NO: 393056 - DNA, 508 bp, Homo sapiens
tagtcaggctgtcggatgaggtctcacagcccaacctcttctcactggtggccttgctttgggcaagtctttcccctcagggcctcaacatcacagtctgaacattccttatggatttgctatcagtataaagtaagatactttttttttttaatgagacagagtttcgttcttgttgcccaggctggaatgcaatggcgtgatcttagctcactgcaatctctgcctcccaggttcaaacaactmccctgcctccgcctcccaaatagctgtgattacaggcacccaccaccacaaccagctaatttttttgtatttttagtataaatggagttttcaccatgttggccaggctcgtctctagctcctgacctcaggtgatccgcccgcctcggcctcccaaagtgctgggaagtaagatactttatgtgaaggatctggcatacagaggacactcaataaatatcattaatattgttgtcatgtcgctcccatgatgcctagcctt

SEQ ID NO: 393057 - DNA, 521 bp, Homo sapiens
cagctttgtgacaccaagatcagtccagaggcctgtgttggtataaacatgccctatgccatctaaaatatgtggctacagcaagggcatrcagtttgaagcgtacaaagctagaagttactctatgaaaaattcttctcatcagtaaacacaactataagtagaagattttttcttattaatgcgtactcagaacaatatttctatcttgtcagttatataattgataatactgtgtataggattatcaatgcaggaacgattatttttctttttttgaagatttccacaaaatgaaatgtaccagaatccttgtgttggtagaacattgacccatagcagggctgttatgggaatatcggtgacaaaacatatatgacataaacttggtataatttttctcattttgacaacattcctgaaaattacatgacatgaccaaagatattctttctgtaaatctgaaagaatatctctaagccatgcaaagcaattattgagcaaacatgctaaaggaaagt

SEQ ID NO: 393058 - DNA, 540 bp, Homo sapiens
aaaaacagcatagtaaaggtgaaatataatgagatacactattgcaagatgtttgggttgtcagtgggtacaaattagtctccattcattcatttatttttatttattattttattaattcctcattaaatattcctcaattcattaaacatatattgcatgtatctgtactgtgtttaggaccaataatacaaactttgagaagatasagagatttttgcctccaatatggttgagtagcaacaacagctaacaataaattctggagaaaacagaaaaacttccacatgcaggcactgaagaatgaaaagaaggcagaaatttgaggagagttgccactaaaagaaaagggaaaaaatctgggtaattttcttatttttataagttttcacccagtaaaagtcccttgtctataccacaagaggtagctaaaactccagtgggaaacccacagtcctactgatttgacaaactgtatgacagagattgaagcaatgactaatgatgggaatcaatgggcaatgaggggttggtggaaat

SEQ ID NO: 393059 - DNA, 534 bp, Homo sapiens
aattgattttttaatggcagaaaaatttaataaagtggtagagacctatgggaaaatgttgaaaggtctaatatattgaagtgccagatcagaaagagaatggggcttccaaaaaatcaaagaactgttgaccaaaaatatccaaattttagttgaagacataatattacaaattcaaacaacttagtgaaactcaaccaggctaaatgcaaagaaaaacatactaagtccattatagtcaaaatgttttcaaagaaaatctagaaagaggcaagagagtatattaaatacagaacagttatttcaatcaccacagacttctcatcagaaacaytggagagaaggccaaagggaagcactgaaaagtaaataaactttcaacctagaattctacatctggcaaatataaccctcaagagtgaatacaaaataaaggcatattgagttaaacaaaaattaagagaaatcattgcaaatagatttgcactacttagaaatgcccaaggaacttcttcaggatgaaggaaaaaaaaa

SEQ ID NO: 393060 - DNA, 468 bp, Homo sapiens
  misc_feature (1)...(468): n = A,T,C or G
nnnnnnnnnaaaaaaagaattccagggattagcggctcagctttgtacttctttattttctatctatacccctttgccagagaaaagcagtctctcatatggatttaatagtatcagactatctataaaaatatcactcccaaatctcctctttatgattcatataatttccaggtagtaaatgctgtcaagcttttcaagcagaatttagacttcccrtgttttgcctctgtgtttccctgtgtaagcccagaagacaatgtggacttttgtagtaggctgaataatgatcctggaagatagcaggtcctaatccctatgaggttattttctatggctaagattatgcaggtatgattagattaagactgccccccctaccctgatcagaggattgtcctgaattatttggtggaggctctaaatgtaatcaaaactgtcctcataagagaaaggcacagatatatt

SEQ ID NO: 393061 - DNA, 537 bp, Homo sapiens
tagaatgaagaactaactagatagatgttgtccactataaaagtattatacatataaagccgcacatagattgaaagtaaatagaaaaagaaatacaatgtaaagcatattcataaggatgttggagtggctgtacatcatgttgaataaagtagatttcacagttctgaaggttggaaagtccaagatcaaggtgctgataggtttggtgtctggtgagattcttcatagagaattctatgagttgtaagagttcttatattctgggtgaaagtccttgtaagatatatgatttccaaatattttctcccattatttggattgttttttcactttattatgatgtcttttaaagcagaaaagtttttagttttgatgagatctaacatagtctttttcatttgtgctgttggtgtgatatctaggaagccattgsgtaatgtaaggtcacaaagatttagtcctttgatttctaccataaatttcatacaaacttgctgttacatttaggcatttaatatattttgggttactgaa

SEQ ID NO: 393062 - DNA, 433 bp, Homo sapiens
caacattaatgtcacatctcatttcaccagaccaatgtggtaaytttccatgttgttttcatgcacttagcaagattaataccacacgctttaggtttgttatccctcagttgtagtacatatattaggttttagtagcatttactaagagcctggccatttccaggagtacagtagttctctttaactgtagttttactttccacgcttttagctacctgaggtaaaatacaataagatatgagagagatagagagatgggggaggagtgagagagagagaccacactcacataactttcatgagaatatattgttataactgttctattttattatagttattattgttcatctcttactaaaattaaactctattgtgggtatgtatgtaggaaaaaaaaaacactgcatacagggttcagtactagctg

SEQ ID NO: 393063 - DNA, 510 bp, Homo sapiens
tttagcctactgatttttatttatactctattcctttcatatttattcttgtatatgctataagaaaaagtaaagagtttgaaattgcctgtgtccctcaccagttgagtaattttacgtttagcacggtgtgccaaaggaggtcttggattccaaaaacaaataattaatggggactactccttaccatttagrgcaatctggaaagaggcttgctaaaagttaccttagagacctttatggtatttcagatactctctcttttaattgtctgctctatttcactaagagactcattaaagacttttgtggtagaccgttggagtcatgagttaattttctactcttgtcttgctttttatattcttctcttcttcgatacaatccttattttccctggcctggctgcttttttggttctgcagtaaggtttccatagtctattacctatgatgaaaacgatccaagacgtgaagtcagagagatctggatttgaggcttgtatgtaag

SEQ ID NO: 393064 - DNA, 624 bp, Homo sapiens
tgtatagagtttttgtccttgaccttcctacagatattactgaaaaatcaagctaaaaactctccaaaatctcataaattaccccactcctacagcttacatcaccctgcctcttccttgacagctgaattaattttaagaagtcccatggagtcaccctcagccattcattatctcaggcctgtggcagagccctatataggcatttgccagcttgtccttttaatcgtctcctaatgatgaattggccttgagtggttctgtgttctatccctgtccctttactgactcccttttcccttgttggccattgtttcttcctccagggaccttgttggaatccacagccccagagyagaaacaaagacatgcttcacgattacctgcacaaccttaagccatgcattacttctgtacaaaatttcaactttatcaggtctttatcacacacctcactcagccttcccacttcattttctgtgtttgtcgttgtacttacttatggaactgaagccagctgattttgcttccaagtcataaacccaaatggaccctctagcttcactgtttcctttcccaggcatgcccttggcttgaccacacctcttctgtttctacctcaag

SEQ ID NO: 393065 - DNA, 624 bp, Homo sapiens
tgtatagagtttttgtccttgaccttcctacagatattactgaaaaatcaagctaaaaactctccaaaatctcataaattaccccactcctacagcttacatcaccctgcctcttccttgacagctgaattaattttaagaagtcccatggagtcaccctcagccattcattatctcaggcctgtggcagagccctatataggcatttgccagcttgtccttttaatcgtctcctaatgatgaattggccttgagtggttctgtgttctatccctgtccctttactgactcccttttcccttgttggccattgtttcttcctccagggaccttgttggaatccacagccccagagtagaaacaaagacatgcttcacgattacctgcacaaccttaagccatgcattacttctgtacaaaatttcaactttatcaggtctttatcacacacctcactcagccttcccacttcattttctgtgtttgtcrttgtacttacttatggaactgaagccagctgattttgcttccaagtcataaacccaaatggaccctctagcttcactgtttcctttcccaggcatgcccttggcttgaccacacctcttctgtttctacctcaag

SEQ ID NO: 393066 - DNA, 536 bp, Homo sapiens
aaatatgctgtgtcatgaaaatcaaaggacaaggaaggagtgactgaggatcaaatgttccaagagtcaacatgarggctgaaaaatcctttcctcgatttagcaactttgtgactggtggggtaaagaactgttctgccaagtgaagggacattactcatcctctgattcatatggtgggtcaagaggcaactggaaggttagcaaatgggaaatatgaacacatatttttcaggaaatatggctataggaacaagaggggatataaggtagtgcctggaggccctcatctaccctcatgattgtagctaacatctacatggtactggtacccaaatctggttttctatccctgacaccttccagtgctacagatccgtacctgccagacctttgaacttcttgaaattcacacaaatctcaaccccatcatattcaaaatagagcttgtcccatttgcccttgggcaaaacccccttttccagctgtggtcctcagttcagtgaatagcacctttcctcaaccagcttacaaga

SEQ ID NO: 393067 - DNA, 563 bp, Homo sapiens
aatcaagttaaaatccaacagtgagtctctggatgaacctaccaaaagcaccaggagttgaaaatggttctgatcccctggtgcagtgttgcatttargtgaacatttctgctgttccttcttgaataaggggttctggagcttctacttcaaacaatgttgacacaagtgcccataaacttaattctctagtttccactttttttctattagtaccaggattggctcacccacttccctattcaatgtcaccatcgcactcaacgccaaaagccaacttagaaacacaatcattttaaaaacatgtacaccaaagcataaaatgtataaactgtaaatatcatataacacaatggaaaggaaaatatatcaaaaattcttggctaaagaaaacagcagaacttaaagctgcacttttgagcttcctagcagtgaaagcaaacatggaaccaatacagtctagactttatcatcagatttccattcctcgctgctggaaagtagaatgccccaaggcagcttctctctcctgtccccaaaggtgcaggtgactacttggcatg

SEQ ID NO: 393068 - DNA, 661 bp, Homo sapiens
acatatggtaactacttaaataactatttggatattcccttttgttaaatgtacattcaagtaatttgccaatttgtatattagattggctctgttaccaatttgcaggggttctgtacatctcctagatacgagattttcacgcaacatatgtattgcagccatattcttccactctttggattttgttctatttattcaacagttgccttcgattaataggtgtttgtaattttaatataatctgattcatcctgtttcttctataaagttaccacttcatgttctgcctaagaaagctgtcactattcaagaagatcatgtttctgaacaaactgtcttgtggcaaacataatgtgaacttttcttgattctgtcatgtatttggttgttgactgtaccacaaactggtttcattaggccagtgtgaaatttcccagactttctgaaacagtggaatgtgcccattttactcatcttgaaagggaatgtatcatagaacaacaacacrttagctgactgaaaaaaggcagaagtaaaaaagtggacttatctctaattctgcactggcttcactctgaatcacatatttcagatgaagattttacacagcacctcatttaagtaaacacaataattgttgagtattactatcagcact

SEQ ID NO: 393069 - DNA, 572 bp, Homo sapiens
aacacattagctgactgaaaaaaggcagaagtaaaaaagtggacttatctctaattctgcactggcttcactctgaatcacatatttcagatgaagattttacacagcacctcatttaagtaaacacaataattgttgagtattactatcagcactaatacggatacatgtaactagtgccttataacttgcaaagtaaaacctcatttaattggacactcacaaccatcctgtaaaaggggcagttgttttctcttgtttctgctgtctagtgtttcctgtaatatattataccagtatttgctgagctcctacaatgtttcagacactgtactgaacactgaaaatacagcagacaaaagacagatgacagttcctgtcctcatggaatttttattctactgtggagagactgagaatttaaaataaataagaaragccttgtattctagaagacggtaagtgctctggaggaaaataaagcagagaatgaagttacagaaagatgaagagagaaaatacaatgttcacaaagattgacagggacaccttactgagacttgaccaggagc

SEQ ID NO: 393070 - DNA, 511 bp, Homo sapiens
accacgatctcctggggaactttgaaaagaaaatacattttgtcaggtccaatgccatatggtaagattcattaggtctggagtgagacttaaggaatctgtaagtttcacaaaactgacagtgattctagagctcaccaggacaaggaatatttggacaggatgacctctgtgattctgttagagagtctgtgatttcttaccaaggctctgggcctcacctaccacaaatttacaggttgaaaaatgcctgtgtagattgcttgtcattggggaatagtttttaccccccacacaatgcagtggtgtgcatatttgctgatgttttccccccaaagcatgtgrgaatgaatcattattgaaacaatttactttcagttagtgcatgaatgccttcccatgattctctgatgctttgtttgtcctcctataaaaattatttatgacccaagtgtgctcttttaaatcagaatacttatttctgaaatcaaagctctagcatgctaatgcg

SEQ ID NO: 393071 - DNA, 501 bp, Homo sapiens
ctgtgctatatatgaggacatcacttagtactttagaatttatgggtcaggccaggtgcagaggctcactcctgtaatcccagcactttgggaggcaagacgggcaggtcacttgaggtcaggagttcaggaccaacctcaccaaaatggcaaaaccccatctctactaaaaatacaaaaaatacaaaaaataaaaataaaataaaaaagccgggagtggtggtgcatgcctgtaatcccagctactyggtggggctgaggtaggagaatctcttgaaccctggaggcggaggttgcagtgagttgaaattgcaccaggtcatgacagcctgggcaacagagtgagaattcatctcaaaaaaaaaaaaaaaaagaatttatgagtcactttattatgcagtattacatttgatcttcaaaagaaccttgtgaagtaggaaggccaggtatcttcattttacagatatggaacttgagcacatgtgtctggttcaaggtcac

SEQ ID NO: 393072 - DNA, 614 bp, Homo sapiens
gaatcttgtctgtaggttgagtttctcattgagttttctcatttccagcaaggagctgaagaatttttactatctcacaaaccctcttctttcataaggagaaatattaaaagttattttctgtatcttcatgaaatgcctgtcatgatatggaattaacatacccattttcattgaatgcttaaaacaaagtattttataaattgtggtaaataaagcctctgacaggtagctggtactagagcagttaactctctcagaggaccctcaggcttcctggcatcttctgtatgccataagccaaggtgctttggcttaatccaaaaccagaggccaacagtttactgatctgtgtcagttaggtaaatctcaatgcacagagatcacygattttaaaaatataaatgttttcccaacctatacttctttgtgagataagtattggggaagagctgaacataatgtatctttcttggtttgggttattaaaatgggaacatgtcatataatgatagccacatatggagcaaagtgtaatgtctagagaaaggctgctgccaccatcattaccacagtggccttcccgggcaatctcctaaattcccagcagagag

SEQ ID NO: 393073 - DNA, 558 bp, Homo sapiens
ctccattgtatctaggaggtaactaacttgcttttgattttgcaggctcataggcagaagggatttgccttgtctcagatgagactttgtactatggacttttgagttaatgctgaaatgagtaagaytttgggggacttttgggaaggtctgatttgttttgaaatgtgaggacatgagatttgggaggggccaagtatggaatgataaggtttggctctgtgttcccaccaaaatctcatcttgtagttcccataattcccacgtgttgtgggaggtacccagtgggagataattgaatcatgagggcaggtctttcatgtgccactctcatgatagtgaataagtttcacgagacgtgatgtttttaaaaatgggagtttctctgcacaagctctctctcttgctgccaccatggaagaagtgcctttcgccttctgccatgattgtgaggcctccctagccacatggaactgtaagtctgttaaacctctttcctttgtaagttgcccagtcttgggtatgtctttatcagcagtgtgaaaatggactaataca

SEQ ID NO: 393074 - DNA, 558 bp, Homo sapiens
ctccattgtatctaggaggtaactaacttgcttttgattttgcaggctcataggcagaagggatttgccttgtctcagatgagactttgtactatggacttttgagttaatgctgaaatgagtaagattttgggggacttttgggaaggtctgatttgttttgaaatgtgaggacatgagatttgggaggggccaagtatggaatgataaggtttggctctgtgttcccaccaaaatctcatcttgtagttcccataattcccacgtgttgtgggaggtacccagtgggagataattraatcatgagggcaggtctttcatgtgccactctcatgatagtgaataagtttcacgagacgtgatgtttttaaaaatgggagtttctctgcacaagctctctctcttgctgccaccatggaagaagtgcctttcgccttctgccatgattgtgaggcctccctagccacatggaactgtaagtctgttaaacctctttcctttgtaagttgcccagtcttgggtatgtctttatcagcagtgtgaaaatggactaataca

SEQ ID NO: 393075 - DNA, 558 bp, Homo sapiens
ctccattgtatctaggaggtaactaacttgcttttgattttgcaggctcataggcagaagggatttgccttgtctcagatgagactttgtactatggacttttgagttaatgctgaaatgagtaagattttgggggacttttgggaaggtctgatttgttttgaaatgtgaggacatgagatttgggaggggccaagtatggaatgataaggtttggctctgtgttcccaccaaaatctcatcttgtagttcccataattcccacgtgttgtgggaggtacccagtgggagataattgaatcatgagggcaggtctttcatgtgccactctcatgatagtgaataagtttcacgagacgtgatgtttttaaaaatgggagtttcyctgcacaagctctctctcttgctgccaccatggaagaagtgcctttcgccttctgccatgattgtgaggcctccctagccacatggaactgtaagtctgttaaacctctttcctttgtaagttgcccagtcttgggtatgtctttatcagcagtgtgaaaatggactaataca

SEQ ID NO: 393076 - DNA, 508 bp, Homo sapiens
atttgaacaagggcaatctgacaacaaaaaccatagttttaatcgctaccctaccatctcttgatgcattgctttgattaaccagaccatgttctacatctgcgccagtaaactttctccataaatggttgaatcatagatattctgtgctttgtgggccacatatacattctatggctcctcctcctcctcttcttcttcctcctttctgacatttaaaaaaatctaaaaaccattctttacttactttagrtaattctgaaaagttttgacactgaagaaaccaaattatttaattggatgaattattcttatttcaacttgtattattagtatgatatactgcatatgggtttagtgtgtatatacttatatacgtaatagccattgaacttactgcaagtacttgtgttcatcaaaacttaaaatgtaaagtattataataagaaatcaacacaaagccaaaagagatttctgcttggtaaatctccaaaaatgaatagaaagt

SEQ ID NO: 393077 - DNA, 508 bp, Homo sapiens
atttgaacaagggcaatctgacaacaaaaaccatagttttaatcgctaccctaccatctcttgatgcattgctttgattaaccagaccatgttctacatctgcgccagtaaactttctccataaatggttgaatcatagatattctgtgctttgtgggccacatatacattctatggctcctcctcctcctcttcttcttcctcctttctgacatttaaaaaaatctaaaaaccattctttacttactttagataattctgaaaagttttgacactgaagaaaccaaattatttaattggatgaawtattcttatttcaacttgtattattagtatgatatactgcatatgggtttagtgtgtatatacttatatacgtaatagccattgaacttactgcaagtacttgtgttcatcaaaacttaaaatgtaaagtattataataagaaatcaacacaaagccaaaagagatttctgcttggtaaatctccaaaaatgaatagaaagt

SEQ ID NO: 393078 - DNA, 551 bp, Homo sapiens
atcctacgcaggtacatgaataaatctatactgtcaygcctatcttgttatatgaccctatattgattttgcaacagctatttcctggttcattacttaagcatgacattccttataacattaagggatttaggacttaactatctgaaaattgaatgtcctcaattattgagaacactacacctggaaatttaactgacaagtttaatataacaaaatatatcattttaaaatgtcactcccaagattcgggttcttgggtaagatggagaaaacacactccaccctactgaatgcagctataaagcatcgagagaacatgtgcagagttcatttgagagctttgaaaaaataataataaatagcaaatttgggaagaggactgaatttcaaagtagcactgagctagtatgagcttacccttactttctttcccaccacatggccctggaggcaggcatagctgcagaagtgcatggcagaaccccagctttctcaccggaagcattaaaaggggagtcctcagaaatcagaaagtactgggagattgc

SEQ ID NO: 393079 - DNA, 470 bp, Homo sapiens
agtttcagaaactgaggctcagagaaaaacccaaggtccctcaagaaatcaggatttggatctctaggtctttaaaccgctggtccaacactcttccctttctcatccaatagcttattcattaatttcacaaacatttattgggtacctattttgtgctaggcaggagggcatttctaatcttacttccaaaaaayagtctgcaagagtatcagaacatctttcagtgctagtgtctaagactgggtgaacattctggccatattgtaatcattatcagatcacatttttacagttatactggtatttctctattgttgttgttgtcactattattattgctgaggaagtctccctttgagtgagcacttagaaagaggttcaaggtagagctcagaaaaaagcatggctgctctggctgaaggaggagtacctccatccccagaaccttctgctgcagctcggccaaa

SEQ ID NO: 393080 - DNA, 536 bp, Homo sapiens
tgggtacctattttgtgctaggcaggagggcatttctaatcttacttccaaaaaatagtctgcaagagtatcagaacatctttcagtgctagtgtctaagactgggtgaacattctggccatattgtaatcattatcagatcacatttttacagttatactggtatttctctattgttgttgttgtcactattattattgctgaggaagtctccctttgagtgagcacttagaaagaggttcaaggtagagctcagaaaaaagcatggctgctctggctgaaggaggagtacctccawccccagaaccttctgctgcagctcggccaaattcctagcacttcaatgttatcagaatttgggaaccactgcattgcacaattctctttcttggatttgacttaattagaagttctatctctagacagagttgagaagtatttactattatttcgaagagccagagaaactttgtatggtcagaaaaggttaacctgctttcttttcatcattatatccacttctttgaaatataagt

SEQ ID NO: 393081 - DNA, 621 bp, Homo sapiens
accctcactggaacccaggaatgttggcactctgaacttagattttccagcctctagaatggtgagaaataaatttctattgttcaagccacctagttgttatagcagcccaarccaattaagacaggaaggatactgggtgttagcactcagaggtgtaaggagtctgaactcatctcaaccagcttccaccaccataatggaggctctctttctaatatttattgttaagtattgtctagcctgttcttgaacactgaggttcataggaagctcactagctcccaagaaaatccatgccattgaagaataattttaatacttagaaaactcttcatactgctctgaaatttgtctgccaatactctactcattcattccctttccattccattccatactctactcattcattccctttccattccatttataagcaggagaggtatcagcttataaaaacctgaatgccagatactgggtggaggagtttgagcttaaatctgagagcagtagatctagcaattctgagtaaacttctcagcttaactgaggcattagaagtccctgaagttttttttttttatgtaggaaaacaacaggattatttccatcttaagg

SEQ ID NO: 393082 - DNA, 570 bp, Homo sapiens
atttagtgcaaaaagtgaaatatacactcttttaatcatccttgaggagaattaaaaacctagccatgagctttacatgatgcccatcagtcgtatttaaacatacaagtccacactatgaccactggactccaaatactatcattagcatttattacaacagcaaagagaaacatcagtgggccacagattayatgtttgaacatgaaaaaagtaaaagacaatataccaggaaaaaactagcctctgtaaaacattaatcgacccatcaattcattaactgatggtcaaaatagatagatgttctggcatatacggtaaattgaaataatcccaattttcttcattcaaaaaaatgttcccattacacatttcattaacaaaacccctccactgcaaaggctgtaaagagagaaaccatatcacatttaaagagtaatgaacatatgtttgggctatattttaaggatgagacatgtatagtcaatacagcctaaaacaagtaatgccaaaactataatcctgatgggccacagcatgcaaagaattatctgctactgttgtcaaaac

SEQ ID NO: 393083 - DNA, 593 bp, Homo sapiens
tgggttttatacttggaaattgctaagagagtacattttaaatgttcttaccacaaaaaaagtatgtgaagtaatgcatatgcaaattagtttgatgtagccattccacaatgtatacatatttcaaaacatcaggctgtacacaatatacacaattttcatttatcaattaaattaataataataataaataccagaaacaccctttatattacagttgcatggctgtgtgtggatgtgcacacattattctaacaactgcagctgaatgctggtaccctgagtaagcaaaccccgtaagcaaaactctttacagagtggtgtcccaagaagtcttattcctgtcaagtatataagttaggaacataaagtgccagaactacatattacctggcattrtttatcctggcacttaagatatcttagccattacctaggaattaaacaaaaattaaaaatcaaatgcctgagttagcaatgaactcgtgtaaacagaaaaaaaaatagttattgttttaaataaatcacaaaattggaccaaggccttggaaaggttaaagttggagtgtaaatggcaattatccaaacaattc

SEQ ID NO: 393084 - DNA, 501 bp, Homo sapiens
cattcagagttcatcagctcttctggaatgatctgtaaaataccatctcctccccttgtccttttctcataacctttgttatgttaccatctttgttatgttacctttgtttgttaccatctcctccccttgtccttttttcataacctttgttaagtaaggagattaagaactgttattaacgacactgattgtttaatttctttcataacttcttcctttcaaatgagagtccagtacagaatgaaaaggaatgttatcrtatgaagtgcatttcagacgtaataaagcagaaaggagagggtggccccagtggcagttgtaagagggatgaagtgtggatctctatagctcagtggctgcaaagcagaaaatgaagattgtaaaaacgtcacataaagaaaaaatgcacagtggattcgttttgtgatgcccataattcagtaatgcctttaagtagctagaagaaatataataaatgtttttccacaacattgatca

SEQ ID NO: 393085 - DNA, 607 bp, Homo sapiens
tcctcaaacacaattattttcttcactatatttaaaaggaatatggtacttctataatagttctcaacattgtgtattaattataatgagcacattttggayactaaatggtgtgaagtgaaaacataaccataaaataagctcgatttataaaatacccccaacccctgctaattacttacaacaattttatatctatttgctcatctgtcttcccagcatccctgggaggttacctgctttactacttttatgagtcaaagttgacctgtgaagtaaattgaatcaagtaattatttgcacaggcattccaggagtaaagcaaaagcaaacattgaaagtgtgttccagacagctaattccagtttgcaaaagttaccagttcagattttggtagttctgtgatttttcaattagtaaaaaaaaaatcctcaattcatgggccttttaactctccttttaaagattcatttaaaaaaaaatctgggccattttgtgaggctgacgtgatagagaaaataggtctttttccaagctgaaaaaaggctggcccagttcaagtgctagttagagcaggaccaggaaaaataatgtggtgaaggaattt

SEQ ID NO: 393086 - DNA, 586 bp, Homo sapiens
tactttccccttcaatttctgatacacatatatctccatggttcatgaaaaattttccctgaaataaatggtgatgaaatggagacaaagaatatagttaccagtctttcttttgtataacatgctgcctgtctattcaaccagcacttactgaatacctgccatgtgccgaactctgggtaggcaataaggagagaagattaaaatcaatgagagagtttctgctctccaggagttcacattctgtttggagagacaaatgcataaatacattaattgaaatagaatgtggcaaatgcagtaatgtacacacgtgactgctccatagggcacrcatgtgacacacatgcatggcagggctaaaggagcatatggggaacatctgaccagaggatgaccacccatgaggctccattgaataacagtcattgagttgagacttgaagcacaagcagacaagcagagggaacttaaaagagcatgacttgtggggttggggcgaggtaggctgagtagctaagtgtaaagggaacagggaagagaggctgtactgaagaatgggaaaagctccattttgtagattaaa

SEQ ID NO: 393087 - DNA, 586 bp, Homo sapiens
tactttccccttcaatttctgatacacatatatctccatggttcatgaaaaattttccctgaaataaatggtgatgaaatggagacaaagaatatagttaccagtctttcttttgtataacatgctgcctgtctattcaaccagcacttactgaatacctgccatgtgccgaactctgggtaggcaataaggagagaagattaaaatcaatgagagagtttctgctctccaggagttcacattctgtttggagagacaaatgcataaatacattaattgaaatagaatgtggcaaatgcagtaatgtacacacgtgactgctccatagggcacacatgtgacacacatgcatggcagggctaaaggagcatatggggaacatctgaccagaggatgaccacccatgaggctccattgaataacrgtcattgagttgagacttgaagcacaagcagacaagcagagggaacttaaaagagcatgacttgtggggttggggcgaggtaggctgagtagctaagtgtaaagggaacagggaagagaggctgtactgaagaatgggaaaagctccattttgtagattaaa

SEQ ID NO: 393088 - DNA, 561 bp, Homo sapiens
tgggaagacctgcctgcaacaccagtccttcattcctgcaaggcaacaatgagctagagctgaaaggccgttttaaaaaatagggtgtgtctcaccagtttgcaaaatcccccagcgtcctccatgcagctacttcgctcatttatgcatctgcatttccctctcctgtcttatactctaccaagtatttttatataggctcatctctcttgttttacacaaacaatgagacaagmggttaggcaatactatctaaattttacagttgagaaaattaataaaaggttaaaggaattttataataaaatggtgcacagtgagtcacttgggacagggactaaaatccagaccaccctcatctccaatattgtgctgcttcccaaaccatgtgaacaaactccttcctcaaatttcattagaaatgatttgtcctctgtcaattgcatccagtgttctttgctgtgattttaagcagcaggacaacatgatgcgccagttttaaatagtaagttaaaatgtgacctaaggtgtttgaggcagcgtcctctccactctactaat

SEQ ID NO: 393089 - DNA, 566 bp, Homo sapiens
tggcagtgagaacatcatgtttaaaagtcctgtggtaggaagaaacattgtcattcaaggaacagaaagaaggccagtgtgccagaagcctagagaacaagcaagagggggatgatgtgatggagtgggcagtcagtggccagatcacacagggccacgctgacctttctatgggattctggtttttattctaagggcaaggagaagaaggtgatgtgattagatttttwaaattttctttggctgcagagttaaggacagatttggtcttcacatttagggtctctaggggaacaagtggattgggaaaatctgagtcagatgggctgccaaggggaggaagtgaagaccaaggaaaactggagatctgttagaaggcaatgagagagaatttcatgctcaacatgcaccaacacagatgtcatggttgcctttccatgtcaacacatctagaaagactacacgttttttctgcagctacgtaacattcaactgtattgacaggttatactttaatatttaccatctctctatgggtggtcatttaaattgttccaattttttta

SEQ ID NO: 393090 - DNA, 566 bp, Homo sapiens
tggcagtgagaacatcatgtttaaaagtcctgtggtaggaagaaacattgtcattcaaggaacagaaagaaggccagtgtgccagaagcctagagaacaagcaagagggggatgatgtgatggagtgggcagtcagtggccagatcacacagggccacgctgacctttctatgggattctggtttttattctaagggcaaggagaagaaggtgatgtgattagattttttaaattttctttggctgcagagttaaggacagatttggtcttcacatttagggtctctaggggaacaagtggattgggaaaatctgagtcagatgggctgccaaggggaggaagtgaagaccaaggaaaactggagatctgttagaaggcaatgagagagaatttcatgctcaacatgcaccaacacagatgtcatggttgcctttccatgtcaacacatctagaaagactacaygttttttctgcagctacgtaacattcaactgtattgacaggttatactttaatatttaccatctctctatgggtggtcatttaaattgttccaattttttta

SEQ ID NO: 393091 - DNA, 584 bp, Homo sapiens
gccaggtatcaaggatgctatgaaaaagtactatgattctgtccaaagaggatccaactggccaaagatgggataatttgagctcttcagtggaatgataaatgaaatgaattcaatggaaacatatcaagtatatttaaatgtaaattcggaatgatatcaaaaatctaaattcattaatcatctttaaagaacgctacaggattaattcattgtgttaaaaaaaatggtctcaaagtaatcaaataatcaagggtaagtttctctttatagaatttttccagctaataaatgaatgaggatggayagaattgagacatcagcatgttgcaaccttctaatgaattaatggctctggacagtgttcactaatggctgctaaacaccaaagagagacacttagacattacgtacctcctaacggaagtgcagaacactacatgtgcattaatcttgacaacaaaataattgaacctgaatctggttaagcttctaaatccaactaccaatttacagcttacaatgacagaggaacatgttaaacatcacagggatgccatcagcaaactccaaactgtgggaaa

SEQ ID NO: 393092 - DNA, 499 bp, Homo sapiens
ccaccctggagctttggtggaggcctggccacatttgggagcctgagctggagacagagccacacctggtgcttggtttgagccctggtctttgactttggccagcagaacctgaaacccttggtgatgcagggatgagcacacttcctgagcttggggtggtcagtgcaggcaagttgattgagtttgcacctaatgccctttgggatcttggtcttgacctccttggacttcacaaaggccctgacagcctcagttgattcactcrtggccctgacatcattgacctgcgtcttcttctggcccttcttgtgcttcttagcaaagtgcatgttcctcaggaacttggggcccacccttttaagagatttacatctttgacatagggttttcttgatgccatttctgttctagttgtgtgtagtgtgattcttggacttggccgtgtttacacagtagcccaaggctcccaaagcaactagtagcggtagagaaagcg

SEQ ID NO: 393093 - DNA, 540 bp, Homo sapiens
ttactcttattactggtgatgaaacagagattaaacaaacaaaaacagtaaagacatatacagcactcaccccttcctgcaggtgaggagagttgcaacactatatttgggatccttcttgcttctattgttctgcattctctttgatctgaaatagtaacatagaaattttctttcacagggaaaaagatatcctttttagccacatgtttaattcttcaatgtcaatatttgcagaaaacatgagcacagcatgatattgccttagagttgttgattaatcccattcggaagcttccctaagttttttttttgatcttcagttcatcattagtctggtaatggtgtgtgtgcctctgtgagtgtattattgtattgccccaaagcctaataatgatgacagtgaggctttattgtggattaagtttacagacttcctcattcccatccagttccatgggagkaatgacttaactcagcttccatgggaaatagagaccagccatagatgcctgagaggagtaatggtggcactgatgt

SEQ ID NO: 393094 - DNA, 529 bp, Homo sapiens
tcaataagtcagaatgtttggaaataaaagactgaataatattccaattaattgagtattgaccagaaaatttaaaaggtaggaggaaaaatccttatttaaaaaatttttattcaaaagagacactaaccttaatatgatatattctggatagcatatgaaggaatcccacatggaaggatcaactgagtcattttaaacacgtattatttctcatgtgtactttttttaaaaaaatgcattagaagactaggagaaaactagacataatagttttctatcatcatggagatgttgtgagaatcatgtaagataatacattgcaaagtccttaggatggaacctatrcatggcttccaaataaaagttaactaaaatattcacaacatgatttaaaatttgttttcagaatttatatattttgttcaaatagataacccaaactcagttttgaaaatttatgaactaaaatagaaaacatgaagatgctatttttatagataatcacattgataataatataatttag

SEQ ID NO: 393095 - DNA, 564 bp, Homo sapiens
cctgccctgacgcccagcctgctgagacctttcattctctagtcaaacgtttcattccatattgatgaattaggtttttttttctcagcacttttactactttagctctttcacattaaaaaaagtttatttatttccattataatcatactttagcatcttcgtgattttcagtgcttttgtgtttatcagctacgatgggatgaataatatttatcagtttttcaaaatgaagtacagataccctgaacgtacttccatgccgtctattagtggtaggcayattgacccagttctgctttggaggatcattttgttcttacatcaaaaattttccattagacaacctactttacatgatttatttctacatttccattgggaattacatttaggcaggacaaacagtatatatataggtggagctacacacagaccaattttcaccataagacccccacacaaggtcctttgtacttatatcaatatcccactattcattgatctattcaacttatattcactgagaagacaccacacattgaattaaccatttaagtaata

SEQ ID NO: 393096 - DNA, 562 bp, Homo sapiens
tgaaaccccatctctactaaaactacaaaaaaactgttagccaggtgtggtggtgggtacccaaaatcccgrctactcaggagctgaggtaggagaatcacttgaactcgggaggtggagtttgtagtgagctgagatcacaccactgcactccagcctgggaaacagagtgagactccattaaaaaaaaaaaaaaaatcagtctttgaattaaatgcgtttttttcttcccttacagatgattttttaaaaaatgaaattcttgaagagctgcaccttaaaaaataagacaaagtgaaagtattgtattatgttacaaacaatgcaggctccttcctcatttaactttacaaccttgcgaagtgggtccaggagatttggagtttgtggtaaagccagtaatgggcattgtcctgcattcccttcccttcatggtttgcctcgatcctctctaagcttctatcctggcctgaataactcaaagataattggtctcagagatcaagccatatcctcaggccttatttccatcttctcatgattctgccatcatacctttgct

SEQ ID NO: 393097 - DNA, 562 bp, Homo sapiens
tgaaaccccatctctactaaaactacaaaaaaactgttagccaggtgtggtggtgggtacccaaaatcccgactactcaggagctgaggtaggagaatcacttgaactcgggaggtggagtttgtagtgagctgagatcacaccactgcactccagcctgggaaacagagtgagactccattaaaaaaaaaaaaaaaatcagtctttgaattaaatgcrtttttttcttcccttacagatgattttttaaaaaatgaaattcttgaagagctgcaccttaaaaaataagacaaagtgaaagtattgtattatgttacaaacaatgcaggctccttcctcatttaactttacaaccttgcgaagtgggtccaggagatttggagtttgtggtaaagccagtaatgggcattgtcctgcattcccttcccttcatggtttgcctcgatcctctctaagcttctatcctggcctgaataactcaaagataattggtctcagagatcaagccatatcctcaggccttatttccatcttctcatgattctgccatcatacctttgct

SEQ ID NO: 393098 - DNA, 562 bp, Homo sapiens
tgaaaccccatctctactaaaactacaaaaaaactgttagccaggtgtggtggtgggtacccaaaatcccgactactcaggagctgaggtaggagaatcacttgaactcgggaggtggagtttgtagtgagctgagatcacaccactgcactccagcctgggaaacagagtgagactccattaaaaaaaaaaaaaaaatcagtctttgaattaaatgcgtttttttcttcccttacagatgattttttaaaaaatgaaattcttgaagagctgcaccttaaaaaataagacaaagtgaaagtattgtattatgttacaaacaatgcaggctccttcctcatttaactttacaaccttgcgaagtgkgtccaggagatttggagtttgtggtaaagccagtaatgggcattgtcctgcattcccttcccttcatggtttgcctcgatcctctctaagcttctatcctggcctgaataactcaaagataattggtctcagagatcaagccatatcctcaggccttatttccatcttctcatgattctgccatcatacctttgct

SEQ ID NO: 393099 - DNA, 562 bp, Homo sapiens
tgaaaccccatctctactaaaactacaaaaaaactgttagccaggtgtggtggtgggtacccaaaatcccgactactcaggagctgaggtaggagaatcacttgaactcgggaggtggagtttgtagtgagctgagatcacaccactgcactccagcctgggaaacagagtgagactccattaaaaaaaaaaaaaaaatcagtctttgaattaaatgcgtttttttcttcccttacagatgattttttaaaaaatgaaattcttgaagagctgcaccttaaaaaataagacaaagtgaaagtattgtattatgttacaaacaatgcaggctccttcctcatttaactttacaaccttgcgaagtgggtccaggagatttggagtttgtggtaaagccagtaatgggcattgtcctgcattcccttcccttcatggtttgcctcgatcctctctaagcttctatcctggcctgaataactcaaagataattggtctcagagatcaagccatatcctcaggccttatttccatcttctyatgattctgccatcatacctttgct

SEQ ID NO: 393100 - DNA, 535 bp, Homo sapiens
acccacatagtctcaaaaccacattaaagtcacttcactctcagaggggctcccttagattctctctactttgctcactttgaggaggaggcaacagccttcaaactggctgacttttgtctattcttctggcttattacattctcctggcaaccttgcttaccactcacctgccccagctacaaccctytgaaggtggcactattatcatccacgttttacataggaggaggctgagttctggagagggtgactttcccaaatctagacagctagtatgtggcagaacctccagtctgtgagactccagaacccaatctcccacccacatattctgtggctctcttcaaatccaactccttagtatgccatgcaggattcctcccgctttgtcctgatctacttttctgcctcagtcccttcactctcttcacacaaactccagccacattaatggaggctccctgaacacagcaggttctctcatgattctactcttctgctcatgctgtccttaccttcctggcaaattatt

SEQ ID NO: 393101 - DNA, 613 bp, Homo sapiens
acccttcggggggcaccgacctaggagctccctgagccagggctgtgacaacctctttagggctctgcagttcctggtatttccaagcttctgagagccacaccatgttgtctggtgtcagytgtggaaatcacttatggtatacctggtccagcttcagcctcacagggagccagtgccaatgctggtgcctggagctgctggccccgccatagcaggtgtgcccagctgtaagcagtggctggatgccatgcttgctcacacacccctcactgctctgtgtctggcttgcccttggcaggtgtgggatccaggccagtagtgggagctgactgcagcctgccaggccaaatgggcagaacgagcccagcagccagagcaaaactcaggcaaagctgccactggccacagaggttgccagctggtgaagtgacaccccaaggatcccataacagtagcatgatgcacaattttcctggacccaggaagaaaaaatatgaatgttggaaataattactctcattgtctgccatttctctttcaaatactgtcttgcaacatttatacattttcttctggaagggtttggtcagggccttgtagtgcccttact

SEQ ID NO: 393102 - DNA, 660 bp, Homo sapiens
aaaaggcaactttttgccagaggacaggtgtagcttaagatgaagtatatctgaacttaaatgagaatcaaacttctaaagctctggggagggagaatataartcatatgtatttacactaatttatctcaagaataatttttctatatacattctaattttaaaataacaataatttaataatatctaccaagttgatggtttcctctatgaagttttcaaaaggatggttatctccctgaggacatcaaaaagtcagcaagtcttcatatgggttttctaggcataaatacagcacagtccactgaatacatgtctcctaaaaattctttaaaggctctatgggtgacaccaagtccttgatgtttgctaaaatttggtttgttttattctttaagaactataagcacagtgcccagggactacgtgctttttaggagcctctaaaatttctgaaaccagaaaaagtattattcgctcagcaataagaaaacaaaactacaaaataaatattattaaaaatgtaatgatcaacaaaatataactttataccaaccttgttattgttagatttagtatttataatatttctattacatttgaaaactagttgttcgttagattttctttactttgcaataatttctacatgtgcatggt

SEQ ID NO: 393103 - DNA, 607 bp, Homo sapiens
ggcccacaaaagagtttcatggaaaccaaccagagtgaaatccttaagacaattaattcaggaaaggtattgtgatggtagatcaggccactggtccactatgctgtatacataaaattgcaagacttgaacgctagacttctgattacacgggaagaggggctggtgattttttcagccgatgagtatgaggtggcaaagttagactgggctcagccggtagaacagaaactcttgtttcactgatcatgtagctaaattttcacatcacaagagagagggctcctctcacttggagtctgatatcttgtgtgactagatcactgtatgctattycagaattctatcctccctttcaacataactggaggcttatgtgaataaggtaggtatgcaggaggtaggatcccccaataatcaaagctgtttgtgtcccttgtcctgatcaaacttttagatgttattaaggaggtctgcatgacctaaagattgctgttcttaaaaaaaaaaaaagctaattaatcttgtgagcacctgcaggggttaggataggaagttaataaattacttgactaccctttactgaaataacggtatgcaagcaagc

SEQ ID NO: 393104 - DNA, 523 bp, Homo sapiens
gaaattactataagaagaaacaactaacctataaataaataatytactttttggaaaagttaacaaacctctctacacacaatataattaagaaagataataagaaacatatataatttcaagattttcaattttttttactaagccagagaagataaatgagttaatcattcatgtcagtaagtaaatacaggatcaaaaaacatacctaatggaaggaaattaataacagaaaagtaaaaattataatctagaaaatgaaagatataaatcgattcataaatggataagacttttaagactttttttgaagaaatcatttcaaactagaataagcaagaggaatagatcaaaacaaaaaggaaaacagtgaaggtgatatacacatcctcttactgaaaattaattttaaagaactttaaattaattttaaagaattaattttaaacactaaaactcagagtcatcaatgtgtctggatacggattcatttttatttcttctgctcagcacttgttttata

SEQ ID NO: 393105 - DNA, 523 bp, Homo sapiens
gaaattactataagaagaaacaactaacctataaataaataatttactttttggaaaagttaacaaacctctctacacacaatataattaagaaagataataagaaacatatataatttcaagattttcaattttttttactaagccagagaagataaatgarttaatcattcatgtcagtaagtaaatacaggatcaaaaaacatacctaatggaaggaaattaataacagaaaagtaaaaattataatctagaaaatgaaagatataaatcgattcataaatggataagacttttaagactttttttgaagaaatcatttcaaactagaataagcaagaggaatagatcaaaacaaaaaggaaaacagtgaaggtgatatacacatcctcttactgaaaattaattttaaagaactttaaattaattttaaagaattaattttaaacactaaaactcagagtcatcaatgtgtctggatacggattcatttttatttcttctgctcagcacttgttttata

SEQ ID NO: 393106 - DNA, 541 bp, Homo sapiens
ttattttagtaaaaatattcaacactgtacctttcaaataaaaatatactgttttaaaggtcaacaaaaagttattgtgcttcaaattttaacatttatcctccaagtgaaattactataagaagaaacaactaacctataaataaataatttactttttggaaaagttaacaaacctctctacacacaatataattaagaaagataataagaaacatatataatttcaagattttcaattttttttactaagccagagaagataaatgagttaatcattcatgtcagtaagtaaatacaggatcaaaaaacatacctaatggaaggaaattaataacagaaaagtaaaaattataatctagaaaatgaaakatataaatcgattcataaatggataagacttttaagactttttttgaagaaatcatttcaaactagaataagcaagaggaatagatcaaaacaaaaaggaaaacagtgaaggtgatatacacatcctcttactgaaaattaattttaaagaactttaaattaattttaa

SEQ ID NO: 393107 - DNA, 523 bp, Homo sapiens
gaaattactataagaagaaacaactaacctataaataaataatttactttttggaaaagttaacaaacctctctacacacaatataattaagaaagataataagaaacatatataatttcaagattttcaattttttttactaagccagagaagataaatgagttaatcattcatgtcagtaagtaaatacaggatcaaaaaacatacctaatggaaggaaattaataacagaaaagtaaaaattataatctagaaaatgaaagatataaatygattcataaatggataagacttttaagactttttttgaagaaatcatttcaaactagaataagcaagaggaatagatcaaaacaaaaaggaaaacagtgaaggtgatatacacatcctcttactgaaaattaattttaaagaactttaaattaattttaaagaattaattttaaacactaaaactcagagtcatcaatgtgtctggatacggattcatttttatttcttctgctcagcacttgttttata

SEQ ID NO: 393108 - DNA, 376 bp, Homo sapiens
ttgaaacactctttttgtagtgtctggaagtggacatttggagcgctttgatgcctttggtgaaaaagggaatgtcttcccataaaaactagacagaagcattctcagaaacttgtttgtgatgtgtgtacccagcyaaaggagttgaacatttctattgatagagcagttgtgaaacactctttttgtggaaaatgcaagtggatatttggatagcttggaggatttcgttggaagcgggaattcaaataaaaggtagacagcagcattctcagaaatttctttctgatgtctgcattcaactcatagatttgaagattccctttcatagagcaggtttgaaacactctttctggagtatctggatgtggacatt

SEQ ID NO: 393109 - DNA, 376 bp, Homo sapiens
ttgaaacactctttttgtagtgtctggaagtggacatttggagcgctttgatgcctttggtgaaaaagggaatgtcttcccataaaaactagacagaagcattctcagaaacttgtttgtgatgtgtgtacccagctaaaggagttgaacatttctattgatagagcagttktgaaacactctttttgtggaaaatgcaagtggatatttggatagcttggaggatttcgttggaagcgggaattcaaataaaaggtagacagcagcattctcagaaatttctttctgatgtctgcattcaactcatagatttgaagattccctttcatagagcaggtttgaaacactctttctggagtatctggatgtggacatt

SEQ ID NO: 393110 - DNA, 376 bp, Homo sapiens
ttgaaacactctttttgtagtgtctggaagtggacatttggagcgctttgatgcctttggtgaaaaagggaatgtcttcccataaaaactagacagaagcattctcagaaacttgtttgtgatgtgtgtacccagctaaaggagttgaacatttctattgatagagcagttgtgaaacactctttttgtgkaaaatgcaagtggatatttggatagcttggaggatttcgttggaagcgggaattcaaataaaaggtagacagcagcattctcagaaatttctttctgatgtctgcattcaactcatagatttgaagattccctttcatagagcaggtttgaaacactctttctggagtatctggatgtggacatt

SEQ ID NO: 393111 - DNA, 376 bp, Homo sapiens
ttgaaacactctttttgtagtgtctggaagtggacatttggagcgctttgatgcctttggtgaaaaagggaatgtcttcccataaaaactagacagaagcattctcagaaacttgtttgtgatgtgtgtacccagctaaaggagttgaacatttctattgatagagcagttgtgaaacactctttttgtggaaaatgcargtggatatttggatagcttggaggatttcgttggaagcgggaattcaaataaaaggtagacagcagcattctcagaaatttctttctgatgtctgcattcaactcatagatttgaagattccctttcatagagcaggtttgaaacactctttctggagtatctggatgtggacatt

SEQ ID NO: 393112 - DNA, 603 bp, Homo sapiens
gggtggtttttctcctatctcagaattgaacaaatgtaaaatcgggttttataccgagacagtccattcccaggagcaggcaggagacagtggccttcctctatctcaactgcaagggctttcctcttttactaatccacctcarcacagaccgtttatgggtgttgggctgggggatgatcaggtctttctcatcccatgaggcatatttcagactatcacatggggagaaaccttggacaatacccggctttccagggcagaggtccctgccattttccgcagtgcattgtgcccttggtttatcgagactagagaatggcgatgacttttaccaagcatactacttgtaaacattttgttaacaaggcacagccctagatcccttaaaccttgattccatacaacacatttttgtgagctcaaggttggggcaaagaggttggggcacagtgattggggcaaagttacagattaacagaatctcaggacaaagcaattgttcaaggtacaggtcaaaatggaatttattatgtcttccctttctacatagacacagtaacagtctgatccctcttccttttccctacaaaatagaaatga

SEQ ID NO: 393113 - DNA, 533 bp, Homo sapiens
agaaaccttggacaatacccggctttccagggcagaggtccctgccattttcygcagtgcattgtgcccttggtttatcgagactagagaatggcgatgacttttaccaagcatactacttgtaaacattttgttaacaaggcacagccctagatcccttaaaccttgattccatacaacacatttttgtgagctcaaggttggggcaaagaggttggggcacagtgattggggcaaagttacagattaacagaatctcaggacaaagcaattgttcaaggtacaggtcaaaatggaatttattatgtcttccctttctacatagacacagtaacagtctgatccctcttccttttccctacaaaatagaaatgatcgttagcaacagaagaaaactaaaatgagtaacttatttttttaaagtaacatactggctaggcatagtggctcttgtctgtaatcccagcattttggcaggtggaggggggcagatcacttgaggtcaggagttcgagatcagcctggtcaacatg

SEQ ID NO: 393114 - DNA, 603 bp, Homo sapiens
gggtggtttttctcctatctcagaattgaacaaatgtaaaatcgggttttataccgagacagtccattcccaggagcaggcaggagacagtggccttcctctatctcaactgcaagggctttcctcttttactaatccacctcaacacagaccgtttatgggtgttgggctgggggatgatcaggtctttctcatcccatgaggcatatttcagactatcacatggggagaaaccttggacaatacccggctttccagggcagaggtccctgccattttccgcagtgcattgtgcccttggtttatcgagactagagaatggcratgacttttaccaagcatactacttgtaaacattttgttaacaaggcacagccctagatcccttaaaccttgattccatacaacacatttttgtgagctcaaggttggggcaaagaggttggggcacagtgattggggcaaagttacagattaacagaatctcaggacaaagcaattgttcaaggtacaggtcaaaatggaatttattatgtcttccctttctacatagacacagtaacagtctgatccctcttccttttccctacaaaatagaaatga

SEQ ID NO: 393115 - DNA, 603 bp, Homo sapiens
gggtggtttttctcctatctcagaattgaacaaatgtaaaatcgggttttataccgagacagtccattcccaggagcaggcaggagacagtggccttcctctatctcaactgcaagggctttcctcttttactaatccacctcaacacagaccgtttatgggtgttgggctgggggatgatcaggtctttctcatcccatgaggcatatttcagactatcacatggggagaaaccttggacaatacccggctttccagggcagaggtccctgccattttccgcagtgcattgtgcccttggtttatcgagactagagaatggcgatgacttttaccaagcatactrcttgtaaacattttgttaacaaggcacagccctagatcccttaaaccttgattccatacaacacatttttgtgagctcaaggttggggcaaagaggttggggcacagtgattggggcaaagttacagattaacagaatctcaggacaaagcaattgttcaaggtacaggtcaaaatggaatttattatgtcttccctttctacatagacacagtaacagtctgatccctcttccttttccctacaaaatagaaatga

SEQ ID NO: 393116 - DNA, 603 bp, Homo sapiens
gggtggtttttctcctatctcagaattgaacaaatgtaaaatcgggttttataccgagacagtccattcccaggagcaggcaggagacagtggccttcctctatctcaactgcaagggctttcctcttttactaatccacctcaacacagaccgtttatgggtgttgggctgggggatgatcaggtctttctcatcccatgaggcatatttcagactatcacatggggagaaaccttggacaatacccggctttccagggcagaggtccctgccattttccgcagtgcattgtgcccttggtttatcgagactagagaatggcgatgacttttaccaagcatactacttgtaaacattttgttaacaaggcayagccctagatcccttaaaccttgattccatacaacacatttttgtgagctcaaggttggggcaaagaggttggggcacagtgattggggcaaagttacagattaacagaatctcaggacaaagcaattgttcaaggtacaggtcaaaatggaatttattatgtcttccctttctacatagacacagtaacagtctgatccctcttccttttccctacaaaatagaaatga

SEQ ID NO: 393117 - DNA, 533 bp, Homo sapiens
agaaaccttggacaatacccggctttccagggcagaggtccctgccattttccgcagtgcattgtgcccttggtttatcgagactagagaatggcgatgacttttaccaagcatactacttgtaaacattttgttaacaaggcacagccctagatcccttaaaccttgattccatacaacacatttttgtgagctcaaggttggggcaaagaggttggggcacagtgattggggcaaagttacagattaacagaatctcaggacaaagcaattgttcaaggtacaggtcaaaatggaatttattatgtcttccctttctacatagacacagtaacagtctgatccctcttccttttccctacaaaatagaaatgatcrttagcaacagaagaaaactaaaatgagtaacttatttttttaaagtaacatactggctaggcatagtggctcttgtctgtaatcccagcattttggcaggtggaggggggcagatcacttgaggtcaggagttcgagatcagcctggtcaacatg

SEQ ID NO: 393118 - DNA, 382 bp, Homo sapiens
actttgtgatatgtgcattcatctcccagatttgaacctttcttttgatgggccagttatttattactctttttgtggaatctgcaagtggacatttcaagccccttgaggcctaccgtggaaaaygaaatacattcacataaaaactagacagaagaaatctgagaaatatctatgtgacgtgtgcgttcatctcacagagttaagctttttttgatcgagcagtttggaaacacactttttgaacaatctgcaagtggacatttgaagctctttgagaactgtggtggaaaaggaaatatcttcacataaaaactagacagaagaatactatgaaatcactttgtgatgcgtgcattcatcacacagagttgaaagtttc

SEQ ID NO: 393119 - DNA, 546 bp, Homo sapiens
catattcacataatggaaacttattcagccttattaaggaatgaaattctaatatacactacagaacttcaatgactacaacmtacgtaaactttgaaaacattatgcttagtgaaataagccagatgcaaaaggataaatattgcttgaagtacttagaataagcaaattatagagacagaataatcattaccagggactagtgtgggtgagaagttattgtttaatgggtacagagcttctatatgggatgattaaagagttctggaaatggacggtggtaaaggttgtgcaatttggtgaatgtaatgtcctctgaactgttcatttaaaattcattaaagtgataaattttacagtatgtgtattttaccacaatttaaagaagaaaattaaaagacaaaaatatgtattcccaattgcactgtattttttgttattaagcataaaatttaaactttattaaacttattagaaaaagggaattggaaatgtgatataatgaagtaattcacaaaaatgtgtacagtaaatgcactcaagagc

SEQ ID NO: 393120 - DNA, 546 bp, Homo sapiens
catattcacataatggaaacttattcagccttattaaggaatgaaattctaatatacactacagaacttcaatgactacaacatacgtaaactttgaaaacattatgcttagtgaaataagccagatgcaaaaggataaatattgcttgaagtacttagaataagcaaattayagagacagaataatcattaccagggactagtgtgggtgagaagttattgtttaatgggtacagagcttctatatgggatgattaaagagttctggaaatggacggtggtaaaggttgtgcaatttggtgaatgtaatgtcctctgaactgttcatttaaaattcattaaagtgataaattttacagtatgtgtattttaccacaatttaaagaagaaaattaaaagacaaaaatatgtattcccaattgcactgtattttttgttattaagcataaaatttaaactttattaaacttattagaaaaagggaattggaaatgtgatataatgaagtaattcacaaaaatgtgtacagtaaatgcactcaagagc

SEQ ID NO: 393121 - DNA, 546 bp, Homo sapiens
catattcacataatggaaacttattcagccttattaaggaatgaaattctaatatacactacagaacttcaatgactacaacatacgtaaactttgaaaacattatgcttagtgaaataagccagatgcaaaaggataaatattgcttgaagtacttagaataagcaaattatagagacagaataatcattaccagggactagtgtgggtgagaagttattgtttaatgggtacagagcttctatatgggatgattaaagagttctggaaatggacggtggtaaaggttgtgcaatttggtgaatgtaatgtcctctgaactgttcatttaaaattcattaaagtgataaattttacagtatgtgtattttaccacaakttaaagaagaaaattaaaagacaaaaatatgtattcccaattgcactgtattttttgttattaagcataaaatttaaactttattaaacttattagaaaaagggaattggaaatgtgatataatgaagtaattcacaaaaatgtgtacagtaaatgcactcaagagc

SEQ ID NO: 393122 - DNA, 398 bp, Homo sapiens
cacctcgcctggactatccctcactttataacattaatcaagttcttttataattttatgttaaagatttttgaattttgttaatctattttattttccttcataaaatgatcaaagctagaaataacattacaaagtatatcataatcgttaayagaaagagctctataatcagcttaaatttcttttctctcttttctagttatgtgatcttaggcaagttacataaattacctgtgttcagtttatttatttgtgaaatggggaaaataatggtgcctgtctctgggtaagattgtagtgatggtgaataacagatttatcaagcataaagcagtgcctgggacacaggaattgccctctctgcatgcccctgcatatgtgtgcatacaggcatg

SEQ ID NO: 393123 - DNA, 398 bp, Homo sapiens
cacctcgcctggactatccctcactttataacattaatcaagttcttttataattttatgttaaagatttttgaattttgttaatctattttattttccttcataaaatgatcaaagctagaaataacattacaaagtatatcataatcgttaacagaaagagctctataatcagcttaaatttcttttctctcttttctagttatgtgatcttaggcaagttacataaattacctgtgttcagtttatttatttgtgaaatggggaaaataakggtgcctgtctctgggtaagattgtagtgatggtgaataacagatttatcaagcataaagcagtgcctgggacacaggaattgccctctctgcatgcccctgcatatgtgtgcatacaggcatg

SEQ ID NO: 393124 - DNA, 398 bp, Homo sapiens
cacctcgcctggactatccctcactttataacattaatcaagttcttttataattttatgttaaagatttttgaattttgttaatctattttattttccttcataaaatgatcaaagctagaaataacattacaaagtatatcataatcgttaacagaaagagctctataatcagcttaaatttcttttctctcttttctagttatgtgatcttaggcaagttacataaattacctgtgttcagtttatttatttgtgaaatggggaaaataatggtgcctgtctctgggtaagattgtagtgakggtgaataacagatttatcaagcataaagcagtgcctgggacacaggaattgccctctctgcatgcccctgcatatgtgtgcatacaggcatg

SEQ ID NO: 393125 - DNA, 617 bp, Homo sapiens
cagataattcacttaaatcaacaaaaaaccctctaatttaaaattgagcaatttaaattagagatctaaattgcagatctaaaaatagtactttgcttctaatttaaaatttggaaaatattttcttaagatctgtaagtgacctatgcacacagaaaacaatatttagtgttcctggttacagaaggcatttaagttaaaagaggaatcaaatactgctttctayctacaaagtttgtgaggataaagagcagtgatatttatactactgtttaaagtttaagttgcagataacttttcaaatagacaatttggtggtaagtaccatattattaagaagaatccatataatgacttttataaatacatttcagtgaatttacagcatgggataatatgtgaccactgaaggtagaaatatgtagagaagtaggtgacatttgaaaatgtattttggtgtatcaagtgagggtaaagttcagtttgattatacatacagacttgcgttatctgaagttgtgtatgaaatatgataaaatttgttatttgagggcatttgttttaatataaaatgtttttcctttttattatctttgatttccacattgagcatgtac

SEQ ID NO: 393126 - DNA, 617 bp, Homo sapiens
cagataattcacttaaatcaacaaaaaaccctctaatttaaaattgagcaatttaaattagagatctaaattgcagatctaaaaatagtactttgcttctaatttaaaatttggaaaatattttcttaagatctgtaagtgacctatgcacacagaaaacaatatttagtgttcctggttacagaaggcatttaagttaaaagaggaatcaaatactgctttctatctacaaagtttgtgaggataaagagcagtgatatttatactactgtttaaagtttaagttgcagataacttttcaaatagacaatttggtggtaagtaccatattattaagaagaatccatataatgacttttataaatacatttcagtgaatttacagcatgggataatatgtgaccactgaaggtagaaatatgtagagaagtaggtgacatttgaaaatgtattttggtgtatcaagtgagggtaaagttcagtttsattatacatacagacttgcgttatctgaagttgtgtatgaaatatgataaaatttgttatttgagggcatttgttttaatataaaatgtttttcctttttattatctttgatttccacattgagcatgtac

SEQ ID NO: 393127 - DNA, 617 bp, Homo sapiens
cagataattcacttaaatcaacaaaaaaccctctaatttaaaattgagcaatttaaattagagatctaaattgcagatctaaaaatagtactttgcttctaatttaaaatttggaaaatattttcttaagatctgtaagtgacctatgcacacagaaaacaatatttagtgttcctggttacagaaggcatttaagttaaaagaggaatcaaatactgctttctatctacaaagtttgtgaggataaagagcagtgatatttatactactgtttaaagtttaagttgcagataacttttcaaatagacaatttggtggtaagtaccatattattaagaagaatccatataatgacttttataaatacatttcagtgaatttacagcatgggataatatgtgaccactgaaggtagaaatatgtagagaagtaggtgacatttgaaaatgtattttggtgtatcaagtgagggtaaagttcagtttgattatacatacagacttgcgttatctgaagttgtgtatgaaatatgataaaatttgttatttgagggcatttgttttaatataaaatgtttttcctttttwttatctttgatttccacattgagcatgtac

SEQ ID NO: 393128 - DNA, 391 bp, Homo sapiens
tttcattctggccatcaaaattgcctaaattctttgtgggcaatatcatcaacccttgagggaaattcaagatattcctaacacagaaatattcttagctgaaaagagtatgggatgacaattttcaacctggcatatataaaaagaagaaaaatgttgggtaaatgaacagcaaaagaaagatgacattcatatgtcctatgcaattctgaatacttattttatgtaggtgaatattttaatgaaagacatttattgatycaaaatattttttaacttaaagaactttggcaaaacaatgcccttcagtcagtgactatattatcaagtttcacctacctctgatcaaggaaacaaaaataatagtaattccatactcagtatgtgtgag

SEQ ID NO: 393129 - DNA, 391 bp, Homo sapiens
tttcattctggccatcaaaattgcctaaattctttgtgggcaatatcatcaacccttgagggaaattcaagatattcctaacacagaaatattcttagctgaaaagagtatgggatgacaattttcaacctggcatatataaaaagaagaaaaatgttgggtaaatgaacagcaaaagaaagatgacattcatatgtcctatgcaattctgaatacttattttatgtaggtgaatattttaatgaaagacatttattgattcaaaatattttttaacttaamgaactttggcaaaacaatgcccttcagtcagtgactatattatcaagtttcacctacctctgatcaaggaaacaaaaataatagtaattccatactcagtatgtgtgag

SEQ ID NO: 393130 - DNA, 576 bp, Homo sapiens
tttatgtagcttcagaaagaggagttaaacacataggtgaagtcttccctccaccaggttctaaaatgtaagattcatggccttctgaaaacactcccttaccaatgtgaggctggaaccatagaacaggtggaggatttagtaggtattggctcaacatttaaagtacaatctttttccttaataggtattttcataccttataaacacatgtatgaccttggatgtccaattaaatcccaggaaaaaaggacagattcttgatgaaactaggcaaataatgagacagcaagtaaaaagggctccccagcagaacctccgaccagcttgcacactggcaggagtgcatactgaggtggagcctcaggaagtttgcagcggggaggagcctggcctcttctgttccaggacggaggctgggattcaatctatgaggcaggaagctgggtagcaggagtctctgtttctccttttttcccttttgcccaataaattccatttttcttayccttcaaagcgtcggtgagcctaatatttcatggctgtgtgacaagaacgcagcttttagctgaacta

SEQ ID NO: 393131 - DNA, 541 bp, Homo sapiens
gactagggtgcagatcttacatctgtagagggaaagagggaaggaaggctgattggggtagaaagagactgcagcatggttccaagaatgctttggcctaggtcactgcrgactccttaaattaaagttactcattggagactgtcacaactcactggaaacgtcctcacatacaatccccatgtagctctatgactgttggaaacatgactgctgcacaagtgtagaagtgcttccagagacagagggctaaagccaggctgtcgttgacttatgctgtctgattcaggatatctgcattgcaaacttccttggtcattaaaatccattacccccacctcctaaccccaccacagcacacacatatttgtccaaacaggttcttcataccagctcttccaaaattcccatgatcctctcttttccaaggggaatcttagaaaaggaaggttaatgagaccaactctagcccatgctatagcagttggtctcagaactgcctttgaatgcccagttgtgtgagggggagagaaagagagag

SEQ ID NO: 393132 - DNA, 541 bp, Homo sapiens
gactagggtgcagatcttacatctgtagagggaaagagggaaggaaggctgattggggtagaaagagactgcagcatggttccaagaatgctttggcctaggtcactgcggactccttaaattaaagttactcattggagactgtcacaactcactggaaacgtcctcacatacaatccccatgtagctctatgactgttggaaacatgactgctgcacaagtgtagaagtgcttccagagacagagggctaaagccaggctgtcgytgacttatgctgtctgattcaggatatctgcattgcaaacttccttggtcattaaaatccattacccccacctcctaaccccaccacagcacacacatatttgtccaaacaggttcttcataccagctcttccaaaattcccatgatcctctcttttccaaggggaatcttagaaaaggaaggttaatgagaccaactctagcccatgctatagcagttggtctcagaactgcctttgaatgcccagttgtgtgagggggagagaaagagagag

SEQ ID NO: 393133 - DNA, 541 bp, Homo sapiens
gactagggtgcagatcttacatctgtagagggaaagagggaaggaaggctgattggggtagaaagagactgcagcatggttccaagaatgctttggcctaggtcactgcggactccttaaattaaagttactcattggagactgtcacaactcactggaaacgtcctcacatacaatccccatgtagctctatgactgttggaaacatgactgctgcacaagtgtagaagtgcttccagagacagagggctaaagccaggctgtcgttgacttatgctgtctgattcaggatatctgcattgcaaayttccttggtcattaaaatccattacccccacctcctaaccccaccacagcacacacatatttgtccaaacaggttcttcataccagctcttccaaaattcccatgatcctctcttttccaaggggaatcttagaaaaggaaggttaatgagaccaactctagcccatgctatagcagttggtctcagaactgcctttgaatgcccagttgtgtgagggggagagaaagagagag

SEQ ID NO: 393134 - DNA, 551 bp, Homo sapiens
attgcaaacttccttggtcattaaaatccattacccccacctcctaaccccaccacagcacacacatatttgtccaaacaggttcttcataccagctcttccaaaattcccatgatcctctcttttccaaggggaatcttagaaaaggaaggttaatgagaccaactctagcccatgctatagcagttggtctcagaactgcctttgaatgcccagttgtgtgagggggagagaaagagagagagagtatgggagtggggagtgtgtgtgwgtgtgagtgtgtgtgtgtgtgtgtctgagagagagaaagagagaaattatctctgcttcttttgtagaaaagtagccctacctcctcctgctaatcagggtgtattcatcctgccccagtggtgacgtatttcttgtcttttggttactggacctaaggaatctaaagcacccaacagataacattctttagagagcaggacttgcttgccttccagatcccagagctgcagtgatgagaagcacaggaaaacctgagaagattattgggagcatttgta

SEQ ID NO: 393135 - DNA, 590 bp, Homo sapiens
ggtcctggctcaggctctgtgaacagaagtgccaaacccagccctggaataaggatatatccctctgaggatgaaaaggtggtcattcaaggtcaaaagacttgccatataagagtctcattattgatttatgctgttgaaaagtaggacagtcagaggcagcagtagttagawaaaccttgatacatagaagtccaggctgtggggcccatatgtatcgtccatctctgccaacatggtcatatgagtgactgcatatgtatgactgttgtgcttgttgtgggaaagccaatctccaaggctggcagcttgtcaagtcattttgtctgattggttattgagtgcctcttctgtggtgagtgctttcttgtgagtgttaacgtgcaatacaagattctttacactccgtgcctgctcctgcatgtccactcatatgcttctaacccagcttccttgtctcagatatttcagttcttttctatctaagcctctgatcagatgattcacccactgactacggcaaagaaatctgtttatattcctgccttaggccatgtttcttctatgtaaagtagatggccagggccact

SEQ ID NO: 393136 - DNA, 515 bp, Homo sapiens
attcctgccttaggccatgtttcttctatgtaaagtagatggccagggccactgctcccagtgctgctaatagggaatattttaatttccttctgtccttcagagtcattcttgcattgggctgcaatgcaactacacctttaaacagagattgcccctttctccctccttcagatggccacagggacacaaatgcagtcacaggtgtgagctgaaggaaggttgctggtgcaaacatggtgggtgacatgaggatctgggttacctgctattcaacttatccacttgytctcatcttgcttggcctttgtctcatatttactatttccacctcatgatgaactacttcttttcccttctggtgtcatgacttggtggttccaatagaactcagcctgcaagaggtagtgccagaagcatggtaacttatcaagcacagcatctctcctaggtccaacatataattctctgctatggaaggcatggctttgtttcagaatcccaggaactggtgt

SEQ ID NO: 393137 - DNA, 515 bp, Homo sapiens
attcctgccttaggccatgtttcttctatgtaaagtagatggccagggccactgctcccagtgctgctaatagggaatattttaatttccttctgtccttcagagtcattcttgcattgggctgcaatgcaactacacctttaaacagagattgcccctttctccctccttcagatggccacagggacacaaatgcagtcacaggtgtgagctgaaggaaggttgctggtgcaaacatggtgggtgacatgaggatctgggttacctgctattcaacttatccacttgttctcatcttgcttggcctttgtctcatatttactmtttccacctcatgatgaactacttcttttcccttctggtgtcatgacttggtggttccaatagaactcagcctgcaagaggtagtgccagaagcatggtaacttatcaagcacagcatctctcctaggtccaacatataattctctgctatggaaggcatggctttgtttcagaatcccaggaactggtgt

SEQ ID NO: 393138 - DNA, 270 bp, Homo sapiens
aacaacacaataacaaaatgggcaagagatttgagtagacgacaataaccaaagatatattaatgattgatraacactgaaaaattcatcattaaccacctgggaatggaatttaaaaatcaaaatgcaataatactgcacagaaactataatggatcaaaaaaaatgtcaattctgaatgtttgagaggacatgcaacaccctgaattatcatatttaggtgggagtataaagtggataatcagtttggattgcagtttggcagttaaa

SEQ ID NO: 393139 - DNA, 558 bp, Homo sapiens
agatttgagtagacgacaataaccaaagatatattaatgattgataaacactgaaaarttcatcattaaccacctgggaatggaatttaaaaatcaaaatgcaataatactgcacagaaactataatggatcaaaaaaaatgtcaattctgaatgtttgagaggacatgcaacaccctgaattatcatatttaggtgggagtataaagtggataatcagtttggattgcagtttggcagttaaacatacacttacaatttgacctagaatattccattcttacttactgaagagaaatgaaaacatgtgcatacaaatgaacatagcagctttacttgtaataatcaaggaatagaaacatttgtaaatggttcaccaacaggctaaaggataaacatattgtagtatttccatacaatagaataaaatagaaagaaccactgattttgcaacataggtgatcctaaaatatattgagagaatgaaccaacagtaggcatattataaaagtttattactacaaaattctagaaactgaatttatagtggtaggttgca

SEQ ID NO: 393140 - DNA, 270 bp, Homo sapiens
aacaacacaataacaaaatgggcaagagatttgagtagacgacaataaccaaagatatattaatgattgataaacactgaaaaatkcatcattaaccacctgggaatggaatttaaaaatcaaaatgcaataatactgcacagaaactataatggatcaaaaaaaatgtcaattctgaatgtttgagaggacatgcaacaccctgaattatcatatttaggtgggagtataaagtggataatcagtttggattgcagtttggcagttaaa

SEQ ID NO: 393141 - DNA, 558 bp, Homo sapiens
agatttgagtagacgacaataaccaaagatatattaatgattgataaacactgaaaaattcatcattaaccacctgggaatggaatttaaaaatcaaaatgcaataatactgcacagaaactataatggatcmaaaaaaatgtcaattctgaatgtttgagaggacatgcaacaccctgaattatcatatttaggtgggagtataaagtggataatcagtttggattgcagtttggcagttaaacatacacttacaatttgacctagaatattccattcttacttactgaagagaaatgaaaacatgtgcatacaaatgaacatagcagctttacttgtaataatcaaggaatagaaacatttgtaaatggttcaccaacaggctaaaggataaacatattgtagtatttccatacaatagaataaaatagaaagaaccactgattttgcaacataggtgatcctaaaatatattgagagaatgaaccaacagtaggcatattataaaagtttattactacaaaattctagaaactgaatttatagtggtaggttgca

SEQ ID NO: 393142 - DNA, 270 bp, Homo sapiens
aacaacacaataacaaaatgggcaagagatttgagtagacgacaataaccaaagatatattaatgattgataaacactgaaaaattcatcattaaccacctgggaatggaatttaaaaatcaaaatgcaataatactgcacagaaactataatggatcaaaaaaaatgtcaattctgaatgtttgagaggacatrcaacaccctgaattatcatatttaggtgggagtataaagtggataatcagtttggattgcagtttggcagttaaa

SEQ ID NO: 393143 - DNA, 348 bp, Homo sapiens
ccattcttacttactgaagagaaatgaaaacatgtgcatacaaatgaacatagcagctttacttgtaataatcaaggaatagaaacatttgtaaatggttcaccaacaggctaaaggataaacatattgtagtatttccatacaatagaataaaatagaaagaaccactgattttgcaacataggtgatcctaaaatatattgagagaatgaaccaacagtaggcatattataaaagtttattactacaaaattctagaaactgaatttatagtggtargttgcagatcaatggctgcttggagccagaggttttggtaaggaatacaaaagaacttttgaggtgata

SEQ ID NO: 393144 - DNA, 655 bp, Homo sapiens
gaaactcattgacatatcctttggttcccacagcctttattgtatatgtcayaatttagcacatacattactctgccatacattttagtaagttaatgacctgtctcttttcactgataaaacagtgtcaggattttttcatttttgtattccctactggtccacagagtgttatgaacatataatttgctaagttaattttaaattgacttaaacgtactggtgaattcaccgattaactgttcttttccagtattactcttagaaatgtccttcccttgatatattttatgttctaaaaaattaatttcattttaagaatcacatcctccaaaacaaaagaaacaaaagctcccatacaattctaatgctagttataggtaacattaaaaaatggcataccaactgtaaaaaccaaaaacaaaaaaacaaacaaacaaacaaaacaattcccatgaaagccagaggcaaacaatgcaaattttaatgtcaatattgtcatttttttcctaggttaggggacaatataaccacatttataaacttattctttttgtctctcctcatgttgacctcacacatagcatattatgccattaaaacaacaaaaaaaggagaaaatgctatattgaaatccagtattttcttacaacaa

SEQ ID NO: 393145 - DNA, 617 bp, Homo sapiens
aaactcattgacatatcctttggttcccacagcctttattgtatatgtcacaatttarcacatacattactctgccatacattttagtaagttaatgacctgtctcttttcactgataaaacagtgtcaggattttttcatttttgtattccctactggtccacagagtgttatgaacatataatttgctaagttaattttaaattgacttaaacgtactggtgaattcaccgattaactgttcttttccagtattactcttagaaatgtccttcccttgatatattttatgttctaaaaaattaatttcattttaagaatcacatcctccaaaacaaaagaaacaaaagctcccatacaattctaatgctagttataggtaacattaaaaaatggcataccaactgtaaaaaccaaaaacaaaaaaacaaacaaacaaacaaaacaattcccatgaaagccagaggcaaacaatgcaaattttaatgtcaatattgtcatttttttcctaggttaggggacaatataaccacatttataaacttattctttttgtctctcctcatgttgacctcacacatagcatattatgccattaaaacaacaaaaaaaggaga

SEQ ID NO: 393146 - DNA, 574 bp, Homo sapiens
aaactacttcatggcttgtgaggatgaagtgcatgtagagtacttagcgagttctctttgtgtattatgtattagtttcaaaatgcagattctagagcccttagattctcattcaataggtatgaggcaagcacgggccaggattctgcattctttaacgacgtgtaatttcctacatctgatgtgacaaagtggttcacattaggtcgcttaaaatgagataaagttattcttttacggttcaggaagctagaaatcttgaaggagytagcagtgcagcatttttctctgaaggacctgggaaaaaatcctttcttgcttcttctagcaccgggtgatcactgagcttcattgtcactgcttggctggaggatacctcactttattctctacctccatcctcacatggccatgtcctcccggcatctctgtttcctcttcccttcttatgaggatatcaaccatattgaattatggcccactctaatgcattatgagctcatctagcatatcataattatacagcatctgcaaataatttgatttcaaattaagtcatactcacagacatcag

SEQ ID NO: 393147 - DNA, 574 bp, Homo sapiens
aaactacttcatggcttgtgaggatgaagtgcatgtagagtacttagcgagttctctttgtgtattatgtattagtttcaaaatgcagattctagagcccttagattctcattcaataggtatgaggcaagcacgggccaggattctgcattctttaacgacgtgtaatttcctacatctgatgtgacaaagtggttcacattaggtcgcttaaaatgagataaagttattcttttacggttcaggaagctagaaatcttgaaggagctagcagtgcagcatttttctctgaaggacctgggaaaaaatcctttcttgcttcttctagcacygggtgatcactgagcttcattgtcactgcttggctggaggatacctcactttattctctacctccatcctcacatggccatgtcctcccggcatctctgtttcctcttcccttcttatgaggatatcaaccatattgaattatggcccactctaatgcattatgagctcatctagcatatcataattatacagcatctgcaaataatttgatttcaaattaagtcatactcacagacatcag

SEQ ID NO: 393148 - DNA, 640 bp, Homo sapiens
caaagtgtcagaggaccatgttccttccaaaagccctagggaaaaattttaattcttccttgcctcttccagcttttggtggccccaggcattgcttggctgatggcagcataactccagtctctacttttgtcttcatatgtcattattccctatgtttctttgtattctccttttctgtctcttataaggacactcattggtggatttcatgcttatctcaatccagcatgacctcaaattgagatgctaaccttaattacatctacaaagattcttatgccaaataaagttacattctgagattccagttgaacatatctttggagatccactgttgaacctactatgcttaaaaactcaggcctgtcccaagggcagatttaaaaagaaagagaaattcattttgctttctgattttgagattgttcctcttacccctactccattttcaacacctgaactttatcaagaaaactcaaagacaaaatgtggccaaggttggcaataaatacatttttgccaataatctgatggraaatgtatgttacttcttgtaaatcaaaataaactggatctgctggcaatctagttaacctgcaatttggattatgacaatggtgttcttattttatgcatt

SEQ ID NO: 393149 - DNA, 323 bp, Homo sapiens
ctaactattgtgtattcatggtcataatggtggaaaggatagtcactgggactactagaggatggaaagagggtgagaggcagggctaaaaaactattttttggatcttatgcccactacctcggtgaaagattgattcatactctaaacctcaacatcactcaatatacctttgcagctaacctgcatgcatacccccaattctaaaataaaagttgaaaaaaaaagcttagaaaagaattgaaggaaatacaaaaataarttaccacgactacctcttgatggtgagtatgggtaatttttgttggtttatattgaccccc

SEQ ID NO: 393150 - DNA, 367 bp, Homo sapiens
ttatagttcctgtaatttggggaaattaaagtcacttgggaacaatrtttacttcactagcaaccaaaggagtacaattgaaaaataatgacttgaaaataaaataaaagtaaaaaaggacttcatttcttttcacacagtctgaaagagtgagtgcacaagcttttctctgcccaactcctctttgtccacaaggaattttcagaattcctccgtgtctgtcttataatttcattccttgctcatataagcaagttggttcagaaaccctaagactgttataccgtcagttgggttagtttaaaataacccctatgagcagttcaacactgaattggcaatgctttggaaagcagagaccctgtca

SEQ ID NO: 393151 - DNA, 567 bp, Homo sapiens
agcagagaccctgtcagctaaccagccatcctttaaaatcaattcatattctcacagtccctggggattgtttcacagggctaaaatttcgctgttggaacagggttgcttgaagataacagggatacttgaaggtaagcatgtcaatattttgctgtttctgaatgtcattcattcagagatggcttaagacatttgcaattcattcaaagatggcataagaaatttggattttcaaactttagttttctcatcttagagtttgaggtaattttatttgtcagctgccagaaaataaaaagtacacataaggtagcagactaatatctacattgacctattgtagaaccagaaggacccatttatttagcaagagacttctttactgtgtctagttcaggttccyggaaagatgggacaattcgtagtaacactcattccttctgctaagggtcatgagataggtttagacatacggtcccattttgatgatgttttaaactttgtttattttacataccctgtgatagagccaatcaatgtaggggcctaaacgtcggtatagcc

SEQ ID NO: 393152 - DNA, 567 bp, Homo sapiens
agcagagaccctgtcagctaaccagccatcctttaaaatcaattcatattctcacagtccctggggattgtttcacagggctaaaatttcgctgttggaacagggttgcttgaagataacagggatacttgaaggtaagcatgtcaatattttgctgtttctgaatgtcattcattcagagatggcttaagacatttgcaattcattcaaagatggcataagaaatttggattttcaaactttagttttctcatcttagagtttgaggtaattttatttgtcagctgccagaaaataaaaagtacacataaggtagcagactaatatctacattgacctattgtagaaccagaaggacccatttatttagcaagagacttctttactgtgtctagttcaggttcccggaaagatgggacaattcgtagtaacacycattccttctgctaagggtcatgagataggtttagacatacggtcccattttgatgatgttttaaactttgtttattttacataccctgtgatagagccaatcaatgtaggggcctaaacgtcggtatagcc

SEQ ID NO: 393153 - DNA, 567 bp, Homo sapiens
agcagagaccctgtcagctaaccagccatcctttaaaatcaattcatattctcacagtccctggggattgtttcacagggctaaaatttcgctgttggaacagggttgcttgaagataacagggatacttgaaggtaagcatgtcaatattttgctgtttctgaatgtcattcattcagagatggcttaagacatttgcaattcattcaaagatggcataagaaatttggattttcaaactttagttttctcatcttagagtttgaggtaattttatttgtcagctgccagaaaataaaaagtacacataaggtagcagactaatatctacattgacctattgtagaaccagaaggacccatttatttagcaagagacttctttactgtgtctagttcaggttcccggaaagatgggacaattcgtagtaacactcattccttctgctaagggtcatgagataggtttagacatayggtcccattttgatgatgttttaaactttgtttattttacataccctgtgatagagccaatcaatgtaggggcctaaacgtcggtatagcc

SEQ ID NO: 393154 - DNA, 410 bp, Homo sapiens
tcataaagtctacattccagaaaggaagttgasaagaaactaccaatggttcaattacttattaaaattagttttgatcattatctctctatccactgttaatctacctataatcttctttgctcttttccatgtttaatgaactcttagacttttcttttaacttttattttaagttcacgagtacaagtgcaggtttgatacattggtaaatttgtgtcttgggggtttattgtacagattatttcatcaccctggtattaagcctaatacccattagttatttttcctgatcctctccctctaccctctagcctgtgaaaagccccatgggtgttgttaccctctgtgtccatatgtgctcatcatttatctcccacttataagtgagaacatgtggtatttggttt

SEQ ID NO: 393155 - DNA, 410 bp, Homo sapiens
tcataaagtctacattccagaaaggaagttgacaagaaactaccaatggttcaattacttattaaaattagttttgatcattatctctctatccactgttaatctacytataatcttctttgctcttttccatgtttaatgaactcttagacttttcttttaacttttattttaagttcacgagtacaagtgcaggtttgatacattggtaaatttgtgtcttgggggtttattgtacagattatttcatcaccctggtattaagcctaatacccattagttatttttcctgatcctctccctctaccctctagcctgtgaaaagccccatgggtgttgttaccctctgtgtccatatgtgctcatcatttatctcccacttataagtgagaacatgtggtatttggttt

SEQ ID NO: 393156 - DNA, 410 bp, Homo sapiens
tcataaagtctacattccagaaaggaagttgacaagaaactaccaatggttcaattacttattaaaattagttttgatcattatctctctatccactgttaatctacctataatcttctttgctctttwccatgtttaatgaactcttagacttttcttttaacttttattttaagttcacgagtacaagtgcaggtttgatacattggtaaatttgtgtcttgggggtttattgtacagattatttcatcaccctggtattaagcctaatacccattagttatttttcctgatcctctccctctaccctctagcctgtgaaaagccccatgggtgttgttaccctctgtgtccatatgtgctcatcatttatctcccacttataagtgagaacatgtggtatttggttt

SEQ ID NO: 393157 - DNA, 521 bp, Homo sapiens
tttcctgatcctctccctctaccctctagcctgtgaaaagccccatgggtgttgttaccctctgtgtccatatgtgctcatcatttakctcccacttataagtgagaacatgtggtatttggttttctgtctctacattagttggctaaggataatggcctccagctccataatgtccctaaaaaggacatgatctcattctttttacggctgcatagtattccatgatgaatatgtaccatattttctttatccagtctatcactgatgggcatttagattgattccatgtctttgctttgtgaatagtactgcaatgaagatatgcatgcatgtgtctttataatagagtaatttatattcctttgggtattgataaggtttggctgttaccccacccaaatctcatcttgaattatagctcccgtaattcccatgtgtcatgagagggacccagtgggagataattgaatcatgggggcaggtctttcccatgctgttctcctgatagtgaatagatc

SEQ ID NO: 393158 - DNA, 604 bp, Homo sapiens
accaactgtgtataagcatccctttttctctacagccttgcyagcgtctttcatttttttattttgataatagccattctgactggtgttagtatctcattgtggttttgatttgcatttctcagagtctaaaatctagaattaaaacttttaacttggtgagcctatgttgaatgactacagagaacctagataagcagttttcgtttgcattttatccaaaacaggtggcaagaagaaaagtttaagaatttcaagtggcttgattggactcttcttcatggtcgctgagtcaaggactttctcttctagtgaatttaagggttttgtggaacactagtctttctttatgaactctgtcctctttctcatacaatttatcttttccacatatggatggaataaaactgcagaaaatataatgaaatggataaccatatattttttaaaatagaaatttttgagtattgacattcaaggttttaattctagatttaaaaatacattttatttacacactcatcagttaatggatgcttgaattattttcattttcagtctattatgaataatgctgctatgaacattaatgtataagtatttg

SEQ ID NO: 393159 - DNA, 591 bp, Homo sapiens
tttcatgtgcctattggccatttgtatatcttccttggcataaagtctttcaaattacttgctcattttttaattgagttatttgtcttttgattttttagttgtaacagttctttatataktatgcataagtccttatcagatatacaatgtgaaaatattttggttcctgctatacattggttttcccctttataagtggtgtattttgtagatcaaaagcctttaattttaatgaagtccagtttaacaatatttttctcgtgttgcttgtgttttaagtgtcttattgtttgttaagtgtcataggttttttaatatgaatgagtgttggattttctccaaagatttttctacaactattgtcatgataatcctttttgatcctttattttattaatatacatattttattaattgattttccattgttgaagcatatttgtgtatctgggataaatcctacttggtcatgttttgtaatcctatttaaagttattgggtttagtttgctagtatttgactgaggattttttttttcttttctttgtatttgtaaggaatatcagagtttttttcaatatttatttt

SEQ ID NO: 393160 - DNA, 591 bp, Homo sapiens
tttcatgtgcctattggccatttgtatatcttccttggcataaagtctttcaaattacttgctcattttttaattgagttatttgtcttttgattttttagttgtaacagttctttatatattatgcataagtccttatcagatayacaatgtgaaaatattttggttcctgctatacattggttttcccctttataagtggtgtattttgtagatcaaaagcctttaattttaatgaagtccagtttaacaatatttttctcgtgttgcttgtgttttaagtgtcttattgtttgttaagtgtcataggttttttaatatgaatgagtgttggattttctccaaagatttttctacaactattgtcatgataatcctttttgatcctttattttattaatatacatattttattaattgattttccattgttgaagcatatttgtgtatctgggataaatcctacttggtcatgttttgtaatcctatttaaagttattgggtttagtttgctagtatttgactgaggattttttttttcttttctttgtatttgtaaggaatatcagagtttttttcaatatttatttt

SEQ ID NO: 393161 - DNA, 591 bp, Homo sapiens
tttcatgtgcctattggccatttgtatatcttccttggcataaagtctttcaaattacttgctcattttttaattgagttatttgtcttttgattttttagttgtaacagttctttatatattatgcataagtccttatcagatatacaatgtgaaaatattttggttcctgctatacattggttttcccctttataagtggtgtattttgtagatcaaaagcctttaattttaatgaagtccagtttaacaatatttttctcgtgttgcttgtgttttaagtgtcttattgtttgttaagtgtcataggttttttaatatgaatgagtgttggattttctccaaagatttttcyacaactattgtcatgataatcctttttgatcctttattttattaatatacatattttattaattgattttccattgttgaagcatatttgtgtatctgggataaatcctacttggtcatgttttgtaatcctatttaaagttattgggtttagtttgctagtatttgactgaggattttttttttcttttctttgtatttgtaaggaatatcagagtttttttcaatatttatttt

SEQ ID NO: 393162 - DNA, 591 bp, Homo sapiens
tttcatgtgcctattggccatttgtatatcttccttggcataaagtctttcaaattacttgctcattttttaattgagttatttgtcttttgattttttagttgtaacagttctttatatattatgcataagtccttatcagatatacaatgtgaaaatattttggttcctgctatacattggttttcccctttataagtggtgtattttgtagatcaaaagcctttaattttaatgaagtccagtttaacaatatttttctcgtgttgcttgtgttttaagtgtcttattgtttgttaagtgtcataggttttttaatatgaatgagtgttggattttctccaaagatttttctacaactattgtcatgataatcctttttgatcctttattttattaatatacatatkttattaattgattttccattgttgaagcatatttgtgtatctgggataaatcctacttggtcatgttttgtaatcctatttaaagttattgggtttagtttgctagtatttgactgaggattttttttttcttttctttgtatttgtaaggaatatcagagtttttttcaatatttatttt

SEQ ID NO: 393163 - DNA, 565 bp, Homo sapiens
gtttgttaagtgtcataggttttttaatatgaatgagtgttggattttctccaaagatttttctacaactattgtcatgataatcctttttgatcctttattttattaatatacatattttattaattgattttccattgttgaagcatatttgtgtatctgggataaatcctacttggtcatgttttgtaatcctatttaaagttattgggtttagtttgctagtatttgactgaggattttttttttcttttctttgtatttgtaaggaatatcagagtttttttcaatatttattttagattcatggggcatatgtgctgctttgttacttggatatattgtctgatgctaaggtttggrgtataagtgatcccatttaccaaggtactaaacatagtacacaaaagcaggtttttcaacccttgcctctactcctccttcactccacctgctagctgtacccagtgtctattgttgccatctttatgtttatgagtacctaatatttagctccaatttataattgagaaaagactgtatttagttttctgttactgcatta

SEQ ID NO: 393164 - DNA, 565 bp, Homo sapiens
gtttgttaagtgtcataggttttttaatatgaatgagtgttggattttctccaaagatttttctacaactattgtcatgataatcctttttgatcctttattttattaatatacatattttattaattgattttccattgttgaagcatatttgtgtatctgggataaatcctacttggtcatgttttgtaatcctatttaaagttattgggtttagtttgctagtatttgactgaggattttttttttcttttctttgtatttgtaaggaatatcagagtttttttcaatatttattttagattcatggggcatatgtgctgctttgttacttggatatattgtctgatgctaaggtttggagtataagtgatcccatttaccaaggtactaaacatagtacacaaaagcaggtttttcaacccttgcctctactcctccttcactccacctgctagctgyacccagtgtctattgttgccatctttatgtttatgagtacctaatatttagctccaatttataattgagaaaagactgtatttagttttctgttactgcatta

SEQ ID NO: 393165 - DNA, 267 bp, Homo sapiens
taatgcacatcatataaagggcasattagtcaatatatggttcagaaataattatgtaatatttataagaaaattaaaaatttagatccttaactcagataacaataatccaaattaaaatttgatttaattacataatttaaaatgacaccagaatactagtaaaaatgtagataagtttatataatcctttttagctgtagaactttattagcataaattcaaatacaggaaccaaagtaagattgagacctatagtcaaaggtt

SEQ ID NO: 393166 - DNA, 267 bp, Homo sapiens
taatgcacatcatataaagggcagattagtcaatatatggttcagaaataattatgtaatatttataagaaaattaaaaatttagatccttaactcagataacaataatccaaattaaaatttgatttmattacataatttaaaatgacaccagaatactagtaaaaatgtagataagtttatataatcctttttagctgtagaactttattagcataaattcaaatacaggaaccaaagtaagattgagacctatagtcaaaggtt

SEQ ID NO: 393167 - DNA, 267 bp, Homo sapiens
taatgcacatcatataaagggcagattagtcaatatatggttcagaaataattatgtaatatttataagaaaattaaaaatttagatccttaactcagataacaataatccaaattaaaatttgatttaattacataatttaaaatgacaccagaatactagtaaaaatgtagataagtttatataaycctttttagctgtagaactttattagcataaattcaaatacaggaaccaaagtaagattgagacctatagtcaaaggtt

SEQ ID NO: 393168 - DNA, 267 bp, Homo sapiens
taatgcacatcatataaagggcagattagtcaatatatggttcagaaataattatgtaatatttataagaaaattaaaaatttagatccttaactcagataacaataatccaaattaaaatttgatttaattacataatttaaaatgacaccagaatactagtaaaaatgtagataagtttatataatcctttttagctgtagaacyttattagcataaattcaaatacaggaaccaaagtaagattgagacctatagtcaaaggtt

SEQ ID NO: 393169 - DNA, 325 bp, Homo sapiens
aatttcaaataatttaagctaaatacrtagtatatgcagaaaatttagcaatatttgtatgtagcaccttactgtgcattactgtaaccagctgtctaatataaagaactaattaaggtagtacctacttttcaaatatcgcattttttcacagacctattaaataagacaaataacatttaaactttatttttaaatttgcagaatagtatttttcagcagatggtttattttagcaaattccatcttcacattgtgctatgcttttatgagttccagctgttaacggataatattttactgctgaatctatcatgtgtgatat

SEQ ID NO: 393170 - DNA, 561 bp, Homo sapiens
ctgagtgtttgtccctcatataggatttcagaacactgctatgaatttctgaatgtttgtcgctcacagaggattctagaactctgcggctgggttgtgttttccccccacataggattccagaatactgctgctgggttctgagtgtttgtccctcacataggattccagaactctcctgctgggttctgtttgtttacccctcacaaaggaatccasagcactgttgctggtttctgagtgtttgtccctcactcaggataccagaacactgctacgatggtctgaatgtttgtccgtcacaaaggattcataacactgctatgggttctgactgtttgtccctcacaatggattccagaaaactgctttgagagtctcaatgtttgtccctcacaaagtattccagagcactgctgcggggttctgtgtgtttgtccctcacatgggattcaaaaacactcctgctgggttcagagtgttttccctcacataaaattccagaacactactacaaggttctgaatgtttgtccctcacataggattccagaacactgct

SEQ ID NO: 393171 - DNA, 561 bp, Homo sapiens
ctgagtgtttgtccctcatataggatttcagaacactgctatgaatttctgaatgtttgtcgctcacagaggattctagaactctgcggctgggttgtgttttccccccacataggattccagaatactgctgctgggttctgagtgtttgtccctcacataggattccagaactctcctgctgggttctgtttgtttacccctcacaaaggaatccacagcactgttgctggtttctgagtgtttgtccctcactcaggataccagaacactgctacgatggyctgaatgtttgtccgtcacaaaggattcataacactgctatgggttctgactgtttgtccctcacaatggattccagaaaactgctttgagagtctcaatgtttgtccctcacaaagtattccagagcactgctgcggggttctgtgtgtttgtccctcacatgggattcaaaaacactcctgctgggttcagagtgttttccctcacataaaattccagaacactactacaaggttctgaatgtttgtccctcacataggattccagaacactgct

SEQ ID NO: 393172 - DNA, 568 bp, Homo sapiens
gttctgaatgtttgtagctcaagtaggattccagaacaatgctgctgggttctgaatgtttgacactcacacaggattccagaacactgctgctgggttctgagtgtttgtccctcacataggattccagaacactgcttcgagggtctgaatgtttttccctcacaaaggactccagaacactgttgctgggttctgagtgtttgcccctcatataggattccagaacaatgctacgagtatctgaatgtttttccctcacataggattccagaacattgctacgagggtctgaatgtttttccctcacagagtattccagaacactgctgctgggttctgaatgtttgtccctcacataggattccagaacactgcagctgggttctgagtgtttgtccctcactttggattccagaaaacgtctacgayggtctgaatttttgtccatcacaaaggattttagaacactgctgctggatctgagtgtttgtccctcacacaggattccagaacactgcttcgatggtctgaatgtttgtccctcacaaaggattctagaacactg

SEQ ID NO: 393173 - DNA, 202 bp, Homo sapiens
ccatactttgcccctatgaagaaaagcaataaggattatttagtaaatagacatggaaactcacccagggttggctgatgagaagctggttagcaagggggtctgcctttagttaggacaaggtctgtgcttcccacgggttctctccacagcaggagggatgcaaacttccctttcctyccctgcacctaccctcaaatgg

SEQ ID NO: 393174 - DNA, 534 bp, Homo sapiens
ttcaaaactgaaatgacatattctacaatatgtgataaaaccacccccwaacaacttaaagcaaaacagggattgaccttaaagacgtgccttttcctcatcccccagccaatcagttttcaaatcttgcattttcttttgaaaggtccttatccccctagtctcttgtttctagacttggcacatatttaagtttgttacctctatctactgactttactctcttcaaacagtatctatgcctgccaaatgtgaatataaaaaacaaatcagaatgtgccattctgatttaaactgcttattagttaataccctcaagataacatctgggttcttagctgcactgagtcaagccaacttacatctttctttgtctttggctgcacttttcctatcacatcacactccagcaatgccaagttgtgctggcctcctacctcatttctcctattttgcccctgccccgccgcggctttttgcggctttccgccccggccgccgcggctttttgcctccgccgccgctgctttttgc

SEQ ID NO: 393175 - DNA, 534 bp, Homo sapiens
ttcaaaactgaaatgacatattctacaatatgtgataaaaccaccccctaacaacttaaagcaaaacagggattgaccttaaagacgtgccttttcctcatcccccagccaatcagttttcaaatcttgcattttcttttgaaaggtccttatccccctagtctcttgtttctagacttggcacatatttaagtttgttacctctatctactgactttactctcttcaaacagtatctatgcctgccaaatgtgaatataaaaaacaaatcagaatgtgccattctgatttaaactgcttattagttaataccctcaagataacatctgggttcttagctgcactgagtcaagccaacttacatctttctttgtctttggctgcacttttcctatcacatcacactccagcaatgccaagttgtgctggcctcctacctcatttctcctattttgcccctgccccgcckcggctttttgcggctttccgccccggccgccgcggctttttgcctccgccgccgctgctttttgc

SEQ ID NO: 393176 - DNA, 613 bp, Homo sapiens
taatttcaaaagtaataaaaataaaagaacaaaaaaatacaaaactattcaacatgccagcaatcctgttctcttaagaaacctacctgtttttttcaatgtgtgtaagttttagcattttatagcaattagatgagtctgtatatcattagaacttctgtccttggaattaggacaaaactattttctgcaataaatatttggctctagaaatctattttgacctgtacyataatgcatagcagcagaattaaaatattgtgtgttatcatcaaaagtttcagccttattttttcacatttgaatataaatattaaaatgatgaaggcccgtttcttttagtctttttattcttagagaaggctgaataaatgttacaaaacaagaaaaagactgtaaaataataattgctaattataaaaaaaatttaaaaatatgtcatcaagccacaatagctgttctctatttctttttttaatttaaaatggacatgaacaaactttcataatacttttgtggaatctagttagagctttactccattacagaatagaaacttttcattgtgaggagatcaaaagcactgctttcctttgtggcaaatgaatatttt

SEQ ID NO: 393177 - DNA, 613 bp, Homo sapiens
taatttcaaaagtaataaaaataaaagaacaaaaaaatacaaaactattcaacatgccagcaatcctgttctcttaagaaacctacctgtttttttcaatgtgtgtaagttttagcattttatagcaattagatgagtctgtatatcattagaacttctgtccttggaattaggacaaaactattttctgcaataaatatttggctctagaaatctattttgacctgtactataatgcatagcagcagaattaaaatattgtgtgttatcatcaaaagtttcagccttattttttcacatttgaatataaatattaaaatgatgaaggcccgtttcttttagtctttttattcttagagaaggctgaataaatgttacaaaacragaaaaagactgtaaaataataattgctaattataaaaaaaatttaaaaatatgtcatcaagccacaatagctgttctctatttctttttttaatttaaaatggacatgaacaaactttcataatacttttgtggaatctagttagagctttactccattacagaatagaaacttttcattgtgaggagatcaaaagcactgctttcctttgtggcaaatgaatatttt

SEQ ID NO: 393178 - DNA, 613 bp, Homo sapiens
taatttcaaaagtaataaaaataaaagaacaaaaaaatacaaaactattcaacatgccagcaatcctgttctcttaagaaacctacctgtttttttcaatgtgtgtaagttttagcattttatagcaattagatgagtctgtatatcattagaacttctgtccttggaattaggacaaaactattttctgcaataaatatttggctctagaaatctattttgacctgtactataatgcatagcagcagaattaaaatattgtgtgttatcatcaaaagtttcagccttattttttcacatttgaatataaatattaaaatgatgaaggcccgtttcttttagtctttttattcttagagaaggctgaataaatgttacaaaacaagaaaaagactgtaaaataataattgctaattataaaaaaaatttaaaaatatgtcatcaagccacaatagctgttctctatttctttttttaatttaaaatggacatgaacaaactttcataatacttttgtggaatctagttagagctttactccattacagaatagaaacttttcaytgtgaggagatcaaaagcactgctttcctttgtggcaaatgaatatttt

SEQ ID NO: 393179 - DNA, 593 bp, Homo sapiens
aaatgatgtaactgtctatgtaagtaacctcaaagaatccaccaaaaaactcctgtcactaataagtagtatagcacattgcaaggtacaatttaaatgtacaaagtcaattgctttcytaaataccaataataaacaattaaatttgcaattaaataaaaaatatacatatatatttatatttgatgttaattcttgccaatttgatctatagattcaatgcaaactcagtcaaaacccagaaaactattttgtagatataataattttctgaagttcatatggaaaagcaaaggctctagactatcccacacagtactgaaaaagaataacaaagttggaggactcatactacccaattttaaaatttactataaggcaactataattgagacagtgtagtttgccaaaggaaaacaaaacaaaacaaaacaaaacaaaacaaaacatgtgaatcaatagaataaagcatactagacccacacaaatattgtcaattgatttttgacaaaggcaaaaattcagttcaatggagtaaatatagacttatttggatggccatatgataaaataatcctaaacacagactttac

SEQ ID NO: 393180 - DNA, 578 bp, Homo sapiens
catcctggctgacatgatgaaaccccgtctcgactaaaaaaaatacaaaaaattagccgggcatggtggcggatgcctgtagtcccagctactcaggaggctgaggcaggagaatggtgtgaacctggaaggtggagcttgcagtgagctgagatctcgccagtgcactccagcctgggggacagagcgagactctgtctcaaaaaaaaaaaaaaaaagtgagctgttgttattgaactttttattattacttaattacaagaaaaaaaacaaagtaaacaaccaaaaaaattatagtgttgagaaaatgccaaggctgctcacccacttctttaaccattcttcaaaaaagtgagctgttgttattgaactttttattattacttaattacaagaaaaaacaaagtaaacaaccaaaaaaattatagtgttgagaaaatgccaaggctgttcacccacttctttaaccattcttcaaatttaccatatrtatttttttttgactaagtgagataaatcacattgaaatgcatgaaataatgtctggcatccagtagatgctcagtgacatttgtccc

SEQ ID NO: 393181 - DNA, 576 bp, Homo sapiens
agaaaatgccaaggctgctcacccacttctttaaccattcttcaaaaaagtgagctgttgttattgaactttttattattacttaattacaagaaaaaacaaagtaaacaaccaaaaaaattatagtgttgagaaaatgccaaggctgttcacccacttctttaaccattcttcaaatttaccatatatatttttttttgactaagtgagataaatcacattgaaatgcatgaaataatgtctggcatccagtagatgctcagtgacatttgtcccctttaatggtttcaactggctaggatttcacacgaagarcagtagcattttggtatcactaggctaatgtccattttctgtattggagagtagagaaaccccttgggtgatagcttattttacctactatggaatttttacagaacaaagttaagggtcatctgctgtgtggattcccactggtatgtgagacgtggcagaacataatggtaagaagaaggattcaggagctgaaccatctgggttcttcaggctgtatcacctactgcctatgagaggcttagccagttagttaccttt

SEQ ID NO: 393182 - DNA, 421 bp, Homo sapiens
ctaatttcttacaaagtttagtatgcatatatattttttcatatatgtactcatatacatrtagatactctttatccatttatctgttgatggacacttaggttgattccatagcttcactatgtgaatattgctgcaatgaacatgggagtgcagatatctctttaatatactaatttcccctctttggatatatagccagtaatgggattgatggattacatcgtagttcttttttttttttttttttgagacagagtctcgctctgtcgctcaggctggagtgcattagcatgatttcggctcactgtaacctccacctcccgggttcaagcaattctcctgcctcagctttccaagtagctgggattacaggcatgcactaccacgccaagctaatttttgtatttttagtagagat

SEQ ID NO: 393183 - DNA, 552 bp, Homo sapiens
aaataataaatatgtatgcacacaatagcattacttcaaaatacataatataaaacctattaaaactgaaaggtaaaatagtaaaaccacagtcatccatggggatttcaacagtctcctgccagaaatttttaaaatttgttaaacaaaaaattggtaagggtagagaggatcttaaaaatacaattagccaacttgatctaactgaatcttttagaataatctaaggatgagggatgaggtagcagagaaagaaaaggcagacatcaaygtgacattactgtttcaaggctatgagaatacaccaataattgtgtgtgtgtgtgtgtgtgtgtgtgtgtgtgtgtgcagatggtaagctcaatcttaaaaatgttgagttttaactgaaaattcattattaggaaagataagaggagatgatatctagtgagaggctgtatgactgaactctaagagaaaggtcacagcagaaattgtgtacctgacagctctagaaggaggtcagtcaaaagtaagtcagtgatgaattctctggtgtaaaagcagagg

SEQ ID NO: 393184 - DNA, 552 bp, Homo sapiens
aaataataaatatgtatgcacacaatagcattacttcaaaatacataatataaaacctattaaaactgaaaggtaaaatagtaaaaccacagtcatccatggggatttcaacagtctcctgccagaaatttttaaaatttgttaaacaaaaaattggtaagggtagagaggatcttaaaaatacaattagccaacttgatctaactgaatcttttagaataatctaaggatgagggatgaggtagcagagaaagaaaaggcagacatcaatgtgacattactgtttcaaggctatgagaatacaccaataatkgtgtgtgtgtgtgtgtgtgtgtgtgtgtgtgtgtgcagatggtaagctcaatcttaaaaatgttgagttttaactgaaaattcattattaggaaagataagaggagatgatatctagtgagaggctgtatgactgaactctaagagaaaggtcacagcagaaattgtgtacctgacagctctagaaggaggtcagtcaaaagtaagtcagtgatgaattctctggtgtaaaagcagagg

SEQ ID NO: 393185 - DNA, 553 bp, Homo sapiens
ttaccgcaaatgaaattttgatgaagtgctattgaagtataatattctatgaaatcccttgttaccttgaaaggagctaaatgacaactgcttgattatcatgggacaaagataactttaggtttttttcttctaaattgtggatagtgactatttcggtattttctgtaatggtattttctgtaagtgatattacccagcttttaggtccacatcttagccaaatcacttcctgaaacctgacttacaacaaaaaccttctttgttcttccttagcctgtgmatagtggcagcatttaaaattaataccatgcaattaccttctgttctatgataatctttcatattttctcttgttttctcaaactcttcataactcttaggtcaaatttcatgcactatatagttcccttccttttgtatcacctttatgtagctaagattatagtaagttgttaacaagaatttatagatttatcggtcaaattattaaccgttcaacaagaagaccaaagccaatgtaatatttttaaaagtagggattaagaaaatt

SEQ ID NO: 393186 - DNA, 545 bp, Homo sapiens
gcaagctctccaggccttcatgttcccagtgaggtaggtacccttctgatgattatactcaccctccctcattgcaaagctcccgttgttattgtcttggctctggattccctcaaaaatagactatgaaacaaatatctggggtcagatactttaatcagaaattgagtgagaaagcacagaagtggagaaaatgaaacagaacacgaagccagtgtgaatgagtagttactgctatgtgctcagtaatgacggaggtatggagattgtctcaaaataactttacaaagagatggggatgctggaatccccatctcttattgcttaaggattaccttagaatcattaactctccacccctaactccttctttgttcctatgtgtggttgagaagcactggttagcctcaagaagcttgcaggcaggyccacaaatcagaaagacaggcatgatgtggggagctctcagttagctggaaacaggtgaatttcaggtgaacacattgagtccaggacatagaagacaagtcatcaacaatatctgc

SEQ ID NO: 393187 - DNA, 553 bp, Homo sapiens
ttaccgcaaatgaaattttgatgaagtgctattgaagtataatattctatgaaatcccttgttaccttgaaaggagctaaatgacaactgcttgattatcatgggacaaagataactttaggtttttttcttctaaattgtggatagtgactatttcggtattttctgtaatggtattttctgtaagtgatattacccagcttttaggtccacatcttagccaaatcacttcctgaaacctgacttacaacaaaaaccttctttgttcttccttagcctgtgaatagtggcagcatttaaaattaataccatgcaattaccttctgttctatgataatctttcatattttctcttgttttctcaaactcttcataactcttaggtcaaatttcakgcactatatagttcccttccttttgtatcacctttatgtagctaagattatagtaagttgttaacaagaatttatagatttatcggtcaaattattaaccgttcaacaagaagaccaaagccaatgtaatatttttaaaagtagggattaagaaaatt

SEQ ID NO: 393188 - DNA, 600 bp, Homo sapiens
gagagagagaaaagcaggggaagcttgtaatacataatcaaatagtaacgttatgagagatttatcccagattatctataattttcattggtccctgaatggtggaggaaaggtaaaaatatctttaattccagatttcatctttggccaccaacaaaggggcatcacttaatcctattggttttaaataccaatgaactagtgtaaaagatgaggattcrtaaattatttcactcagaacaaagctttcaaatgtctgaaactagccagaatcttgtcaacaatttccaaaatcagattctgaaatttaatgttgtttgcaaaactccttcaccaagattcccaagaaaggaaaatgataggagtgaagttcgggagagaggacataataaaaacataaaattgaagaatttgttcttgatcattgtggaaataggagaataccatattttatatttattaattatacttgtctctaacgacagaaagaaatgtaaagaaatactgtgaacaccccaaaattagacagcctaggtgaaatggactgtacacctcaaaattagataacctagatgaaatggacaaagttttagccacaca

SEQ ID NO: 393189 - DNA, 609 bp, Homo sapiens
gcttacaaaacaagacacaataaatgtaaatgactgagatcatacaatgtatgttctttggcccaaatgggatgaaatttgaaatcaattacagaagaaaatttggaaaaatcccaaatatgtgaaaattaataaactccctaaataacaaatgaattgargaataagttaaagaaaaatgagaaaatattgtgagattaaaaaaatagaaacaaagcataccaaaacttagaggataaagataaaatagcacttagaggaaaaagtatagctgccaatgtccatatttttaaaaatccaaatcaataatatgactatcttcagaaactagaaaaagaagagcaaattctagtcaaaaaagcagaaggaaggagataataaaaattagagtagaaataaataaaataaagattagaaaagttatagagaaaaccaggaaataaaagatgtgtaattcttcaagagggtcaacaaatagtgacaaacctttagatagatgaaataggaaaacaaagaacaaagactcaaattactaaaattggaatgaaaaggaatagcagcactaacaaattttcaggtacctaaaaatggtgtatgtccacaaattat

SEQ ID NO: 393190 - DNA, 609 bp, Homo sapiens
gcttacaaaacaagacacaataaatgtaaatgactgagatcatacaatgtatgttctttggcccaaatgggatgaaatttgaaatcaattacagaagaaaatttggaaaaatcccaaatatgtgaaaattaataaactccctaaataacaaatgaattgaagaataagttaaagaaaaatgagaaaatattgtgagattaaaaaaatagaaacaaagcataccaaaacttagaggataaagwtaaaatagcacttagaggaaaaagtatagctgccaatgtccatatttttaaaaatccaaatcaataatatgactatcttcagaaactagaaaaagaagagcaaattctagtcaaaaaagcagaaggaaggagataataaaaattagagtagaaataaataaaataaagattagaaaagttatagagaaaaccaggaaataaaagatgtgtaattcttcaagagggtcaacaaatagtgacaaacctttagatagatgaaataggaaaacaaagaacaaagactcaaattactaaaattggaatgaaaaggaatagcagcactaacaaattttcaggtacctaaaaatggtgtatgtccacaaattat

SEQ ID NO: 393191 - DNA, 609 bp, Homo sapiens
gcttacaaaacaagacacaataaatgtaaatgactgagatcatacaatgtatgttctttggcccaaatgggatgaaatttgaaatcaattacagaagaaaatttggaaaaatcccaaatatgtgaaaattaataaactccctaaataacaaatgaattgaagaataagttaaagaaaaatgagaaaatattgtgagattaaaaaaatagaaacaaagcataccaaaacttagaggataaagataaaatagyacttagaggaaaaagtatagctgccaatgtccatatttttaaaaatccaaatcaataatatgactatcttcagaaactagaaaaagaagagcaaattctagtcaaaaaagcagaaggaaggagataataaaaattagagtagaaataaataaaataaagattagaaaagttatagagaaaaccaggaaataaaagatgtgtaattcttcaagagggtcaacaaatagtgacaaacctttagatagatgaaataggaaaacaaagaacaaagactcaaattactaaaattggaatgaaaaggaatagcagcactaacaaattttcaggtacctaaaaatggtgtatgtccacaaattat

SEQ ID NO: 393192 - DNA, 568 bp, Homo sapiens
atttcaaatttcagggcaaactagcatggtttcacccctttcctttgtaacatttttcctaaggttggaaaagtaaggtaggctttagtacgatttttaataacaagttttcaaagtgagacgcaaaatggtggcgccaacacatttcaagtctgctacattttgaatacacttattggagaaaagaccttctcatcatttttctcttacaggaaaggaaataacatgtacagttgacccttaagcaacaccgaggttggggtgctggcccccctgcacagtagaaaatccactaaaactttgactcctccaaaacttaactactaatagsctactgtaagccttacaaataacacaagcagtcaattaacacatatttaatgttatatgtcttatatactgtattcttaacaaacacgccagagaaaagaaaaagaaaatcataaggaaaatatatttactagttattaaatggaagtagatgatcaaacaggtcttcatcctcatccttttcatgggcagggtgtggaaaaggatgtagaatttttggttttgctaagtggacccg

SEQ ID NO: 393193 - DNA, 452 bp, Homo sapiens
ctgaaatcctaaccactgaatatgacctcattaggaaataggttctttgcaggtgattaagttaagataaaatcagatgagcctgaattcaatatgactgatgtccttataaaaagaaraaaattgagtagagggagacatacatacagggagagtaccatgtgattatgagggcagagattagccaagaaatgccaaagactgccactaaaccaccagaagctagaaacaaggcacagaacagactttctctcatagcccttgaagggaccatccctgctgacacctcagtctcagacttttagcttccaggactataagactataaatttgtgttgttcaaggcacccagtttgtgttacttggttatggcagccctagaaaactaatacatgaactaataacaaagcataagaacatgaagcaaaaattgacaaaagaggagcatcagc

SEQ ID NO: 393194 - DNA, 452 bp, Homo sapiens
ctgaaatcctaaccactgaatatgacctcattaggaaataggttctttgcaggtgattaagttaagataaaatcagatgagcctgaattcaatatgactgatgtccttataaaaagaagaaawttgagtagagggagacatacatacagggagagtaccatgtgattatgagggcagagattagccaagaaatgccaaagactgccactaaaccaccagaagctagaaacaaggcacagaacagactttctctcatagcccttgaagggaccatccctgctgacacctcagtctcagacttttagcttccaggactataagactataaatttgtgttgttcaaggcacccagtttgtgttacttggttatggcagccctagaaaactaatacatgaactaataacaaagcataagaacatgaagcaaaaattgacaaaagaggagcatcagc

SEQ ID NO: 393195 - DNA, 452 bp, Homo sapiens
ctgaaatcctaaccactgaatatgacctcattaggaaataggttctttgcaggtgattaagttaagataaaatcagatgagcctgaattcaatatgactgatgtccttataaaaagaagaaaattgagtagagggagacatacatacagggagagtaccatgtgattatgagggcagagattagccaagaaatgccaaagactgccactaaaccaccagaagckagaaacaaggcacagaacagactttctctcatagcccttgaagggaccatccctgctgacacctcagtctcagacttttagcttccaggactataagactataaatttgtgttgttcaaggcacccagtttgtgttacttggttatggcagccctagaaaactaatacatgaactaataacaaagcataagaacatgaagcaaaaattgacaaaagaggagcatcagc

SEQ ID NO: 393196 - DNA, 452 bp, Homo sapiens
ctgaaatcctaaccactgaatatgacctcattaggaaataggttctttgcaggtgattaagttaagataaaatcagatgagcctgaattcaatatgactgatgtccttataaaaagaagaaaattgagtagagggagacatacatacagggagagtaccatgtgattatgagggcagagattagccaagaaatgccaaagactgccactaaaccaccagaagctagaaacaaggcacagaacagactttctctcatagcccttgaagggaccatccctgctgacacctcartctcagacttttagcttccaggactataagactataaatttgtgttgttcaaggcacccagtttgtgttacttggttatggcagccctagaaaactaatacatgaactaataacaaagcataagaacatgaagcaaaaattgacaaaagaggagcatcagc

SEQ ID NO: 393197 - DNA, 265 bp, Homo sapiens
ctggtgcactgtgtagaataaataggttatgtgagcaaataaattgggaggctattgtaatccagagaaaaaaggtagtgacttaggtgagaatgctgtragtatgagtggtattagtggtgagaagtcgttaggccatggatgtatttcataggactggccaagagaactgcagctaaattggagtgtagggagtgaaatggagaactcaaagatgactctcagcactggaaggtgacagctgtcactgaagcatgctgatgcc

SEQ ID NO: 393198 - DNA, 553 bp, Homo sapiens
tgattcaattacctccaactgggttcctcccataatatgtagggattatggaaactacatttcaaggtgagatttgggtggggacacagccaaaccatatcattctgccctcagccccttccaaatttcatgtccttacattttaaaacatgatcatgcctttctaacagtcccccaaagcctcagctcattccagcattaacccaaatatccaagtccaaagtcttatcttagacaaggcaaggcccttctgcctatgagcctgtaargtcaaaattaagttagttacttcatagatacaatgaggatataggggtcagtcaaatcttgaagctctgaaatgatttcctttgacttcatgtctcacatccaggtcacgctgaagcaagaggtgggctctcatggccttggacagctccacccctattgctttgaagagtacagccctcctcctggctgctttcacaggatggtgctgagtgtctgtggcttttccaggcaatacagtgtaagctgtcagtgtatctaccattctggagtctggaggatggtg

SEQ ID NO: 393199 - DNA, 302 bp, Homo sapiens
aagcattgaaacatccctaagcctgttcccaggccagcctggaactgagaatccaggagagtcttttctgttctgctgctgcagctacactatctacttcttagcataaccagggccaccagcaacacatgctagagaaatacagagagcaaaaatcaacagctgatgaaaagcagaatcttttctttttgacagcaataccaacagcatgaagcacgtcctttttggagctttccaaaccaattcaaaagcgagttttctggtgyggatgaagaaagctagccaaattgcccctgaatgca

SEQ ID NO: 393200 - DNA, 586 bp, Homo sapiens
acatttgctgttgtgaatagggctgcagtgaacatttgcatgcatgtgtctttatggtagaataattcctatttttctggaaatatacgcagtaatgggattgcgagcagaactattgaatgttagttctgcttttagctctttgaggaattgccaaactgctttccacagcagttgaactaatttacactcccaccaacagtgtataagttcccttttctctacaacctctccagcatttattgtttgactatagccattctgactagtgtgagatggcatttcattgtggttttaattttcatttctctaactatcattgatgctgagctttttctcatacacttgttggcctcatgtatgtcttctttcgaaaactgttcatgtctttgcccactttttaatggggttgtttttcttttgtaaatttaatttccttatagrtgatagatattagacctttgttagatagatagtttacaaatatttttttccactccatagtttttctgtttactctgttaatagttttttttctgctatgcaaaatctctttactttaattaaatcctacctgttaattttt

SEQ ID NO: 393201 - DNA, 631 bp, Homo sapiens
gctttaataatatcttccttacttatttaactttttccagtgcaattttttctttgactctttcctcytgctctaaaacttacattgaaattttagtaggattcagggcaaccaatctcgaagcttgaatatatgaaagaaccctttaagattaaaaaacccatattatctcccataagttatttcttcggactattgccttattaaaattttctagttcttatttttgcattgaaaaggagaatgatgatttttaaataagttcctactcacttttaatttctactatgacagttttattgcttttcatggcaatagattcctctggttcaacaagaagggcagaacaaggaagtacagaaacatctcaatatatctcaaaaagttatttaacatggacagtgtcatttagaatctttaacatccctatcaaatggatgccattattatcccccttttacaggatattaaaacttacatactgtaaataaccagctgaaagtcatatagcatggaaaatacaataagcatacaaagaagcaatggcatttgaagtggaggagggtgaaggattaaaaggctaaacttagtttggttaagaaaaaagaaaactagaaggtggcaaactctt

SEQ ID NO: 393202 - DNA, 576 bp, Homo sapiens
catggacagtgtcatttagaatctttaacatccctatcaaatggatgccattattatcccccttttacaggatattaaaacttacatactgtaaataaccagctgaaagtcatatagcatggaaaatacaataagcatacaaagaagcaatggcatttgaagtggaggagggtgaaggattaaaaggctaaacttagtttggttaagaaaaaagaaaactagaaggtggcaaactcttgttggaaaggggaaggatttggacagagcaaggtagtggagtagatctctccagtaatcatacccctatggacacatctatatgaacaactatccacatatgaaattatctttacaagagctaatgaaccctgaatacatgagtgagtcaatgaagcccctttggactgcaaagaggagtaaaactatgcttggacagtaagggaaacagtactcgtgactgtgatactcctcccccaggccataatggtattatatgcagaaagtcctcctgaaytcacagttcttacactgaataaagtgagcagaagttgaatattttttccaccatactgagtg

SEQ ID NO: 393203 - DNA, 578 bp, Homo sapiens
gtggctaacaaaaaaattcaaatagctgttttttaaaaaaaaaaaatctgtgaacttcaacaaagtacagagaaacaatatggaaatttatgagaaattcaacaaagaatttaaaataatgggaaaaaaaatcaaacggaaatcctggaggtagaaagttcagtaaacaaactgaaaaatgcactagagggcatcaagagcagaactgatcaagtagaagaaaaaaaacagtgagctcaaagacatcctctttgaaaacacactgtcagagtagaaaagagaaaaaaatgaaaagaaacaaagaaaacttatgagatccatgggacaccatcaaaaaaacaaatctacagtgttacagtggaactaagaatgaaaaakagttagaagcttattcagagaaataacagacaactttttaaacttggagaaggattaagatgtttaggatggtcaaagctcactaatctgatttaatctgaataagacaaccacaagacacattataattaaactttcaaatgtcaaaaagaaagagtaggtcctgaaagcattaagaaaaaggaagcatataacacata

SEQ ID NO: 393204 - DNA, 559 bp, Homo sapiens
ggaggaatcttttttgaaaacrtaaaattgacaaatgttttgtcagattaagaaaaaaagagaaaattcacatataatcagatatgaaaaaggatatactatgatagactctagagaaatataaggaatcatgagtaagtactacaaacaattatacactaataaattgaaaaacttagaagaaatacataagctctggacacatataacctatcaaaattgaagaaagaagaaatagaaaatgtgaacacaccaatgacaaataatgagattgaaggagcaatttagactctcagtcaaggaaaatccaaaagacttcacacagtagctcacacctgtaatctcacagtttaggagcccaaggcaggagaatcactagaggccaggagttcaagattagcctgggcaacacaacgagactccatctctaaaaataaaaataaaaattatccaggtatagtggtgtgtatttgtactcaggaggctgaggcaggaggatcacttaagaccaggagtttgaggctgcagtcagctatgactgcaccactgtatgccagcc

SEQ ID NO: 393205 - DNA, 559 bp, Homo sapiens
ggaggaatcttttttgaaaacataaaattgacaaatgttttgtcagaytaagaaaaaaagagaaaattcacatataatcagatatgaaaaaggatatactatgatagactctagagaaatataaggaatcatgagtaagtactacaaacaattatacactaataaattgaaaaacttagaagaaatacataagctctggacacatataacctatcaaaattgaagaaagaagaaatagaaaatgtgaacacaccaatgacaaataatgagattgaaggagcaatttagactctcagtcaaggaaaatccaaaagacttcacacagtagctcacacctgtaatctcacagtttaggagcccaaggcaggagaatcactagaggccaggagttcaagattagcctgggcaacacaacgagactccatctctaaaaataaaaataaaaattatccaggtatagtggtgtgtatttgtactcaggaggctgaggcaggaggatcacttaagaccaggagtttgaggctgcagtcagctatgactgcaccactgtatgccagcc

SEQ ID NO: 393206 - DNA, 571 bp, Homo sapiens
attcaattgggaaaagaaagtcttttcaacaaatggtactgggaaagtgcatatccacatacaaaagaatgaaagtagacccctatctctcatcatatacaaaaatcaactcaaaataaattaaatatttaaatgtaagaccccaaactatgaaactagtagaagcaaacttaggtgaaatgttatatgtcattggtctgggcaaggactttttagaaaagacatcgaaagacatgcacaacaaaagyaaaaataaacaaatgggattacaccaaataaaaacttctgcactgcataggaaacaatcacaagagtgaagacacaacctacaaaataggagaaaatatctgcaaactattcacttcataaggggttaatatcccaaatttatagaaaactcaaacagctcaatagcaaaaatacaaataattggattagaaaatagtcaagacagctgaatagacatttctccaaacaagacaaaaaaaatcaccaacaggtaaatgaaaaaatgctcatcatcactaatagtcagagaaatggaagtcaaatccacagtgagatatcatct

SEQ ID NO: 393207 - DNA, 448 bp, Homo sapiens
tcaaatccacagtgagatatcatctcaccctgcttagaatggtttttatgaaaaagtcaaaaaataacaaatgctggcaaggatgtgaagaaaggggaattttcatacactgttggtggaaatgtaaattagagcaattgttatggaaaacaatataacttccaaaaacattaaaaatagacttatcacaaaatccaacaatcccactactgggtatatattcaaagaatattaaatcagtatgtcaaagagatttctggactctcatgttaattacagcactattcacaatagcctagaatcaacctaagtgtccatcaatgaatgaatggagaaagaaaatgtggcatatatgctgtatttggtcattcttgcattastataaagaaatacctgagattggataatttaaaagaaaagagacataattggctcctggttccatggg

SEQ ID NO: 393208 - DNA, 575 bp, Homo sapiens
gtctttaatggaaatctcatccttgtctagaataacctgggttatctgtttctatggggtctctgtgycttttgttttctttgttatttgcaattctgttagttgtagattactgatagtaatgcaaatattcttgtctatagacaggcaaatgattgattttggtggaagtataattaattttcctttttccaccttccatcaagaagtcagttttgaacttatcaagcaaatttatttcagtgttccttagtgcctagatatgtgtggctcttaattttccataaaacttagtataacatcttactggctccctcattaaataaatgagttaaaaatcttagacaagtgttcattttatatttgtaagtcataatttaccctattttaagcaattttccttcatcattcctaaaaatccagattcctatgtcccatgctagacctattgaatcaaaatctcaggcctaaggcacaagaatttacattgttagtaagcttttcaagtgatttttaggcatactaaattgtattaacctttaccattctaattctttaaactagaattattatat

SEQ ID NO: 393209 - DNA, 575 bp, Homo sapiens
gtctttaatggaaatctcatccttgtctagaataacctgggttatctgtttctatggggtctctgtgtcttttgttttctttgttatttgcaattctgttagttgtagattactgatagtaatgcaaatattcttgtctatagacaggcaaatgattgattttggtggaagtataattaattttcctttttccaccttccatcaagaagtcagttttgaacytatcaagcaaatttatttcagtgttccttagtgcctagatatgtgtggctcttaattttccataaaacttagtataacatcttactggctccctcattaaataaatgagttaaaaatcttagacaagtgttcattttatatttgtaagtcataatttaccctattttaagcaattttccttcatcattcctaaaaatccagattcctatgtcccatgctagacctattgaatcaaaatctcaggcctaaggcacaagaatttacattgttagtaagcttttcaagtgatttttaggcatactaaattgtattaacctttaccattctaattctttaaactagaattattatat

SEQ ID NO: 393210 - DNA, 575 bp, Homo sapiens
gtctttaatggaaatctcatccttgtctagaataacctgggttatctgtttctatggggtctctgtgtcttttgttttctttgttatttgcaattctgttagttgtagattactgatagtaatgcaaatattcttgtctatagacaggcaaatgattgattttggtggaagtataattaattttcctttttccaccttccatcaagaagtcagttttgaacttatcaagcaaatttatttcagtgttccttagtgcctagatatgtgtggctcttaattttccataaaacttagtataacatcttactggctccctcattaaataaatgagttaaaaatcttagacaagtgttcattttatatttgtaagtcataatttaccctattttaagcaattttccttyatcattcctaaaaatccagattcctatgtcccatgctagacctattgaatcaaaatctcaggcctaaggcacaagaatttacattgttagtaagcttttcaagtgatttttaggcatactaaattgtattaacctttaccattctaattctttaaactagaattattatat

SEQ ID NO: 393211 - DNA, 421 bp, Homo sapiens
atttttccaacacatttagtttatttctcaaagaaacaatactacccttgttatactcattttctcagtttacataatatttatttatttatttatgtatttattttcagacagagtctcactctgtcacccaggctggaatgcagtggtgcgatctctgcgcactgcaagctccacctcccaggttcatgccattctcccgcctcagcctccccagtagttgggtgtacaggcacccgccaccatgcacaactaatttttttgtattttcagtggagacggggtttcaccgagttagccaggatggtctcaatctcctgacctagtgatccgcccatctcagcctctcaacataatatttaattaaatmgcatagctacaagaacaagaacaaatggtgtaaacatgtttaggaatcaac

SEQ ID NO: 393212 - DNA, 178 bp, Homo sapiens
gatactctgttcttgtagaatctgcaaggagatatttgtgagcrctttgaggcctttggtgaaaaaggaaataccttcacataataaatagacagaagttctctgagaaacctccctgtcatgtgtgcattcatctcacatagttgaaacagtcttttgactgaacagtttgaaaact

SEQ ID NO: 393213 - DNA, 178 bp, Homo sapiens
gatactctgttcttgtagaatctgcaaggagatatttgtgagcgctttgaggyctttggtgaaaaaggaaataccttcacataataaatagacagaagttctctgagaaacctccctgtcatgtgtgcattcatctcacatagttgaaacagtcttttgactgaacagtttgaaaact

SEQ ID NO: 393214 - DNA, 547 bp, Homo sapiens
tggctcacacctgtaatcccaggattttgggaagccaaggcaggaggccaggagctccagtccagcctgggaaacatagcaagaccccatctcagaaataaaattaaaattaaccagacatggtgttgtacacctgtagccccagctactcaggaggctgaggtaggaggatcgcttgagcccaggagttcaaggctgcagtgagctatgatcttgccactggamtttaccctggatagcagagtgagacccggtttcaaaaatgaaaaaaagaactaccacataatccaacaatttcacttctggatatatgtccagtgaaattgacataagagtcttagagaggtgtctgtcatcctctgttcattgcggcatgacacacaatgaccaaaataggaaaataaccaaaaggtcctttggcagaggaacagatgaatgggtaaagaaaatgtgacgtgtatacataaaatgaaatattatacaaccttaaaaaagaaagaaatacttgtatttgtgaaaacattgatggagctggaagatattgcgc

SEQ ID NO: 393215 - DNA, 629 bp, Homo sapiens
attgtaacatttccccctcagcacttcttttgctgcatcctgtagttttgttgagttgtatgttcatttttgtttgtctcaagatatttttaaaattcccttttgatttcttcttttacccaatggtggttcaagagtgtgttgtttagtttctgcatttttgtaaatgtttctgttttctttgttattgacttctaattttattccattgtggtctgagaagatacttggcattatattaaacttcttaaacttgtaggatgccttgtgacctaagacttgatctatctcagagaatattctgtgtkcacttgagaagaatgtatattctgctgctgttggatggaaagttctgtatatgtcagtgtttaatctactgtgttgttcaagtcagctgtttcctctttttttattcctgcctagatattctatccattattgaatttggggtactgaagttggctactattattttagtgttactgatttctcccctttgctttgctgatattaacttcatatatttaggcgttctaatgttgagtggatatatatttacaatcttcccattgaagtgaacgtttatcattgtataatgaccttcttagtctctaatgacagttttttat

SEQ ID NO: 393216 - DNA, 584 bp, Homo sapiens
agaagaatgtatattctgctgctgttggatggaaagttctgtatatgtcagtgtttaatctactgtgttgttcaagtcagctgtttcctctttttttattcctgcctagatattctatccattattgaatttggggtactgaagttggctactattattttagtgttactgatttctcccctttgctttgctgatattaacttcatatatttaggcgttctaatgttgagtggatatatatttacaatcttcccattgaagtgaacgtttatcattgtataatgaccttcttagtctctaatgacagttttttatttcaagtctattttttctgatctaagtatagatacccttgctcttttttggttaccatttgcatagagtatcttttcccatccattcactttgagcytctatgtatctttatatctaaagtgactcccttataaatatgtactgatgagtatcttttatgcattgtgccactctatgtcttttaattagatagtttaatcctttcacatttaaagtcattgttgataagtaaggagtaacttgcattttgttaattgtttttcatatgt

SEQ ID NO: 393217 - DNA, 576 bp, Homo sapiens
tcccttataaatatgtactgatgagtatcttttatgcattgtgccactctatgtcttttaattagatagtttaatcctttcacatttaaagtcattgttgataagtaaggagtaacttgcattttgttaattgtttttcatatgttttgcagttcttttttttcctctcttgctgtcttcttagtttggttatttcttgtagaggtttggtttcatttatttttcttcacattttgtgcatctcctataagtttttaatttrtggttgcaaatttacatcttctatagaaagctatattaatgttatcagcttttttggaatcattttctttctcttccctcttcagacatatatgcaaatactctgttgttcaagacatgagtaaatagagctctggttagaaatttatcaatatgaaaaaaaaagatcctctgagtattttgataagttagaaaataatgatagactgcggtagaatgtcatgtatttcaacttctgtcatctatgttactctacaatatattttctttgtgtattagtcaatgttatatatttacaaggtaaatccataaagc

SEQ ID NO: 393218 - DNA, 474 bp, Homo sapiens
aaaatctttaaaaagccagaaaaggaatcaccacttaccctgggaaccctaacagaggagcaggccacataggaatatgtcccattggtttgaggtcgataagtccattttcaaagctttagtaattccagaaacaagaacatatttattttactttgatcacacaatgcctagttatattaaaagtaaggagacattcaataaataccttttatggaaataaaaacagacaatttaggagaaaattaactatcaaygcattattttcaaaggtaaagaaaaaagaaattattctgaacacacaaaacgattttatcaaatatcatggtaaattatcattatatactaggtcacttaataaatttccagagataattggaaagagtttccacaatagattttgtttcaccccaggaagaattttcacaaaaagttagttacttatctccattgttactagtaccaaactaatcc

SEQ ID NO: 393219 - DNA, 474 bp, Homo sapiens
aaaatctttaaaaagccagaaaaggaatcaccacttaccctgggaaccctaacagaggagcaggccacataggaatatgtcccattggtttgaggtcgataagtccattttcaaagctttagtaattccagaaacaagaacatatttattttactttgatcacacaatgcctagttatattaaaagtaaggagacattcaataaataccttttatggaaataaaaacagacaatttaggagaaaattaactatcaacgcattattttcaaaggtaaagaaaaaagaaattattctgaacacacaaaackattttatcaaatatcatggtaaattatcattatatactaggtcacttaataaatttccagagataattggaaagagtttccacaatagattttgtttcaccccaggaagaattttcacaaaaagttagttacttatctccattgttactagtaccaaactaatcc

SEQ ID NO: 393220 - DNA, 474 bp, Homo sapiens
aaaatctttaaaaagccagaaaaggaatcaccacttaccctgggaaccctaacagaggagcaggccacataggaatatgtcccattggtttgaggtcgataagtccattttcaaagctttagtaattccagaaacaagaacatatttattttactttgatcacacaatgcctagttatattaaaagtaaggagacattcaataaataccttttatggaaataaaaacagacaatttaggagaaaattaactatcaacgcattattttcaaaggtaaagaaaaaagaaattattctgaacacacaaaacgattttatcaaatatcatggtaaattatcattatatactaggtcacttaataaatttccagagataattggaaasagtttccacaatagattttgtttcaccccaggaagaattttcacaaaaagttagttacttatctccattgttactagtaccaaactaatcc

SEQ ID NO: 393221 - DNA, 474 bp, Homo sapiens
aaaatctttaaaaagccagaaaaggaatcaccacttaccctgggaaccctaacagaggagcaggccacataggaatatgtcccattggtttgaggtcgataagtccattttcaaagctttagtaattccagaaacaagaacatatttattttactttgatcacacaatgcctagttatattaaaagtaaggagacattcaataaataccttttatggaaataaaaacagacaatttaggagaaaattaactatcaacgcattattttcaaaggtaaagaaaaaagaaattattctgaacacacaaaacgattttatcaaatatcatggtaaattatcattatatactaggtcacttaataaatttccagagataattggaaagagtttccasaatagattttgtttcaccccaggaagaattttcacaaaaagttagttacttatctccattgttactagtaccaaactaatcc

SEQ ID NO: 393222 - DNA, 493 bp, Homo sapiens
tttacctctctgagatcaatgcacacaccacaaagctgtttctaagaaatcttccttatgccttttatataaatatatttcctttttcaccattggcctcaaagctctcawaaatgtccctttgcagattccacaaacagatggtttccatattgatcaatcaaaagtaagtttcaactttgtgagatgaatgcccacatcacaaagaggtttctcagaaaacctctctctaatttttatgtgaagatatttcctttttcaccataggcctcaaagcactcacaaatatccctttgcagaatctacaagtacaatttccagacagatcagagaaaagaaacgtttacctctgtgagatgaatgcatacatcacaaagctgtttctgagaaatcttgcttatactttttatgtgaatacatttcctttttcaccatagacctcaaagcactcacaaatatccctttgcagattctacaaaaagagtgtttacaa

SEQ ID NO: 393223 - DNA, 493 bp, Homo sapiens
tttacctctctgagatcaatgcacacaccacaaagctgtttctaagaaatcttccttatgccttttatataaatatatttcctttttcaccattggcctcaaagctctcataaatgtccctttgcagattccacaaacagatggtttccatattgatcaatcaaaagtaagtttcaactttgtgagatgaatgcccacatcacaaagaggtttctcagaaaacctctctctaatttttatgtgaagatatttcctttttcaccataggcctcaaagcactcacaaatatccctttgcagaatctacaagtacartttccagacagatcagagaaaagaaacgtttacctctgtgagatgaatgcatacatcacaaagctgtttctgagaaatcttgcttatactttttatgtgaatacatttcctttttcaccatagacctcaaagcactcacaaatatccctttgcagattctacaaaaagagtgtttacaa

SEQ ID NO: 393224 - DNA, 493 bp, Homo sapiens
tttacctctctgagatcaatgcacacaccacaaagctgtttctaagaaatcttccttatgccttttatataaatatatttcctttttcaccattggcctcaaagctctcataaatgtccctttgcagattccacaaacagatggtttccatattgatcaatcaaaagtaagtttcaactttgtgagatgaatgcccacatcacaaagaggtttctcagaaaacctctctctaatttttatgtgaagatatttcctttttcaccataggcctcaaagcactcacaaatatccctttgcagaatctacaagtacaatttccagacagatcagagaaaagaaacgtttacytctgtgagatgaatgcatacatcacaaagctgtttctgagaaatcttgcttatactttttatgtgaatacatttcctttttcaccatagacctcaaagcactcacaaatatccctttgcagattctacaaaaagagtgtttacaa

SEQ ID NO: 393225 - DNA, 493 bp, Homo sapiens
tttacctctctgagatcaatgcacacaccacaaagctgtttctaagaaatcttccttatgccttttatataaatatatttcctttttcaccattggcctcaaagctctcataaatgtccctttgcagattccacaaacagatggtttccatattgatcaatcaaaagtaagtttcaactttgtgagatgaatgcccacatcacaaagaggtttctcagaaaacctctctctaatttttatgtgaagatatttcctttttcaccataggcctcaaagcactcacaaatatccctttgcagaatctacaagtacaatttccagacagatcagagaaaagaaacgtttacctctgtgagatgaatgcatacatcacaaagctgtttctgagaaaycttgcttatactttttatgtgaatacatttcctttttcaccatagacctcaaagcactcacaaatatccctttgcagattctacaaaaagagtgtttacaa

SEQ ID NO: 393226 - DNA, 570 bp, Homo sapiens
tgtgagatgaatgcacatatcacaaagaagtatcttagaaacgttctttatactttgaatgtgaagatatttcctttgtcacaataggcctcaaagtgctcaaaaataccccctttgagattgtacaagaacagagtttccagactgatctcagaaaagaaacacttacctmtgtgagatgaatgtacacatcacaatgttgtttttagaaaacctgctttatagttcttatgtgaaaatatgacgttttccaccataggattcacagcgctccaaataaccaatggcagactctacaaaaagagtgtttccaaactgctcaacaaaaagaaagtccaactctgtgagatgaatgcacacaacacaaagaagtttctcagaatgcttctgtctagttttcatgtgaagatatttccttttccaccataggcgtcaaagcgctctaaatatccacttgcagattttacaaaaagagtgtttcaaaactgctcaaccaaaagaaaggttccactctgcgagatgaaagcacacatcacaaagaagtttctcaaaatgattccctgtagtttt

SEQ ID NO: 393227 - DNA, 570 bp, Homo sapiens
tgtgagatgaatgcacatatcacaaagaagtatcttagaaacgttctttatactttgaatgtgaagatatttcctttgtcacaataggcctcaaagtgctcaaaaataccccctttgagattgtacaagaacagagtttccagactgatctcagaaaagaaacacttacctctgtgagatgaatgtacacatcacaatgttgtttttagaaaacctgctttatagttcttatgtgaaaatatgacgttttccaccataggattcacagcrctccaaataaccaatggcagactctacaaaaagagtgtttccaaactgctcaacaaaaagaaagtccaactctgtgagatgaatgcacacaacacaaagaagtttctcagaatgcttctgtctagttttcatgtgaagatatttccttttccaccataggcgtcaaagcgctctaaatatccacttgcagattttacaaaaagagtgtttcaaaactgctcaaccaaaagaaaggttccactctgcgagatgaaagcacacatcacaaagaagtttctcaaaatgattccctgtagtttt

SEQ ID NO: 393228 - DNA, 559 bp, Homo sapiens
tgctcagtactgcgatggaatgccaagacacagaaaaaccatgtgtcaagaaggggggagttattctttagacacaacctggtatatgcttatcattaaagatcagtgcctttgctcagtactgcgatggaatgccaagacacagaaaaaccatgtgtcaagaaggggggaattattctttagacacatcctggtatatgttcatcattaaagatcagtgcctttgctcagtactgcgatggaatgccaagacacagaaaaaccatgtgtcaagaaggggggagttattctttagacacatcctggtatatgtatatcattaaagatcagtggcttttgtgagtctaaaaaattaatccttaaatgttttcatcaagttccagttaactaccttaattttctaggttatattaacagtattayttggattttcaccttgatatgaagatgtctgtgtaacttttacaatgatgtaaaacaaagagtaggattagggagagcacaggccactggtgcaatggataacgcatctgactatggatgagggaatttagcctgg

SEQ ID NO: 393229 - DNA, 559 bp, Homo sapiens
tgctcagtactgcgatggaatgccaagacacagaaaaaccatgtgtcaagaaggggggagttattctttagacacaacctggtatatgcttatcattaaagatcagtgcctttgctcagtactgcgatggaatgccaagacacagaaaaaccatgtgtcaagaaggggggaattattctttagacacatcctggtatatgttcatcattaaagatcagtgcctttgctcagtactgcgatggaatgccaagacacagaaaaaccatgtgtcaagaaggggggagttattctttagacacatcctggtatatgtatatcattaaagatcagtggcttttgtgagtctaaaaaattaatccttaaatgttttcatcaagttccagttaactaccttaattttctaggttatattaacagtattacttggawtttcaccttgatatgaagatgtctgtgtaacttttacaatgatgtaaaacaaagagtaggattagggagagcacaggccactggtgcaatggataacgcatctgactatggatgagggaatttagcctgg

SEQ ID NO: 393230 - DNA, 595 bp, Homo sapiens
atacccagttaaatttcaatttcagataaacaaggaataatattttagtatacgtatgtcccaaatattgcatgggatatacttacactgaaaaaagtatttgtttatctgaaatttcaaattaackgggcatgctatattttctgtggcaacctgctttatagtgaacagagtaagtcagctgaattttagaatacttaaccctaacctggtgttctaggtctttcctttttgtaattattattattatttggagtcagggtcatgctccatcactcaggctggagtgcagtggcacaatcacaatgccctgcagccttgagcttctgggctcaagtgattctggcacctctgcctttgcctcccaagtatttgtaccacaggtacgtgggcccagctaatttttttttttttttttttctcatagagacagggtctcaggctggtctggaactcctgggctcaagcaatcctcccacctctgccttcacttcccaaatagctgagaccacaggcacacgccaccaccatacccagcttattttttttatcagtttggtgcaagagtaattgtgggttttgctattgaaagtaa

SEQ ID NO: 393231 - DNA, 595 bp, Homo sapiens
atacccagttaaatttcaatttcagataaacaaggaataatattttagtatacgtatgtcccaaatattgcatgggatatacttacactgaaaaaagtatttgtttatctgaaatttcaaattaacggggcatgctatattttctgtggcaacctgctttatagtgaacagagtaagtcagctgaattttagaatacttaaccctaacctggtgttctaggtctttcctttttgtaattattattattatttggagtcagggtcatgctccatcactcaggctggagtgcagtggcacaatcacaatgccctgcagccttgagcttctgggctcaagtgattctggcacctctgcctttgcctcccaagtatttgtaccacaggtacgtgggcccagctaatttttttttttttttttttctcatagagacagggtctcaggctggtctggaactcctgggctcaagcaatcytcccacctctgccttcacttcccaaatagctgagaccacaggcacacgccaccaccatacccagcttattttttttatcagtttggtgcaagagtaattgtgggttttgctattgaaagtaa

SEQ ID NO: 393232 - DNA, 257 bp, Homo sapiens
tcttttggtcgttatgatgctgtaacattctctgctgggtttaacaatattccttttttttagtcttcctgtttgtctttagacttccaaacagtgagtttaaatatcatagcaacagtgaaccaggttttgtacaaattkatttattttttaatttatcttatttggtgtgtgaaattattaatcttcattttttaacttacatatcttttttccagcctagcattatatattgataagaaatccactgaaagtag

SEQ ID NO: 393233 - DNA, 257 bp, Homo sapiens
tcttttggtcgttatgatgctgtaacattctctgctgggtttaacaatattccttttttttagtcttcctgtttgtctttagacttccaaacagtgagtttaaatatcatagcaacagtgaaccaggttttgtacaaatttatttattttttaatytatcttatttggtgtgtgaaattattaatcttcattttttaacttacatatcttttttccagcctagcattatatattgataagaaatccactgaaagtag

SEQ ID NO: 393234 - DNA, 257 bp, Homo sapiens
tcttttggtcgttatgatgctgtaacattctctgctgggtttaacaatattccttttttttagtcttcctgtttgtctttagacttccaaacagtgagtttaaatatcatagcaacagtgaaccaggttttgtacaaatttatttattttttaatttatcttatttggtgtgtgaaattattwatcttcattttttaacttacatatcttttttccagcctagcattatatattgataagaaatccactgaaagtag

SEQ ID NO: 393235 - DNA, 257 bp, Homo sapiens
tcttttggtcgttatgatgctgtaacattctctgctgggtttaacaatattccttttttttagtcttcctgtttgtctttagacttccaaacagtgagtttaaatatcatagcaacagtgaaccaggttttgtacaaatttatttattttttaatttatcttatttggtgtgtgaaattattaatcttcattttttaacttacatatcttttttccagcctagcattatayattgataagaaatccactgaaagtag

SEQ ID NO: 393236 - DNA, 373 bp, Homo sapiens
tgcttggcacaaaggaatgatatatcttaaatttggaaatggaattttcttycccaatcttactgtagtctaagtacctttcacaaaacttctattaacccatagctgacttagctttagttcctgggtaaatcaaatctgtgttttgcaaactacgatgttgtaagttcaattgcttctgaatctagcagagctcagtgaaaatccttgcttacagacatgctcatttttattaatgtcacacatggtactctccatgtgaaagtcagaatttctttcatcctatttaccaatcccttcagatccttgtgaggaaccaacagaacagctttaaaaaattaaaaggtttttttctttcccttcacaaataggc

SEQ ID NO: 393237 - DNA, 373 bp, Homo sapiens
tgcttggcacaaaggaatgatatatcttaaatttggaaatggaattttctttcccaatcttactgtagtctaagtaccyttcacaaaacttctattaacccatagctgacttagctttagttcctgggtaaatcaaatctgtgttttgcaaactacgatgttgtaagttcaattgcttctgaatctagcagagctcagtgaaaatccttgcttacagacatgctcatttttattaatgtcacacatggtactctccatgtgaaagtcagaatttctttcatcctatttaccaatcccttcagatccttgtgaggaaccaacagaacagctttaaaaaattaaaaggtttttttctttcccttcacaaataggc

SEQ ID NO: 393238 - DNA, 373 bp, Homo sapiens
tgcttggcacaaaggaatgatatatcttaaatttggaaatggaattttctttcccaatcttactgtagtctaagtacctttcacaaaacttctattaacccatagctgacttagctttagttcctgggtaaatcaaatctgtgttttgcaaactacgatgttgtaagttcaattgcttctgaatctagcagagctcagtgaaaatccttgcttacagacakgctcatttttattaatgtcacacatggtactctccatgtgaaagtcagaatttctttcatcctatttaccaatcccttcagatccttgtgaggaaccaacagaacagctttaaaaaattaaaaggtttttttctttcccttcacaaataggc

SEQ ID NO: 393239 - DNA, 373 bp, Homo sapiens
tgcttggcacaaaggaatgatatatcttaaatttggaaatggaattttctttcccaatcttactgtagtctaagtacctttcacaaaacttctattaacccatagctgacttagctttagttcctgggtaaatcaaatctgtgttttgcaaactacgatgttgtaagttcaattgcttctgaatctagcagagctcagtgaaaatccttgcttacagacatgctcatttttattaatgtcacacatggtactctccatgtgaaagtcagaatttctttcatcctatttaccaatcccttcagatccttgtgaggaaccaacagaacagctttaaaaaattaaaagktttttttctttcccttcacaaataggc

SEQ ID NO: 393240 - DNA, 635 bp, Homo sapiens
atgtgcatagtcacaagctccaccagtttatctaactgacctctgaagaacactgaatcaccgggcgccacggctcacgcccataatcccagccctttgggaggccgaggcaggtgcattgcctgaggtcaggagtttgagaccagcttagccaacatggtgaaacccaacctctattaaaaatattaaaaaaattagccaggcgtggtggcaggtgcctgtatttccagctcctctggaggctgaggcaggagaatcacttgaacctgggaggcggaagctgcactgagtcgaagatcgtgccactgctctccagcctgctgggcaamagagcgtgacttcatctccaaaaaaaaaaaaaaaaaaaaaaccaaaacaagaagccctgaaccaacatctgcagaatacacactcttttgaagtgtacatggaaattcactaagaaagtatgttctccaactatactataaatgaattagaaatcagcaacaataacatacttataatatctctatgtagtagaaatgaaaaacaatacacttttaaataactcaaatgtccatggaaagaaaaatcacaaggaaaactagatgatattttgaatggaatgaaaatgaaagcaaaatgtgttgact

SEQ ID NO: 393241 - DNA, 492 bp, Homo sapiens
caggaggatagcttgagcccaggagttggaggctgcagtaagctatgatcgtgccactgcactccagccagggcggtaatttactttaattttagagtgagttaactactgcaaaagcaatgcagcagtgaccaaggacaaattacttaacctcttgaagattcctgttccccatctgtggaatggcaatatcattatcttgtaagggcatactgtgagcattaaaggaaacaaatgtatagaaaataaaccaatacacacacatacaattttgtgtgcatgtgtgtgggggtgttcatgtgtgtgggggtgttcatgtgtgtgggggtgtgcatgtgtgtgggggtgtgcacatgagtgacaggcacatagtayttctaaatgtgaatcctctgcacttccctcttaagatatctaaggaatgaaaaggagaacgtgacagggtgggataaggaagcacagatacggaatagtggaagccagaggaaacct

SEQ ID NO: 393242 - DNA, 496 bp, Homo sapiens
tttttttttttttgcttatctctgagtctgttaaragtactttgttcttacacaataagaattgaatactttttggaagaagtgagatgctttttcttttcattttctccttttttctttgagtgtgagttgatttttttttttttataaggtagttagttgttcatgctgctagtgacttaaccatcatactgaaatgttttgaccttggtagaaaatgtcctgttctttatttacttaggtccatgcctgagagatgtagttataaggaagcaaaaagttcaagactgtatctacagccatgctcaccatatcaaatacttatgttctcaactaacattaagcttggtatccaggagctcctctggctggcattggaggagtcacagctttgtggtcatgtcagggaaggggagggatcttatttgtaggcagaatcaggtatgatgtcttgttcacctaccaaatgcaggaacctgggacaaaatgaaataat

SEQ ID NO: 393243 - DNA, 496 bp, Homo sapiens
tttttttttttttgcttatctctgagtctgttaaaagtactttgttcttacacaataagaattgaatactttttggaagaagtgagatgctttttcttttcattttctccttttttctttgagtgtgagttgatttttttttttttataaggtagttagttgttcatgctgctagtgacttwaccatcatactgaaatgttttgaccttggtagaaaatgtcctgttctttatttacttaggtccatgcctgagagatgtagttataaggaagcaaaaagttcaagactgtatctacagccatgctcaccatatcaaatacttatgttctcaactaacattaagcttggtatccaggagctcctctggctggcattggaggagtcacagctttgtggtcatgtcagggaaggggagggatcttatttgtaggcagaatcaggtatgatgtcttgttcacctaccaaatgcaggaacctgggacaaaatgaaataat

SEQ ID NO: 393244 - DNA, 496 bp, Homo sapiens
tttttttttttttgcttatctctgagtctgttaaaagtactttgttcttacacaataagaattgaatactttttggaagaagtgagatgctttttcttttcattttctccttttttctttgagtgtgagttgatttttttttttttataaggtagttagttgttcatgctgctagtgacttaaccatcatactgaaatgttttgaccttggtagaaaatgtcctgttctttatttacttaggtccatgcctgagagatgtagttataaggaagcaaaaagttcaagactgtatctacagccatgctcaccatatcaaatacttatgttctcaactaacattaagcttggtatccaggagctcctctggctggcattggaggagtcacagctttgtggtcatgtcagggaaggggagggatcttatttgtaggcagaatcaggtatgatgtcttgttcacctacyaaatgcaggaacctgggacaaaatgaaataat

SEQ ID NO: 393245 - DNA, 548 bp, Homo sapiens
tttcccagtcatcacatgaagactaacatgtttccaggaattaagtcctgggaacatagtcttttcctcttttcccctataaaccctcatctacagcagcaggaaatgctgaagcaagctttcctgaagagagtaaacgctatttttctagagttttaagaggtaccatggcaggccgggcacggtggctcacgcctgtaatcccagcactttgggaggccaaggcaggcggatcacgaggtcaggagattgagaccacggtgaaacgcagtctctactaaaaatacaaaaaattagccgggcgcagtggcgggcayctgtagtcccagctactcaggaggctgaggcaggaaaatggcgtgaacccaggaagcagagcttgcagtgaggtgagatcacaccactgcactccaacctgggcgacagagtgagactccatctcaaaaaaaaaagaggtaccatggcataaattgtatccaggtagtcagctatggatagaaagatgaaaagagaacacagaaatatactttatcaggtcaggagatggg

SEQ ID NO: 393246 - DNA, 533 bp, Homo sapiens
tttttctcttatattatttatattacatttaaaaaagaaaaatttaaaataaacaaactaagcagacaaaataagaaaaataaagaaaaaataataacaaaagagaaagtaaataggaagtgaacaaataatagaaaaaagtcaaaattgtttctttgaataggttaacataattggtaaactttaataagactaaaataaaatacaaattaccaatattagtaatgaaatagggatatctacagagtgtatgtacatttaaaagagaaatattataaacaactataaattttacagcttgtgtgaaatgaacaaatctttaacaatcacgcatactaaaactaatcaagaagtacaaaaattttaaccaccatatgttaattagaatcattaattttgtactttaaagttttcatgcaaataattctgggtcattggcatattctaacaaatatttgatgaatgtaatacaaatattccaatatttaatacaagkgaagcaataacagtattgcacaaattctttcagaaaa

SEQ ID NO: 393247 - DNA, 531 bp, Homo sapiens
aaaaaacccaatattaaaatgttacatattgtataattccatttatttgacattttagaaaaggtgatatatgagaagacagaacagattagtcattgccagaagttaggctgggaggaggttcagaataaaatgcaataaatgagataattatttgarctgtagaatattttgtgtatcttctctctagttctggtaatgataatccatacagatgtaaaaattcatagaagtttacaataaaaagtgacttttgctctatgtaaattcaaaatattaaaatccaaagagtcaatgtaatgttcttaaatagagtaaagcagaaaagcaatcatcttttaaaaattcagactatccatttgacaaaagacaacactccttatgataaaatatccaagaccctttggagtagaagaaaactttctcactctgttaaagcatttctgcagcaaacctgcagttaatatcatactgatgacacagtgaacaccttccctccaggatcaagaatgagcaagtgagtaaacacat

SEQ ID NO: 393248 - DNA, 599 bp, Homo sapiens
  misc_feature (1)...(599): n = A,T,C or G
cttctagtcttgacaactaaatatgtgtctagacattgttaaatgtctcttgggggacaaaattgcacctggttgatatcctctggtgtaaaataaatcccaaaagggatgaggagagaagagagaaaatggatggatcaaaggaaatatttgaaaaactactagatgagaactttccaaaattgatgaaagacctcaacctgtatttccaaagaggtaagtaaaaatttaaaagcagaataaataaatcaaaatccccacattggcatattatagtcaatgacacagagcagatataaacccatatagaaagacatattatacacaaggtaacatgaatgtaactactgctcatgcagcagaaacaacagagatgagaaagaaataggacaaaattttttaattgctgaaagaaaaaaatcataccaacctagaattcttttcctagacaaatatccttcaatatgacggtgaataaaaatatttaagagcgtcaaaacttgcgagagcaggcttgcactacaatgcrtgctaaaagaagatactcaggatgaagggaaagggtgccagatagaagcataannnnnnnnnnnnnnnnn

SEQ ID NO: 393249 - DNA, 526 bp, Homo sapiens
tgataataggttctgttaaatttcatatgcacatagtcaagctgggaagtaccaagatacataggcttaaaattcctacataaatattagagtaagaaccccacataacaaagaatttccaagttactcaatccccactgaatctatgttraaaattgtatgaacagaaagtaagtttaaaatgaagaaaacatcatacaactggtagttttcaattaatactctgaaacactgagtttctgttaccattgccctctaatttttttttaagatccacgaatttgttaaaaatctatttcaaggccaccacatttcagaccatactgaaatattacagcattactattgtaaaaatagtaatattttattagaagtgccaggaagctgaatttgtttcatttttcattggtaggcaaaaacaccctctgtgttaaactggaggatcatctatcattacagagtatcttatggttcaccctggaaatgtccactatgactacctggtataaaagaatattcatttata

SEQ ID NO: 393250 - DNA, 526 bp, Homo sapiens
tgataataggttctgttaaatttcatatgcacatagtcaagctgggaagtaccaagatacataggcttaaaattcctacataaatattagagtaagaaccccacataacaaagaatttccaagttactcaatccccactgaatctatgttgaaaattgtatgaacagaaagtaagtttaaaatgaagaaaacatcatacaactggtagttttcaattaatactctgaaacactgagtttctgttaccattgccctctaatttttttttaagatccacgaatttgttaaaaatctatttcaaggccaccacatttcagaccatactgaaatattacagyattactattgtaaaaatagtaatattttattagaagtgccaggaagctgaatttgtttcatttttcattggtaggcaaaaacaccctctgtgttaaactggaggatcatctatcattacagagtatcttatggttcaccctggaaatgtccactatgactacctggtataaaagaatattcatttata

SEQ ID NO: 393251 - DNA, 447 bp, Homo sapiens
taggaaatattaggtaggcaaagattgttattaaatagtttttgaggaaatactacattacagacactgtgccagataattaaaaactataagcctccatagaaccaaatagtgcrcgcgcgcacacacacacacacacacacacacacacacacacacacacacacgtaaagctggtgaaatcagaatgaagtgagtggattggaccaacgtcaatttcctcgttgtaatattgttctgtggttatacaaggtgttgctattgggagagactgagtgaagggcctatgagaccactctgcatgaatttttataactgcatgtaaccctacaattacctcaaattaaaaacttaggaaaaaaaaacctcccagttccacaaggatccccattttatgtgtgagaaatctcaggcttagaaagattaactttggcaactcttcctacc

SEQ ID NO: 393252 - DNA, 447 bp, Homo sapiens
taggaaatattaggtaggcaaagattgttattaaatagtttttgaggaaatactacattacagacactgtgccagataattaaaaactataagcctccatagaaccaaatagtgcacgcgcgcrcacacacacacacacacacacacacacacacacacacacacacgtaaagctggtgaaatcagaatgaagtgagtggattggaccaacgtcaatttcctcgttgtaatattgttctgtggttatacaaggtgttgctattgggagagactgagtgaagggcctatgagaccactctgcatgaatttttataactgcatgtaaccctacaattacctcaaattaaaaacttaggaaaaaaaaacctcccagttccacaaggatccccattttatgtgtgagaaatctcaggcttagaaagattaactttggcaactcttcctacc

SEQ ID NO: 393253 - DNA, 563 bp, Homo sapiens
tctacatagacaataatgtcatccatttctttctttctaatctgtgtgcctttaacttctttttcttgtcttattgtactggttaggacttctattaaaatgttgagtaggagtggtgataaaggacatcttttccttgttcctcatctttgttggcaaatattacatctttcactattatgtatattgttagctgcatggtttttgtgtgtgtattggttccattttcttcctttctgtggcttatttgaacatttttgaatatcccatttgtccattctattttaaaatgtctttccttttccctttccttccctttctttccctttttttcctccctccttccttccctccgtctctcccttycttcctttcttttttttctctctctttctctctctctccttttctttctttcctttcttccttccttctctctctctctctttctctttctctgtctctctctctctcctttcgtttccaggcaaaaattctcttaattttctttctttagaagtctttaccttaatttctgaaaactatgtacatcgtgggatata

SEQ ID NO: 393254 - DNA, 549 bp, Homo sapiens
agttctcataaagccttgtagctcttcttgaacataaaaatcctttatragcaagtaagtcagtcagctcagggagaagaaaaagagaaatataaatggtagtttaaaaattagccaaacctaggataaccaccagggatcttgctgcctcctgcatggcaacaggcaagattggacattccccttgctctcagccctaaagggaataggcacacaagcctcacgtgattatccatctcctatgcatgaacgtagtcaatcatcttcagctgtgaacaaaagccaaaagcaggattctacttctggatagtaaagaatttaagggtaataaaggttaaggagaggaggcatcccatagccatctatgctagctatggtttctatacgttttctgtacaaacagcagttatacagaaagcattctatcattatttttgatgaaaaatccatacacaaataaagcaaattcatgcaatagtagtaaaatctcatctgagaacattcaatatctttgaaaaatttagcccatagatgtgtaactcaaactgt

SEQ ID NO: 393255 - DNA, 556 bp, Homo sapiens
ctcagcctcccaaaagtgctgaaattacaagtgtgagccactgtgcctggcctttaactgtaattttatttagtgttcatgagtcaatcagtataaaaattagctagtcctgaaattagctctaccacaaatacacatattcatttatttgttttctactctttttctaaggtgccttgtgcagaaaacaaatatagcatcctatttggacttttaaatgtttgtttcaaagcctgtcttctctgtaggtcgtggagagtgatacctgcacagtgtaggcatttaataaatgctcattgaatggattcttaattatctgggataggtggaaaacagtggtataggtacrcgaaaacagtggcacttggaatgattttaaaggtattatgaacccaaatttgcatgataaagtagacaagctcaaagtttccttaccttttgctagctttcagaaagatctactgttatataacttttattcatacacaaatttaaattgttttgccttccattcattttggcagtaacagtttttccctcacaaactcttgctatc

SEQ ID NO: 393256 - DNA, 570 bp, Homo sapiens
tctaccacaaatacacatattcatttatttgttttctactctttttctaaggtgccttgtgcagaaaacaaatatagcatcctatttggacttttaaatgtttgtttcaaagcctgtcttctctgtaggtcgtggagagtgatacctgcacagtgtaggcatttaataaatgctcattgaatggattcttaattatctgggataggtggaaaacagtggtataggtacacgaaaacagtggcacttggaatgattttaaaggtattatgaacccaaatttgcatgataaagtagacaarctcaaagtttccttaccttttgctagctttcagaaagatctactgttatataacttttattcatacacaaatttaaattgttttgccttccattcattttggcagtaacagtttttccctcacaaactcttgctatcagtaggtgaagtaaaaccttaattctacctcaccctccagcaccatcactagctaatcgagttttacaaaaaggatgtatctcttcattgctgtattgaatttttagaattgcttcctcagtgcagttgtaagg

SEQ ID NO: 393257 - DNA, 613 bp, Homo sapiens
tagattacaacactagtagtaaactcacttcattggaatcagcactaatccaatccatgaaaattcaattgccccatcactccgcttagtctacacgttttgtaactaaaagcagagaactgcaaacttggcaatggagactgcctgaaagaacactggactttctacttagaagaatcctaatcccaaaacttcagatcacagaattcaatttaattaacgaaagaattgtrtgtattgatgttctccagctacattaccagacatgaatgcaagtcaagtgacatctttcattttctactaatcttttaaacagccatttatttgttaagttgctgcaattaactgttgatttttacctcaccttgggctttgcttcagatgctggtatcaacatcactgaaaccaatggtgcatgctggtgattaatggctacttttttactcaaaagaaatctcccttttcttactaatgattatgaatttttttttaatgaaaataccatttccagaaatacatgtactgtttattattagctaagattgtagacattatttgaatccaaaaatatagagaaatatattatgatttccctgatatggtaaaaaccatt

SEQ ID NO: 393258 - DNA, 580 bp, Homo sapiens
aacacctttttaagcactgttaatttttccaataatagatcgatgaattcttaaagtgtttggcaactctgcatccctgagttttcatcagcctagagcatccctggaggtaacatatgaccagtggatactggggaagaagccaaaagctagaaaccaatgcataaatagaaagaataaaaaacaaatttttttgaaaaggaatcaagttgtttacatttgattatggttactaataactgaatagtttgaagttgttggagagtataagcacattttaataccctctgatacctaggtattagattgctgcatggatamtaggtaattttgccctaaatctgtctcccaatgccaaagcactttcagatgatgacattttctattgcaattctgagtgcttatagaccttgattgtgctaggtaattataatatccaccatggcattaaggctcactgcatgagctaatgccttgatatggaattaatcaaatctgaaagaaaaggtcattagaaagttaaattatgtcagtgatacaggaaagcaccatataagcaggaattataccctgttgtgat

SEQ ID NO: 393259 - DNA, 580 bp, Homo sapiens
tagttgcaagaaaacaagctcaggactcccactgattctatattatggtgaattatataaaygtttcattatatattacaatgtaataatagaaataaagtgcacaataaatgtaatgtgcttgaattatcccaaaaccattgtgcaactccccagccccccatgaaaaattgtcctccatgaaacagttcctggtgccacaaaggttggggaccactgctctaaatgaattatgttccagttccttttggtccctcttagtatcacaacctgtcagacacaagtcaggaatttgttagcattgttgcaatcatctcactctgtaccaattttcatcttattcacagacccctatggctaatatgagtaacaccatgtgttgatgttagcatatagtagattcaggcacgctggcagtcagctttcttcatagccagtgttctcaggaattccttcttcctttctttttggttcttttctcctctcagaatatgtttttgcaagtggagcctttttttttattttggagagaaggtgacatgtcattcacatgctcacttgtagattgtggctatatgac

SEQ ID NO: 393260 - DNA, 493 bp, Homo sapiens
gcatttctgtcatttgcagcaacacagataaaactggaggccatcatgttaagtgaaataagccatgcttagaaaaatattttatgttcccactcatatgtgagagctaaaaaatagatttcatggagacagagcatagaacggtagttaccagagcataggaaaggaagggtgtgggkatagagttggttaatgggtaccaaaaaacaaatagaaagttaagaaccagtattcaataatacagtaggaaaattatagtttaacaataatttattgtattcttcaaatagctggaagaaaagaattataatgttcccaatacaaagaaaagataaatttttgaagtgatgaatatcccaattacacttacttgatcattacacatttatacatgtatcaaaaaatcccatataccccaacatatgtacaacaataatatatcaatttaaaaaaaaagaaagaatgtggcaaattatttaccccagatcagaat

SEQ ID NO: 393261 - DNA, 550 bp, Homo sapiens
gctggaaaattcaggtccctccaggccttataatcccttaacattccctgattcattaatctattttcaacttttaaagtctgtatattttagaaaagaaacgcttgaatgtatgttcatgattcaacaacctacacrgtacaatgtaagaattccacactgctctgtgactaccacttaatctggcaacctccaaatcccatttctctccccactgaaaaccatagttaatggtttgatggtgtgtatcctaaagtttttgtgtattgatacacacacacacacacacacacacacacacacacccgctcaacttgtagcatcaaattccaaaacttgctttgtttagtgtctcagcaaaccttctgtgataatacatgtaactttaatatttttgaaaatgatactttgtataaatataccacatgctatttattctattagtaggcatttagatgctacaaattctccagtattataagccacacagcaccactatctggaagctcataggcggtttgatacatcaccagcatgagatgccatatga

SEQ ID NO: 393262 - DNA, 498 bp, Homo sapiens
aatcatacaataattatgtttacatcaattaaaaatcttcastctgggaagatgtaacgacttcttccaaacagtttcaagatattggaaagccagctggagatacaaacagtggcacaaagagtgacaaatttccttgaggggctgccaaagtggaggctttcaaaatgctggaagcatttagtataactctcctacctacagctttaaaataactgaaataaagtagcaatagttcaactatgtaatttctttgtgttttttctagtattttatatttgtctgatttcaaataaagatattattccagtgggagaaaagttagcttggagatgaatatactgtattgaaacttttgatgggatacattgtggttttaaaacaactttggtgctatttttcccctccaacaatagccattattctgcatcgattgactttatgacaggtctctttggcatatatttttgagattagaactccaagtaaattgtgtga

SEQ ID NO: 393263 - DNA, 498 bp, Homo sapiens
aatcatacaataattatgtttacatcaattaaaaatcttcagtctgggaagatgtaacracttcttccaaacagtttcaagatattggaaagccagctggagatacaaacagtggcacaaagagtgacaaatttccttgaggggctgccaaagtggaggctttcaaaatgctggaagcatttagtataactctcctacctacagctttaaaataactgaaataaagtagcaatagttcaactatgtaatttctttgtgttttttctagtattttatatttgtctgatttcaaataaagatattattccagtgggagaaaagttagcttggagatgaatatactgtattgaaacttttgatgggatacattgtggttttaaaacaactttggtgctatttttcccctccaacaatagccattattctgcatcgattgactttatgacaggtctctttggcatatatttttgagattagaactccaagtaaattgtgtga

SEQ ID NO: 393264 - DNA, 604 bp, Homo sapiens
ggctctgagtgctgttttctttctctagagagggtttatcattccttttgttagataaaaattggagtttacaatattaaccaatcttgggttaagctgacttaagactgtgttacaagcttgctaagtgtttctctacctttggttaattccatgttcctagagtgtagtcttgcaggtgctatgattgcatacttatacatatttaggggaaaacagtcctaaggcaatgcttaattttggatctcactaaaatcttggtctctcaagtttctcatgttcgttttccatgtttgtgaaactgcaaatgctctcttggtttctctgattctaagtattttccttcttaccctttcatttgctgaactctcagattctttcccagtatctagaattagcaaatatagcaaagctaaaaagcagacacagaatgttagtttaccttatcacagttttcctatttattaagatcttgtctctttaagacttggttaaatcagtrgctctctgataccttaaaacagataatttaaagacttatagttaataaaagtctccacaaaaggaattcgaggtcctcaaagaggtgactaatagtatagct

SEQ ID NO: 393265 - DNA, 603 bp, Homo sapiens
taattagaaaacacatcaaaatgtggtacattttattttttaatgaggagatattttttaaaaatatcagtgccatgaaagacaaaggctgtagaaaggtctaaaattgaaggataaacatgtatgacaaatgaatgtaatatctaaccccacrctggatattgtaattgagaagaaaaaaattctaaaagaaaattagtgggtcaattaacaaaattggaatataaatggtaaattaaataataatactttatcactgttaaatttactgattttgataacttcactgtggttatgtgagaaaataaatattcatattattggaaatagtaagaataaagggccattttaatatgtaaatatgtataatatatatgctattaaatgtatataaagttatatataaaaatctacaaatggttcagaaaatataaatgcagagacacacatatatacatatatgtatctatatatgtgttgatattatatatatatatatacacacacacacatataaagagaatgagacagaggagaaaagcatttttaaaaaatgggaaaaagttaaaataagtgagtattttggtaaagtgagtatttggg

SEQ ID NO: 393266 - DNA, 558 bp, Homo sapiens
tagtgaggggaggtcacctgaggatgcaggactaacactggtcttaaaggaaagggtgatttggattaaacacagggaaagacagaacttgaagctgagtcagccataatggtgagtcctagcagtgaacaggtagggactggggaggcaggatgcaggcagattgttgagactttcaactgtctatttgaggaacttgggcttcatctggtaggtgctatggaaaaaaaatgtaagataatgagttggttaaaacaatgttttaggccaggcacagtggcgcactcctgtaatcccagcactttgggagggcaaggtgggaggactgcttgaagccaggagtttgagacctgcctgggtaatatagcaagacccatctctgtaaaaaaagaaaaaaaaaaattagccaggcatggtggcatacacctgtggtcccagctaccctggaggctgaggcgggaagatagcttgagcccaggtrttcaagatggaagtgagctatgattgcactactgcacaccagcctgggcaacagtgtgaccctgtctccaaaaacaa

SEQ ID NO: 393267 - DNA, 605 bp, Homo sapiens
tgggcggcccgctgtaacaccccgggaagaacaagactgctgtccccgccatctcaatcttgatattcacctcaatcattctcaggaccctccgtgtgccyggcatgggtcacatgccactccctcacccagcacctccttcccttgtccactggcagcaccatccaggcaccccgggctgttggaatcctggtgcctgcatgctaacacccatcacacctcgtcacactagttatgtgtctgtccatttccaccagacacagtgcctcatccagggaccacgttatcttcattcccaagtccagcgctctcgtgattcacaggagggcctgggtgaagcctggatgaagaaactcccagatggactctggagtgtggtttcttctcatggtgtcttatcggccagagaaggtgtgtgcctgatgacagtggggtcccacaccctgtctccttccaactcactccccccaacaaaagaccacctagctgccaaaacaatacccttaaaattgatggtctcaccatttcacctccaaataaggacgtcagcagcatgttttagtgcctaacatctgctgttatctctaattctcaaatactcctgc

SEQ ID NO: 393268 - DNA, 546 bp, Homo sapiens
tctttggtgacgtcctgtgtaggaaatgcgctctgacaaggggttgcacaggagggcacctctcagatgcgccaggggaggcaatgccgtctggagccctgccccatcacctctgctctgacccccatgccaacctggcacctcctcagccccttctgcacctctcccctgttctcagaagggtggccaggacccattccccacccagccgcatgccccaggcctgggcacatcattctggctcccagggccctcccttgaggcctctcctcagcatacccccaaatccagcttccagggagtccgaggctgcctacatctgtcctgccccagggccaggtggctctgtctgctgtatccctgcccagcccctcctgcccctcctggcctgccctctgcggaggcccagccccgccacctctctcatccaccaacctcacctctctgggatcaagaacactgccrctcccccaccttgcccaccaagccctcccagcacccccaatctctagctatttgtaggtcctcctggcctgtccacagcaa

SEQ ID NO: 393269 - DNA, 569 bp, Homo sapiens
cagtgacaaatatgatacatagagtccctgagattttaccttcctgtggatgagtagtcgataaacacatgagtatatatgtaccataatatcaggtaggtgataagagctactaaragaaatggaggagagtgaggcgatggagactgatggaaaaggaagaacaagttatacttctgtgcctggaataccctttcttccaccttaatttctcagctttgttagatcttcaacattctgctgaggcctcacctttttcatgggtagcacccctgccccaccctgacacacacagacatagtagatccttcttttggaggctaatgtcatgatgccctctagttcttatgtatggatttggatttagacatatgctgtgtctaattgtttcattttatctaagtctcagtttactcctctgtaccattaagataataaaaccccttttgcttcacgaggtttctgtgagcttcaaatgaatgaaagcactttgaaaattacaaattacattgctaattttaaagtattatacaaatttaatcagctattagtatcatcttgctacaatg

SEQ ID NO: 393270 - DNA, 569 bp, Homo sapiens
cagtgacaaatatgatacatagagtccctgagattttaccttcctgtggatgagtagtcgataaacacatgagtatatatgtaccataatatcaggtaggtgataagagctactaaaagaaatggaggagagtgaggcratggagactgatggaaaaggaagaacaagttatacttctgtgcctggaataccctttcttccaccttaatttctcagctttgttagatcttcaacattctgctgaggcctcacctttttcatgggtagcacccctgccccaccctgacacacacagacatagtagatccttcttttggaggctaatgtcatgatgccctctagttcttatgtatggatttggatttagacatatgctgtgtctaattgtttcattttatctaagtctcagtttactcctctgtaccattaagataataaaaccccttttgcttcacgaggtttctgtgagcttcaaatgaatgaaagcactttgaaaattacaaattacattgctaattttaaagtattatacaaatttaatcagctattagtatcatcttgctacaatg

SEQ ID NO: 393271 - DNA, 569 bp, Homo sapiens
cagtgacaaatatgatacatagagtccctgagattttaccttcctgtggatgagtagtcgataaacacatgagtatatatgtaccataatatcaggtaggtgataagagctactaaaagaaatggaggagagtgaggcgatggagactgatggaaaaggaagaacaagttatacttctgtgcctggaataccctttcttccaccttaatttctcagctttgttagatcttcaacattctgctgaggcctcacctttttcatgggtagcacccctgccccaccctgacacacacagacatagtagatccttcttttggaggctaatgtcatgatgccctctagttcttatgtatggatttggatttagacatatgctgtgtctaattgtttcattttatctaagtctcagtttactcctctgtaccattaagataataaaaccccttttgcttcacgaggtttctgtragcttcaaatgaatgaaagcactttgaaaattacaaattacattgctaattttaaagtattatacaaatttaatcagctattagtatcatcttgctacaatg

SEQ ID NO: 393272 - DNA, 569 bp, Homo sapiens
cagtgacaaatatgatacatagagtccctgagattttaccttcctgtggatgagtagtcgataaacacatgagtatatatgtaccataatatcaggtaggtgataagagctactaaaagaaatggaggagagtgaggcgatggagactgatggaaaaggaagaacaagttatacttctgtgcctggaataccctttcttccaccttaatttctcagctttgttagatcttcaacattctgctgaggcctcacctttttcatgggtagcacccctgccccaccctgacacacacagacatagtagatccttcttttggaggctaatgtcatgatgccctctagttcttatgtatggatttggatttagacatatgctgtgtctaattgtttcattttatctaagtctcagtttactcctctgtaccattaagataataaaaccccttttgcttcacgaggtttctgtgagcttcaaatgaatkaaagcactttgaaaattacaaattacattgctaattttaaagtattatacaaatttaatcagctattagtatcatcttgctacaatg

SEQ ID NO: 393273 - DNA, 576 bp, Homo sapiens
cacaacacactcataattagtaaatctttcagagtacataggaattgaaagaaaggaaaacaaaataaacatctaatttatatactgaaaatccttgttatctgaacatattattccatgtttaataaggtttgctgaatttgataatatattacaaaatattttcaacatggagatttttattttccatttcaaaaaaagttttggaagaaatgtctatcaaattttgttgctcaaactccagcttcgttttcaaattgtgcacaaaatttaatccaagggactggcccttttattacaaaatattaagaggataawaatgataattaaaatggaaatacgtatggtctatcatcagtaatattcttcagcagtaacttatttttcttcaatactccaatctagttaagtgttaataaaacttacctaataacatctgtaagtggctggtttggatgagagaccagcattccattgctgtatttgacacttctaaaaaatctactaaataaatgagatatttctttccagaatccatggaaacatgtcaatttagtcaattctatagtttttata

SEQ ID NO: 393274 - DNA, 576 bp, Homo sapiens
cacaacacactcataattagtaaatctttcagagtacataggaattgaaagaaaggaaaacaaaataaacatctaatttatatactgaaaatccttgttatctgaacatattattccatgtttaataaggtttgctgaatttgataatatattacaaaatattttcaacatggagatttttattttccatttcaaaaaaagttttggaagaaatgtctatcaaattttgttgctcaaactccagcttcgttttcaaattgtgcacaaaatttaatccaagggactggcccttttattacaaaatattaagaggataaaaatgataattaaaatggaaatacgtatgrtctatcatcagtaatattcttcagcagtaacttatttttcttcaatactccaatctagttaagtgttaataaaacttacctaataacatctgtaagtggctggtttggatgagagaccagcattccattgctgtatttgacacttctaaaaaatctactaaataaatgagatatttctttccagaatccatggaaacatgtcaatttagtcaattctatagtttttata

SEQ ID NO: 393275 - DNA, 590 bp, Homo sapiens
aaaaaatctactaaataaatgagatatttctttccagaatccatggaaacatgtcaatttagtcaattctatagtttttatatatctgatttttcatgatgtastgtcaagaataaatgatttaaaattagaagatgggctgtgagtctgtaatatttgacattcaatacttataaaacatagaggatgaagatgataatcatagtcatttatgctttgcctacttgaaaaaggtgctcatttcttattaaataagacattttttgccactgataaatatgtgtggcactcttatcatatgtcagaacttgtgatgataattcaaagataaaatgcaatagctgaactcaacaaatttacagacaggcaagaaagatttctaaagagaataatcaaagagtttaataagaactgcaagagaggtcctaaagtagcccagtgaggagaaaacttaaaaatcagattcaaggattgagggatcatggacattttaataaagaaagtaacagtgatttaccataagctttagattttcccctgatcaccaggttgtttacttgatttattagtttgtttttaaactgctgata

SEQ ID NO: 393276 - DNA, 541 bp, Homo sapiens
tttaaaattagaagatgggctgtgagtctgtaatatttgacattcaatacttataaaacatagaggatgaagatgataatcatagtcatttatgctttgcctacttgaaaaaggtgctcatttcttattaaataagacattttttgccactgataaatatgtgtggcactcttatcatatgtcagaacttgtgatgataattcaaagataaaatgcaatagctgaactcaacaaatttacagacaggcaagaaagatttctaaagagaataatcaaagagtttaataagaactgcaagagaggtcctaaagtagcccagtgaggagaaaacttaaaaatcagattcaaggattgagggatcatggacattttaataaagaaagtaacagtgatttaccataagctttagattttcccctgatcaccaggttgtttacttgatttattagtttgtttttaarctgctgataaagacatacttgagactaagtaatttataaagaaaaagttgtttaatggactcacagttccatgtggctgg

SEQ ID NO: 393277 - DNA, 541 bp, Homo sapiens
tttaaaattagaagatgggctgtgagtctgtaatatttgacattcaatacttataaaacatagaggatgaagatgataatcatagtcatttatgctttgcctacttgaaaaaggtgctcatttcttattaaataagacattttttgccactgataaatatgtgtggcactcttatcatatgtcagaacttgtgatgataattcaaagataaaatgcaatagctgaactcaacaaatttacagacaggcaagaaagatttctaaagagaataatcaaagagtttaataagaactgcaagagaggtcctaaagtagcccagtgaggagaaaacttaaaaatcagattcaaggattgagggatcatggacattttaataaagaaagtaacagtgatttaccataagctttagattttcccctgatcaccaggttgtttacttgatttattagtttgtttttaaactgctgataaagacatacttgagactaagtamtttataaagaaaaagttgtttaatggactcacagttccatgtggctgg

SEQ ID NO: 393278 - DNA, 518 bp, Homo sapiens
tcacagttccatgtggctggggaggcctcacaatcatggtgaaaggtgaaaggcacatcttacatggcagcagacaagagagagtgagaatcaagtgaaaggagtttcctcttataaaaccatcagatctcgtaggcttattcactatcatgagaaccacccccatgattcaattaactcccactggctccctcccacaacatgtgggaattatgagagctacaattcaagatgagatttgggtgcggacatggccaaaccatatcacttgacatctctacttcataaactaatgaacaactcaaacttaacataaggaaaagagccacctaattaccagccagacttccctatcctattaaacaaaacctayattttttcaattactcagccaaaaatgtacatgctgttttagactttattatattttatattaaattcaacatcatacaataactctactacatattctcattttgataactccttagtgtcccaaagctacaaccccagagcaa

SEQ ID NO: 393279 - DNA, 597 bp, Homo sapiens
aagcatgagtgagagcctgaggagactgagaccagaagaaggaaaagccaacaggagtggcattgccactgtaggcagtaggggcttggttctactggggccyctgaagaaccaatgcatcccagaatttctgcccgaataatgggaaatggggggcatttatccactggcttctatactgtgttggttgagggtgttctttggggtatgaataaacctctgggctgcccttgtgcatggggcccattgacttcttcagcctcagaaagagcccttttctaaggcagatagtggcaagactggcttgagaggtgagggtttgttgtaatctgagtgtgagctcacgtagagctgtccatcacagtggtgaacacagaggctggccaagaggggtgtgctgtggggcactgagagcatctgctactggcagcaatccctaccctttgaaagtcaccgagctccttttcctcagttctggcctctgccactcccagacacatgggtggttcagaaaaacacactgcctttcccacccatggcctcatgaatttccaaaattacttcctcctgaccttgaacctctctgcaggacagatt

SEQ ID NO: 393280 - DNA, 643 bp, Homo sapiens
ggttttgatttgacatgctaaggagtggaatactgaggaagaggcaagtgggcttttgaccggcttctttgagaaaacattttaagataatggtgtagtataatctaatagttaagaaaacagactttggattagacagatttgattccataatcaaatcctaatcctttggattaggtagatttgactccacaatctaccatctactagctgtgtatcctyggtcaatttacctaacctatcggagtctattttctcttctataaaacaataatagcataataaaagtaaacatctatatgtttacttttaaaaatatattatttatatataatatataacataccatatgtctatatatgacacatttgttatgttacataaaatatctgatactacacataatttattatgttttgttacacatgttatagtacatatatttataatataaactaatgacaattgaaaataataatgagatctacttctcagggctgatgtgatagttttatgtgataataactccaaaaaatgattaatattatatatatggttcatagttaatgcataacaaatatactagctacagccattagtattcattgcccttactgtcatcatcatcgtcgtcatcatcatc

SEQ ID NO: 393281 - DNA, 604 bp, Homo sapiens
tgtcctattataatatccatcttcaggatattatattgctgcaagctggccttccctccagactatacattcctaacaatgggctgcttttttttttttatcatcttttacaatacggataggctgaatatttctgaagtcaacgaatcctgtttcgtttttgctaaacagttttttcttcaatttatctcttttctcttgcattttctcttgcatttcactataagcaacaagaagaaaccagtctgtgtcttcaatactttggctggaaacctcctcagctaaatatccaagttaatcagtttatcacttacaagttctgctttccactcarttgtaggacacaattcggctaagtttttggcccctataaacaaagattggttattttccagtttccaataacatgttgcttatttccttcttgagcattcaaccttaatgtctttactgttcatatgtctaccaacactgtgtttaaggctatctagggttttatttttccttaaactgcatctcaaaatttatatagcctctagccatttctaattctaaagccaattccacatgttcaggtatttattatagcagcatctcctttgct

SEQ ID NO: 393282 - DNA, 570 bp, Homo sapiens
ttgcttggactccaggccaccctgtccacattccaaccatcagaaaggaagaagagtgtgtagggcagctgttctctgtgtcaccacaaccacctgccacttacaaaattttccctaaaacttggccatgtgaccacaactaacttcaagggaggctgggtcttatttcaggcatgtgcccagctaaaaatcacaagtcatataataaagaataatgaaaaaaaaaaaaacgggttttgagagacaaccaacaagctctgctacaatctcaagcaagttgcatgaccttgctsagcctgtttcttcatctgtgaatacatgaattttaaccccacagcctcgactggggctgaggctggcctgactgatcatcagctttgggacagatggtgcctgaatcagggactttattcttttaatatgtgagcttctgagacacaaagtacagattcaactagaacccgggcaggagagtggaggtccaaatgccaagcactgagtcaggaaaagaggtatttttggatgggatggagatggaataaaagtaagcactaagaaggtaaaatcaaa

SEQ ID NO: 393283 - DNA, 570 bp, Homo sapiens
ttgcttggactccaggccaccctgtccacattccaaccatcagaaaggaagaagagtgtgtagggcagctgttctctgtgtcaccacaaccacctgccacttacaaaattttccctaaaacttggccatgtgaccacaactaacttcaagggaggctgggtcttatttcaggcatgtgcccagctaaaaatcacaagtcatataataaagaataatgaaaaaaaaaaaaacgggttttgagagacaaccaacaagctctgctacaatctcaagcaagttgcatgaccttgctcagcctgtttcttcatctgtgaatacatgaattttaaccccacagcctcgactggggctgaggctggcctgactgatcatcagctttgggacagatggtgcctgaatcagggactttattcttttaatatgtgagcttctgagacacaaagtacagattcaactagaacccgggcaggagagtggaggtccaaatgcyaagcactgagtcaggaaaagaggtatttttggatgggatggagatggaataaaagtaagcactaagaaggtaaaatcaaa

SEQ ID NO: 393284 - DNA, 559 bp, Homo sapiens
attatctagcctgcatgcatgtcattcttacccttgactccaccatcatatagawctttcagtggatgtaatttgggggcaactattacttgccaggcaatagacaaggacttgggtatccgtcatttatttcttacaagtaacattggaattgttgttgttaccagaagaaactgatgctttgtctaagctcccacctgggatctgaaccaggtctttctgactgtaataattttgttctttctacctcaacctattttatttgtatttccctacctgatctttgctgattatttgtttttcctgcctcgctgattaggaggaaagttctattaataggaattatgattagttgaccagtaggtgttatctataagataaggccaggctcttgaacataacattgagtgcctccatggtctgattcttgcctatctctccaatcttttctcttttcctcactctctcccaccactctgtcatctatatactccctttgcctcactgagctcttcactgctcttcaaaagactcctcccctcctataaccagatttttt

SEQ ID NO: 393285 - DNA, 544 bp, Homo sapiens
aaaaaatgtattccaggaattcaattatttgaaatcttcatgatgaatgcctattttctgccatcactctccttaggaagctaagtcctaatcagaattttacttaggtaagtagaaagtcagaatcatagaaatgtaataatcttgggaaaaggtatcctctgagatatcttctatatgtttataaaatgggaatgactttgggactttggcaatttaagaatgacctacacaacttctggttgaccaagattccctgtcttccaggcagtgctagaacaaattggccaggtccttatttacattctcttggatgtactaactacacatattcagaccaacctcagatggtatgttttctctcctagagtttattagtatcattgcctgtrattcaaccttattgggcaggtgtagcctagtctttgttaggtccagagctacctcaagattgactaacctcttgaggcatttccaccctgttattttagattggttcttttaaggctaatttcctccatcatgtgctgactttgtagttgag

SEQ ID NO: 393286 - DNA, 544 bp, Homo sapiens
aaaaaatgtattccaggaattcaattatttgaaatcttcatgatgaatgcctattttctgccatcactctccttaggaagctaagtcctaatcagaattttacttaggtaagtagaaagtcagaatcatagaaatgtaataatcttgggaaaaggtatcctctgagatatcttctatatgtttataaaatgggaatgactttgggactttggcaatttaagaatgacctacacaacttctggttgaccaagattccctgtcttccaggcagtgctagaacaaattggccaggtccttatttacattctcttggatgtactaactacacatattcagaccaacctcagatggtatgttttctctcctagagtttattagtatcattgcctgtaattcaaccttattgggcaggtgtagcctagtctttgttaggtccagagctacctcaagattgactaacctcttgaggcatttccaccctgttattttagattggttcttttarggctaatttcctccatcatgtgctgactttgtagttgag

SEQ ID NO: 393287 - DNA, 563 bp, Homo sapiens
taaatttcagattataaaaaagatttttaaactatttttgaaatagttggtgttatgatgtcataaacactgcagaaaaaagacaaaatcagaaaatgctgttgatcactggactctttctcaacattgaaagcaaacgtggctggggcaaagtgtgccagagactcagaaacttgcttgaagcattacttcaatattacggggaagtcagctggtaaaccacagcacagagtactgctgatactctcaagaataataagttcttctaactgatagtagtgaacagtttgggtttgtttgtttattttttgcagttggctgaaagcatttcctttttgaaatagctcaaaagctaccatgatagaaagtttgtagatcagggggcaattcttggaatctaagagaattctgactttgattgtcgaagygcactagagtggaaagatcaagttttctttctactaaaaaagagtgcactgaatgctatttgaatggccttgttttttaggaaatggtcctgtcattcaggttgaaagatgagattgcttgactaattatgtttt

SEQ ID NO: 393288 - DNA, 589 bp, Homo sapiens
agaaattttaattttatcctatattaaatggtgaggcaggaagttctagcacaagaagatggccagacaagtgagtgccatgggttgcttttcaacgtggaaaataaataggagagataagatttttcttaccrtaagcaatgtcccataataactggcacagttctctctaagcacaaatgctttcacctctagagccagccttcattttctgtttatggctgggtccatgatgaaacacaatgatatgtagttatgacctacacaatatgctacaaaaaatccctcagctaatatcaccaatagatttcatcttctttttcacttttttccccatgtagcatgagcagatgaattaaaaaaaaactatatagaagtacacatttttccaagaatatgtaatgcctaaaatataattgcttaagtcataaaagatctggtctccaaacaagttatatttatctaatgactgtccaactgtctttaaattactgtttaataactaccttgtgctcttattaaggaaaaatcatacatggtgtgatattgtgttatggtttattatttttattcagacacagacatgaca

SEQ ID NO: 393289 - DNA, 488 bp, Homo sapiens
aaaaaaattaccctgggagaagaccatagatcacatggaggtggcatgtcaagtcgttattttttatattaagaggaggaaatatgartattatcccacaacagacaaaatagactcacatttataaaactgatttcagatactgatagtatatgaaatacaagactgttctgtaatttttaaactgtagtatattggggtattgtgttgggatctttatatgatttggggagggaggacagttatgttctcttccatcttcaccttcatcctatctctcaatctacttgaatactatttttattctttttttaacaggtatattgaggcgtattttacatacaataaaatccacccaattcatatgtacaatttaataattttttagttaatttattaagtggtgcagccattatcataaatcagctttaggacattttcatccccaataagatctttcacacccaactacaataatccccaaccca

SEQ ID NO: 393290 - DNA, 557 bp, Homo sapiens
tatttttcacaagcaacctttgcacaatgagctgggattggtatggctatgaaagtggtaactcaaggtctgtacccagaatgatgccactcaggctggcatgggctttagctaagtccaggtcaaaagctccatgctgtgccctgggcagagagcaagattcagtctcctgtcatggtccacccttttccttgtaggcaccaagcatgcactctgaggccagagcaagactttgtgtagccagaatagattcaggagagagcaatacttggctgtgatgcagacaacctttgaacaggggatgacttctataactacaatttctgatagcttcagcgcacaaaaggaaaccatgagagtcttggcaattgccagcactcaggcaggcatggatcccagaccccacttcgtgtttgcattaagccaatagctcattggagtaaggctttaatgggggaataggacctgatgwctggttttttgtgccagatattctttttattctcatctcacaagtatttctgaacatttgatattaattgtacaatttttcaagt

SEQ ID NO: 393291 - DNA, 521 bp, Homo sapiens
atcaataaatatttactgatgaaaaaagaatgagtaaagataactgtactccagaagaaaatattacagtagcttggatatactggtaaagtggagagtgcaggataagtaggcagatttgagatctattttggaggcaaatataaaggacttacagagcaaatggatgcaaagacggagagagaaggacaaatgaagatcaataccctcatttctggcttgagcaacaaggtaattggcaaaggcatttcctgggaaaagaaaacttcctgggggacaggtgggttcgactattggtctatatctagaatcacaatgactcagcctctacagacctgtgtatgtcagaataaatgtgtactgttactaaatttgggggcagtttatcatgaagccttaccatggccatagctgacttctgtggtttggataactgatcattccaaatatsatgttgaaatgtaatccccagtgtagcagtgttgggaggtgggcccagtgggagatgtgtgggccaccgg

SEQ ID NO: 393292 - DNA, 580 bp, Homo sapiens
aaggatcagtccagaaggattgttaccaaaatgtcagggattttgtgtaggtcctgctgctcactacacagaaagccaatcactgagacaatgagtattgccagggaagaaggcttaaatcgggtgttgcagctgaakagaatgagagataaagtctcaaatccatctccccaactgataaaaactgagggggcatagcagagaaggcaggaaaacaagaattaaagagggataaggaagcaatcatgagggatgaagcgtctagcatctcattgtctggatgtggtgatctgaagagtttcagttgcttgcttgagggttagtttcctgaggaaggaactcagatgagacaaaaatgagtttcaagtttcaaaaccaggagtttcaatttgtatgtttattcaaaaaagtgtaaatattagttctatggatgattgggccagtttcagaatcatcatctatccaaagcagttttagagaagagaacagtatatgaaggagattctgcaagacagcagggcaataactataacattttaaggaaaatattatctttaacccagattttcacacctagaca

SEQ ID NO: 393293 - DNA, 548 bp, Homo sapiens
tcctgaggaaggaactcagatgagacaaaaatgagtttcaagtttcaaaaccaggagtttcaatttgtatgtttattcaaaaaagtgtaaatattagttctatggatgattgggccagtttcagaatcatcatctatccaaagsagttttagagaagagaacagtatatgaaggagattctgcaagacagcagggcaataactataacattttaaggaaaatattatctttaacccagattttcacacctagacacaatacttagtgtgagagtaaaataaagaaatttccagacaggaaaggactcaggccaaaaaattcttaataatgtacttcaacacaacgaaagaaaacgtgaaaagagcaacccatgggaataactcaggagtgtgagtagagcctgtagtctttatctgttctgaggcaaacagtggatccattttctgtcatctctccatcaaggtaggccatgtgactgctcttgacaatggaatatgatcagaagtcacaagtgccacttctagccaaagaagattaaaagcatatgt

SEQ ID NO: 393294 - DNA, 605 bp, Homo sapiens
aagttttctaaaaagactagtggtcaatgctttgtctcttgttttgaattctagccttgcctcagttgctcaatgatccaatagctatcacaggattgccacatgccactatcttccgacacatggcaaaccctgaaactctgaaatgtcaattctaattctttcttattcattaactccagactgatcaccaagtcttgccaattccatctgcatgcttcttaaaactgcccaggaagctccaggtctaccccttttgccagcatgttcatgatacggcatcgtgatgtgctgcttctcattttccacttcatttttctatctctcccactaggctccaagcactraaaggcagggctgagtctcctttgtctctgggtgccccatgcctagcacagatcctgacatagcaccggggctcagcaaatgttggctaaataaaggaacaaacatgttatgtatgacagtagatgcgtgaaccctctaaaagaaataatagagcaatacaaacagaatagtattggctctggtcttcaaaagccttttttaaattcatgtgcctgtttctggctgttctctttgctccaattagacacattcttttc

SEQ ID NO: 393295 - DNA, 524 bp, Homo sapiens
cccataacactcagatccttgtaaccagagacttactgatcattcttttcttacactgaattggcaagctagtaatgtaacatatcaaaacaaaaccacacattaaatcatcatcaataagaatatcctgaattatgagtaggwctatataattataataaattaaaatagaaaaaagaattcaaatcatgtcattaagcctcttattttatagaagagaaagctgagatcctccaaatgatgttacttattcaagatcacccagtaattcaattatgactcacaaataccattttatttgttggaaatgttcaacaacattgactcctggttagaaaagctagattttaaccctgacactaattgctggaaaatcttctaagtcatatggcttctttcagccttagcttcttctcttagaaataataccaaaaaggaaattgatgccaccctctgaccacctgtgcagctcatgtaacataatatgggtaaaaaatatcttgtaaacattttcttacatgcct

SEQ ID NO: 393296 - DNA, 582 bp, Homo sapiens
atttgttgacttgcattctagatggtcacagaaaatccaatggagtctttaagtgttcacgtaaaggttatccagaaaaccctttggagttaatttgtcctgtgctcttggtaaaacatggcttctatggtaggaagaggggaaaagtctatattttaaatggtttcatggactgccaagaactgttataaaacaatattttgatgagttacacagtacatgaatcagaaacatatgagattaatttccctgaaaatacatgtgggtttaaaaatgaaaggaaaggaatgttggcacaatgtgctaygccaaaccgaaaatgttagaaaaatattttatgatattaggatgcacaaatcctaaaagcagctcaatttgctcatctttcagtggcctgctcccaatgtacctgttgtgtctggtcctctacagtgagaataagtaaaacctaaacaagaaatttaaaagccatggtataagacaaggagccagaagttccaagtcttgggcctggttctgccactggctagctgtggaagtctagattaatcacttaatcttcctgggcctcaactcaggaaa

SEQ ID NO: 393297 - DNA, 509 bp, Homo sapiens
tgtgctaactcccaactcatcactcaggtctaatccttctactaaaatcgctatcctcttatttatggaaaatctgagaccaactagcattagttaaccaatagtattctcatctgtatatctacttcttcccatacccattggtatcagttayctgtttcaatgcaacaaattaccccaaaacttagaagattaaaacaacaagcatttatctcatagagtttcaaggacagaaatccaggactgacttagctggatgatattggacatgggtagacagggtctaccatggtgttgcagtcaagctatcaactggaactgcagttaggtgaagccttgacagggcagagggagcctcttccaagctctctcatgtggttattggttgggctattgacctctggttttcacaatgtaggcctctccctaggttgtctgagtattctcatgaaatggtagctggatttccccaaagtgttatggactgaactgtgtcccctcaaaacctt

SEQ ID NO: 393298 - DNA, 649 bp, Homo sapiens
gtgtgttattcatctctgtgtccctgtgcctagcatggtgcctggcacagagcgggtgctccataaatatttgttgaactgaattgaactaaactttccaaccaactccctctttataaacacygcaatggttttctctgagtcagaaggtatggtggtagttcatctcttggtagaaagcagtgatagtaagaaattctccaagggttgaattgttatggggacagtaggttcaattacctcagaaactgttcagttactctgccatggacccaatgtctattaaacgagcctttcattaccatcagctctttgctgttgtcctactacctccccccaaataactaaatcatgtctccatgtgcctagctgctggctgacgtcctgctgtgacacatctctcagtgccctaacacagatctgcctcacaacattaaccactgacaaccatgtatcttttgcttatatgatctatgcattgggttagacccatacactcaccgccctacctctgagcatgggagagcctttggatcttgtgcttcagacaaacttctgctttgcggtagcacccagtttctgagtctactcaacaccactttgttctcctaccttttcccaccctcattccccttcatcatcatgcatc

SEQ ID NO: 393299 - DNA, 634 bp, Homo sapiens
tccacccattggcctgatgggagaacttttttaccccttaatgctactgttttcttagtttttaaccttttaatacttaataattctctaaaagaccatcctgagaggaaagaaggggacaccttacgacttcattgtgttagcaattgaggattctgagattcctaatttcagaatttccagtcagtggtgttggcatgtcatacagaaacgtaattgagcatgttcatgttaattactttgaagtgctttcctcttttccagtgctttacaaaaacacagcaacttaaattgggtcattatttcatgygtctaagatcctactcggctacttaagggagccatggaaatgcagtcagaagaattaatttaaaatggttccaatatttccccataaaggaaaaatgtaaataaaaaaatatattggcaatgtaattactagaaatgggacttataataatgatgataataaacaaaacaccatctttaaattcccctttcaattcactaatatattttgggtgccagcaatgtctagacatctccagttttatttaccttgcatcttgtttaattctctcaacaatcccacaaaatatggaatcatcatgcctctgaggcacagagaggttaa

SEQ ID NO: 393300 - DNA, 567 bp, Homo sapiens
ttctccctctcttaggagcacagtgatgggcatctgatagatgcatagtatctgttgagtgaatggatggattgatcaataccttctgattcttcctgaattgctaacttaactccatttccatctctgctaccctgatcaatctgttctggaggaccatggtctctgcagatacactctttaaaaccaccagacaggcccaagtgcttgcctgtsaggattgagtatccacttgaattttatcactttactgaaaatctgtaacaccttctatctggttcatctgaaattgaagacacctgacttcacatctagcagctgataatttgaggatggtttttaaatttatataagaaccagacaaagcaacattcaaaacttcttcttaagggtggatggttaatggtcaaaaattaggaaaaacttgttactaacaagttggactaaggaaaatcacttctgacatatccaagacatcctagccagcaggaatgatattcgaggagatgagtgatttcaacaccaaatgacatcatttttggcatgttgtggtaatgtccataagac

SEQ ID NO: 393301 - DNA, 545 bp, Homo sapiens
atctgtaacaccttctatctggttcatctgaaattgaagacacctgacttcacatctagcagctgataatttgaggatggtttttaaatttatataagaaccagacaaagcaacattcaaaacttcttcttaagggtggatggttaatggtcaaaaattaggaaaaacttgttactaacaagttggactaaggaaaatcacttctgacatatccaagacatcctagccagcaggaatgatattcgaggrgatgagtgatttcaacaccaaatgacatcatttttggcatgttgtggtaatgtccataagacatcattcttgccttttaaaatatctttgtaagaaataaaaatgcaagatgactgaggtgatttttctacatgtacatatctgagcaagtgggaagaacaaaaacactctttgggcaaccttgcctgcctgttagaaattagttcaaattaagttttgatatactctctgctccaaagtgcttttagacatggtactttggagctaaaatgaaaatacaaccaactttgctttgg

SEQ ID NO: 393302 - DNA, 430 bp, Homo sapiens
tttttgttacctggtacataaaaagtgacttatttgattctgcatactgttatcataaacattatacacttatcttagtttgcagggctttcataacaaagtgtcacagactggwtgtcgtaaacaataggaatttattttctcacacttttggaagctagaagttcaagatcaagatggttgtttttttctgaaggctgtgaagggaagatctgttctaagcctctctccttggcttgttgagagccatcttctctgtcttcacataatttttcctctgtgtatgtctgtgtttacatttcctttccttataaagacagctctcatattggattaagatccacccttatgacctcattttagtttaattatcattttaaagaccctctctccaaatatggtcatattattaaatgctagggggtaggac

SEQ ID NO: 393303 - DNA, 557 bp, Homo sapiens
gcttggcagctagatcccgagcaccctgcaagcttgccattttttctttcttccrgaaaataacatcttgacataacatggccattgtaagaattaagtgagtgagtacactttgtacactctatagaaaagttagaattttaaagatgggccccttttcttaatggcaaacttaaagcacaaacataatattttaaagaaatgaaagcaaacctgctcagttcaaagaggcagtgaggagtgcagctggaagatggtgctgaaatcgcacaccaagcccccacctctactaactgaagttttgtagtaactttggggctactattgagcatattttttaaataattactttagggtcctagacaaatgctagttatattttattatatttttgtttttgttgtatttatattttttcaccactcttctcctttattattactttttattgtttcttgagccatgtgaggtagaatcacttattgttttcagtttttaaatgtgtagaggctaaaatccagggtggttaaataacttcctgatatcctgtggcctag

SEQ ID NO: 393304 - DNA, 557 bp, Homo sapiens
gcttggcagctagatcccgagcaccctgcaagcttgccattttttctttcttccggaaaataacatcttgacataacatggccattgtaagaattaagtgagtgagtacactttgtacactctatagaaaagttagaattttaaagatgggccccttttcttaatggcaaacttaaagcacaaacataatattttaaagaaatgaaagcaaacctgctcagttcaaagaggcagtgaggagtgcagctggaagatggtgctgaaatcgcacaccaagcccccacctctactaactgaagttttgtagtaactttggggctactattgagcatattttttraataattactttagggtcctagacaaatgctagttatattttattatatttttgtttttgttgtatttatattttttcaccactcttctcctttattattactttttattgtttcttgagccatgtgaggtagaatcacttattgttttcagtttttaaatgtgtagaggctaaaatccagggtggttaaataacttcctgatatcctgtggcctag

SEQ ID NO: 393305 - DNA, 557 bp, Homo sapiens
gcttggcagctagatcccgagcaccctgcaagcttgccattttttctttcttccggaaaataacatcttgacataacatggccattgtaagaattaagtgagtgagtacactttgtacactctatagaaaagttagaattttaaagatgggccccttttcttaatggcaaacttaaagcacaaacataatattttaaagaaatgaaagcaaacctgctcagttcaaagaggcagtgaggagtgcagctggaagatggtgctgaaatcgcacaccaagcccccacctctactaactgaagttttgtagtaactttggggctactattgagcatattttttaaataattactttaggrtcctagacaaatgctagttatattttattatatttttgtttttgttgtatttatattttttcaccactcttctcctttattattactttttattgtttcttgagccatgtgaggtagaatcacttattgttttcagtttttaaatgtgtagaggctaaaatccagggtggttaaataacttcctgatatcctgtggcctag

SEQ ID NO: 393306 - DNA, 460 bp, Homo sapiens
tgagcatattttttaaataattactttagggtcctagacaaatgctagttatattttattatatttttgtttttgttgtatttatattttttcaccactcttctcctttattattactttttattgtttcttgagccatgtgaggtagaatcacttattgttttcagtttttaaatgtgtagaggctaaaatccagggtggttaaataacttcctgatatcctgtggcctagcatttcttaaaatgatctatagggggataattttttttaattttcaattttcatgaactgatgcatttgtgaaacacagtaaacatgaattactagacaaagaaggcctataaaaaataagcctaattttttattagyttcaacagacagaaaataattctactgaatttctataaaggtttctataagtctattctcattgcatatggttaaactgtatgcgaccca

SEQ ID NO: 393307 - DNA, 585 bp, Homo sapiens
acaatttgtttaaccaatctctcttcaattttatttgtttccatacctttgtttttgtcattataaattaggctgcagtaaatggcattatacttaatctttgaatacatccatgactatttctttaggccagttttattttttataggatagaatttcagagctggaatgacccttaaagattattatgtaaacgtattggccagatggaagaaagggaccagagagtttagtgtcttgccagaggacaaagagaaagcaagagaagcaagtcaaactctccatctattaaaatgtgaccttcccaaagcccaaccacaatttcacacccttccctgaccaacttcacccacactgacctctccttcccctgaaatccwagagcctgcagtgtctgggtcactccttcggcccttggccacaatctttttattcttctactaaatatttagttgctcatccaaccacaagcttcctaaaggtggttctggattttatattcccctgtattctgtagcatagtactatatgcatatagataagcatttcacaaatatctgctaaaggactaaagatacctatgaa

SEQ ID NO: 393308 - DNA, 585 bp, Homo sapiens
acaatttgtttaaccaatctctcttcaattttatttgtttccatacctttgtttttgtcattataaattaggctgcagtaaatggcattatacttaatctttgaatacatccatgactatttctttaggccagttttattttttataggatagaatttcagagctggaatgacccttaaagattattatgtaaacgtattggccagatggaagaaagggaccagagagtttagtgtcttgccagaggacaaagagaaagcaagagaagcaagtcaaactctccatctattaaaatgtgaccttcccaaagcccaaccacaatttcacacccttccctgaccaacttcacccacactgacctctccttcccctgaaatcctagagcctgcagtgtctgggtcactccttcggcccttggccacaatctttttattcttctactaaatatttagttgctcatccaaccacaagcttcctaaaggtggttctggattttatattcccctgtattctgtagcatagtactatatrcatatagataagcatttcacaaatatctgctaaaggactaaagatacctatgaa

SEQ ID NO: 393309 - DNA, 589 bp, Homo sapiens
agaagtttagctgatgagttagagctctctgagaaacacaagatctggaattagaatagcaggcttggggacaaaagatgggattcaagttttagctctgcccttctgtgtgaaacagggcaatgccattaacgaattagggactcttgtgtgaagtaaggataataatactcatcttgccaacttcatatgagaacatggatgtgaaagtactttatagtrataaaggtggtccgtgagagttatgattgctgttgtattctcatgtagctgcttctgtgaatcccagaatggcctcctgaccctcgcttctcaggaaccatttcccagtttctactccacacacatatccttaaagaaatctatggctgcactcttcaggtaagaataagtgttttcttgaagcagaacttctttttttttctctttgagacagggcctcactctgtcacccaggctggactgcagtggcgcaaccttagcttactgcaacctccacctcctgggctcaagccatcctcctgccccagcctcccaagtagctgggaccacaggcacgcaccaccacacccagataattttttttata

SEQ ID NO: 393310 - DNA, 575 bp, Homo sapiens
attttacaatagttgggatctttcacagattcgttcayttgaacatcatagcagccctatgtagaatgcaggcaggttttaataccagacttcagagttgaggaaactgaggcctaaacaggtaaagtgacttaatcaaggtcaacaaactaggaaggcacccagatctgccatccaactctcattaaaagcacctccagccaggaaaccatgaatctcagatgagacacctgcaggtcactgagcctggataaagtcacccaggagtcccatgaagttcctgagaacaatgatcgggaacattaagcagcttgggaaaggtttctagaatgcagcaccatgagcctgagacacaggtacccttgccaactctcccagattagaacaggttctcttggactctttccaagtgcctctgactaacagagaaaagtatttttccatcacaaacactgcaggcaggcatcagacagactcctgagaggggagggcagagaacacatcccagattcccatacagacaatctataaagttattctgataccatgtgaactgccttagctaagcacctacc

SEQ ID NO: 393311 - DNA, 573 bp, Homo sapiens
catggcaaggaacatgaaaccattagggctttaccacatttgtttatttacaggtccacggagattgcaagcagacccagctaacatctcaactgtaacttcatgagagaccagctaagctgttcctaaattcctgactctccgaaactgtgacataataaatgtttgctgttttaagctgctaaggtttgcagtaatttgttacacagcaatagataactaatgaagatcttttcttcaaagcaaatatcccccattcatcagccatcactggatttcaaattcccttcccctcctggtcttcacttctctaaatatgctctagttgttcaatctttctcttttaaaggaactctatagcataatcataaccccattaaggcttaycacatttgtttatttacaggtccacagtgtctttctaaactttaggaccctcaagggcaggacctgagtcttatatacctttatgcccagggcctaagcaccaaatccacaacaaaacacaacatcccagatgcaggctgaacagcagaaagggctgagctttggccttccttcttctggaaacta

SEQ ID NO: 393312 - DNA, 624 bp, Homo sapiens
tactagctatgtgatcttggacaagtcatttaacctctgtggtctgtttcttaatctgtaaaatgggattcacaataatcattcagggttgatttaattatgtaacttaatgatagtgcctaaagcagttttatacagagtcagctctcaataaataaattctccccaacctttcaacttttgttcattctctttgcgggcttttttctcccctttttagttaggcagcctgtatttggaaatcttatttctgtattaacttaaaaaaattccaaaccttttattatgtgatattgtttatgatacgactttggaaacttgtgacattttactaaaaaataacaaactatacagtcaagttttaatgtttatttacgctaggaactatatgagtagtctttgatattagagtgcatgctttatttttggacagtggtcagactaaatattccaaaggtgacaataaaattaaattgtataccagtcattttaatactgaagatttttaggcatcataattaaaatgtagatcagggaggtatccaagaggtcatctrttgcggttctctcattttatagatgggaaaactgggtgcctaaagcagaagggacctgttcaaggcc

SEQ ID NO: 393313 - DNA, 590 bp, Homo sapiens
gaggtggttggattcatttattctattgttcattcaggcagcagatatttattgagtgcctactttgtgttgggcattattctaggacacaagaatgagtgaaatagccagtccccagtgtcatggagctggctctctggaagaggagrcacacattaattaaacagtcctaatgagtgtgcatttataaactgaggtaaatgctcccaggatgaggaacatggtcctctgagattgttgcacagaggaacctgatctgagttgagtagtgggcagagttgaagatgagtaggagttgactaggtgaatggggtcagggtagtagagatagctggggacaaagggaaccagtatggaggctgtattagtctgttctcacgctgctgtgaagaaatgcctgaaactgggtaatttataaagaaaagaggtttaattgactcacagttcctgcatggctggggaggcctcaggaaacttacaatcatgacagaaggcaccccttcatagggcggcagcagagagaatgagagccagcaggggaaatgccagacacttacaaaactatcagatctcatgagaactcactatca

SEQ ID NO: 393314 - DNA, 600 bp, Homo sapiens
ctagtggggaaggcaacattaaacaaacaactgcagtaagtgaataatcactatgtgtaaagtgacatgaaacagaaataccagatattctgacagcattgaacttgggggacctaactgagtttaagggctcagggacacacaaagatttattgtttataggaactaaaaattataaataagccacttgtcctaatataggggatgttgaattgtgatagcagaacaccactgtggttaagctctggtctccagagacaggccacctggattcatatccttgctctgtcagttattacctgggtgatcgtgggcaaattgattaatctctccacacttcakgatttatgtccataaaatgagaactctacctacctcatagggtcattgtgagcattagtagagttaatatctctaaaatgcttaggatggtacagtacaaagtaagtgaacaatagatgttagctatgttaataatcatatgacatactattatatagctgtttgcaaagaatatttcaaagaattaaaaatcttaaatatagatagtctagaagagcttgtaatgaaaagcatcagttttcttacctaacacatacc

SEQ ID NO: 393315 - DNA, 600 bp, Homo sapiens
ctagtggggaaggcaacattaaacaaacaactgcagtaagtgaataatcactatgtgtaaagtgacatgaaacagaaataccagatattctgacagcattgaacttgggggacctaactgagtttaagggctcagggacacacaaagatttattgtttataggaactaaaaattataaataagccacttgtcctaatataggggatgttgaattgtgatagcagaacaccactgtggttaagctctggtctccagagacaggccacctggattcatatccttgctctgtcagttattacctgggtgatcgtgggcaaattgattaatctctccacacttcatgatttatgtccataaaatgagaactctacctacctcatagggtcattgtgagcattagtagagttaatatctctaaaatgcttaggatggtacagtacaaagtaagtgaacaatagatgttagctatgttaataatcatatgacatactattatatagctgtttgcaaagaatatttcaaagaattaaaaatcttaaatatagatagtctagaagagcttgtaatgaaaarcatcagttttcttacctaacacatacc

SEQ ID NO: 393316 - DNA, 595 bp, Homo sapiens
atattggttcatggttctttagtctgtacaggaagcatagtggcttctgcttctggggaagcctcaggaaactttcaatatggcaaaggcagagggggagtgaggcatctcacatggtgggagcaaggacaaaagagagtgaggggggaggtactgcacacttttaaataaccagatctcaaaagaattcactcactatcacgacgacagtaccaagggggatgctgttaaacctttcatgagaaacagccttcctgattcaatcacctccctctaggctccactcccaacattgggaattayaattgaacatgaaatttgggtggggacacagatccaaaccatatcaacttctatcaaagaagagaatgacttgaataaaacgagaaagtagatttccagcattgaatggttccaaagggagtaaaataattgtgacaggatgtgatcattggccctcaatttctgcctgaagaagagtaggaaaaaggaggtctggacatcacatgccctgctttatgaagcagctcctccaagtacaccatgaccagtggctgtggatggttgacaactcccctcctcttccccctcttct

SEQ ID NO: 393317 - DNA, 550 bp, Homo sapiens
acaatacctcaagcatctgcatcaacttcaggaccctatgtgrggtcacaaattatatttttaaatatataaaatacatcatatttaagttatgctaaacaaataacaataatgtttccagctaatgagagttaaccatggtgccctaatgtctggcttcagttgtcggctgcagagtggagatggtcctagagagaaggaacaaagaaaatgcacatgttttgggtgggatgaaagaagagtgggaataatttcaattataaatattctttttttttaacttcaggtgactatccagcaggcagtcaggtatacatacctgggattcatgggtattgtcagagctggagatacagatttgagagttgtaggtgagagaaaagatcacctaattaaagtgtgaagagagagtttagataagatgaaaatctgggaacactttgcatttaagggttaagcacagtagatttagaaagggagacagacagagaatgttgagtatgacttgatctaaggggaaagcatcattagaacgagagacattaaagac

SEQ ID NO: 393318 - DNA, 514 bp, Homo sapiens
tttcactgaataattggtgtctgagtacattattcatccctcgtgcagctggggtctgcaggacagacccccacaaacaacaatttgcaaaagcaaacttccctgttttgtttttttccmaagatgataaattagaggcttttagtatgcctcggccacttagaaatagcaagagagtgcacaaaggtcaactctgtgagctctaagtcaagaaggaaaatgggaatccaccagaatcatgaaggacatcatagatcccaagaaggagaatgtgagcaaacagtcaacatgacagcaaccagcttataaaagtgagcgaagtcctagtatgtgagagaggcagagagcctccctctgtaactgacattttcactgtgaatctgagcaaccccagccaagttgttgcattttgtttctcccaaggcctggagtcaacatggggagaggcttggagatgctgtgaagcaaagacactgggaacagctgcagacattttcccagaccaggaagtaag

SEQ ID NO: 393319 - DNA, 514 bp, Homo sapiens
tttcactgaataattggtgtctgagtacattattcatccctcgtgcagctggggtctgcaggacagacccccacaaacaacaatttgcaaaagcaaacttccctgttttgtttttttccaaagatgataaattagaggcttttagtrtgcctcggccacttagaaatagcaagagagtgcacaaaggtcaactctgtgagctctaagtcaagaaggaaaatgggaatccaccagaatcatgaaggacatcatagatcccaagaaggagaatgtgagcaaacagtcaacatgacagcaaccagcttataaaagtgagcgaagtcctagtatgtgagagaggcagagagcctccctctgtaactgacattttcactgtgaatctgagcaaccccagccaagttgttgcattttgtttctcccaaggcctggagtcaacatggggagaggcttggagatgctgtgaagcaaagacactgggaacagctgcagacattttcccagaccaggaagtaag

SEQ ID NO: 393320 - DNA, 528 bp, Homo sapiens
  misc_feature (1)...(528): n = A,T,C or G
agtgcagcaagggtggagggaggtgcccgcgctgggtcggaggagcaggaggagtaaggagggaagactcctgggtggcatggagctcttgcacctctaggcactgcccagccctgtgtcagccagggctgaacccccacaggataaggaagcctgtgtgtgtaccaacaatcaaagctacatctgtgacacaacaggacactgctatgggcagtctcagtgttgtaactactactatgaacattggtggttctggctsgcgtggaccatcaccatcatcctgagctgctgctgtgtctgccaccacagccaagccagccctcaagtccagcagtagcaacatgaaatcaacctgcctgcctatccagaagcccgcaattactcagtgctaccattttatttcaccaaactatttattaccttcttatgaggaagtggtgaactaacctccacctgtttccctccctgtctgtccattgtggatgagctctnnnnnnnnnnnnnnnnnnnnnnnnnnnnnnnnnnnnn

SEQ ID NO: 393321 - DNA, 528 bp, Homo sapiens
  misc_feature (1)...(528): n = A,T,C or G
agtgcagcaagggtggagggaggtgcccgcgctgggtcggaggagcaggaggagtaaggagggaagactcctgggtggcatggagctcttgcacctctaggcactgcccagccctgtgtcagccagggctgaacccccacaggataaggaagcctgtgtgtgtaccaacaatcaaagctacatctgtgacacaacaggacactgctatgggcagtctcagtgttgtaactactactatgaacattggtggttctggctcgcgtggaccatcaccatcatcctgagctgctgctgtgtctgccaccacagccaagccagccctcaagtccagcagtagcaacatgaaatcaacctgmctgcctatccagaagcccgcaattactcagtgctaccattttatttcaccaaactatttattaccttcttatgaggaagtggtgaactaacctccacctgtttccctccctgtctgtccattgtggatgagctctnnnnnnnnnnnnnnnnnnnnnnnnnnnnnnnnnnnnn

SEQ ID NO: 393322 - DNA, 479 bp, Homo sapiens
atggggtgtcgcctcacccgggaagtgcaaggggttgggggaattccctcccctagccaagggaagccccgagggactgtaccatgaggaacggtgcactccacccagaaactatgcttttctcacggtcttcacaatccacagaccaggagattccctccagtgcctctgccaccaaggccctaggtttcaagcacaaaactaggcagctgtttgggcagacaccgagctagctgcaggagtttttttttttttttcatgccacaatggcaactggaatgccaacaagacagaaccattctctctcctggaaagggggctgaagccagggagccaagtggtctggctcggcgggtcccacccmtacagagcccagcaagctaagatccactggcttgaaattcttgcacagcagtctgaggttgacctaggacactcgagcttggtggcgggaggggcttccacattgccaaggcttg

SEQ ID NO: 393323 - DNA, 553 bp, Homo sapiens
ctctttcctgagttagagcagggaactgctctgagtgttaactgttggattcactgcagtgtyctacaatattttacaagaagatgaacaggcaacctgcagacctaagcttgattcccaagtcacagtctgacccctgctacaggaggttaccctcctcaggaagagatagaaatagggaatttgaaggaatagtgaggggaccagggagatttgattgagtctggtttccaggtgaattaaaaggaagggtgtcatccagggtttgttactacagtcaaaagaataaataaatcaatgaagaaataccttcattgtctgtggttttcatgcagatatactcatggaggttgtatctctccaaaaacagacaaatccaaggctgtgaacaagcatccgcatttgaattccattaaaccaaaatctatgttgaacgaagtgaagtctgtacacagcattgcaaatgtgaacacattcctgtgtgaggcacatcaccatttgtcagttattgtgaatatgtgtatttttaagcaataagatgcagctggtcagt

SEQ ID NO: 393324 - DNA, 504 bp, Homo sapiens
ttcactgcagtgttctacaatattttacaagaagatgaamaggcaacctgcagacctaagcttgattcccaagtcacagtctgacccctgctacaggaggttaccctcctcaggaagagatagaaatagggaatttgaaggaatagtgaggggaccagggagatttgattgagtctggtttccaggtgaattaaaaggaagggtgtcatccagggtttgttactacagtcaaaagaataaataaatcaatgaagaaataccttcattgtctgtggttttcatgcagatatactcatggaggttgtatctctccaaaaacagacaaatccaaggctgtgaacaagcatccgcatttgaattccattaaaccaaaatctatgttgaacgaagtgaagtctgtacacagcattgcaaatgtgaacacattcctgtgtgaggcacatcaccatttgtcagttattgtgaatatgtgtatttttaagcaataagatgcagctggtcagt

SEQ ID NO: 393325 - DNA, 504 bp, Homo sapiens
ttcactgcagtgttctacaatattttacaagaagatgaacaggcaacctgcagacctargcttgattcccaagtcacagtctgacccctgctacaggaggttaccctcctcaggaagagatagaaatagggaatttgaaggaatagtgaggggaccagggagatttgattgagtctggtttccaggtgaattaaaaggaagggtgtcatccagggtttgttactacagtcaaaagaataaataaatcaatgaagaaataccttcattgtctgtggttttcatgcagatatactcatggaggttgtatctctccaaaaacagacaaatccaaggctgtgaacaagcatccgcatttgaattccattaaaccaaaatctatgttgaacgaagtgaagtctgtacacagcattgcaaatgtgaacacattcctgtgtgaggcacatcaccatttgtcagttattgtgaatatgtgtatttttaagcaataagatgcagctggtcagt

SEQ ID NO: 393326 - DNA, 534 bp, Homo sapiens
cacagtctgacccctgctacaggaggttaccctcctcaggaagwgatagaaatagggaatttgaaggaatagtgaggggaccagggagatttgattgagtctggtttccaggtgaattaaaaggaagggtgtcatccagggtttgttactacagtcaaaagaataaataaatcaatgaagaaataccttcattgtctgtggttttcatgcagatatactcatggaggttgtatctctccaaaaacagacaaatccaaggctgtgaacaagcatccgcatttgaattccattaaaccaaaatctatgttgaacgaagtgaagtctgtacacagcattgcaaatgtgaacacattcctgtgtgaggcacatcaccatttgtcagttattgtgaatatgtgtatttttaagcaataagatgcagctggtcagttttctgggcaatcttggtgaggcatttcctgtgctgtggttgttctctaaccactgtgagaaacccaaataaaaatcgatcccccccaaaacaagtacatatca

SEQ ID NO: 393327 - DNA, 534 bp, Homo sapiens
cacagtctgacccctgctacaggaggttaccctcctcaggaagagatagaaatagggaatttgaaggaatagtgaggggaccagggagatttgattgagtctggtttccaggtgaattaaaaggaagggtgtcatccagggtttgttrctacagtcaaaagaataaataaatcaatgaagaaataccttcattgtctgtggttttcatgcagatatactcatggaggttgtatctctccaaaaacagacaaatccaaggctgtgaacaagcatccgcatttgaattccattaaaccaaaatctatgttgaacgaagtgaagtctgtacacagcattgcaaatgtgaacacattcctgtgtgaggcacatcaccatttgtcagttattgtgaatatgtgtatttttaagcaataagatgcagctggtcagttttctgggcaatcttggtgaggcatttcctgtgctgtggttgttctctaaccactgtgagaaacccaaataaaaatcgatcccccccaaaacaagtacatatca

SEQ ID NO: 393328 - DNA, 504 bp, Homo sapiens
ttcactgcagtgttctacaatattttacaagaagatgaacaggcaacctgcagacctaagcttgattcccaagtcacagtctgacccctgctacaggaggttaccctcctcaggaagagatagaaatagggaatttgaaggaatagtgaggggaccagggagatttgattgagtctggtttccaggtgaattaaaaggaagggtgtcatccagggtttgttactacagtcaaaagaataaataaatcaatgaagaaataccttcattgtctgtggttttcatgcagatatactcatggaggttgtatctctccaaaaacagacaaatccaaggctgtgaacaagcatccgcatttgaattccattaaaccaaaatctatgttgaacgaagtgaagtctgtacacagcattgcaaatgtgaacacattcctgtgtgaggcacatcamcatttgtcagttattgtgaatatgtgtatttttaagcaataagatgcagctggtcagt

SEQ ID NO: 393329 - DNA, 534 bp, Homo sapiens
cacagtctgacccctgctacaggaggttaccctcctcaggaagagatagaaatagggaatttgaaggaatagtgaggggaccagggagatttgattgagtctggtttccaggtgaattaaaaggaagggtgtcatccagggtttgttactacagtcaaaagaataaataaatcaatgaagaaataccttcattgtctgtggttttcatgcagatatactcatggaggttgtatctctccaaaaacagacaaatccaaggctgtgaacaagcatccgcatttgaattccattaaaccaaaatctatgttgaacgaagtgaagtctgtacacagcattgcaaatgtgaacacattcctgtgtgaggcacatcaccatttgtcagttattgtgaatatgtgtatttttaagcaataagatgcagctggtcagttttctgggcaatcttggygaggcatttcctgtgctgtggttgttctctaaccactgtgagaaacccaaataaaaatcgatcccccccaaaacaagtacatatca

SEQ ID NO: 393330 - DNA, 405 bp, Homo sapiens
aataccttcattgtctgtggttttcatgcagatatactcatggaggttgtatctctccaaaaacagacaaatccaaggctgtgaacaagcatccgcatttgaattccattaaaccaaaatctatgttgaacgaagtgaagtctgtacacagcattgcaaatgtgaacacattcctgtgtgaggcacatcaccatttgtcagttattgtgaatatgtgtatttttaagcaataagatgcagctggtcagttttctgggcaatcttggtgaggcatttcctgtgctgtggttgttctctaaccactgtgagaaacccaaataaaaatcgatcccccccaaaacaartacatatcacaaaaccatagtaatcaaaacaatatgacacttgcacaaaaacagacacatt

SEQ ID NO: 393331 - DNA, 663 bp, Homo sapiens
aatcaaaacaatatgacacttgcacaaaaacagacacattgaccaggggaacagaataaggagcccagaaataaactcatgcatttatgaccaataaatttttgacaaaggtgcccagaaaacgtaatgaagwatagacatttgtttcaataaatggtgttaagaaaactagatatccacatgcagaagaacacgaatgtgtatggtgtgtatccttatctcacaccatacacaaaaatcaattcaaaatggattaaaggtttaaacataaaactgtaaaactactagatgaaaacataggggaaaagttccacaatgttggtttggtcaaagatttcttggatatcacccccaaagcacaggcaacaaaagcaaaaatatatgggattgcatcaaactaaaaagcttctgcacagcaaaggaaacaatatggtgaagagacaacctacaagttgtgagaaaatatttgcagagcatacatctgatgaaaggctaatctccaaatatataagggactcaactcaatatcaagaaaacaaataaccaagtcaaaaaatgggcaaggtcctaaatagacatttctcaaaaaaaatacaaatgactaacataaaaaaagtttgtcatcctaattatcagggaaatgcaaattaaaatgacagtgag

SEQ ID NO: 393332 - DNA, 663 bp, Homo sapiens
aatcaaaacaatatgacacttgcacaaaaacagacacattgaccaggggaacagaataaggagcccagaaataaactcatgcatttatgaccaataaatttttgacaaaggtgcccagaaaacgtaatgaagaatagacatttgtttcaataaatggtgttaagaaaactagatatccacatgcagaagaacacgaatgtgtatggtgtgtatccttatctcacaccatacacaaaaatcaattcaaaatggattaaaggtttaaacataaaactgtaaaactactagatgaaaacataggggaaaagttccacaatgttggtttggtcaaagatttcttggatatmacccccaaagcacaggcaacaaaagcaaaaatatatgggattgcatcaaactaaaaagcttctgcacagcaaaggaaacaatatggtgaagagacaacctacaagttgtgagaaaatatttgcagagcatacatctgatgaaaggctaatctccaaatatataagggactcaactcaatatcaagaaaacaaataaccaagtcaaaaaatgggcaaggtcctaaatagacatttctcaaaaaaaatacaaatgactaacataaaaaaagtttgtcatcctaattatcagggaaatgcaaattaaaatgacagtgag

SEQ ID NO: 393333 - DNA, 627 bp, Homo sapiens
tttatattgttattgttgcaccaactcctttccaccaggcagattctcataaagactattttctcttttacatgaagcatttcctacacacctcttaatcacggtagcattgacgtcattccaccagattctatctccagtgttaaaataatcaagaacccagaaatctccaccagggggcaaccaatgcgtatcaaagtttcccactttcctttagatttacttatgggtaacttatgggaaaaaatacttaagtacttccctttttaaagaaaaaaattatatgaattctacaaaattatggcagaaaatttaagaagagcagatgcttcccaactcattctaaagggccagcattaccctgattctgaaaygaaaaagctttacaaaatccaagatccattcctgactaaagataaaagaaattttcagcaaactgtgaatacagaaaactttctcagcctgttaaagagtacctatgaaaaaaattatagctaacattatacttaatgatgaaatatttaatatatttcataacaggaacaagtcaaagatgtctactctaactaattctactcagcattcaacaaaatgaatatagtgaattcatactagaattttaaaagc

SEQ ID NO: 393334 - DNA, 528 bp, Homo sapiens
ccaccagggggcaaccaatgcgtatcaaagtttcccactttcctttagatttacttatgggtaacttatgggaaaaaatacttaagtacttccctttttaaagaaaaaaattatatgaattctacaaaattatggcagaaaatttaagaagagcagatgcttcccaactcattctaaagggccagcattaccctgattctgaaacgaaaaagctttacaaaatccaagatccattcctgactaaagataaaagaaattttcagcaaactgtgaatacagaaaactttctcagcctgttaaagagtacctatgaaaaaaattatagctaacattatacttaatgatgaaatatttaatatatttcataacaggaacaagtcaaagatgtctrctctaactaattctactcagcattcaacaaaatgaatatagtgaattcatactagaattttaaaagcaaatgtctttattcactgacaacataatcatctataaagaaaatcctacataacctataaaaaactgatg

SEQ ID NO: 393335 - DNA, 548 bp, Homo sapiens
aaaaagaaagaaaagaaagaaagaaaagcaagcaagctttaaaagttcatgtttggtaggctgtacttcaagatacacttttaaaaaaaaagactccttcagatacaaactaaaaaacactagaaagtaactcaaaaccacataaagaaataactccagtaargataactacataggtaaatataaaagcaattatcatattttttgtaagtctttttaaatattctatatgttttaaaacaaatgtgtaaaataatgactataaatctatgttaatgaagcatgatgtataaagatgtggtttgtgaaattaccaacataaagaaattcataggaaactaaataataatagagattttgtatactattgaagttgtttcaatttattctaaattgttccaaattaagaatgttaattgtaaatccccatggtaaccactaagttaatatcttttgaaaatacagaaaaggaaagcagagggtaaacacagtgatatgctacaaaatagcaactaaacacaaaagaaggcgataattgaggaaattag

SEQ ID NO: 393336 - DNA, 548 bp, Homo sapiens
aaaaagaaagaaaagaaagaaagaaaagcaagcaagctttaaaagttcatgtttggtaggctgtacttcaagatacacttttaaaaaaaaagactccttcagatacaaactaaaaaacactagaaagtaactcaaaaccacataaagaaataactccagtaaggataactacataggtaaatataaaagcaattatcatattttttgtaagtcttyttaaatattctatatgttttaaaacaaatgtgtaaaataatgactataaatctatgttaatgaagcatgatgtataaagatgtggtttgtgaaattaccaacataaagaaattcataggaaactaaataataatagagattttgtatactattgaagttgtttcaatttattctaaattgttccaaattaagaatgttaattgtaaatccccatggtaaccactaagttaatatcttttgaaaatacagaaaaggaaagcagagggtaaacacagtgatatgctacaaaatagcaactaaacacaaaagaaggcgataattgaggaaattag

SEQ ID NO: 393337 - DNA, 548 bp, Homo sapiens
aaaaagaaagaaaagaaagaaagaaaagcaagcaagctttaaaagttcatgtttggtaggctgtacttcaagatacacttttaaaaaaaaagactccttcagatacaaactaaaaaacactagaaagtaactcaaaaccacataaagaaataactccagtaaggataactacataggtaaatataaaagcaattatcatattttttgtaagtctttttwaatattctatatgttttaaaacaaatgtgtaaaataatgactataaatctatgttaatgaagcatgatgtataaagatgtggtttgtgaaattaccaacataaagaaattcataggaaactaaataataatagagattttgtatactattgaagttgtttcaatttattctaaattgttccaaattaagaatgttaattgtaaatccccatggtaaccactaagttaatatcttttgaaaatacagaaaaggaaagcagagggtaaacacagtgatatgctacaaaatagcaactaaacacaaaagaaggcgataattgaggaaattag

SEQ ID NO: 393338 - DNA, 548 bp, Homo sapiens
aaaaagaaagaaaagaaagaaagaaaagcaagcaagctttaaaagttcatgtttggtaggctgtacttcaagatacacttttaaaaaaaaagactccttcagatacaaactaaaaaacactagaaagtaactcaaaaccacataaagaaataactccagtaaggataactacataggtaaatataaaagcaattatcatattttttgtaagtctttttaaatattctatatgttttaaaacaaatgtgtaaaataatgactataaatctatgttaatgaagcatgatgtataaagatgtggtttgtgaaattaccaacataaagaaattcataggaaactaaataataatagagattttgtatactattgaagttgtttcaatttaytctaaattgttccaaattaagaatgttaattgtaaatccccatggtaaccactaagttaatatcttttgaaaatacagaaaaggaaagcagagggtaaacacagtgatatgctacaaaatagcaactaaacacaaaagaaggcgataattgaggaaattag

SEQ ID NO: 393339 - DNA, 581 bp, Homo sapiens
tgaacatggaacattctccagcacagatgatatgttaggccataagataagctcaataaacttaaaaagattgaaatcatgcaaagtatcttcactgaccacaatggaatgaaataagatatcaataacaaaagaaaaactagaaaatttacaaatatttggaaattaaacaacacagtatttaccaaccaatgaatcaaagaacaaatcatgagggaaattagaaaatgtttagagacgattgaaaacaaagatataacaagatgggtgtgatatatcaaaagcagtgctcagagttgtaacacctacattttaaaaaagaracatgtcaaatcaataaccaaactttactcaataaaccataaaaggaagagcaaacaaaatccagagctagcagaaggaaggaaataaacattagagcagagataaatgaaattgagaattaaaaaattatacagagatcaacaaaactaaaagttggttcttttaaaatatcaataaaattaatatacttttacatagactaagcaaaacatctctattcagctgacttttttttacaagggagccaacattattca

SEQ ID NO: 393340 - DNA, 581 bp, Homo sapiens
tgaacatggaacattctccagcacagatgatatgttaggccataagataagctcaataaacttaaaaagattgaaatcatgcaaagtatcttcactgaccacaatggaatgaaataagatatcaataacaaaagaaaaactagaaaatttacaaatatttggaaattaaacaacacagtatttaccaaccaatgaatcaaagaacaaatcatgagggaaattagaaaatgtttagagacgattgaaaacaaagatataacaagatgggtgtgatatatcaaaagcagtgctcagagttgtaacacctacattttaaaaaagaaacatgtcaaatcaataaccaaactttactcaataaaccataaaaggaagagcaaacaaaatccagagctagcagaaggaaggaaataaasattagagcagagataaatgaaattgagaattaaaaaattatacagagatcaacaaaactaaaagttggttcttttaaaatatcaataaaattaatatacttttacatagactaagcaaaacatctctattcagctgacttttttttacaagggagccaacattattca

SEQ ID NO: 393341 - DNA, 617 bp, Homo sapiens
caaactttactcaataaaccataaaaggaagagcaaacaaaatccagagctagcagaaggaaggaaataaacattagagcagagataaatgaaattgagaattaaaaaattatacagagatcaacaaaactaaaagttggttcttttaaaatatcaataaaattaatatacttttacatagactaagcaaaacatctctattcagctgacttttttttacaagggagccaacattattcagtggggaataatagctttttcaacaaaaagtgctgggaatactgaatattcatatgmaaaaaaaatgaagctggacccctacctcacattatatacaaaatctagattggatcaataatgtaaatatacgagtgaaaaccatacatgcttagaagaaaacatggaaataaaacattgctgtggattggcaatgcattcttagataatacaccaaaaatacaagcatgaaacaaacaaatgtagccaaaatgtaccagaatctgaaaacatgtattatctataaagaattagagggaaatttggtgaaagaaatatgggagaatgggatattgctctgtgaatgcttttgtgcataattgtacatttttaattaagtt

SEQ ID NO: 393342 - DNA, 637 bp, Homo sapiens
ctacatactattgcttgaaaaaataaaatatctgcaaaaaattattaaatcttcatgataggattttttctttttatattagtataaatataacaattctgaaacaaatgtatgtgcattgtaagattaagccaatgagtaaatattaatatatttgtattgctagaaccccagattctcactgtgaaaggacagagatacagatatggaataagacaaggaaagaagcagcccactgagttacattagaatcagtattatcaacataaatawgcaatgtgctctctcacatgctctttccttctcttaaaaaatatataatatgtacttattatatattatatgcatagacacacgtgtgtctatacatatcctacatgtacatattgaggattaacaggtgctagtagaaaatattaactttctttgtattaacaggtgttagtagaaagtagtagtaggtgctaagataaaagccataattaaacctcctggtgaatgaacacaccatcacctacaatcttaccaaaaatagaatcaagcacgtgtcctagtcaaacctctggattcaactgtcatttggataaaacgcaaaggatagtgaaaatgtcgatcttcactgagagtctcaccagca

SEQ ID NO: 393343 - DNA, 637 bp, Homo sapiens
ctacatactattgcttgaaaaaataaaatatctgcaaaaaattattaaatcttcatgataggattttttctttttatattagtataaatataacaattctgaaacaaatgtatgtgcattgtaagattaagccaatgagtaaatattaatatatttgtattgctagaaccccagattctcactgtgaaaggacagagatacagatatggaataagacaaggaaagaagcagcccactgagttacattagaatcagtattatcaacataaataagcaatgtgctctctcacatgctctttccttctcttaaaaaatatataatatgtacwtattatatattatatgcatagacacacgtgtgtctatacatatcctacatgtacatattgaggattaacaggtgctagtagaaaatattaactttctttgtattaacaggtgttagtagaaagtagtagtaggtgctaagataaaagccataattaaacctcctggtgaatgaacacaccatcacctacaatcttaccaaaaatagaatcaagcacgtgtcctagtcaaacctctggattcaactgtcatttggataaaacgcaaaggatagtgaaaatgtcgatcttcactgagagtctcaccagca

SEQ ID NO: 393344 - DNA, 637 bp, Homo sapiens
ctacatactattgcttgaaaaaataaaatatctgcaaaaaattattaaatcttcatgataggattttttctttttatattagtataaatataacaattctgaaacaaatgtatgtgcattgtaagattaagccaatgagtaaatattaatatatttgtattgctagaaccccagattctcactgtgaaaggacagagatacagatatggaataagacaaggaaagaagcagcccactgagttacattagaatcagtattatcaacataaataagcaatgtgctctctcacatgctctttccttctcttaaaaaatatataatatgtacttattatatattatatgcatagacacacgtgtgtctatacatatcctacatgtacatattgaggattaacaggtgctagtagaaaatattaactttctttgtattaacaggtgttagtagaaagtagtagtaggtgctaagataaaagccataattaaacctcctggtgaatgaacacaccatcacctacaatcttaccaaaaatagaaycaagcacgtgtcctagtcaaacctctggattcaactgtcatttggataaaacgcaaaggatagtgaaaatgtcgatcttcactgagagtctcaccagca

SEQ ID NO: 393345 - DNA, 607 bp, Homo sapiens
ccttctcttaaaaaatatataatatgtacttattatatattatatgcatagacacacgtgtgtctatacatatcctacatgtacatattgaggattaacaggtgctagtagaaaatattaactttctttgtattaacaggtgttagtagaaagtagtagtaggtgctaagataaaagccataattaaacctcctggtgaatgaacacaccatcacctacaatcttaccaaaaatagaatcaagcacgtgtcctagtcaaacctctggattcaactgtcatttggataaaacgcaaaggatagtgaaaatgtcgatcttcactgagagtctmaccagcaaaattcacagtgtggacaccaagtgacaaaaatcccaaatttttcaacaaatatattgtatgggaaagaaaactttgaaaagaaacctgtatgttagaagggattttaaaaacacgacaaatgaaaacaaatgggcaagactaaatcatagtgtcttggaatgcatgcatgaaggacacagccgtgaaaatgcaaggacgcctctactggaacagtcatgtttatcgtcacttttcaggagaaaggtggctgcagttgaggagagtcac

SEQ ID NO: 393346 - DNA, 548 bp, Homo sapiens
gtggacaccaagtgacaaaaatcccaaatttttcaacaaatatattgtatgggaaagaaaactttgaaaagaaacctgtatgttagaagggattttaaaaacacgacaaatgaaaacaaatgggcaagactaaatcatagtgtcttggaatgcatgcatgaaggacacagccgtgaaaatgcaaggacgcctctactggaacagtcaygtttatcgtcacttttcaggagaaaggtggctgcagttgaggagagtcacatgcttcagggctggcaaagtcctatatcttgacttatgtgatgattacagggatgtttacaaaaatcaaactataagtttgttttgtgccatgttttgtattgtgtgtgtgtgttttgtttttcaacttaaaaataaataaaatcaaaaccaaggcttcattatcaagtagcacaaagtctccaatctataacctcctttgtctggatatctgcatttaactaccattgccagagctaatcctgacaatgcattcatatttttaacactgaaacacagtaaacagggaa

SEQ ID NO: 393347 - DNA, 548 bp, Homo sapiens
gtggacaccaagtgacaaaaatcccaaatttttcaacaaatatattgtatgggaaagaaaactttgaaaagaaacctgtatgttagaagggattttaaaaacacgacaaatgaaaacaaatgggcaagactaaatcatagtgtcttggaatgcatgcatgaaggacacagccgtgaaaatgcaaggacgcctctactggaacagtcatgtttatcgtcacttttcaggagaaaggtggctgcarttgaggagagtcacatgcttcagggctggcaaagtcctatatcttgacttatgtgatgattacagggatgtttacaaaaatcaaactataagtttgttttgtgccatgttttgtattgtgtgtgtgtgttttgtttttcaacttaaaaataaataaaatcaaaaccaaggcttcattatcaagtagcacaaagtctccaatctataacctcctttgtctggatatctgcatttaactaccattgccagagctaatcctgacaatgcattcatatttttaacactgaaacacagtaaacagggaa

SEQ ID NO: 393348 - DNA, 548 bp, Homo sapiens
gtggacaccaagtgacaaaaatcccaaatttttcaacaaatatattgtatgggaaagaaaactttgaaaagaaacctgtatgttagaagggattttaaaaacacgacaaatgaaaacaaatgggcaagactaaatcatagtgtcttggaatgcatgcatgaaggacacagccgtgaaaatgcaaggacgcctctactggaacagtcatgtttatcgtcacttttcaggagaaaggtggctgcagytgaggagagtcacatgcttcagggctggcaaagtcctatatcttgacttatgtgatgattacagggatgtttacaaaaatcaaactataagtttgttttgtgccatgttttgtattgtgtgtgtgtgttttgtttttcaacttaaaaataaataaaatcaaaaccaaggcttcattatcaagtagcacaaagtctccaatctataacctcctttgtctggatatctgcatttaactaccattgccagagctaatcctgacaatgcattcatatttttaacactgaaacacagtaaacagggaa

SEQ ID NO: 393349 - DNA, 570 bp, Homo sapiens
tcacttgtcatgggaattgtctcctggaatcactttggttgtcccagggtaacgcagggaaagtggttaatgggtcacttgggggtggcatcttcatcagtaaatcacatttactttctcctactaagaattttatttttggccatgaagccaaaagtcagctcttaaataacaagggaagcaaataatcattgaataaaaatagcagraagaaaaagctgtgcaaagaaatttatgtttttaatttgttatatatgtatatttttatcatactttaagttctagggtacatgtgcacaatgtgcaggaataaaatttatgtttttaaaatttattctacattatgaattctacattagaaaaataaaccatagcctcatcacaggcacttaaatacactgaagctgccaaaacaatctatcgttttgcctacgtacttatcaacttcctcatagcaaactgggagaaaaaagcaatggaatgaataaaatgatagccacaaaaatcaaggtgggagaaatacttattatatgtccataaaaaattttaattaatgcaaagtattaacac

SEQ ID NO: 393350 - DNA, 502 bp, Homo sapiens
ccatagcctcatcacaggcacttaaatacactgaagctgccaaaacaatctatcgttttgcctacgtacttatcaacttcctcatagcaaactgggagaaaaaagcaatggaatgaataaaatgatagccacaaaaatcraggtgggagaaatacttattatatgtccataaaaaattttaattaatgcaaagtattaacaccaatgattgcagtaatacagatcttacaaatgatagttttagtctgaacaggactatccaaaagttaattttctatagtaacagtttttaaataaaatatcaattcctgaaacacataaaatggtccatgagtatacaacgagtgaaaaaaaacaaattcagagcaaagataaattaagaagtatctaatattcaaacatagtcaaagagagggagatttctggataatcacttaaacccatggttaaacataaatgcacatatgttaatgtttactgaataacttatctgtgccaagtg

SEQ ID NO: 393351 - DNA, 502 bp, Homo sapiens
ccatagcctcatcacaggcacttaaatacactgaagctgccaaaacaatctatcgttttgcctacgtacttatcaacttcctcatagcaaactgggagaaaaaagcaatggaatgaataaaatgatagccacaaaaatcaaggtgggagaaatacttattatatgtccataaaaaattttaattaatgcaaagtattaacaccaatgattgcagtaatacagatcttacaaatgatagttttagtctgaacaggactatccaaaagttaattttctatagtaacagtttttaaataaaatwtcaattcctgaaacacataaaatggtccatgagtatacaacgagtgaaaaaaaacaaattcagagcaaagataaattaagaagtatctaatattcaaacatagtcaaagagagggagatttctggataatcacttaaacccatggttaaacataaatgcacatatgttaatgtttactgaataacttatctgtgccaagtg

SEQ ID NO: 393352 - DNA, 502 bp, Homo sapiens
ccatagcctcatcacaggcacttaaatacactgaagctgccaaaacaatctatcgttttgcctacgtacttatcaacttcctcatagcaaactgggagaaaaaagcaatggaatgaataaaatgatagccacaaaaatcaaggtgggagaaatacttattatatgtccataaaaaattttaattaatgcaaagtattaacaccaatgattgcagtaatacagatcttacaaatgatagttttagtctgaacaggactatccaaaagttaattttctatagtaacagtttttaaataaaatatcaattcctgaaacacataaaatggtccatgagtatacaacgagtgaaaaaaaacaaattcagagcaaasataaattaagaagtatctaatattcaaacatagtcaaagagagggagatttctggataatcacttaaacccatggttaaacataaatgcacatatgttaatgtttactgaataacttatctgtgccaagtg

SEQ ID NO: 393353 - DNA, 502 bp, Homo sapiens
ccatagcctcatcacaggcacttaaatacactgaagctgccaaaacaatctatcgttttgcctacgtacttatcaacttcctcatagcaaactgggagaaaaaagcaatggaatgaataaaatgatagccacaaaaatcaaggtgggagaaatacttattatatgtccataaaaaattttaattaatgcaaagtattaacaccaatgattgcagtaatacagatcttacaaatgatagttttagtctgaacaggactatccaaaagttaattttctatagtaacagtttttaaataaaatatcaattcctgaaacacataaaatggtccatgagtatacaacgagtgaaaaaaaacaaattcagagcaaagataaattaagaagtatctaatattcaaacatagtcaaagagagggagatttctggataatcacttaarcccatggttaaacataaatgcacatatgttaatgtttactgaataacttatctgtgccaagtg

SEQ ID NO: 393354 - DNA, 568 bp, Homo sapiens
gctcatatttattccctgtgcatttttgtaacatgtatatgttatatatatagaaagagagagaggcagagatggaaagtaatttatggagtttgatgttatgtcagggtaattacatgattatataattaacaggtttctttttaaatcagctatatcaatagaaaaataaatgtaggaatcaagagactcattctgtccatctgtgatagttccatcatgatactgcattgtcaagtcattgctccaaaaatatggtttagctcaacactgagtgactataggaaaccagaaaccaggctgggcgctaaagatgcaaagatgaatgagacatcatctctgccgtccaaaagcttactgtctagtgggagagttacacacgtaaggacagtaatctaataagagctaataagtgaaaactaagataaattaataatacaagattacagggaaggtttccaaagtcaatgaggcctcaaatgartcttgaaagtgtgcaaggattgaccaaatgaagaaatgtgtaagtttttcaaacaaaaaggaacagcatgagcaaatgcaagga

SEQ ID NO: 393355 - DNA, 568 bp, Homo sapiens
gctcatatttattccctgtgcatttttgtaacatgtatatgttatatatatagaaagagagagaggcagagatggaaagtaatttatggagtttgatgttatgtcagggtaattacatgattatataattaacaggtttctttttaaatcagctatatcaatagaaaaataaatgtaggaatcaagagactcattctgtccatctgtgatagttccatcatgatactgcattgtcaagtcattgctccaaaaatatggtttagctcaacactgagtgactataggaaaccagaaaccaggctgggcgctaaagatgcaaagatgaatgagacatcatctctgccgtccaaaagcttactgtctagtgggagagttacacacgtaaggacagtaatctaataagagctaataagtgaaaactaagataaattaataatacaagattacagggaaggtttccaaagtcaatgaggcctcaaatgaatcttgaaagtgtgcaaggattraccaaatgaagaaatgtgtaagtttttcaaacaaaaaggaacagcatgagcaaatgcaagga

SEQ ID NO: 393356 - DNA, 592 bp, Homo sapiens
ggttttttgttcttgagatagatgatgctttaaattgaccactctagctgcattgtgggaggaaaaaagattttagaacaagactagaaacagaataattagaaaaatgcaactacaatgcagatgagtgattatcaaggtctgaactgaatagtggaaatagagataaggaggcaaattcaagatatgtgcgtgacagtaaaattaacatgacctggtgtttgattgactctgtaaagtgaaaggaaaggatgaataatcaacaaataatatttattctaccaaatgcctccatgccgctttgatgacaggataatatgtaagcttttctatatytcagaaactatatgacatgacgaaaagtaaaaaggggatgggggtaaggaggtatcctgaattgactgagaaataaggaggtattccacagagaatataaataaacatatacttagtgttcaaggaataataaaaaagagaacatctatgtgtccaccatacaggatatgaaatagaacatttgccggccatggtggctcacacctgtaatcccagtactttgggaggccgaggtgggaggatcacttaagcccag

SEQ ID NO: 393357 - DNA, 546 bp, Homo sapiens
ttgttttgctttgttttttgcttaaaagtgctttggctattagggatctttttttggctccatgtgaactttaggatttttttttaattttgtgagaaataacgttggtaatttgatgggaattgcattaactctatagattgtatgggtgatatggtcactttagctattgatttttctaatccatgagcatgggatgtttttccatttgtttatgtcatctataatttctttcattagtattttgtagttctcyttgtagagatctttcatttatatagttatgcattcctaggtatttttcatggctattgtaaattcagttgagttcttaatttggttctcaacaaattaatctcaacaaacattcaaacagcttgaatgtatttggtgtatagaaatacaactgatttttgtggcttgtttatcccaagactttactgaagtcgtgtatcaagtctaggagtcttctgaagactttagggttttctaggcctacagtcatgtcatcagtgagcagagatcatttgacttcttttctaattt

SEQ ID NO: 393358 - DNA, 629 bp, Homo sapiens
actttagggttttctaggcctacagtcatgtcatcagtgagcagagatcatttgacttcttttctaatttgtataccttttatttctttctcctttctgatagttctggctagcacttccagtamtgtattgaataggaatgatgaaggtgaacatccttgcttttttccagtttctagaagcaacacttctaacttttgcccatccaggatgatgttggctgtggctttgtcatagatgactcattttttgaggtatactccatctatacctatattgttgagggtttttatcataaacagatgttggattttatcaaatgcttattctgcatctaatgagatgatcatagggtttttgttctcagttccatttatgtggtgaatcatgtttattgatttgtctattttgaaccattcaagcacccctggaataaagcccacttgatcatgatgaattatctttttgatgtgttgttagcttcagtttgctagaattttgttgagtatttttacatctgtgttgatcagggataaggatttgtagttttcttttgtgttctttttaaaattttccttgttaattttactgcacagtattattttaatgatgaataaagtgttgagctg

SEQ ID NO: 393359 - DNA, 629 bp, Homo sapiens
actttagggttttctaggcctacagtcatgtcatcagtgagcagagatcatttgacttcttttctaatttgtataccttttatttctttctcctttctgatagttctggctagcacttccagtactgtattgaataggaatgatgaaggtgaacatccttgcttttttccagtttctagaagcaacacttcyaacttttgcccatccaggatgatgttggctgtggctttgtcatagatgactcattttttgaggtatactccatctatacctatattgttgagggtttttatcataaacagatgttggattttatcaaatgcttattctgcatctaatgagatgatcatagggtttttgttctcagttccatttatgtggtgaatcatgtttattgatttgtctattttgaaccattcaagcacccctggaataaagcccacttgatcatgatgaattatctttttgatgtgttgttagcttcagtttgctagaattttgttgagtatttttacatctgtgttgatcagggataaggatttgtagttttcttttgtgttctttttaaaattttccttgttaattttactgcacagtattattttaatgatgaataaagtgttgagctg

SEQ ID NO: 393360 - DNA, 629 bp, Homo sapiens
actttagggttttctaggcctacagtcatgtcatcagtgagcagagatcatttgacttcttttctaatttgtataccttttatttctttctcctttctgatagttctggctagcacttccagtactgtattgaataggaatgatgaaggtgaacatccttgcttttttccagtttctagaagcaacacttctaacttttgcccatccaggatgatgttggctgtggctttgtcatagatgactcattttttgaggtatactccatctatacctatattgttgagggtttttatcataaacagatgttggattttatcaaatgcttattctgcatctaatgagatgatcatagggtttttgttctcagttccatttatgtggtgaatcatgtttattgatttgtctattttgaaccattcaagcacccctggaataaagcccacttgatcatgatgaattatctttttgatgtgytgttagcttcagtttgctagaattttgttgagtatttttacatctgtgttgatcagggataaggatttgtagttttcttttgtgttctttttaaaattttccttgttaattttactgcacagtattattttaatgatgaataaagtgttgagctg

SEQ ID NO: 393361 - DNA, 585 bp, Homo sapiens
cagttctcttctattcctagtttgttattattacaaatagtttcaaatgtgaacaagtgcttttcccacagctattgaaataaccatattttkttcttttattcagttaatgtggttaatttcattgtttggttttctaattttaaaccatacattcttgaaattactgcacttagtcatgatgtatttttctttggagtatattgttggattatatttgcaaacatttttgtttagaattattatgtagtatattagtctgtaatttcatttcttttaatatccttgtatggttttactatcatggaggtaccaccatataaaacaagttggaaagtgttatgtcttcccaattctctaaaaatattcatgtaacattggcattatttctttattaaatatttggtaatatttctttattaaatattgcatccacctagccctggagttctttttacaggaaaaaaaaattttctaaataaaatttctacaatgaaaaaaaaactactcagtttttctagtttttttctgatcatttcataaaagtaggtatttttcataggaacttgaccattccttatgatt

SEQ ID NO: 393362 - DNA, 521 bp, Homo sapiens
atgatgtatttttctttggagtatattgttggattatatttgcaaacatttttgtttagaattattatgtagtatattagtctgtaatttcatttcttttaatatccttgtatggttttaytatcatggaggtaccaccatataaaacaagttggaaagtgttatgtcttcccaattctctaaaaatattcatgtaacattggcattatttctttattaaatatttggtaatatttctttattaaatattgcatccacctagccctggagttctttttacaggaaaaaaaaattttctaaataaaatttctacaatgaaaaaaaaactactcagtttttctagtttttttctgatcatttcataaaagtaggtatttttcataggaacttgaccattccttatgattgtcaaatttattaatataaagtttcatattttatatttattttatcagataaataaaattatatgttttgaaatatatattcattgtaaaatagccatgttaagctaacatatg

SEQ ID NO: 393363 - DNA, 521 bp, Homo sapiens
atgatgtatttttctttggagtatattgttggattatatttgcaaacatttttgtttagaattattatgtagtatattagtctgtaatttcatttcttttaatatccttgtatggttttactatcatggaggtaccaccatataaaacaagttggaaagtgttatgtcttcccaattctctaaaaatattcatgtaacattggcattatttctttattaaatatttggtaatatttctttattaaatattgcatccacctagccctggagttctttytacaggaaaaaaaaattttctaaataaaatttctacaatgaaaaaaaaactactcagtttttctagtttttttctgatcatttcataaaagtaggtatttttcataggaacttgaccattccttatgattgtcaaatttattaatataaagtttcatattttatatttattttatcagataaataaaattatatgttttgaaatatatattcattgtaaaatagccatgttaagctaacatatg

SEQ ID NO: 393364 - DNA, 625 bp, Homo sapiens
cctcaaaaaagtaaaaatagagctaccatgtggtccagcaatcccactgctgcatatataccccccaaaaaagaaatcagtatatcgaagagatatctgcactcccgtatttgttgcagcactatttwcaatagcgaagttatggagtcaacctaagtgtccatcaacagatgaatgaataaagaaaatgtggtacttatatacaatgaagtattattcagccataaaaaggaatgagaccctgtcatttgcaacaacatagatgaaactggaggtcattatgttaagtgaaataagccaggcacaaaaagacaaatactatgtgttatcacttatatgtggaatccaaaaagcaaacaactgaactcatggagatagagagtagaaggaagtataccagaggctgtgaagggtagtgggggttgggagaggtgggggatggttaatgggtacaaaaaaagaaagatttaataagacctagtatttgatagcacaacagggggattgcagtctaaaattcaattatacatttaaaaataactgaaagagtataattggattgtttataacacaaataataaatgcttgaggggatgaatatccaattttccattatgtacttatt

SEQ ID NO: 393365 - DNA, 670 bp, Homo sapiens
ctcatggagatagagagtagaaggaagtataccagaggctgtgaagggtagtgggggttgggagaggtgggggatggttaatgggtacaaaaaaagaaagatttaataagacctagtatttgatagcacaacagggggattgcagtctaaaattcaattatacatttaaaaataactgaaagagtataattggattgtttataacacaaataataaatgcttgaggggatgaatatccaattttccattatgtacttattgtacattgcatgcctgtaccaaaatatttcatgtaccccataaatgtrtacacctgctatgtacccacaaaaattaaatttaaaaacaatacattgttatccactatagtcaccatattgcacaatagatctgttgaattcattcctcctgtacaatgcaattttgtaccctttgaccaacatctacccaatcctcctggtaaccatcattctactctgtacttctatgtgttcagccttcttagacctccacatacaagtgagattatgcagtatctggctttctgtgcctggattattttactcagtataatgtcctcccggttcattcatgttgtcacaaatgatactttttttattttttaaggttgtatactattctattgtgtatgtgtaccacattttcttca

SEQ ID NO: 393366 - DNA, 515 bp, Homo sapiens
tacagaatcatttatactgtcttttacaatggctgaaatagtttacattctcaacaattacaargttttccttttctccacatcctctccaacacttggtatcttctgccttttctgtaacagccattctaacggatgtgaaatggcattttattgtagttttaatatgcatttctctgatgatcagtgataattagcatttttatatatctgttggccatttgtatgtcttcttttgagaaatgtctatttagatcctttgtcaatttttcattagggttccttgttttcttattattgtgttgtttgagttcctaagatattttggacattagcctcttatcaaatgtatagtttgcagataatttctcccattttgtaggttatcacttcactctgttgactttcttttgctgtgcagaagctttttaggttgatgctattccatttgtgttttgttgcttttcttgcctgtgctttagagtcatatcataaaatattattgcccagaccaa

SEQ ID NO: 393367 - DNA, 515 bp, Homo sapiens
tacagaatcatttatactgtcttttacaatggctgaaatagtttacattctcaacaattacaaggttttccttttctccacatcctctccaacacttggtatcttctgccttttctgtaacagccattctaacggatgtgaaatggcattttattgtagttttaatatgcatttctctgatgatcagtgataattagcatttttatatatctgttggccatttgtatgtcttcttttgagaaatgtctatttagatccttkgtcaatttttcattagggttccttgttttcttattattgtgttgtttgagttcctaagatattttggacattagcctcttatcaaatgtatagtttgcagataatttctcccattttgtaggttatcacttcactctgttgactttcttttgctgtgcagaagctttttaggttgatgctattccatttgtgttttgttgcttttcttgcctgtgctttagagtcatatcataaaatattattgcccagaccaa

SEQ ID NO: 393368 - DNA, 515 bp, Homo sapiens
tacagaatcatttatactgtcttttacaatggctgaaatagtttacattctcaacaattacaaggttttccttttctccacatcctctccaacacttggtatcttctgccttttctgtaacagccattctaacggatgtgaaatggcattttattgtagttttaatatgcatttctctgatgatcagtgataattagcatttttatatatctgttggccatttgtatgtcttcttttgagaaatgtctatttagatcctttgtcaatttttcattagggttccttgttttcttattattgtgttgtttgagttcctaagatattttggacattagcctcttatcaaatgtatagtttgcagataatttctcccattttgtargttatcacttcactctgttgactttcttttgctgtgcagaagctttttaggttgatgctattccatttgtgttttgttgcttttcttgcctgtgctttagagtcatatcataaaatattattgcccagaccaa

SEQ ID NO: 393369 - DNA, 515 bp, Homo sapiens
tacagaatcatttatactgtcttttacaatggctgaaatagtttacattctcaacaattacaaggttttccttttctccacatcctctccaacacttggtatcttctgccttttctgtaacagccattctaacggatgtgaaatggcattttattgtagttttaatatgcatttctctgatgatcagtgataattagcatttttatatatctgttggccatttgtatgtcttcttttgagaaatgtctatttagatcctttgtcaatttttcattagggttccttgttttcttattattgtgttgtttgagttcctaagatattttggacattagcctcttatcaaatgtatagtttgcagataatttctcccattttgtaggttatcacttcactctgttgactttcttttgctgtgcagaagctttttargttgatgctattccatttgtgttttgttgcttttcttgcctgtgctttagagtcatatcataaaatattattgcccagaccaa

SEQ ID NO: 393370 - DNA, 620 bp, Homo sapiens
tttgtttaaatttacatctaagtattttttgttgctattataaataggattgttttcttgatttctttttttgtatagtttgttgttgatgtgtagaaatgctactgaattttgtatgttcacattgtatcctgcaactttactaaattcatttatgaattctaaattttttggcagagttattggtgttttctatatataagatcatgtcaactgcaaacagaaacaatttaacttcttcctttccaattttcatgccttttatttctttcttttgcctaattgctctggctaggacatccagtactatgttgaatagaagttctgagagtgggcacccttgtatgaarttttccacaacatctcttatctttttattagctatatattaatacggatgtttcttcttcatcaggagtttgaaaaatatgtcttttctctatattgttcttaatcagtcttcctagaagtatttcaatttcaaaaagtagcaacaactgtgggagttcagtcaggctggtgggaaaaattttaaagatagttataagaaatcgacacaaaccttcatggaaggctgggggtgttgtatagcttcagtaatagatctgaatgaaggcggc

SEQ ID NO: 393371 - DNA, 518 bp, Homo sapiens
tactcttttacttgcctactttattcattatagataaaatttaaaaggattccatatgatttttatgaatatcttgggaagtggatwttattagattatctagagacactttcatttatcatgataggatttaaattgttaaagattgtgtcctttgcagggacatggatggcgctggaggccattatctttagcatactaactcaggaatagaaaaccaaaaaccacatgttctcacttataagtgggagctaaatgatgagaacacatggacacatagagggaagcaacacaaactagggcctattggaggttgggaggagggagaggatcaggaaaaataactaatgggtactaagcctaatacctgagtgattaatctgcacaataaacccacatgacacacctttacctatgtaacaaacctgcacatgtacccctgaccttaaaataaaagtgaaaaagaaaaataatccagaaaaatataaagtggtggagattgatttttcttagagatt

SEQ ID NO: 393372 - DNA, 571 bp, Homo sapiens
cgggcacggtggctcatcacctgtaatcccagcactttgggaggccgaggtggacagatcagttgagtgcaggagttcgagaccagcctggccaacatggtgaaacctcatctctattaaaaatacaaaaattagccagatgtggtggtgcatgaatgtaaatccagctactcgggaggctgaggctacagaatcgcttaaacctaggaggtggaggttgcagtgaaccgagattgtgccatggcaatccagcctgggtgacagagtgagaatctgtctcaaaaaaaaaaaaaaaaaatgcatgatacctgttcrtaatagctaagaaatatatttttgaaccttgaaaactgagggaaaaactgacatttcctggatgggtaaataaaggaactggttcagaacgtagtctcaaatcttttccagctcattgagtttattgattgagaataatgaacatctttttaagaaaattttaaaatgtagtgatcataaatctattctaagaagttgcccaattccgatcccatgcaattccagttaggtgaatttaaatttaaatgattccatc

SEQ ID NO: 393373 - DNA, 575 bp, Homo sapiens
gtctgaccatcaaggctctcctgggtcatattcagttcatgctgatattttcccttcctcccctctttggtcctcactatttttgctttggtcatgttatgctatattctgtaggcctttttaattttttttttatggtggcaggggaaaatattttataattatgctttgtgctttttatcttccagtcagtaaatgcttggtaaatatttgttttattgagtatatgaccctattctagctatatygtgcttgaacagaaatcttaactgccttgaaagttaactgctaagaatttgtcaaaagtgcagagctacatcaagaacttgtcatggatagtacaaaaaggtctctaagggcttgaaggaagtctgtaaattgatttcatatgagagcgtaagaagtgaaaatgtaaagcatgactggagagccagagagataaagcaagggtccctttctccagatcctttgtaacagtattatgtgatctcttttagaaatcactctgaaagataatgccaactcggaacctaggaaaccatccagtgggtttctgcaggttaggtggttcaatt

SEQ ID NO: 393374 - DNA, 630 bp, Homo sapiens
cactcacaacaaactatatgacaaaaataaagaaatcaatctcattcacagtagcatcaaaaaaactgtattttttttgtttaggagcacatttaggattgtacttaggagtacatttaaccaaggaggtgaaagatctgtattctgaacactataaaacattgatgaaaaattgtagatgacacaaatacatgggaaagatattttatgttcatgggtaggaagaattaatattcttaaaatgtccttactgcccaaagcgatttataggtttaatgcaayatttatcaaaatttcaatgtcattcttcacagaaatagaaaaaacaatttgaaaatttatatggaaccacaaaggaccctgaataactaaagcactcttgagcaataagaacaaagctgaaggcctcacaatctgacttcaaaacgtattacaggaaaagaacaaaagaaggaagaagagggtagaggagaagtgcagcaagggtggagggaggtgcccgcgctgggtcggaggagcaggaggagtaaggagggaagactcctgggtggcatggagctcttgcacctctaggcactgcccagccctgtgtcagccagggctgaacccccacaggataaggaagcctgt

SEQ ID NO: 393375 - DNA, 566 bp, Homo sapiens
gcaacttttgcctttgagactctgaagacacaagttaaatacactgtaaatatcttgtgatatacaattatttgctttgcttcttttccagttttaggctatctggcccatttctaaaattcattttttcctgtttccttgtccaatttctccatcatttgtatcacattcaggctcattacatttggataatatcagatattctaaacttgtgttttttctctccaaactccatttgcttaaatacctgctgctgcttccagaaggagatcagaaaaaataatctacacaaaactatgaaagacttgttatttcttattatctgaaccyttgggacattagtacatatttctcagatttattgcttgtgcatctagaaaaattctgattttatctatcaaatcgtgggatacattaggtatatagccaagtttttttgtttaacgatgatgcattctttcattttttgtaaagtgttgtcattatagacttccggtgtccctagcaataactagtctgcgttgtttagagacctttcttcttttgagttgcatttaagcttccct

SEQ ID NO: 393376 - DNA, 566 bp, Homo sapiens
gcaacttttgcctttgagactctgaagacacaagttaaatacactgtaaatatcttgtgatatacaattatttgctttgcttcttttccagttttaggctatctggcccatttctaaaattcattttttcctgtttccttgtccaatttctccatcatttgtatcacattcaggctcattacatttggataatatcagatattctaaacttgtgttttttctctccaaactccatttgcttaaatacctgctgctgcttccagaaggagatcagaaaaaataatctacacaaaactatgaaagacttgttatttcttattatctgaacctttgggacattagtacatatttctcagatttattgcttgtgcatctagaaaaattctgattttatctatcaaatcgtgggatacattaggtatatagccaagtttttttgtttaamgatgatgcattctttcattttttgtaaagtgttgtcattatagacttccggtgtccctagcaataactagtctgcgttgtttagagacctttcttcttttgagttgcatttaagcttccct

SEQ ID NO: 393377 - DNA, 450 bp, Homo sapiens
agttggaacagggagtgactgacaccaagggtccaggcaacagccagaaatgaaaggcacattcttgggctcataatggtcagatagtggaggggcttacatagggccacatawctgtcaaaggccatggctatgagcagcaccatctccacaccaccaacgacgtggatgaagaagatttgagcgatgcagcctccaaaggagatgactttgcgctttctgaacaggtcataaatcatcttgggagaagtgacagagcaggctcctaagtcaatgaaggagagactggccagtagaaagtacatgggggagtgtaagtgagggtcagtggtcacagaaaacacaatgaggatgtttccagtaatgcttgccacatagagcacagaggaaaacactaggaggaggagctggatctcccatgaatgagtgagtcccagaaacaaaaactca

SEQ ID NO: 393378 - DNA, 566 bp, Homo sapiens
ggcaacagccagaaatgaaaggcacattcttgggctcataatggtcagatagtggaggggcttacatagggccacatatctgtcaaaggccatggctatgagcagcaccatctccacaccaccaaygacgtggatgaagaagatttgagcgatgcagcctccaaaggagatgactttgcgctttctgaacaggtcataaatcatcttgggagaagtgacagagcaggctcctaagtcaatgaaggagagactggccagtagaaagtacatgggggagtgtaagtgagggtcagtggtcacagaaaacacaatgaggatgtttccagtaatgcttgccacatagagcacagaggaaaacactaggaggaggagctggatctcccatgaatgagtgagtcccagaaacaaaaactcagataccactgagtgattctctccatccattggtccagccaactgggctgtggctaaaattatgagaactaagaaaatggggaggaaattgtgattatgaagataataatatgtactaaaatcaatattgcaatgtcactatgaataaatag

SEQ ID NO: 393379 - DNA, 630 bp, Homo sapiens
cactcacaacaaactatatgacaaaaataaagaaatcaatctcattcacagtagcatcaaaaaaactgtattttttttgtttaggagcacatttaggattgtacttaggagtacatttaaccaaggaggtgaaagatctgtattctgaacactataaaacattgatgaaaaattgtagatgacacaaatacatgggaaagatattttatgttcatgggtaggaagaattaatattcttaaaatgtccttactgcccaaagcgatttataggtttaatgcaacatttatcaaaatttcaatgtcattcttcacagaaatagaaaaaacaatttgaaaatttatatggaaccacaaaggaycctgaataactaaagcactcttgagcaataagaacaaagctgaaggcctcacaatctgacttcaaaacgtattacaggaaaagaacaaaagaaggaagaagagggtagaggagaagtgcagcaagggtggagggaggtgcccgcgctgggtcggaggagcaggaggagtaaggagggaagactcctgggtggcatggagctcttgcacctctaggcactgcccagccctgtgtcagccagggctgaacccccacaggataaggaagcctgt

SEQ ID NO: 393380 - DNA, 566 bp, Homo sapiens
ggcaacagccagaaatgaaaggcacattcttgggctcataatggtcagatagtggaggggcttacatagggccacatatctgtcaaaggccatggctatgagcagcaccatctccacaccaccaacgacgtggatgaagaagatttgagcgatgcagcctccaaaggagatgactttgcrctttctgaacaggtcataaatcatcttgggagaagtgacagagcaggctcctaagtcaatgaaggagagactggccagtagaaagtacatgggggagtgtaagtgagggtcagtggtcacagaaaacacaatgaggatgtttccagtaatgcttgccacatagagcacagaggaaaacactaggaggaggagctggatctcccatgaatgagtgagtcccagaaacaaaaactcagataccactgagtgattctctccatccattggtccagccaactgggctgtggctaaaattatgagaactaagaaaatggggaggaaattgtgattatgaagataataatatgtactaaaatcaatattgcaatgtcactatgaataaatag

SEQ ID NO: 393381 - DNA, 630 bp, Homo sapiens
cactcacaacaaactatatgacaaaaataaagaaatcaatctcattcacagtagcatcaaaaaaactgtattttttttgtttaggagcacatttaggattgtacttaggagtacatttaaccaaggaggtgaaagatctgtattctgaacactataaaacattgatgaaaaattgtagatgacacaaatacatgggaaagatattttatgttcatgggtaggaagaattaatattcttaaaatgtccttactgcccaaagcgatttataggtttaatgcaacatttatcaaaatttcaatgtcattcttcacagaaatagaaaaaacaatttgaaaatttatatggaaccacaaaggaccctgaataactaaagsactcttgagcaataagaacaaagctgaaggcctcacaatctgacttcaaaacgtattacaggaaaagaacaaaagaaggaagaagagggtagaggagaagtgcagcaagggtggagggaggtgcccgcgctgggtcggaggagcaggaggagtaaggagggaagactcctgggtggcatggagctcttgcacctctaggcactgcccagccctgtgtcagccagggctgaacccccacaggataaggaagcctgt

SEQ ID NO: 393382 - DNA, 573 bp, Homo sapiens
ttttagaagttgctgaggtacaaataaaactgctatgctgacatcatacttttttgcaccaacaactccagttcttctgacacaaaggaccatcttcctagtgccataatttatcttagaccccaaaactcacagaggcacacatcatatctctaatacttgctcaccaccactggcatgagtctctctctatcctcttctacgtgaagtgattatactgtcacctctggagctaactgtccacagtctcaagatgcacactttttacaaccagaagcctatggactgggtgagggagcagaaacagccacaggtactgcccatcagggtaatgtaagtcagcatgcaaacaactgatcagatgaacatgaatagcaaggtgctgaggcactgggaagagggaccggaaaactctataattgttgaaaaagactcaagcccttgggaagggaaatgcctatgraattatataaagaccattttatccaagttggtcatcattcagatgaaaaccatgaggcccagaaaagtaaactgagtttccagaattcacacaattgatagaataggaac

SEQ ID NO: 393383 - DNA, 547 bp, Homo sapiens
accggaaaactctataattgttgaaaaagactcaagcccttgggaagggaaatgcctatggaattatataaagaccattttatccaagttggtcatcattcagatgaaaaccatgaggcccagaaaagtaaactgagtttccagaattcacacaattgatagaataggaaccagaattcaggcctcttgcttcctattccagaaagacaaattgcaataataatcaaataatatgagcaatcatccagtaaaaataatctrgtaaaaacagcaaaactcaaaagagtgatttttcctggttaagaccaaaactaaccatagattgctatacatagtatctattataaatactgaattatatagcagcctgacaataaatacataaaatgtgtacacaaagattattgaacctgtacaatacagtagtaaatagtaactttatatttgcaaagtgactgatcattactatcagaatttgtttacccattcttcatattttgttggtcatataaccagttactacaactgcaaaaacaacctaaggtca

SEQ ID NO: 393384 - DNA, 593 bp, Homo sapiens
aattcacacaattgatagaataggaaccagaattcaggcctcttgcttcctattccagaaagacaaattgcaataataatcaaataatatgagcaatcatccagtaaaaataatctggtaaaaacagcaaaactcaaaagagtgatttttcctggttaagaccaaaactaaccatagattgctatacatagtatctattataaatactgaattatatagcagcctgacaataaatacataaaatgtgtacacaaagattattgaacctgtacaatacagtagtaaatagtaactttatatttgcaaagtgactgatcattactatcagaatttgtttacccattcttcatattttgttggtcatataaccagttactacaactgcaaaaacaacctaaggtcatgtttctgtgaagtccatccttttggtctttaaattttattatcctcaaaggtcaattatgatctcaatcttttcttgtaattttactgacaattctccttcacactgattwgttctttctctaattcctgtaaatggaaagaaccaaaaaaagttgaaaaaacatgtattgtacatataacaaacaatc

SEQ ID NO: 393385 - DNA, 593 bp, Homo sapiens
aattcacacaattgatagaataggaaccagaattcaggcctcttgcttcctattccagaaagacaaattgcaataataatcaaataatatgagcaatcatccagtaaaaataatctggtaaaaacagcaaaactcaaaagagtgatttttcctggttaagaccaaaactaaccatagattgctatacatagtatctattataaatactgaattatatagcagcctgacaataaatacataaaatgtgtacacaaagattattgaacctgtacaatacagtagtaaatagtaactttatatttgcaaagtgactgatcattactatcagaatttgtttacccattcttcatattttgttggtcatataaccagttactacaactgcaaaaacaacctaaggtcatgtttctgtgaagtccatccttttggtctttaaattttattatcctcaaaggtcaattatgatctcaatcttttcttgtaattttactgacaattctccttcacactgattagttctttctctaattcctgtaaatrgaaagaaccaaaaaaagttgaaaaaacatgtattgtacatataacaaacaatc

SEQ ID NO: 393386 - DNA, 621 bp, Homo sapiens
tttgcaaagtgactgatcattactatcagaatttgtttacccattcttcatattttgttggtcatataaccagttactacaactgcaaaaacaacctaaggtcatgtttctgtgaagtccatccttttggtctttaaattttattatcctcaaaggtcaattatgatctcaatcttttcttgtaattttactgacaattctccttcacactgattagttctttctctaattcctgtaaatggaaagaaccaaaaaaagttgaaaaaacatgtattgtacatataacaaacaatcatatgtggtatacaatatatatcaaatgagtattaagataaacattcaaagagttttaaagaaaaaagtgttatagatattggagggcagaagatacaattgccattaagaacaggtggaggaggttatgccaaggacattgacctgaccctttaggaattagtgaaaattgaataggaaaagaatgaggtacacaatgtgtgaaaaatacctaaattgatataacaggaggagaccttttcatatcaattatcatyacttctgtgtctataaccatattagatacccacaaacaaatagaaagtggatagttcttgattgacaagt

SEQ ID NO: 393387 - DNA, 452 bp, Homo sapiens
atagtaaggtcttaacttcaagtcaataatctttattacttatggttcattcctctccctcatgttttccaataattttaaaatgcataattaaaacaattctcatttaaaaacatagtagccatgactaatgatcttccagtgggaaggtactaagactttacaacatgtttcttgctggggataagacagcctacagccagcattcaactcatttttctaaagtctatggatcaatttgaaatacagaaaaagyagaacagagataaagttaaaaaaagattaaaaatatggaaagaatgggagaaaggggaaattagaagatatgaacaatgatttaaaaataaaagagcctcaaaggagaagagaaactgctaagcaagactaaggtaggatgaaatacagtagtctctgtttctgagaacacaggttaaaaagaacataaataaaat

SEQ ID NO: 393388 - DNA, 452 bp, Homo sapiens
atagtaaggtcttaacttcaagtcaataatctttattacttatggttcattcctctccctcatgttttccaataattttaaaatgcataattaaaacaattctcatttaaaaacatagtagccatgactaatgatcttccagtgggaaggtactaagactttacaacatgtttcttgctggggataagacagcctacagccagcattcaactcatttttctaaagtctatggatcaatttgaaatacagaaaaagcagaacagagataaagttaaaaaaagattaaaaatatggraagaatgggagaaaggggaaattagaagatatgaacaatgatttaaaaataaaagagcctcaaaggagaagagaaactgctaagcaagactaaggtaggatgaaatacagtagtctctgtttctgagaacacaggttaaaaagaacataaataaaat

SEQ ID NO: 393389 - DNA, 464 bp, Homo sapiens
gtcaataatctttattacttatggttcattcctctccctcatgttttccaataattttaaaatgcataattaaaacaattctcatttaaaaacatagtagccatgactaatgatcttccagtgggaaggtactaagactttacaacatgtttcttgctggggataagacagcctacagccagcattcaactcatttttctaaagtctatggatcaatttgaaatacagaaaaagcagaacagagataaagttaaaaaaagattaaaaatatggaaagaatgggagaaaggggarattagaagatatgaacaatgatttaaaaataaaagagcctcaaaggagaagagaaactgctaagcaagactaaggtaggatgaaatacagtagtctctgtttctgagaacacaggttaaaaagaacataaataaaataaatttatcacctttaatacactcattcaagga

SEQ ID NO: 393390 - DNA, 478 bp, Homo sapiens
taggatgaaatacagtagtctctgtttctgagaacacaggttaaaaagaacataaataaaataaatttatcacctttaatacaytcattcaaggatgctactgagtttgactctgggaatttctcacctttaatacactcatctggggatgctacggactgtgacattgggttgcatttaacgggggagagaaagggcagttgcttctattatcgcccttttggactcacagagtttctttgaaaagcacagatgataataaatggaaatattgccttttatactatacaataatatacacatgcaattcactggaaaaagtatacttgttactatgatttgaggatactaccatatactaatcaagagaaacacatgtacagaacaaagaaggcacatgaaatttttactagtgtgtgttttccttgtgttctaccaccccaggagcagcttctgctactgaaggtcacagtagagt

SEQ ID NO: 393391 - DNA, 478 bp, Homo sapiens
taggatgaaatacagtagtctctgtttctgagaacacaggttaaaaagaacataaataaaataaatttatcacctttaatacactcattcaaggatgctactgagtttgactytgggaatttctcacctttaatacactcatctggggatgctacggactgtgacattgggttgcatttaacgggggagagaaagggcagttgcttctattatcgcccttttggactcacagagtttctttgaaaagcacagatgataataaatggaaatattgccttttatactatacaataatatacacatgcaattcactggaaaaagtatacttgttactatgatttgaggatactaccatatactaatcaagagaaacacatgtacagaacaaagaaggcacatgaaatttttactagtgtgtgttttccttgtgttctaccaccccaggagcagcttctgctactgaaggtcacagtagagt

SEQ ID NO: 393392 - DNA, 478 bp, Homo sapiens
taggatgaaatacagtagtctctgtttctgagaacacaggttaaaaagaacataaataaaataaatttatcacctttaatacactcattcaaggatgctactgagtttgactctgggaatttctcacctttaatacactcatctggggatgctacggactgtgacattgggttgcatttaamgggggagagaaagggcagttgcttctattatcgcccttttggactcacagagtttctttgaaaagcacagatgataataaatggaaatattgccttttatactatacaataatatacacatgcaattcactggaaaaagtatacttgttactatgatttgaggatactaccatatactaatcaagagaaacacatgtacagaacaaagaaggcacatgaaatttttactagtgtgtgttttccttgtgttctaccaccccaggagcagcttctgctactgaaggtcacagtagagt

SEQ ID NO: 393393 - DNA, 478 bp, Homo sapiens
taggatgaaatacagtagtctctgtttctgagaacacaggttaaaaagaacataaataaaataaatttatcacctttaatacactcattcaaggatgctactgagtttgactctgggaatttctcacctttaatacactcatctggggatgctacggactgtgacattgggttgcatttaacgggggagagaaagggcagttgcttctattatcgcccttttggactcacagagtttctttgaaaagcacagatgataataaatggaaatattgccttttatactatacaataatatacacatgcaattcactggaaaaagtatacttgttactatgatttgaggatactaccatatactaatcaagagaaacacatgtacagaacaaagaagscacatgaaatttttactagtgtgtgttttccttgtgttctaccaccccaggagcagcttctgctactgaaggtcacagtagagt

SEQ ID NO: 393394 - DNA, 545 bp, Homo sapiens
atatttcccagcaccccccccaaaaaaaaattgctcctaggtggacacactaatcaaagacttcctgagaaatgcaggaagaagttttgtcctctgaccacgctacgccctttccttgatggtaagccccataatctaaagccataagtttcaattcctcacataaaaagaaaaaaaaatgtcttttatgaccacttcagataacactggatatttcccttgtcattaggaatgagaaatgggaggaaggtaaayttgtagacaggagaattggtagatgcttgaaaggatttctgaaaactgtgcctatccaggtgtacaaatgtgttgaccagccaaggcaaagcagtcaaaccatacaatacgttatcctcaggaaaatggacttttctcccaaattgcctttttcatgaaaaatataaaattctccagtttcaacctcatgttaaatttcacatgtgaagaaaacagtcatgcacatcagaaaattaaatggcgagtcaagaccaaattcctagtcacagttatgttctgtttccagtatt

SEQ ID NO: 393395 - DNA, 545 bp, Homo sapiens
atatttcccagcaccccccccaaaaaaaaattgctcctaggtggacacactaatcaaagacttcctgagaaatgcaggaagaagttttgtcctctgaccacgctacgccctttccttgatggtaagccccataatctaaagccataagtttcaattcctcacataaaaagaaaaaaaaatgtcttttatgaccacttcagataacactggatatttcccttgtcattaggaatgagaaatgggaggaaggtaaacttgtagacaggagaattggtagatgcttgaaaggatttctgaaaactgtgcctatccaggtgtacaaatgtgttgaccagccaaggcaaagcagtcaaaccatacaatacsttatcctcaggaaaatggacttttctcccaaattgcctttttcatgaaaaatataaaattctccagtttcaacctcatgttaaatttcacatgtgaagaaaacagtcatgcacatcagaaaattaaatggcgagtcaagaccaaattcctagtcacagttatgttctgtttccagtatt

SEQ ID NO: 393396 - DNA, 613 bp, Homo sapiens
cctatcattagaaacttctcaaaggtatatgagaattattaaataaatttagggagccagtgaaggtatgggtcccgggaattgaggatgaagccagtaattagggaagatgccccatctataagtgcgatgtatcaaatggaggaaaagaaaaacggagggaaggagttcccttaagagaagattgaaatagagcagacttggggggctacacagaggaactgggactacacagttccagctttaaggctatagaaacagaaatagaaatactggtaagtaaaaacccaaaggattggtgacttatcacagctggagtgaatacgaaggagcatgaactcaaagaaaatatcaagatttaagcaagaataaataggacaatggtaggtccatttttagaaattagaaagttgaacataaaatatgtcagggtggagaaaataatcacrtgtattttaagcaaataagagtattagatattgagatgctcaggtgaaaacatatgacaggatatatgggggaaaagtacaaattcaacatgtaattgtatagtaatccatataaaaataatagacggatgtgtaagagtgcataaggtccctgaaggaaataa

SEQ ID NO: 393397 - DNA, 531 bp, Homo sapiens
tacacagaggaactgggactacacagttccagctttaaggctatagaaacagaaatagaaatactggtaagtaaaaacccaaaggattggtgacttatcacagctggagtgaatacgaaggagcatgaactcaaagaaaatatcaagatttaagcaagaataaataggacaatggtaggtccatttttagaaattagaaagttgaacataaaatatgtcagggtggagaaaataatcacgtgtattttaagcaaataagagtattagatattgagatgctcaggtgaaaacatatgacaggatatatgggggaaaagtacaaattcaacatgtaattgtatagtaatccatataaaaataatagacggatgtgtaagagtgcataaggtccctgaaggaaataatacacaggaaaaaaagattaaaaagcmaagacccaactatagaaactatccacattgattatgtaaagtaggaaaaggaatcaataaactagacagaacatcacagaggtaggaggacaagtgctgg

SEQ ID NO: 393398 - DNA, 630 bp, Homo sapiens
cactcacaacaaactatatgacaaaaataaagaaatcaatctcattcacagtagcatcaaaaaaactgtattttttttgtttaggagcacatttaggattgtacttaggagtacatttaaccaaggaggtgaaagatctgtattctgaacactataaaacattgatgaaaaattgtagatgacacaaatacatgggaaagatattttatgttcatgggtaggaagaattaatattcttaaaatgtccttactgcccaaagcgatttataggtttaatgcaacatttatcaaaatttcaatgtcattcttcacagaaatagaaaaaacaatttgaaaatttatatggaaccacaaaggaccctgaataactaaagcactcttgagcaataagaacaaagctgaaggcctcacaatctgacttcaaaacrtattacaggaaaagaacaaaagaaggaagaagagggtagaggagaagtgcagcaagggtggagggaggtgcccgcgctgggtcggaggagcaggaggagtaaggagggaagactcctgggtggcatggagctcttgcacctctaggcactgcccagccctgtgtcagccagggctgaacccccacaggataaggaagcctgt

SEQ ID NO: 393399 - DNA, 596 bp, Homo sapiens
aacgattaccataatattcaatttaaacataaaatgtaattgaaagtatgagattaatatgtggacatgaaatcatataatrttccatggaaaaaacagaatgtataaggcaaagaggtttaaagtaacatcaaaactaacgctcactatacaaattctatgaaatcctcataattacactgtgaagcaggtgttgttagagccacataatctcaaacaaattatttattatctaaaattacatagatattaaaaggttaagccatatatgaatttaggattctctcaaaaattttttctcttcctcctacatcaaacttccctaaattatagaaaagtcacaatgttaccaaacatattcacaaaacacatataatcttgaatccaaatttcagttacagcagaaaaaataaaactctagatcaatctcaatcgtgtaaataaattcagatttccaatctaagagtctcaatttgacatacttctttctctctcttctttcaaaccaggagaaatataaatatgagccacaaccttacaaaagctagaaaatatttacaattccacacaacaacacatgaagaaaaccttctgga

SEQ ID NO: 393400 - DNA, 596 bp, Homo sapiens
aacgattaccataatattcaatttaaacataaaatgtaattgaaagtatgagattaatatgtggacatgaaatcatataatattccatggaaaaaacagaatgtataaggcaaagaggtttaaagtaacatcaaaactaaygctcactatacaaattctatgaaatcctcataattacactgtgaagcaggtgttgttagagccacataatctcaaacaaattatttattatctaaaattacatagatattaaaaggttaagccatatatgaatttaggattctctcaaaaattttttctcttcctcctacatcaaacttccctaaattatagaaaagtcacaatgttaccaaacatattcacaaaacacatataatcttgaatccaaatttcagttacagcagaaaaaataaaactctagatcaatctcaatcgtgtaaataaattcagatttccaatctaagagtctcaatttgacatacttctttctctctcttctttcaaaccaggagaaatataaatatgagccacaaccttacaaaagctagaaaatatttacaattccacacaacaacacatgaagaaaaccttctgga

SEQ ID NO: 393401 - DNA, 596 bp, Homo sapiens
aacgattaccataatattcaatttaaacataaaatgtaattgaaagtatgagattaatatgtggacatgaaatcatataatattccatggaaaaaacagaatgtataaggcaaagaggtttaaagtaacatcaaaactaacgctcactatacaaattctatgaaatcctcataattacactgtgaagcaggtgttgttagagccacataatctcaaacaaattatttattatctaaaattacatagatattaaaaggttargccatatatgaatttaggattctctcaaaaattttttctcttcctcctacatcaaacttccctaaattatagaaaagtcacaatgttaccaaacatattcacaaaacacatataatcttgaatccaaatttcagttacagcagaaaaaataaaactctagatcaatctcaatcgtgtaaataaattcagatttccaatctaagagtctcaatttgacatacttctttctctctcttctttcaaaccaggagaaatataaatatgagccacaaccttacaaaagctagaaaatatttacaattccacacaacaacacatgaagaaaaccttctgga

SEQ ID NO: 393402 - DNA, 596 bp, Homo sapiens
aacgattaccataatattcaatttaaacataaaatgtaattgaaagtatgagattaatatgtggacatgaaatcatataatattccatggaaaaaacagaatgtataaggcaaagaggtttaaagtaacatcaaaactaacgctcactatacaaattctatgaaatcctcataattacactgtgaagcaggtgttgttagagccacataatctcaaacaaattatttattatctaaaattacatagatattaaaaggttaagccatatatgaatttaggattctctcaaaaattttttctcttyctcctacatcaaacttccctaaattatagaaaagtcacaatgttaccaaacatattcacaaaacacatataatcttgaatccaaatttcagttacagcagaaaaaataaaactctagatcaatctcaatcgtgtaaataaattcagatttccaatctaagagtctcaatttgacatacttctttctctctcttctttcaaaccaggagaaatataaatatgagccacaaccttacaaaagctagaaaatatttacaattccacacaacaacacatgaagaaaaccttctgga

SEQ ID NO: 393403 - DNA, 637 bp, Homo sapiens
taaatatgagccacaaccttacaaaagctagaaaatatttacaattccacacaacaacacatgaagaaaaccttctggacatcaaaagtttaaaccagtcaagactgaacaccaagataaagtgcatgcctctgaagagcttgagctagtcaagaagcccagaaatccctaaaagaggtgtgtatactgaggactgaggatcaaaacctgtgatctttacttggaacagaaatattgcagcatgtgaaccctccacagagtgacagagggaaaggagtttaaagggaaacatgcaaatgtatcacctttggaataattaggacacgtgtgtggtgtaatgaaagaaggcaaaaagatggggaagaagccagacagatggcaattttcattctattatgaaaagaaaaggataagtcacaagtcacatgaygaaattaacaactatgaatccactctaagccatagtcaatcctatagcctaggagtcattctaacagatgagagtgttttggagacaagattccaaactcgtctgccttccatcatacttactacccccagctcctcctccacaatatccttacacaagtatctagaatattcaaagactaataatattatataattatttataata

SEQ ID NO: 393404 - DNA, 515 bp, Homo sapiens
gaggactgaggatcaaaacctgtgatctttacttggaacagaaatattgcagcatgtgaaccctccacagagtgacagagggaaaggagtttaaagggaaacatgcaaatgtatcacctttggaataattaggacacgtgtgtggtgtaatgaaagaaggcaaaaagatggggaagaagccagacagatggcaattttcattctattatgaaaagaaaaggataagtcacaagtcacatgatgaaattaacaactatgaatccactctaagccatagtcaatcctatagcctaggagtcattctaacagatgagagtgttttggagacaagattccaaactcgtctgccttccatcatacttactacccccagctcctcctccacaatatccttwcacaagtatctagaatattcaaagactaataatattatataattatttataataattgtattacaaaaataaaacatgatgacctttataaaaatactagaagaaaaagggaaaattaca

SEQ ID NO: 393405 - DNA, 515 bp, Homo sapiens
gaggactgaggatcaaaacctgtgatctttacttggaacagaaatattgcagcatgtgaaccctccacagagtgacagagggaaaggagtttaaagggaaacatgcaaatgtatcacctttggaataattaggacacgtgtgtggtgtaatgaaagaaggcaaaaagatggggaagaagccagacagatggcaattttcattctattatgaaaagaaaaggataagtcacaagtcacatgatgaaattaacaactatgaatccactctaagccatagtcaatcctatagcctaggagtcattctaacagatgagagtgttttggagacaagattccaaactcgtctgccttccatcatacttactacccccagctcctcctccacaatatccttacacaagtatctagaatattcaaagactaataatattatataattatttataataattgtattacaaaaataaaacwtgatgacctttataaaaatactagaagaaaaagggaaaattaca

SEQ ID NO: 393406 - DNA, 559 bp, Homo sapiens
caaattttctatgttttttaaaaatatgccttctctaaaatgttttctctctgaaatgatatttagaagacataattgaaaataaatacaaaataaagtgataaaaaataatctggcaaaattcaggatgtaatgagtaaagacaaccatgaaagaaatgaagatcaataaaagcaggaaaaaaagtgggaagtggagagaataatgctgctaaaaacacagataagaatataaatgacaggcttaaatatatcctgagcaaaacraaatagaaaacacaagaaggtgaaatgtaacattaaagtcaggtccaacaaatgagaaattagtgtgaaagagctcacaatatctggttaaaaaattcaaagataaaagaaaacttttctgaaatgaagaaaacattgaatctaatggttaaagggcttatctttatccagaaaaaatatgttatagtatgaccacatcaaggcagatgcaactgaatttaccggacttcacaaacacaaaataaacaacccacaaaaaaaaaaaaaaaaaatagagtccccatgaggcttta

SEQ ID NO: 393407 - DNA, 487 bp, Homo sapiens
aattcaggatgtaatgagtaaagacaaccatgaaagaaatgaagatcaataaaagcaggaaaaaaagtgggaagtggagagaataatgctgctaaaaacacagataagaatataaatgacaggcttaaatatatcctgagcaaaacaaaatagaaaacacaagaaggtgaaatgtaacattaaagtcaggtccaacaaatgagaaattagtgtgaaagagctcacaatatctggttaaaaaattcaaagataaaagaaaacttttctgaaatgaagaaaacattgaatctaatggttaaagggcttatctttatccagaaaaaatrtgttatagtatgaccacatcaaggcagatgcaactgaatttaccggacttcacaaacacaaaataaacaacccacaaaaaaaaaaaaaaaaaatagagtccccatgaggctttaatgaagacaactattagaggccaggcgcaggggctaacacctacagt

SEQ ID NO: 393408 - DNA, 495 bp, Homo sapiens
cagatgcaactgaatttaccggacttcacaaacacaaaataaacaacccacaaaaaaaaaaaaaaaaaatagagtccccatgaggctttaatgaagacaactattagaggccaggcgcaggggctaacacctacagtcccaacactttgaaaggccaaggcaggagaatcacttgagcccaggagttcaagataagaccagcctgggcaacatagcaagaccccatctctatcagaaaaacttaaaaaagaaaactatccactaaaaatgaatagagataacatgatacaagtgagcattctgaagcctaatatcaaaatgttctggggtttgcggttaaagaacagaatgyaaatgttacaaaccataactgtataaggactaattatattcataacaaaaataagaagagaaagatagtagaaatatattctggtccattcaactttcacagtgggagagaatcaacaaattatgttatgggtgattaaatat

SEQ ID NO: 393409 - DNA, 495 bp, Homo sapiens
cagatgcaactgaatttaccggacttcacaaacacaaaataaacaacccacaaaaaaaaaaaaaaaaaatagagtccccatgaggctttaatgaagacaactattagaggccaggcgcaggggctaacacctacagtcccaacactttgaaaggccaaggcaggagaatcacttgagcccaggagttcaagataagaccagcctgggcaacatagcaagaccccatctctatcagaaaaacttaaaaaagaaaactatccactaaaaatgaatagagataacatgatacaagtgagcattctgaagcctaatatcaaaatgttctggggtttgcggttaaagaacagaatgtaaatgttacaaaccataactgtataargactaattatattcataacaaaaataagaagagaaagatagtagaaatatattctggtccattcaactttcacagtgggagagaatcaacaaattatgttatgggtgattaaatat

SEQ ID NO: 393410 - DNA, 608 bp, Homo sapiens
acacaaaaattaaagaactaaatataatttatacagcacataactaaactataaatcttcaaattaaaagaaaataggtacatacaaaatatcacatagagagaaatattaataccatgaaaatattaaaataaaagcataaaattaattcatttatttaccctattagtattttttgaacacctatgtgccaggtattgtgctgaatgccagtaagatatagttcctgcatcttggagttttcgtggaggagacagagattaatcaaacaatcacacaaatgtaaaattgcaaccataaaaattactctgaaatacaatgaaaattactataagagagggatttgatgtgagtcagagaagtttcccctaagaaagcaacactgragctgagatctaaagggtaaacagcagttaactgagtggagaacaaaggttttcctgcagggggaacaatctgctccgcgaggccagagtggggccttgggagttgtgcctgaaaccacattgtgaggaagtgaggggaagcattgtgcagataatgctgaaataagtagtggaagatgcttcctaagagaatgagaaatccaagactactaagcagaagaa

SEQ ID NO: 393411 - DNA, 608 bp, Homo sapiens
acacaaaaattaaagaactaaatataatttatacagcacataactaaactataaatcttcaaattaaaagaaaataggtacatacaaaatatcacatagagagaaatattaataccatgaaaatattaaaataaaagcataaaattaattcatttatttaccctattagtattttttgaacacctatgtgccaggtattgtgctgaatgccagtaagatatagttcctgcatcttggagttttcgtggaggagacagagattaatcaaacaatcacacaaatgtaaaattgcaaccataaaaattactctgaaatacaatgaaaattactataagagagggatttgatgtgagtcagagaagtttcccctaagaaagcaacactggagctgagatctaaagggtaaacagcagttaactgagtggagaacaaaggttttcctgcagggggaacaatctgctccscgaggccagagtggggccttgggagttgtgcctgaaaccacattgtgaggaagtgaggggaagcattgtgcagataatgctgaaataagtagtggaagatgcttcctaagagaatgagaaatccaagactactaagcagaagaa

SEQ ID NO: 393412 - DNA, 528 bp, Homo sapiens
  misc_feature (1)...(528): n = A,T,C or G
agtgcagcaagggtggagggaggtgcccrcgctgggtcggaggagcaggaggagtaaggagggaagactcctgggtggcatggagctcttgcacctctaggcactgcccagccctgtgtcagccagggctgaacccccacaggataaggaagcctgtgtgtgtaccaacaatcaaagctacatctgtgacacaacaggacactgctatgggcagtctcagtgttgtaactactactatgaacattggtggttctggctcgcgtggaccatcaccatcatcctgagctgctgctgtgtctgccaccacagccaagccagccctcaagtccagcagtagcaacatgaaatcaacctgcctgcctatccagaagcccgcaattactcagtgctaccattttatttcaccaaactatttattaccttcttatgaggaagtggtgaactaacctccacctgtttccctccctgtctgtccattgtggatgagctctnnnnnnnnnnnnnnnnnnnnnnnnnnnnnnnnnnnnn

SEQ ID NO: 393413 - DNA, 528 bp, Homo sapiens
  misc_feature (1)...(528): n = A,T,C or G
agtgcagcaagggtggagggaggtgcccgcgctgggtcggaggagcaggaggagtawggagggaagactcctgggtggcatggagctcttgcacctctaggcactgcccagccctgtgtcagccagggctgaacccccacaggataaggaagcctgtgtgtgtaccaacaatcaaagctacatctgtgacacaacaggacactgctatgggcagtctcagtgttgtaactactactatgaacattggtggttctggctcgcgtggaccatcaccatcatcctgagctgctgctgtgtctgccaccacagccaagccagccctcaagtccagcagtagcaacatgaaatcaacctgcctgcctatccagaagcccgcaattactcagtgctaccattttatttcaccaaactatttattaccttcttatgaggaagtggtgaactaacctccacctgtttccctccctgtctgtccattgtggatgagctctnnnnnnnnnnnnnnnnnnnnnnnnnnnnnnnnnnnnn

SEQ ID NO: 393414 - DNA, 592 bp, Homo sapiens
ccaaactttgctcccatcattgtagccaatatacccttccttcatcctcagagatgtgaatatcttcatggtcttgaaacacccccaatggtctcccttgccttcaaacaccctcatgtattgtgtgagcatgagcctgttttatctccaaaayatcaaagcgtaagccctagctctgaaactcccatccaactgctacctctgcctagggccacagtcccctctcttactgagactgttttgaagcaagtattcagccccattctccactcaaccagtcccctctggcctggctagttcccaagatcaaccacttctgatcaaccgccacttaattctgcttttactaataacccaggatccaaattgctcttggctttccacccactgagaccctactttgtaagagaaccagcactgaagtgtgattttgcctggtaacattagacaaagtcaggctgtctaatcacagctgggtcccaactaggggtgaagggttgggttgcaaggcacttccccacccctcagttgcacccagtcattttcattctgctcatgctcggtctcaccctctcactctcagagaatgacc

SEQ ID NO: 393415 - DNA, 592 bp, Homo sapiens
ccaaactttgctcccatcattgtagccaatatacccttccttcatcctcagagatgtgaatatcttcatggtcttgaaacacccccaatggtctcccttgccttcaaacaccctcatgtattgtgtgagcatgagcctgttttatctccaaaatatcaaagcgtaagccctagctctgaaactcccatccaactgctacctctgcctagggccacagtcccctctcttactgagactgttttgaagcaagtattcagccccattctccactcaaccagtcccctctggcctggctagttcccaagatcaaccacttctgatcaaccgccacttaattctgcttttactaataacccaggatccaaattgctcttggctttccacccactgagaccctactttgtaagagaaccagcactgaagtgtgattttgcctggtaacattagacaaagtcaggctgtctaatcacagctgggtcccaactaggggtgaagggttgggttgcaaggcacttcmccacccctcagttgcacccagtcattttcattctgctcatgctcggtctcaccctctcactctcagagaatgacc

SEQ ID NO: 393416 - DNA, 579 bp, Homo sapiens
ggggcaccccctagtatagtcttggaggggttcctcttttcatggggctgactctgcaggtgtctggttggaatggttcatggttgtctttacaatgtagggtaggtcctcttgccagttttcaggcgtgaattcaggctaacagttttagggtaaagggaaaaattttcatcagtgctgagttgcaaatgggaaacaaaagcctgagaaacaatagaattgaataaatggcaagaagcacaaacattaggtgtacgcagattctgctttttcctctgtgatgtggtcacaaacttactccaactacaactttgtaactaacstcgtcttcacagctcccacacaaggcagtagaaagacttcagtctgttatttctgctctccagctctccaccatgttcctctctagacagtgtttgatgtgtgagtgcaaggacatgtatggaattgtgagggggcacagggaatagaccctcaggtctgtcctgtgtccttgaggtccatgccaatcctggctctacatctgatatttcttggggagtatacagcccggtttcttctctggatgttctgattagc

SEQ ID NO: 393417 - DNA, 604 bp, Homo sapiens
cttcctgatatgtacacgcactgtgaaggatacaatatcacctatgcattattcctattgtaggtatttgacctgaacttaatcatgaagaagaaaacaactcttaactgagaggcattttgcaaagcctctgagatggatactttgaaaatagcaatgtaatgataagacaaaaaaataaaaaaattaattaatgtctagggaaattttctggattaagggagactaatagacatgcaaactaaatgtcagctgtgattcttgattgtgttctggattaggaaaattaaacatcataaatttaatttgaggaagaattttgaaaatttgaatatgaattgcatattacataaagtgctgtataaaagttaagttttctaaatgagatcactatattgtatttatgcaggaggatatcctgcttaagagatgggaagttcatacatttaataatgaagatacagcaaatgtgggaaaatgttaaaaatcattgaattaaagtaaagtatatgtgggtattccttgtacaatttttgtaactttgccataagtttgyactttttaaaataaaatgtttgaaaaattacaataattttcatcataa

SEQ ID NO: 393418 - DNA, 588 bp, Homo sapiens
caggcaaacttgaaagttaaatgttttggggtaatgcwtgcaactagccacactttgcttgtcagtaactagttactacattagtcttccccttctaatagttttgatccctattctaggaatggtacaagttatccagagactgagttgttcttttatcagagtaaattcttcgcatatgtttgcaagtcatgactaaagaatacacaaaagagcatatttaaatatattttgctaattagtaacaataacttttttcttgtttctgatttttctctgggattatgccagttacttgatacatgttcattaattttatactaaaaacaacattaataacggtgctattctaagattttagtccaacttcaagctaatcatattaatacaagctatcctgcttagtgaataataatcataatataatttgtaaaataataataatataatttgtaagtgaatgaaatggactcccttagaaaatgttaatagacacctttttatagcatatgtcctataactgaataaaaagcttagctaattgattggttatttatgttgtattaaataatgatttaatagtaaatg

SEQ ID NO: 393419 - DNA, 590 bp, Homo sapiens
cctgggcctgcaggttttattttttaaatgtaacaaagctgatttgatgttcctcaaaatgcttctatgttgatcagcactcaatgcaaggtctagttgtcataatgacactgtatatactccagtcaggagagtaagaagtttctgctttgcaaactagtgggccatttattcaaccaattttaatcttcctgacagtcatacatttacctaaaacaataataaaaaaaactctattaaaacactagaaaatagttggtattactccagaaaggccaaaccaattgtcaaggattagatgtatattaaatgggctgatttttgacaggcaaacttgaaagttaaatgttttggggtaatgcttgcaactagccacactttgcttgtcagtaactagttactacattagtcttccccttctaatagttttgatccctaytctaggaatggtacaagttatccagagactgagttgttcttttatcagagtaaattcttcgcatatgtttgcaagtcatgactaaagaatacacaaaagagcatatttaaatatattttgctaattagtaacaataacttttttcttgttt

SEQ ID NO: 393420 - DNA, 590 bp, Homo sapiens
cctgggcctgcaggttttattttttaaatgtaacaaagctgatttgatgttcctcaaaatgcttctatgttgatcagcactcaatgcaaggtctagttgtcataatgacactgtatatactccagtcaggagagtaagaagtttctgctttgcaaactagtgggccatttattcaaccaattttaatcttcctgacagtcatacatttacctaaaacaataataaaaaaaactctattaaaacactagaaaatagttggtattactccagaaaggccaaaccaattgtcaaggattagatgtatattaaatgggctgatttttgacaggcaaacttgaaagttaaatgttttggggtaatgcttgcaactagccacactttgcttgtcagtaactagttactacattagtcttccccttctaatagttttgatccctattstaggaatggtacaagttatccagagactgagttgttcttttatcagagtaaattcttcgcatatgtttgcaagtcatgactaaagaatacacaaaagagcatatttaaatatattttgctaattagtaacaataacttttttcttgttt

SEQ ID NO: 393421 - DNA, 388 bp, Homo sapiens
acttaggactgtcagaggaatcagcctcattttgttcatgacttctaaaggactttcagagagaaagagcattttaaaaataagagttaatatttaaagtttatgaattgttgtaaccaacttggttttaaagctggaagtcacctattaataccataccactaacacatttacattaataatagcygttctatgaatagcattagcatcttctcaataaacccatgtagccaacacttacacttcttgattcctgaataaatcatgcaacaaaagatgaatttttagtttctatgaattacaagtaaaaagagtcacctctttaaattatgtgagttgtgtttttttacggatagcattaaggtttcctaattacttttttttgttt

SEQ ID NO: 393422 - DNA, 582 bp, Homo sapiens
ctttgtaattgcctgtggtgaagcatgaaataccatacataggatttttgctgaggaagggagggcttcttaagactcaccacttagctattagggaagtcactcagccttcttagtgttaattttcatatttataaaatgagataatatcatctacttcacatatttgttgttacattagataaggtaataagtactccattgtgtttcattcctgggggacttctagaacaggtgttcaatatataatagatgttatagcccgtttgtatgattgtcaatatttcaagaactcaagatatgtatcaagggtcctaacagtcraaacaaatcaatcctttccccccaaaaaatgattttcaatactattgcttcatactgttttaagtagcatgtgttctaacaaaaacagagattggttgcagttatccttgactgaaataaaatgtagatattacttccagaatggcaaagtgaggaagtccataaactctatccccttcaaaaccaaccataactggtgaaaaaatatttatcttaaaaggcaaacttttcttttaaaaaagaaacatttaaatagta

SEQ ID NO: 393423 - DNA, 599 bp, Homo sapiens
tttgttgttacattagataaggtaataagtactccattgtgtttcattcctgggggacttctagaacaggtgttcaatatataatagatgttatagcccgtttgtatgattgtcaatatttcaagaactcaagatatgtatcaagggtcctaacagtcgaaacaaatcaatcctttccccccaaaaaatgattttcaatactattgcttcatactgttttaagtagcatgtgttctaacaaaaacagagattggttgcagttatccttgactgaaataaaatgtagatattacttccagaatggcaaagtgaggaagtccataaactctatccccttcaaaacyaaccataactggtgaaaaaatatttatcttaaaaggcaaacttttcttttaaaaaagaaacatttaaatagtatctcctcaaattcaagtctactggaacctcagaatgatcatattttaaaattgggtcattacaaatataattacataagttgaggttatactgcactaggatgagccctaaatccaatgactgaagttcttataaggagaagagagaacacacagagatacagcagggaaaattcatgtgaa

SEQ ID NO: 393424 - DNA, 468 bp, Homo sapiens
  misc_feature (1)...(468): n = A,T,C or G
agatgcttttttttctntgagccaaatctaacataaaattatagaactctatcataatattgtataaggagaccaatcttatttagatagrgactacctatattttaactggatctntaagctctgggcagagctcacattgaatcctgggtctccaaaaaacggtagaattattttgaggttagaccctgtgatgctttcagagtgcacttaaatttttttttaacaaagatatttctgagtgtcttaactacactcttccttaaaaacccaagattagcctctgttgcaataactattttagtcaaaagatcaggtgaaaacggaattcagtcaactgaaggaaaaaaaaaacttttgctcaaaaaaaagacaaagtcttaggagagaaaaacaaaaaaaaaacccacaaaaacctgaaggccttttaaatacaaacatgcacacatgcacacatacacacacaca

SEQ ID NO: 393425 - DNA, 468 bp, Homo sapiens
  misc_feature (1)...(468): n = A,T,C or G
agatgcttttttttctntgagccaaatctaacataaaattatagaactctatcataatattgtataaggagaccaatcttatttagatagggactacctatattttaactggatctntaagctctgggcagagctcacattgaatcctgggtctccaaaaaacggtagaattattttgaggttagaccctgtgatgctttcagagtgcacttaaatttttttttaacaaagatatttctgagtgtcttaactacactcttccttaaaaacccaagattagcctctgttgcaataactattttagtcaaaagatcaggtgaaaacrgaattcagtcaactgaaggaaaaaaaaaacttttgctcaaaaaaaagacaaagtcttaggagagaaaaacaaaaaaaaaacccacaaaaacctgaaggccttttaaatacaaacatgcacacatgcacacatacacacacaca

SEQ ID NO: 393426 - DNA, 590 bp, Homo sapiens
cagaattcccaagtcagaggctgtcagctaggagcaagatgcttcctagtgtaaccgttcaatgggttcaccttgcccgctgccttgacagagccgatttatcaagacaggggaaatgcaatggagagagagtaattcacacagaaccagctgtgcgggagaccggaggagttttattagtactcaaattagtctccctgagcattcagggatcagagtttttcaagataatttggggagaagmagctcgggaagtggggtggggagtgctgattggtggattgaagatggaatcacagtggggtcaaagtgaagttttcttgctgtcttctgttccgtgggtgggattacagaactggttgaaccagattaccagtctgggtagcatcagctgatccatcgagtccaggatatgcaaaatatctcaagcactgatttcaggttttacaacagtgatgttatccccaggaataatttttgggaggttcagactcttgcagccaaaggctgcatgacccctaaaccataatttctaatcttgtagttaatttgttattcctgcaaaggcagactggtccccaggcaagaag

SEQ ID NO: 393427 - DNA, 516 bp, Homo sapiens
tttgaagatgaaagtcatatgaactgaaaggtaccacagcttttattttaccctttaaaaaatatttgatccaagcacttatcttcttttaggccaattaattagaccttttttttaaatagacattacacacccaacacatatataactacacagacaggaagaagaaaacccagtagccatacgatttttcattttctgatctyctatttggattattggtccctttaagagggagggctaggaaaacaagcagcttttagagcctaataggcaggcattactgggaggcgaaaagagattttgagagggatctatccacttttaattcctggggttcaatgaggaagacagagatctctcccctctcttgtgtgcattaaaattggcaaagcagaatggagaaaaataatacagccaactgagaaaaagccgttttccagcaaagcaagatcccagaagagaaaaaaataaaataaaacaaaaaggccttttaaatatacctgtaacttagat

SEQ ID NO: 393428 - DNA, 516 bp, Homo sapiens
tttgaagatgaaagtcatatgaactgaaaggtaccacagcttttattttaccctttaaaaaatatttgatccaagcacttatcttcttttaggccaattaattagaccttttttttaaatagacattacacacccaacacatatataactacacagacaggaagaagaaaacccagtagccatacgatttttcattttctgatcttctatttggattattggtccctttaagagggagggctaggaaaacaagcagcttttagagcctaataggcaggcattactgggaggcgaaaagagattttgagagggatctatccacttttaattcctggggttcaatgaggaagacagagatctctcccctctcttgygtgcattaaaattggcaaagcagaatggagaaaaataatacagccaactgagaaaaagccgttttccagcaaagcaagatcccagaagagaaaaaaataaaataaaacaaaaaggccttttaaatatacctgtaacttagat

SEQ ID NO: 393429 - DNA, 516 bp, Homo sapiens
tttgaagatgaaagtcatatgaactgaaaggtaccacagcttttattttaccctttaaaaaatatttgatccaagcacttatcttcttttaggccaattaattagaccttttttttaaatagacattacacacccaacacatatataactacacagacaggaagaagaaaacccagtagccatacgatttttcattttctgatcttctatttggattattggtccctttaagagggagggctaggaaaacaagcagcttttagagcctaataggcaggcattactgggaggcgaaaagagattttgagagggatctatccacttttaattcctggggttcaatgaggaagacagagatctctcccctctcttgtgtgcattaaaattggcaaagcagaatggagaaaaataatacagccaactgagaaaaagccgttttccagcaaagcaagatcccagaagagaaaaaaataaaataaaacaaaaargccttttaaatatacctgtaacttagat

SEQ ID NO: 393430 - DNA, 509 bp, Homo sapiens
atatagaacagcagtttttgcagtggccagagatcaataatctggatactaaaaagaaggatgtgatgattmtggaaacctctggaaaataatgaaaccacttttgcaaaatttatatcttttttacttttattattttttatattatatataatataatatatattttttatattttatatatattttatatttatacatattttatatttatattttatatattttttacttttattattacattgaaagagatttgacctaactgactccatcttgtttctaacctccaagctgtccttgttcattcttgggcgttcgctgaactaactttgggaggaacttagtttatggtttagctctgaaacaaagacaataacagccctttcccaaaataaactcccttcctgcctggggactagattgcctatatagggctaacaaattagccacaagattagaaattatgtttaggggtcatgcagctggagggtgcaagattctaaacc

SEQ ID NO: 393431 - DNA, 527 bp, Homo sapiens
agactccatctcaaaaaaaaaaaaaaaaagtctagaaaaataatatcagaactgagcaacatggtgaattcaagttaaaatagttttgtgaatttagaaaagcatataaaattctataaaccttaaaactcatcactggtaaaattaaagtgttgaataagatgctttctagttctcatgtttgggtgacttgctatataagggagttgaaataatcactctctcccatccatcacgatgaaatctcaagaaggatatgttttgttatcaaagagaatatggggtccacmaggactcaaaaattggccagccagaggaagagagtttataagagaagaaagaaaaatataaatagaaccacgtgaggtcagttgctgtcgtatttctgatctttccttgcttgtccctttgtgtgtctttcccaccccttcttcacttcagtgcagctggtttagtaggccagggtctgaaagtggcccctttctaatgtgtctcctttgaactaatctggggaaaagaagcaatga

SEQ ID NO: 393432 - DNA, 540 bp, Homo sapiens
atcctttaagatattagtttccctaaagtccaaaaatgacataatttggcttacttggtataaaattatacaggaagcattgtcaaatatgaaatggtgtttggttttatttgggctgtatttatgtaaatgttattggtaagtgttccagaattaatggaaaggcctgtaattctgatatgacttagtgtacattatcaataataataataattgttatgttaaaattattgtgtaccactgaggtaacaaatttccttgtcaattgtgtctttgactatgtctgccctaaaaccttttttcatccaaggacaattgtgctcatgttttggtcctctttagaaggtgtttttataatcagctacaaaactctaacaggtgcccttaaatgcaggtttctgataactttggagattgtaacatcagaaaagaggaaaaactttcaggactcatrgagagctaaaatgttcatgagtattaaacagaacaggaattaactgcatggactcaaataatcttttttactttttacttaaaatg

SEQ ID NO: 393433 - DNA, 522 bp, Homo sapiens
cctaatttggagtcactgaaaactaagctgtgctttcttaaagtccggcaaactgaagccagtcaacttaaactttagaagaaagtaactgcagcctatttacatacataagccacttttcatacctgcctactgatgtacggacttcaaagtaacrtggcctatatgaatatttccagtattgttcttttttttgctgttgtttttctcccttcctcccactattttctcttcatagaacatgagactttgcaatctgctaaaaataagcttttgggacctacccatctagtaataaaccatcctaaccatgagaaatcagatgaaaactgagaccagagactcatattctcctaaaatgctttctcctaaagattttttttttaaagggagcaggggaatgggaaaggaaattatcttgggctctgtcaaactgggagctgcctcccattctatttaaagttattcctttgctcactgagatgaatgcctattctgattgcctcctttggaaaggtcaat

SEQ ID NO: 393434 - DNA, 449 bp, Homo sapiens
catgccagacatgtttttgcctcacgatctttgcatttacagcctctctgcttggaaccatgttcccccacatatctgcgtggttaagtccacgcacttctccaagtcttcacttgaacataaccttttcagtgagtgaggccctgccaggcaaccctttctcaaattgtacactccccctactaccagatcgtttctcttcctcccactgttttcatttgttctctttgttaattattacagccaayatgccacatgtatttttattttttgtgactgcctgtctcaattactaatgagggcaaggtttttgtctgttttgttctctgccaaatccccagaacttaaaaaaaagtcagtaaatatttgaatgaataaataaatcaaagaaagatcttcttgcagtcaaatgctatcagtttagcattgcactgttagagtttaatctt

SEQ ID NO: 393435 - DNA, 640 bp, Homo sapiens
gtaataaaggaaagtttctgtaatcaaaggctggctgtacacaagccaatatagatccttcaaagcttcttaaaacctttaaagttgccaaagtgcacggtgactctcaaatttaggtgacgtttaaaaaatcaaagaaatttatcaatgaactggtattatatagaacataatttgagaagtcctctgctagatatctgaaacactgcctaactcacattagaatcttgatgacttatctggaaatgacctttactgtgcaaacttggtaaaataaaataaaataaaataaaatacaagaagaagcacgatgatatgcaacagatagtgactggtgattgggtattgtaattttcatccaggaggcagatggaaaaagtgsgactagaattttcactggagatgtcagaggtatttgaaccagagtgacctcatcttgaatagggactaagtaaaataaggctgagatctgctgggctgcattctcaataggttaggcattcttagtcacaagatgagataggaggcacaagatacaggttataaagacctcactgataaaactggttgcagtaaaggagccagcctgaaacctccaaatccaagatggcgttgaaagtgacttccggtcatcctcact

SEQ ID NO: 393436 - DNA, 640 bp, Homo sapiens
gtaataaaggaaagtttctgtaatcaaaggctggctgtacacaagccaatatagatccttcaaagcttcttaaaacctttaaagttgccaaagtgcacggtgactctcaaatttaggtgacgtttaaaaaatcaaagaaatttatcaatgaactggtattatatagaacataatttgagaagtcctctgctagatatctgaaacactgcctaactcacattagaatcttgatgacttatctggaaatgacctttactgtgcaaacttggtaaaataaaataaaataaaataaaatacaagaagaagcacgatgatatgcaacagatagtgactggtgattgggtattgtaattttcatccaggaggcagatggaaaaagtgcgactagaattttcactggagatgtcagaggtatttgaaccagastgacctcatcttgaatagggactaagtaaaataaggctgagatctgctgggctgcattctcaataggttaggcattcttagtcacaagatgagataggaggcacaagatacaggttataaagacctcactgataaaactggttgcagtaaaggagccagcctgaaacctccaaatccaagatggcgttgaaagtgacttccggtcatcctcact

SEQ ID NO: 393437 - DNA, 512 bp, Homo sapiens
atcgagttgattccattccattccgttccattccattccattccattccatttcgttccattccattctattccgtaccattccattccattccattccattccattccattccatgccattccactcgggttgattctattgctttccattccatttgggttgattccaatccattccattccattccattccattccattccattgcactaggtttgattccattccactgcattccattccattccattccgttccattccattccattacattcggattgattgtattcaattccttacactccattacattccattccattcgagttgtttccattccattccattccattccattccattccattgcactcaggttgattscattccattccattccattccattccattccattccattccatttcgttccattccattctattccgtaccattccattccattccattccattccatgccattccactcgggtttattccattc

SEQ ID NO: 393438 - DNA, 512 bp, Homo sapiens
atcgagttgattccattccattccgttccattccattccattccattccatttcgttccattccattctattccgtaccattccattccattccattccattccattccattccatgccattccactcgggttgattctattgctttccattccatttgggttgattccaatccattccattccattccattccattccattccattgcactaggtttgattccattccactgcattccattccattccattccgttccattccattccattacattcggattgattgtattcaattccttacactccattacattccattccattcgagttgtttccattccattccattccattccattccattccattgcactcaggttgattccattccattccattccattccattccattccrttccattccatttcgttccattccattctattccgtaccattccattccattccattccattccatgccattccactcgggtttattccattc

SEQ ID NO: 393439 - DNA, 512 bp, Homo sapiens
atcgagttgattccattccattccgttccattccattccattccattccatttcgttccattccattctattccgtaccattccattccattccattccattccattccattccatgccattccactcgggttgattctattgctttccattccatttgggttgattccaatccattccattccattccattccattccattccattgcactaggtttgattccattccactgcattccattccattccattccgttccattccattccattacattcggattgattgtattcaattccttacactccattacattccattccattcgagttgtttccattccattccattccattccattccattccattgcactcaggttgattccattccattccattccattccattccattccattccattccatttcgttscattccattctattccgtaccattccattccattccattccattccatgccattccactcgggtttattccattc

SEQ ID NO: 393440 - DNA, 521 bp, Homo sapiens
tctccttggaagcgaacgtcaaagatccttgggccactgaatgctccgaggccaaaggagaaagtccacagtgaggaggccactcgacttccctggacactgaagcgggggccttggggatrgaactgtagagggggagctggacccgggggcacaggggacttcagggaccaggacccacctgtgccattgtctgggatcagcaccacattcaccaggccggcctcaaactgggcctccagctgggccaggctgtcgtagtagcggccttgatagaacaccttctggatagtccagcgggcagggtcaagggccttgtggttcactagcagctccaagcccacgtggtgcaggaagaacccagcgcccgagatgttgtagtagaggccaaaccaggtggcccggtcccctgattgcagaccacggggagccgtggtcattgtcaccaggttccgtccccggtgcttgtagaagcaacagtggtggagaagcccagaagcctggggcagctctctgttgaa

SEQ ID NO: 393441 - DNA, 521 bp, Homo sapiens
tctccttggaagcgaacgtcaaagatccttgggccactgaatgctccgaggccaaaggagaaagtccacagtgaggaggccactcgacttccctggacactgaagcgggggccttggggatagaactgtagagggggagctggacccgggggcacaggggacttcagggaccaggacccacctgtgccattgtctgggatcagcaccacattcaccaggccggcctcaaactgggcctccagctgggccaggctgtcrtagtagcggccttgatagaacaccttctggatagtccagcgggcagggtcaagggccttgtggttcactagcagctccaagcccacgtggtgcaggaagaacccagcgcccgagatgttgtagtagaggccaaaccaggtggcccggtcccctgattgcagaccacggggagccgtggtcattgtcaccaggttccgtccccggtgcttgtagaagcaacagtggtggagaagcccagaagcctggggcagctctctgttgaa

SEQ ID NO: 393442 - DNA, 521 bp, Homo sapiens
tctccttggaagcgaacgtcaaagatccttgggccactgaatgctccgaggccaaaggagaaagtccacagtgaggaggccactcgacttccctggacactgaagcgggggccttggggatagaactgtagagggggagctggacccgggggcacaggggacttcagggaccaggacccacctgtgccattgtctgggatcagcaccacattcaccaggccggcctcaaactgggcctccagctgggccaggctgtcgtagtagcggccttgatagaacaccttctggatagtccagcgggcagggtcaagggccttgtggttcactagcagctccaagcccacgtggtgcaggaagaacccagcgcccgagatgttgtagtagaggccaaacyaggtggcccggtcccctgattgcagaccacggggagccgtggtcattgtcaccaggttccgtccccggtgcttgtagaagcaacagtggtggagaagcccagaagcctggggcagctctctgttgaa

SEQ ID NO: 393443 - DNA, 521 bp, Homo sapiens
tctccttggaagcgaacgtcaaagatccttgggccactgaatgctccgaggccaaaggagaaagtccacagtgaggaggccactcgacttccctggacactgaagcgggggccttggggatagaactgtagagggggagctggacccgggggcacaggggacttcagggaccaggacccacctgtgccattgtctgggatcagcaccacattcaccaggccggcctcaaactgggcctccagctgggccaggctgtcgtagtagcggccttgatagaacaccttctggatagtccagcgggcagggtcaagggccttgtggttcactagcagctccaagcccacgtggtgcaggaagaacccagcgcccgagatgttgtagtagaggccaaaccaggtggcccggtcccctgattgcagaccacggggagccgtggtcattgtcaccaggttccgtccccggygcttgtagaagcaacagtggtggagaagcccagaagcctggggcagctctctgttgaa

SEQ ID NO: 393444 - DNA, 580 bp, Homo sapiens
gaaaaatataacagttctaaatttgtatgcatctaataacagcctcaaaatacataaagcagacattgacagatctcaagggagaaacggacaaatctgtaatcaacggaagacttaagctcatctttcattagtgatagagcaaatggaagcataatatgttcaggagcacaggctttgaagtttcacagacctgggtagaaatactggatttgcacatccaggaaaggtgataaaacaaagatccagtcacagctttagctagaacaaagatggttaaggcctagacagccaggatgaaataacagaggagaaatacaaaagctgacatccaggggagataacctgtggctgtggctgtggctgtgttcagctatttrttcttccgactctgaaaggaactttttttttttttggagataagagtcttgttctgccacctaggccggagtgcagtggcatgattttggctcactgcaacctccgcttcctgggttcaagcaattcttgtgcctcagccacccaagtagctgggattacaggtgtgtgctaccaaaaatttccttcaaccctgccactg

SEQ ID NO: 393445 - DNA, 573 bp, Homo sapiens
tgggtcccacaccaaaccagctgaatcagaatctcttctgagtcgagcctagaaatctgcatttctacaaatcgcatcgcccactctgtgcttctgattgaggtattctgggaccatggtaagacaaccaggtaaattaggaacaaagatttgtaatcacacaaacctggatcaaatatggtttctgcacttacttgttgcatggtcttgaacaagytatttgacttcactgagccctagtagtcccatctgtaaaactgggtgatgatattacttacctctcagaattactcggaagatttaattagagattgtatataaaatacaagcacttggctataataagcactcaaaatctttcacgacatttattcactgtcatttgtgagtatccataatctggaagacaacgtggggaagaggcagagggaagaataccaaaaaagaacagccccctcccttcaaggaaattctctctagtggggctgcttttaaagctttcctaggtcaggaatggtggctcacacctgtaatcccaaatttttgggaggccacggtgggagcatcacgtgg

SEQ ID NO: 393446 - DNA, 530 bp, Homo sapiens
gattgggagctttgggaaagtggggctggcatcttattatctccgcagcccaggacttaacagtgcgtgcttggtatgcagcaggagctcaataagtaaatgctgacttgacaatcacgatccttttattcttattttatgtaagtttaggccagaaggagcttatgggactctaccactgataactggaaaccgattttgactaggatcaggaggtactgggataggatatgaaataaaagagaaaamgcagaggacagaggtaaagatctgttgccacaggatggacctggagctgtcctgggaacacctttggcgatcaggggttctctggcctgcagcagctcattcccagacagtggctgctctgctaccgtggacttgagcttctcccctgggtaaaggaatgaaatcccacccactcacccctttcctttcagaagtagtgtggggatgcacctttattggccattgaacattcacagagatgcatttagcatcatgaacgttataaaaacgacagtggcaaa

SEQ ID NO: 393447 - DNA, 530 bp, Homo sapiens
gattgggagctttgggaaagtggggctggcatcttattatctccgcagcccaggacttaacagtgcgtgcttggtatgcagcaggagctcaataagtaaatgctgacttgacaatcacgatccttttattcttattttatgtaagtttaggccagaaggagcttatgggactctaccactgataactggaaaccgattttgactaggatcaggaggtactgggataggatatgaaataaaagagaaaaagcagaggacagaggtaaagatctgttgccacaggatggacctggagctgtcctgggaacacctttggcgatcaggggttctctggcctgcagcagctcattcccagacagtggctgctctgctaccrtggacttgagcttctcccctgggtaaaggaatgaaatcccacccactcacccctttcctttcagaagtagtgtggggatgcacctttattggccattgaacattcacagagatgcatttagcatcatgaacgttataaaaacgacagtggcaaa

SEQ ID NO: 393448 - DNA, 609 bp, Homo sapiens
ggctcccgccaccatgcccagctaatctgtgtagttttagtagagatagggtttcactatgttggccaggctggtcttgaactcctgggctcaagtgatccaccccaccttggcctcccagagtgctggaattacaggcgtgagctatggcgcttggcatgcaggtagttctatctttaacctctaggagcaaataatgaatacctaccagtacggtgggaactacgggcataaggaagttgatctctgtcatttattggcagaagtggacatttagattaacacccaagaatttaaaaatgttataggctaattctttttgaatgtcacatttttatctctctgataacaagtcagagaagactggaaacactgcagagtgagtggcctcatgagactctttctctctctctgccatrtgaggacgtggtgaggaggtagccatctgcaagccaggacaagggccctcaccagaaacggaattggctgacaccttaatcttagactttgcagcctccataactgtgagaaaataaatgtctactgttgaagctgccacctatggtattttgttacagcagctggtgtagactaggacagcctgtgact

SEQ ID NO: 393449 - DNA, 609 bp, Homo sapiens
ggctcccgccaccatgcccagctaatctgtgtagttttagtagagatagggtttcactatgttggccaggctggtcttgaactcctgggctcaagtgatccaccccaccttggcctcccagagtgctggaattacaggcgtgagctatggcgcttggcatgcaggtagttctatctttaacctctaggagcaaataatgaatacctaccagtacggtgggaactacgggcataaggaagttgatctctgtcatttattggcagaagtggacatttagattaacacccaagaatttaaaaatgttataggctaattctttttgaatgtcacatttttatctctctgataacaagtcagagaagactggaaacactgcagagtgagtggcctcatgagactctttctctctctctgccatgtgaggacgtggtgaggaggtagccatctgcaagccaggacaagggccctcaccagaaacrgaattggctgacaccttaatcttagactttgcagcctccataactgtgagaaaataaatgtctactgttgaagctgccacctatggtattttgttacagcagctggtgtagactaggacagcctgtgact

SEQ ID NO: 393450 - DNA, 585 bp, Homo sapiens
atgcttagtggcttaaaacaacaacatttattatcccaccccatctgtgggtcaggaatctggctgtggcttacctgggtctcctgtctcagagcctcttacgtgggtgcaatcgaggtgtcagttggggctgtggtctcacctgaaggcctgactgggagcaggattcattttaatgcttactcttgtggctactagcaggcttcatttccttatggactgttcagttgagggtttcagtttctcttctcttctcttttctttctttccttyttttttttttttttcagggtctcactctgtcacccaggctggagtacaatggtacaatctcagctcactgcaaccgctgcctcccaggctcaagcaatcttcccacctcagccttctgagtagttgggactacaggtgcaaaccaccacacccagctgatttttgtagtttttgtagagatggggtttcaccatgtcacccaggctggtcttgaactcttggactcaagcagtctgctcacctcagcctccaaaactgctgggagtacaggaagcagccatcgtgccaggctggtttcagtttcttgtacat

SEQ ID NO: 393451 - DNA, 585 bp, Homo sapiens
atgcttagtggcttaaaacaacaacatttattatcccaccccatctgtgggtcaggaatctggctgtggcttacctgggtctcctgtctcagagcctcttacgtgggtgcaatcgaggtgtcagttggggctgtggtctcacctgaaggcctgactgggagcaggattcattttaatgcttactcttgtggctactagcaggcttcatttccttatggactgttcagttgagggtttcagtttctcttctcttctcttttctttctttccttcttttttttttttttcagggtctcactctgtcacccaggctggagtacaatggtacaatctcagctcactgcaaccgctgcctcccaggstcaagcaatcttcccacctcagccttctgagtagttgggactacaggtgcaaaccaccacacccagctgatttttgtagtttttgtagagatggggtttcaccatgtcacccaggctggtcttgaactcttggactcaagcagtctgctcacctcagcctccaaaactgctgggagtacaggaagcagccatcgtgccaggctggtttcagtttcttgtacat

SEQ ID NO: 393452 - DNA, 554 bp, Homo sapiens
tatacagaaaatacaagaaaatccactaaaaatctcttagaactaayaagtgagtcttgcaagtttcagaatacaagatgaatataaacaatatttcattgtatttctatggtttcctatctttttcatttcaccaagtcctgatggaatcaattgtatttttgtacagtagcaatgagcaaactaaaaatgaaattaagagagtagttttatttagaacagcaccaaaaagaataaaatactatatttgtccattcccaactgctatgaagaaatacctgagactgggtaattcaaaacgaagaggtttaattggctcatagttctactggatgtacaggaagcatggcagcatcagcttctagagaggcctcaggaaactttcaatcatggcggaaggcaaagggggagtgaggcatctcatggtcagagtagaaacaagaacgagtgaggtgggaggtgctacacacttttaaacgactagatctcccaaggactcactatcacgagaacagcactaaggtgatggtgctaaaccatttatgagaaaacta

SEQ ID NO: 393453 - DNA, 554 bp, Homo sapiens
tatacagaaaatacaagaaaatccactaaaaatctcttagaactaacaagtgagtcttgcaagtttcagaatacaagatgaatataaacaatatttcattgtatttctatggtttcctatctttttcatttcaccaagtcctgatggaatcaattgtatttttgtacagtagcaatgagcaaactaaaaatgaaattaagagagtagttttatttagaacagcaccaaaaagaataaaatactatatttgtccattcccaactgctatgaagaaatacctgagactgggtaattcaaaacgaagagstttaattggctcatagttctactggatgtacaggaagcatggcagcatcagcttctagagaggcctcaggaaactttcaatcatggcggaaggcaaagggggagtgaggcatctcatggtcagagtagaaacaagaacgagtgaggtgggaggtgctacacacttttaaacgactagatctcccaaggactcactatcacgagaacagcactaaggtgatggtgctaaaccatttatgagaaaacta

SEQ ID NO: 393454 - DNA, 503 bp, Homo sapiens
aacatgaggagttgtgctggtggtatgtgtgttggaggctgggctggctgattcacagtgacgaggatgtcaataataacaagaatgagaatgatggtacctaataaagactttttttyccaagtcccatctacaattttttcattgggtgttttgccaagtctttctcaatttcatctcagctttttttttttttttaaagaaaatgtattcaatacttaattgcatcacaaatgtagacatagaagaaaggacttcaaacggaatttatgggaggcaatgtgtgcggctttttgccttataaagctgtgtaaaaggtttggaatgatcttccagccccaaatttagatggcctcaaaaaaaaaaaaaaaaaaaaaaaaatcaggccttattgagggcaaggaatgttccaggtcagaaataaaagtgtcagcaactctcaataggttcatctttttatttcctgtccttctcccttttgtcttaaaatagaaacgctacca

SEQ ID NO: 393455 - DNA, 619 bp, Homo sapiens
actccactcctaggtagatcctcaagagaagtaagaacatgtccacacaaaaacttgtacatgatcattcctagcagcatgttcatraaagtcaaaaagagggaaaactccaatgtctatccatcaactgatgaagggacaaataaaatgtgatatgtccatagaatgagatatttgccaataagatgaagtattgtgctcctcaactcacactgaggttacatcccaataaaccattgtaagttgaaaacgtcgaaagtcgaaaaatgcattgaatacacctaatctaccaaacaacatagctcagcctagcctacattaaacgtgttcagaacacttaaattagcctacagttgggcaaaatcagctaacacaaagcctattttataataaagtgttgaatatatcatataatttattgaatactataatgaaagggaaaaccggaatggttggatgggttcttgaagcacagttcctactgaatgcgtgttgtttttgcaccatcatgaagtcaaaaaaattgttagttgagccattttaagttggggaatgtctatattgatacatactacaacacgcatgaatcttgaaaacactgtgctaagtgaaaaagaaa

SEQ ID NO: 393456 - DNA, 566 bp, Homo sapiens
cgtagtgaggaaacctctcagcccatataatagcacggtggtgcaggatatggaaggcatatttagaatcagtatgaatattgacacgtagtccttttgcaagagtgagggcctgagttgaggcaatgagtttggcttgctgagaggtagtggggtggggcagagcggtagatgtggaagatactatagcatagcctgcctttgctggtgagtggcaattaggcctggtggaactgccatcaataaaccaagtgtgatcagggtgaggaacagggaagaaggaaatatggggaaatggagtgaatgtcaggtggatcagagacatatagtcacgggggtcaggtgtggtatcaggaataatgtggggggccagactgaaacagtaaagttaagttgtttggacagaaaggctacaggctgcagtcctggttcttgtgtaagaaatgccaccacacagycctgtacttcagctgtgtttaatgaaaaagggttgggatgagttagggagagctagtgtgggaacagcttctagggctgtttttaaggaacagaaaggcaagtgggga

SEQ ID NO: 393457 - DNA, 491 bp, Homo sapiens
aaacaagaatcagtacatttaagaaccgcttcccctggtgaccaagagtccaaattctcatttgaccagctttgaattacataaggaaggaagacctagtcctttgcttaaaaatgtgccctcagtggtggttgcaaactcaaatgtcttcaggggatggcaaataatagaaatgtgataggtatagcgttgccaggtattgcaaattaaaacacaggatgctcttttaaattcaaatttcagataaacaaygaataaatttctagtataattaggttacaaatactatgtgagacatacttacactgaaaatattatttgttgtttattaaaaatttaaatgtaattgggtgtcttgtatttatctgacaatcctagctagggggttgagtaaaaataaagaaacttgtgcccatccgccacccccaccaagactttgcttcatgcattttgagttctgttgttaggtgcataatatgttaataattatt

SEQ ID NO: 393458 - DNA, 599 bp, Homo sapiens
caactgtatctgattctcctcccagcagcagcgggtgagccaaggcatgttccagtggccatggcagaagcacaagagggcgagtgaaaatgctcttaaatcccaggtgggggccccacttatgctccatcctgttgaccagtgccattcaatagccaaggccaaggttaagggagacggaaatctatccatcccattggcagaggtgtggctgcaggaagaggtgaagaattgggactaattttcaatataccacaggaggaggtgaggaagaagtatgtctacttaagaggccsccatagacatccaggtgagtgaggatggaccagactggcagcagtggcagtgatgagaaatatctgttgactgaatgaatgctcagacccttaattccaccttgacccttaattccactcctaggaattcatgctaataacataaactaaactgtgaagatgttcattacagcattgcttataataataaaatatggatacaacttaaatgtgcatgaaatgtaactcctaaattctagcaccttagaaaatgtaatagaaagagactgctttggactggcgtggtggcttacaccggtaatc

SEQ ID NO: 393459 - DNA, 625 bp, Homo sapiens
ctcattgctccacaccatttccaacaacagctattttcagtgattaatctttttgaaatcaatctattttttctttttctttttctttttagaggtggagtctcactctgtcacccaggctggagtgcagtggtgrgatctcagctcaccgtagcctccacctcctgggttcaagcgattctcctgcctcagcctcccgagtagctgggattacaggtgcacccaccacgcccggctaatttttttttttttgagacggagttttgctcttgttgcccaggctggagtgtgatggcgtgatcttggctcactgcaacctccaccttttgggttctaatgattctcctgcctcagcctcttgagcagctgggattacaggcatgcgccaccatgcccagctaattttgtatttttagtagagacgaggtttctccatgttggtcaggctggtcttgaactcctgacctcaggtgatccacccacctcggcctcccaaagtgctgggattacaggcatgagccactgcacctggccttaatttttgtatttttagtaaagacagggtttcaccattgttggccaggctggtcacaaactcctgacctcaagtgatatagcttgcctc

SEQ ID NO: 393460 - DNA, 603 bp, Homo sapiens
aaggcccaccaaagtatgttaccatgtgtattagctcattctcatgctgctgataaagacatacctgggactgcgtaatttataaagaaaaagaagtttaatggactcacagttctgcggggctggggaggtctcaggaaacttacagtcatggtggaaggggaagcaaacatgtccttcttcatatggtgacagctaggataagtgctgagcaaaagggggaaaagccccttataaaaccatcagatctcatgagaactcactaactatcacgagaacagcatgaggatcaccgcccccgtgattaaattacctcccacctggtccaactcatgacacgtgggaattacaggaactaaactcaagatgagatttgggtggggacacagccaaaccatatcaccatgaaatttcagaatatcaagaataaagattgtaaaarctcctaagaggaagaaaacagtcacatacaaagggtcaagaataataatgacttttgtatatgtcatgtgttgaattgtgttccctccaaattcatatgttgaagttttaaccccaatacctcagaaggaggccttatttggaaacagtctttgcagatgt

SEQ ID NO: 393461 - DNA, 607 bp, Homo sapiens
tttctgatttaattggtctgggtacatcctgggcactaggaatttttaaagctcctcagatgattctaatatgcagccaaggatgacaaccactgtctaagagaatgaagcaaaaaggggggaatatcaggcttggagagcatcttcttatggcacatcgttggagtaaaagtagtttaarctgttgataatatgaagaaatgcatagaacactttggtaagtataagaaaagccccatgtaagccgggcggggtggctcacacctgtaatcctagcactttgggaggtcaacgagggcagattgcctgagctcaggagttcaagaccagcctgggcaacacggtgaagccccgtctctactaaaatataaaaaataagccgggtgtggcaccatgcacctgtagtacaggctactcgggaggctgaggcaggagaattgcaccaatgcactccggcctgggtgacagagtgagactccgtctcagaaaaaaaaaggggggagaggggggtcagggtgcagtggctcacgcctgtaattccagcactttgggaggccaaggcgggtggatcacgaggtcaggagatcgggaccatcctggctaacac

SEQ ID NO: 393462 - DNA, 546 bp, Homo sapiens
aatctttgcatcttgatcctctttatgtgatcacccatgcaaagttgccatagtggattacctgaggttccagccaaagagtgaaatactgcagtaggccaagccatgaagaagagagaggacagcaacttattcctgcactgacgatgacttattgtatgatcttgaccaattcctcaatcttctttgagctgtgggttccccatctgtacaatgaatggtttggttttgatgactcaaaactctgacattttgtgatttaacttctgggcaccaacagtcacacagggcagcagcaytgagtattagagctgagcagttaaaaacagcatgcataatacttaatccctggttgagctagccactgcacatgctcagtactcaggagaactacctgctgagaatgctcagtccacaggtgagcaacccactgagcatgctcagtccccctccaagtgtactacccactgggcatgctccgtgccaaggcaatcaagttccctaaggcaccagagcacatcccctctcacggagcatattcagttc

SEQ ID NO: 393463 - DNA, 600 bp, Homo sapiens
attaatgtttatccacagttttgtctactattacttataaccattatttatattttgctatacatatttatatatttgtcatatataaaacaggaaatacataattcagtaatttatattgtagaattttgaggatattctgtggcatttgtttttacagacttctttgtgcccttaatgatgtattatgatgaattttattgctttaagcattctttgaaaagattakttttaatggctcatagattccattttatagatggaatatcaagtattcaatcaagtgttatgcattggtatgttttctgatttctcagttttataagttactctttaatgaacacacttatgtatacatttttgtgtgtacctgattttttcctatatgtatattgctgtaaatgaaattgctggttaatttttttaggtttttgataatcatatagaggtgtactacaataatgtgatatatatgtatatacatgtcatataaaatgctaaaaaatattgtgtcctgcaaaactgcgcactaaaaataacatgacttagggaaaaatatgtttgagtcagatcactcaaaatttattttatgttgtaacc

SEQ ID NO: 393464 - DNA, 600 bp, Homo sapiens
attaatgtttatccacagttttgtctactattacttataaccattatttatattttgctatacatatttatatatttgtcatatataaaacaggaaatacataattcagtaatttatattgtagaattttgaggatattctgtggcatttgtttttacagacttctttgtgcccttaatgatgtattatgatgaattttattgctttaagcattctttgaaaagattatttttaatggctcatagattccattttatagatggaatatcaagtattcaatcaagtgttatgcattggtatgttttctgatttctcagttttataagttactctttaatgaacacacttatgtatacatttttgtgtgtacctgattttttcctatatgtatattgctgtaaatgaaattgctggttaatttttttaggtttttgataatcatatagaggtgtactacaataatgtgatatatatgtatatacatgtcatataaaatgctaaaaaatattgtgtcctgcaaaactgcgcactaaaaataacaygacttagggaaaaatatgtttgagtcagatcactcaaaatttattttatgttgtaacc

SEQ ID NO: 393465 - DNA, 505 bp, Homo sapiens
ctacaaacgactcctaaaagtggcagaaattggtacttggaattggcattgctgagctgaagaggaatgaggcacaggggaatmcctcagtttgtagctgggaagcccttgttatcagtagctatgcagctggttaaattgttactgtgtgcttactgaggatggcacttcaggggattggtagatatttcggggatattagagtatgttggctactccttatggcctcttgggagggcataaatgtagtccacaataaacatggtctaagcagctcatctggaaaacagagaggaaggagcaagcagtgttgacagaagaaccctcccttcccctttctttagactaagtcttgatgggataagccatgtgccttgcagaattgcaaaagtagaatttcctgcttctggctaagataggaaggcagaaaataacataacagagcaataagattggatagggaggagccaaaggaatagaggaagctgatcccccagttcctaag

SEQ ID NO: 393466 - DNA, 508 bp, Homo sapiens
tatcagtcctgccctggctggtgtaaaagagtgtttgatttgattagaaatatctgcyatggatgcccaacagagagtggcagttgctattccgcataagcatatgggaggtctgcactgtatttcatgcaactcacacacagtcttctcttctcccactagcagtaacttcattcttttaagcaaatctcttattttaaggtattttttccagtctttaccgtatttgcctttctcaggggtaaagtctagttgggtaataatttcacttaaagggtgaaagtcaagactgtgcataataatttaggtatcttctaagcatagagaaaacctaaaatcccagtagcttgttctggagtccataatgagaccttttcagactagggctatattaatttgggttgagaaggactcctcattgcttccgtgtgtttagtgctaagtggctactgatatgacaggctcatgacaggtacttttctctctccttcccctccttggctcaaaa

SEQ ID NO: 393467 - DNA, 508 bp, Homo sapiens
tatcagtcctgccctggctggtgtaaaagagtgtttgatttgattagaaatatctgctatggatgcccaacagagagtggcagttgctattccgcataagcatatkggaggtctgcactgtatttcatgcaactcacacacagtcttctcttctcccactagcagtaacttcattcttttaagcaaatctcttattttaaggtattttttccagtctttaccgtatttgcctttctcaggggtaaagtctagttgggtaataatttcacttaaagggtgaaagtcaagactgtgcataataatttaggtatcttctaagcatagagaaaacctaaaatcccagtagcttgttctggagtccataatgagaccttttcagactagggctatattaatttgggttgagaaggactcctcattgcttccgtgtgtttagtgctaagtggctactgatatgacaggctcatgacaggtacttttctctctccttcccctccttggctcaaaa

SEQ ID NO: 393468 - DNA, 508 bp, Homo sapiens
tatcagtcctgccctggctggtgtaaaagagtgtttgatttgattagaaatatctgctatggatgcccaacagagagtggcagttgctattccgcataagcatatggkaggtctgcactgtatttcatgcaactcacacacagtcttctcttctcccactagcagtaacttcattcttttaagcaaatctcttattttaaggtattttttccagtctttaccgtatttgcctttctcaggggtaaagtctagttgggtaataatttcacttaaagggtgaaagtcaagactgtgcataataatttaggtatcttctaagcatagagaaaacctaaaatcccagtagcttgttctggagtccataatgagaccttttcagactagggctatattaatttgggttgagaaggactcctcattgcttccgtgtgtttagtgctaagtggctactgatatgacaggctcatgacaggtacttttctctctccttcccctccttggctcaaaa

SEQ ID NO: 393469 - DNA, 572 bp, Homo sapiens
aagaactcaatagcaatacattgaggtaaaatgaaaatgacatattttgcacattaaaaattattttaaaacttattttaattggcacataattgtacacatttataagatacaatttgatgtttcaatactatatatagtataataatcaaatcaggatatttggcatatccattactcatatattaatcatttttgtggtgagaacattaaaargcctctcttctagtaattttgtaatatacaataatatctctctgtcaaccatcattattctacttaacaatagaatgccagaactgactcagcattcataattttaacttggtatccattgatgaacctcttctcattctctcttccccactcccttccacagtttctggtaaccacggttctacttgtttctattatatcaacttttttgtttttaagattctgcatatgaatgagatcacgtgttatttatctttctgtgtttggtttatttcacttaatttgaggtcctccaggttcatccatgttggcacaaaagacaatattttactctttttatggctgaataatattcc

SEQ ID NO: 393470 - DNA, 621 bp, Homo sapiens
gaactttaaaaagtaaacttattatccctgggtataaagctagtagctctgccaaagaaagrcaagttcattcttgtggaattctagagagaagaggtgttgaaatcacaaacacatcattgctaggatgtgctgctgctccacatgtagagaccattgctgttatcgaaaactttattttcatttggcataatttgacctgccttgtacaatttgtagccttctgtgcccctttctgggggagagataaatggaagtaggatcactcagttttcaaaaaatggccaagggtgactaagtttgcagtctgctcaggaccagaaaagtcattcttcacttttggatgcctgtgtcatctctccccaggtgcttcacataatgagtgactgttatcttacctgtcaggtaatgggtatcacgtaataggtaatgggtgcctgccgtgggatgggtgttgaaaagccctagttccagtaaggcctggaaatgcattccttctaaagtactgttgggaactccacctcagacctgtatctcctagaaattattttaccaccagacagcatgcatacctaggtgggactattccacttgtgtgtaaagaacacctgagttcttatc

SEQ ID NO: 393471 - DNA, 621 bp, Homo sapiens
gaactttaaaaagtaaacttattatccctgggtataaagctagtagctctgccaaagaaagacaagttcattcttgtggaattctagagagaagaggtgttgaaatcacaaacacatcattgctaggatgtgctgctgctccacatgtagagaccattgctgttatcgaaaactttattttcatttggcataatttgacctgccttgtacaatttgtagccttctgtgcccctttctgggggagagataartggaagtaggatcactcagttttcaaaaaatggccaagggtgactaagtttgcagtctgctcaggaccagaaaagtcattcttcacttttggatgcctgtgtcatctctccccaggtgcttcacataatgagtgactgttatcttacctgtcaggtaatgggtatcacgtaataggtaatgggtgcctgccgtgggatgggtgttgaaaagccctagttccagtaaggcctggaaatgcattccttctaaagtactgttgggaactccacctcagacctgtatctcctagaaattattttaccaccagacagcatgcatacctaggtgggactattccacttgtgtgtaaagaacacctgagttcttatc

SEQ ID NO: 393472 - DNA, 591 bp, Homo sapiens
atatataagggtttgtttccctattcttttatttgagttttcttccttgtctttagttttcagaagtttaattttaatagaggtttttatggatttatttgaatttatcttgttagggattcattcagcttctcttttcctaatagcttygttgagatataattcacacagcataatattcatcctttaaaagtgttttttggaatattcacagatttgtgcaattataccactacctaatttcagaacatttttaatcaccacaaagagaagtcctgagcttttgagtagtcactccttatttcagcatatcccttccccttggcaaccactaatctattattttttaaatggatttgcatattctggccatttcatataatatgtggtcttttgtgactggctttttacgtactataaagttttcaagattcactcatgttttaggtctatcaatattttattcatcaactgattgtaggtattaatcctatctacaaatttaccttcgcagtaacacctagagtagtgtttgaataaccggggacaatagcttagtcaaggtgacacataaaattgatcaccacagac

SEQ ID NO: 393473 - DNA, 560 bp, Homo sapiens
cattcgcaaggtatccaaatatcttaatgatctttgacccttcagagacatccatgcacctcatcaacatttttctatcatgttcctttcaagtttctgaccatccagccaaacaattgtccacagtccatgaatatagaatcatacctctgactatttttccaggcaaaatgaataaccaggcacacttaccaaagttttgcctaccaggaagttcaccttccctactgtcagagatgtctcaggaagggctctagtggtacagttgtccactttgaggtggtgactccatattgtgcggagccatctgtaaaccaggtcaagatttttcytcctcagtcaactgctcataaaggctttcacatgaagccaagtgtggtctggaagagagaaggtaatgtgtccagagtttgttccttccggtggattcatggtcttgctgacttcagtaatgaagctgtggacctttgtggtgagtgttacagctctcaaaggtggcatgaacccatgagcagcagcaagatttattgtgaagagtgaaagaacaaagcttccacagc

SEQ ID NO: 393474 - DNA, 560 bp, Homo sapiens
cattcgcaaggtatccaaatatcttaatgatctttgacccttcagagacatccatgcacctcatcaacatttttctatcatgttcctttcaagtttctgaccatccagccaaacaattgtccacagtccatgaatatagaatcatacctctgactatttttccaggcaaaatgaataaccaggcacacttaccaaagttttgcctaccaggaagttcaccttccctactgtcagagatgtctcaggaagggctctagtggtacagttgtccactttgaggtggtgactccatattgtgcggagccatctgtaaaccaggtcaagatttttcctcctcagtcaactgctcataaaggctttcacatgaagccaagtgtggtctggaagagagaaggtaatgtgtccagagtttgttccttccggtggrttcatggtcttgctgacttcagtaatgaagctgtggacctttgtggtgagtgttacagctctcaaaggtggcatgaacccatgagcagcagcaagatttattgtgaagagtgaaagaacaaagcttccacagc

SEQ ID NO: 393475 - DNA, 609 bp, Homo sapiens
tcttttctcttttcwtttcttttcttcctgttgttgagacagggtctcactctgttacccaggctggagtgcagtggcacaatcatgccccactgcagcctccatctctcgatctcaagcaatcctcccacctcagcctcccaagtagctaggactacaggcatgtgccaccatgcctcgctaatttttgtagtttttgtagagatggggttttgccattttgcccaagctgttttcttgaactcctaagctcaagcaacctgctcacctcggcctcccaaagtgctgggattacaggtgtgagcaaccatgcccggcctatttctttcttacacgagtctgttgaggttctttgttttttgttttccccaatgtctactgaactaaatcaaagctactatcttctaaaagaaccatagggcattatagataggaaaagacccctggcaatcatctgttaactattgtgttagggaactgagatgctatccccttattcatccgtccatccacccattcatccagcaagcatttgttgagtacttactatgtaaaaggcatgtgctagggattggagaagatttaaaggtgatcaaaacacataatccc

SEQ ID NO: 393476 - DNA, 609 bp, Homo sapiens
tcttttctcttttcatttcttttcttcctgttgttgagacagggtctcactctgttacccaggctggagtgcagtggcacaatcatgccccactgcagcctccatctctcgatctcaagcaatcctcccacctcagcctcccaagtagctaggactacaggcatgtgccaccatgcctcgctaatttttgtagtttttgtagagatggggttttgccattttgcccaagctgttttcttgaactcctaagctcaagcaacctgctcacctcggcctcccaaagtgctgggattacaggtgtgagcaaccatgcccggcctatttctttcttacacgagtctgttgaggttctttgttttttgttttccccaatgtctactgaactaaatcaaagctactatcttctaaaagaaccataggrcattatagataggaaaagacccctggcaatcatctgttaactattgtgttagggaactgagatgctatccccttattcatccgtccatccacccattcatccagcaagcatttgttgagtacttactatgtaaaaggcatgtgctagggattggagaagatttaaaggtgatcaaaacacataatccc

SEQ ID NO: 393477 - DNA, 552 bp, Homo sapiens
aagtacaagtaaagtttagctatggaatactaatgtaggctgaagtactccagttaaaggaaatttayggttagagtaacggcagttactccctgcttagtgaacttctgtagttgtctatcaagtctggtctgcaagccgagggacagtttcctgcttcctcttcttctcccatccccatttcttcccctggcttacagaaggtttctggaggatgcctcaggcacatgggctggtgattctttcttctctattttacatatgggtaagaactcgtatgtaatgctaacctgagtttctacgagtggtcagcaggaaatatttaattttgtcatctaagatatgaaaattttcatgtccccagagaagtcacttaccaaggaacatgaatactgctaataaaagttacaaaagatgaatataaaaactggaactcaggcttcaaatttaccagaatatacttggctcaaaccgatgatctatgtagggttttaaagttcattaagttgtttgatgagtgtggaactgatggagacaaaaagaaattgatgt

SEQ ID NO: 393478 - DNA, 582 bp, Homo sapiens
tcaggccctgctgctgcagccatcatcctagccaaagagagcatggtgtgtggtgggaggagagagggggcaggacagggctagtcgaggaaatgcctttcgtccttgctgggtctcaggaacagaagctgggcatgtgggcagaggagtaaacaggccagtccttgtcctgggtttgggggcccaggctaaggagaaaataaagaaggaactccaakttgagggtaggcccaaaagcaaccgagaactaaaaacttattatctgaggagcaagtcaagataaatattaacagccaaagtgaaatggcttcaataagggatagacaaggataaaaaagcaggtttcagaggtggaattcagaaaagtaacttgaagcaattttagatcttgtatgggctcactcctagaggaggaccaagcctgttccagcatcttcagacacttaatcaacattcactatgtgccacggcctggctaagcactggatataaaagatgaagaagaactggccccagttgttagagatctcacagcctcctctgggagacggatacaggccatatacctattccgtaatgtgt

SEQ ID NO: 393479 - DNA, 496 bp, Homo sapiens
cataaccctgtctaattaaacctttctattctctgacatcgtttcaataaaatatctgatcttctgcaatgactccaataattggttacagttgttcactgaaattcaaattcccttcccactatcagaggagaagcagagcctgcatctgccccaggacacaccagggcaaacacaatagctagacagagagaggattgttgttctcagctgggatctgaaaaaaaaaatccatcatctcaaaaaccaaatacagaaagtgaatgtattaatttttaatgaagaaaatgtaactaacaggaggrtggatgcttgtgttcagtgagtgcagcttctccctgaagacaattttcctgggatactaaattattatcagaatgttgtttggtgagcatggcattacagcaagtggaactagttgggtaaattctgatgcacattgacgttggggtggatccactgcagcccctctagggccacagctacccctggggtg

SEQ ID NO: 393480 - DNA, 496 bp, Homo sapiens
cataaccctgtctaattaaacctttctattctctgacatcgtttcaataaaatatctgatcttctgcaatgactccaataattggttacagttgttcactgaaattcaaattcccttcccactatcagaggagaagcagagcctgcatctgccccaggacacaccagggcaaacacaatagctagacagagagaggattgttgttctcagctgggatctgaaaaaaaaaatccatcatctcaaaaaccaaatacagaaagtgaatgtattaatttttaatgaagaaaatgtaactaacaggagggtggatgcttgtgttcagtgagtgcagcttctccctgaagacaattttcctgggatactaaattattatcagaatgttgtttggtgagcatggcattacagcaagtggaactagttgggyaaattctgatgcacattgacgttggggtggatccactgcagcccctctagggccacagctacccctggggtg

SEQ ID NO: 393481 - DNA, 508 bp, Homo sapiens
actattatatactgactgaagatttatttgtttttcattagcaaaaagaaaaaaaaacacttttctctgctttttgttcaggtgttccaaggcaagaagttattttcaccagggaagcctgtgaacagaaagagctcctgagactacacctgcttttaatttggtgtcagtaggaamgatggtatacacattttacaaaagtcattttttaatgttaagaaaaaattatcaattgtttccaagatctttataataagctactaaattggtatactaatatagctttgtcctaaaacttggaagccataccaaaaatccttgattcagattcctttctaaaatagacaggaaacaggtacaaaaaaaaatctttctttttctgatgatatgtgcattatcttgtttataaaagccacggacatcgcaactgcttaacacaggcaaggatccacttactgataccttcctgaagctgaacacatggaaatgtcgtcgttgccactgcctc

SEQ ID NO: 393482 - DNA, 508 bp, Homo sapiens
actattatatactgactgaagatttatttgtttttcattagcaaaaagaaaaaaaaacacttttctctgctttttgttcaggtgttccaaggcaagaagttattttcaccagggaagcctgtgaacagaaagagctcctgagactacacctgcttttaatttggtgtcagtaggaacgatggtatacacattttacaaaagtcattttttaatgttaagaaaaaattatcaattgtttccaagatctttataataagctactaaattggtatactaatatagctttgtcctaaaacttggaagccataccamaaatccttgattcagattcctttctaaaatagacaggaaacaggtacaaaaaaaaatctttctttttctgatgatatgtgcattatcttgtttataaaagccacggacatcgcaactgcttaacacaggcaaggatccacttactgataccttcctgaagctgaacacatggaaatgtcgtcgttgccactgcctc

SEQ ID NO: 393483 - DNA, 557 bp, Homo sapiens
gatccacttactgataccttcctgaagctgaacacatggaaatgtcgtcgttgccacygcctcctccttctccgcctcttcctcttcttcttcctcctttctttttcctctttttctccttcctctactccttctttttcaccttctccttctttttccttttgatgttttaagattggaggattacattataaggcaaaagttaatatgccattctggcgaaaggctccggaaactaaataaagagggggctttctcccagcggggctggggcagcctctgaggcacagcaaagatagaggcaagctgagcacacttgcagaagcctaggaggcagatcttttgcaaggtgccgtccattgaactaattcatcttcaaggagtctccagttggaaagggttgttaaagcaatagattaagccaccagcattatagtagtttatttgcatttccctgcaggtcagcctctgtttaacagtaaatttatactgtaatcattgtgtattagacattagaaattagacatttgacattagaaacactagagtttgagtcc

SEQ ID NO: 393484 - DNA, 583 bp, Homo sapiens
tagtctatggcctcaaacgctgagacaccttaagcactctttaattgtgattcttgttcttctcaaccctttcagtatttggccctgttggttcattactatttattgaaactactccccatccttggggtccaggtcctagcactatccagactcttctacctctctgacccttccttcttgatttcatttgatgaactctctttctcatcctgatatcagaaatggacattccctaagattccaaatttgaacctccttcattttctgcaaactcatcttatcctctttcatgactttagccaccacagtctctatgctcagatctttattgccaggtcttccaagttatagatttacttttctaactgtacgatggagacttccaactgtgtgtatcaccatttcttcaaatgcaacatgactaaaacagaatttatcctgtaagtaagtaccctccccatgasctccccttttccagacctactggcttctccttcctcccagcctttctatctctattattgctaccaccatccttggaggaacaatgactgacactggcaaaggaaccagcagaaat

SEQ ID NO: 393485 - DNA, 595 bp, Homo sapiens
tcatgtccaagaccatcaaggtggtacctctatgagtctggaagaatcacagcactagygagcttggggttccccctaaaacagctacagcttagaacacaacagtcaagtcccttcaaacacctggaagacctttccaagaaggacgggcacaaacaagtccagactgtgaagaccaaaataaataactaattcttcaatgtccagatgctgaagaacatctacaagtatcaacacaatccaggaaaacatgacctcaccaaatgaactaaataaggcaccagggaccaatcctggagaaacagagatgtgtgatctttcagaaagataattcaaaatagctgtattgaggaaactcaaagaaattcaagataacacaaagaaggaattcagaagacaaatttaacaaggagattaaaataattaaaaagaatcaaggggaaaatctggagctgaaaaactcaattggcatactgaagaatgcatcagagtcctttagtggcagaattgatcaagcagaagaaagaagtagtgagcttgaaggcagcctatttgaaaatacagtcagaggagacataagaaagaataaaaaacc

SEQ ID NO: 393486 - DNA, 462 bp, Homo sapiens
caataatagctggatacttcaacayccccctttcagcattgggtagattttccagacagaaaatcaacaaagaaacatcagacttaatctgcactatagactaaatggatctaatagatatttacagagcatttcatgtaagagctgcagaatacatattcttttcctcaacacatggatcattctcaagtatagaccatttgcgaggtcacaagacagtcttaaaacattcaaaaaattgaagtaatatcaagcttcttctctagaaaaactagaaatcaatgacaagaggaatcttggaaactataaaaaagaaacatggaaattaagcaatatactcctgaatgaccagtcaataaagaaatcaagaaggaaatttaaaaatttcatgaaacaaatgataatggaagcacaacataccaaaacttacgggatacagcagttctaagagggaattttatc

SEQ ID NO: 393487 - DNA, 613 bp, Homo sapiens
atgaaattaaaatgaaaaaacaatacaaaaatcaatgaaacaaaaagttggtttcttgaaaagttaaacaaaattgacaaacctttagccagactaagaaaaaaagagagaagatccaaataaataaaatcagaaatgaaaaaggagacattacactgatattgcagaaattcaaatgattattagtggctatgatgagcaactatatgcctataaattggaaaatctaaaagaaatgaacaaattcctagatacacacaacctaaccragatttaaccaggaagaaattcaagcctaatgagatcaataacagtaacaagattgaggctttaataaaaagtctcccagtaaagaaaagcctgggacctgacagcttcactgctgaattctaccaagcatttaaagaagaactaataccaatcctattcaaactgtttcaaaaaatagaggagagggaaatacttccaaactcattctgtgagaccagagttaccctgataccaaaatcaaagacacattaaaaataaataaataaaactaaaggccaagatttccgatgaatattgatacaaaaatcctcaacaaaattactagcaaactgaattcaacaat

SEQ ID NO: 393488 - DNA, 613 bp, Homo sapiens
atgaaattaaaatgaaaaaacaatacaaaaatcaatgaaacaaaaagttggtttcttgaaaagttaaacaaaattgacaaacctttagccagactaagaaaaaaagagagaagatccaaataaataaaatcagaaatgaaaaaggagacattacactgatattgcagaaattcaaatgattattagtggctatgatgagcaactatatgcctataaattggaaaatctaaaagaaatgaacaaattcctagatacacacaacctaaccgagatttaaccaggaagaaattcaagcctaatgagatcaataacagtaacaagattgaggctttaataaaaagtctcccagtaaagaaaagcctgggacctgacagcttcactgctgaattctaccaagcatttaaagaagarctaataccaatcctattcaaactgtttcaaaaaatagaggagagggaaatacttccaaactcattctgtgagaccagagttaccctgataccaaaatcaaagacacattaaaaataaataaataaaactaaaggccaagatttccgatgaatattgatacaaaaatcctcaacaaaattactagcaaactgaattcaacaat

SEQ ID NO: 393489 - DNA, 369 bp, Homo sapiens
aacattctgagttcccgaaaacctccctgtcccctcctcccagtcaatactcctggaaaagtaaccattagcctgacttgcatctctttctttttaaagcattcttgaactttatataaatttagtatgttcttgattgkgtctggctttcactaagactcactcgcattgctgcatgatttgttctttttcatggctgttatattctattatagaaatatggcacaatttatctatgctactcttaaggaacatgttgcttatttccagtttggaaatttataataaagctgctacaagtattcttgtgcatgtcttttgatggatgtatcctctcatttttcttgggttagataccaaggaatagaa

SEQ ID NO: 393490 - DNA, 598 bp, Homo sapiens
ggagggtcttggcttacacaaatatctatacttgtaaaaatccagcaaacaatacacttaaaaatctgtgccttttagtggacataaatttgtgccttaaaaaccccataaataaatgttgaactataataatatgctggctgaaatgttttaggatgaaatgcattgatatttacaacttactttaaaaggcattaaaaagtaagatggattgattgagagsagatagaggaatgaatagatatgtgataaagccagagttgtaaaaagcatggagtctaggtggtggtatatgagtattcagtgtaacatgtcttcaattttcctgtatgtctgaaatttttccaaacaaaatgttggaaaatatgttatacatgtatctatgcaggtttaaaatgtataataacaatattatacaaaagacagaaggtggtaaatgaagttcaggtgttcttgggtctttggacagttaggaggtggtaacagtaaaattcacaatagaaagaaataagtcagaagtctatatgggttgttctagggtaagcactaacagagtaatggaagatacataactaatggtgggggtaggattgtaaaa

SEQ ID NO: 393491 - DNA, 527 bp, Homo sapiens
gggtatgatggcacatgcctatagtcccagctacttgggaggctgaggcaggaggatcactcaagtccagatcaagactgtagtgagctgtgattgtgccactgtaatccagcctgggtaacagagtgaaaccctgtctcaattaaaaaaaaaaaaaaagatacatggccaactagaaagccatacagaaaaacaaattaatatttaattttgactcctacctcacacctcacatacacaaacttcagacagattttagagctaaacgtaaaaatcaatcaataaaatttaatctaaaagaagacagcatagtaggatatcttcgtgctcttgtagacaccatggtagacatgaacaaaaaaacaaattaaaaagaaaaagaccgacaaattggagtacattccaattaaaaacctctgttaatgaaaagacacttagaaagggagaagatacttacarcaaaaatatctaatggtctcatatctaaaatatataaagaagttctacaaattaacaggaaaaagaca

SEQ ID NO: 393492 - DNA, 539 bp, Homo sapiens
cctatgcatctctttatctggctgtccatctgcattctttgtaacatcctttataataaatgggtaaatggaaagaaaagtgtttccctgagttctgtgagccactctagcaaattaattgaacccaaggaaggggtagtgggagctcckatttgtataggggacacctggggctttgcaattggtgcatctgaagactgcacccgtcttgtgtgaacctgtgagatctaacactgcctgcaggtagatagtgtcggaattgaattgaattagaggacacgcagctggtgtctgctggagaattgctgggtgtaggggaaagcccacacatctgttgtcagaagtgttgtattgaatgactgtgtaagagaggagaataggaaaaaaacactttggtttttggggtttttttttttcctatatcccttagaagcatccaacccagagaaggctggacagaacaaacaacacaggcaaaacccagaggaactgctgcaatgccacctggctgaaaggtttagagaaaggagaattagaag

SEQ ID NO: 393493 - DNA, 561 bp, Homo sapiens
ccttaacccaaaattagatgaatgaggtgaatttcatgttctgtggcatggccaatagaatgatgttttagggctgagttttcttacatttctcaggaacactatttaggtaggtggtctacttatggaaaaaaaagtgaattcagttgataaccaaaagtggcattcaaaagtattgggcaaattgaagaggcatatttacaaacatttcaaactttcatttaaaaaaaatactaatggcagtattttaacattttgtaaattgcagctcttatttgctttcctggctgaacacttttccccttctttcttttcaatggcctgtgaatttactatacttatctaaatttagtattgtgttaaatgtagtgaatttatttgcacacttgtccaggaactaccagaaagccctggagtaaattagcttccatcatagcgtggctcagaagctcacatgatgtcatcaggtcctccggttcctttcctccttttcttgccctttaatcttcagtgaccctctactttcaccygctacgtcaaaaaaaaaaaacaaaaaaaaaa

SEQ ID NO: 393494 - DNA, 596 bp, Homo sapiens
atgatcaagtttcagaaacgtttctttcctgttttttaatttttaatttaaattagaggattttttaagtttaatccacagagcaaaacatatgctttccatagaattcttttcagcaatgccttgcaagacacaggttagaagtaaaatcgaacaatttccctaatattttatttcctaaagagtacctttcatttctgaactctattcgtgtgtccagatctaaactgtggtgttttaattgcctaggaacctcctctcaaatgctggggctggacttgggtattattggattcattgagactcactgcccagctctctaaggagtttctctccctgttctgtctgtcatgccccaatctcctcacctggaaatgtgaaaattatagggagtcttgtctcttaatactaacttttaaaatttaaaaaatcaaagatattrttatccacttattgatcccttactatgcctcagaccctctgctaacacaggtccctcttttagccctcacaaccccccacccccaacctcccactccatgaggcaggtgccattgttccagttctcagatgaaagaatgaatcagtgtgcctaa

SEQ ID NO: 393495 - DNA, 547 bp, Homo sapiens
ttcttggcatcacagtagatcagcggaagagaatagggagttctgaaagtgatgcatgataaatggagacttaagaaaaattttggtgaaagtttaaatcaggatagaagaaagggaatcttcaataaatgatggggagattactgcctgcccatttggaaaagaaaatcagattaaagtgatccctcatatcaaaatacgcagcagttaaactcgaggtggatcatggaattaattagaaaaataaacctatcraagtagtagaataaaatataggagactgcagatgaaacacacacttaaaaattactgctcaagctcactatattcagggagatgaaagttataacagtgaagtgctatttttgcccactgaacttattgcaacaccaacactgttcactgctggtgaaggttaggtaaacagacactctcattgatgattggcgagggtgtgaagaagtgtggccttggaggaatgatcatttttgctgaaactgtgataatttatagcagttccatatatagacatttgtcccaaagaaag

SEQ ID NO: 393496 - DNA, 557 bp, Homo sapiens
cagtctggaaaagtgatggactgtgccaactggcactcagagcctgggccacggccatcggtgactcgttgggccgattttcatttgcacttttccactgggcttggacccagcagcctgaaacagtgcctatgaagctgtcacactctgttgtgtcaaagtgactcaagcacttttgggctgggatcattgaaatgatggactgttatggtcttccctcttaacgcgcatttaatgcctgttcagggagcacttcatttacacatcacttacatgctagacttatgcaattttggttgwaaattcagtattgttcttgtataggagccatgctctaaattaaataagacgagccccttgtaccctaaaggcaggcctgcgtgtgtatttctaacctctttgcagtatcaattaccatggaattacattacaatttttaacaaggataacattcaggtttcaaaagaggaaaaatagattgaaataagaaaacgttcagattttgcttatagtaattcttacaaagaaataaaaagaattatggtcctgtgtaataa

SEQ ID NO: 393497 - DNA, 584 bp, Homo sapiens
agaccttgtctcaaaaaaaaaaaaaaattattgtgaactccaaagaaattttgtgtatatgggttatatatatccatatttaccatattagaaattaaaactgaaaataagttaaaatattaattcacttagaaataatagtaataaacccattacatgttaacatgaataatacatttttgaaaattaaaaacattttattttctgaaaaaattagtaggaagagtggcgttgttttatatttttgtaaacttctttaatgtctggtttattagaagatgactggattcttatagctgcttctgcatctaatttgttgggatgtgttgttttggttgaaattcatgaaaaaaaatctagcttgacacagatatgtagttggaaaagggaggaggagscttttcagataatcatggacatccatctttgatactacaccaacacttggcaggaggggactccttaaaggctggttataatgtgaaatctgaaaccatagcaatgaacttttcctattctgttacattaaagtgcattgatctatcttgtactttgagtgggtctcttatgcatgcatgattttc

SEQ ID NO: 393498 - DNA, 606 bp, Homo sapiens
gcccatcacacaaagacaaatgctgtacgatttctcttacattaggtttgaaattagtcaaactcatagaaacagaaaatagagcggttgtttccataagccaggggatagagaaatggggagttgttgtatagtggctatagtttcagttctccaagagaagcaagttctagaaactcgttactcaacatgtatatttttaacactactgcactgtatacttacaagtggttaatatggtaaattttatgttgtgccttatcaccataatgtttttaaaagaaggggtttgtgtttcccttcgttgtgatcacccatttttcacttcagcattttgaacttgagatttcctgtagcggttttactgagccctgcagttaccggctcagaatgtctccaccrccttgtaaccttgtaggcagacacttttcagcatcttattgggctccgtgtgcttgatgcttaaagtgacatggagacatgccacttgctgagaagcaaagaaaggcaaaaggtgactgctttcctggcatcgatgaaggcagagagaagggatcttggaggcacagatattaagccataagcaataacatgggttgccaaaaa

SEQ ID NO: 393499 - DNA, 513 bp, Homo sapiens
gttccttttgagcttttgattgasagctggtaggaactacttctcattagtctcaaaaaatgttgttggagattaaattttaatttcaggggtattgggcttagccctttagcatttcaccctattcagcttcaaaatcttagaaatgtgttgaacaagggagttggccatgcttttggggcaggctctcttctttgcaatgagtttgtctcccagttgctgtgatactcttgaagattttattctgtctcttgaaatcttctggaataactcctcattcttgcatatatcacaataattcagtcaatatgcctcagggaaaatatcttttgtgtgccactgcttattttacccctaatccatatctgggccaggcccaatcctcagccttcacccataattataaaagacactcagagaaacagtcagttcacattggaaggttcattaatctatacatttttgtggacctattttgacctatgcaactttcttggcattcactttaagtgc

SEQ ID NO: 393500 - DNA, 513 bp, Homo sapiens
gttccttttgagcttttgattgagagctggtaggaactacttctcattagtctcaaaaaatgttgttggagattaaattttaatttcaggggtattgggcttagccctttagcatttcaccctattcagcttcaaaatcttagaaatgtgttgaacaagggagttggccatgcttttggggcagsctctcttctttgcaatgagtttgtctcccagttgctgtgatactcttgaagattttattctgtctcttgaaatcttctggaataactcctcattcttgcatatatcacaataattcagtcaatatgcctcagggaaaatatcttttgtgtgccactgcttattttacccctaatccatatctgggccaggcccaatcctcagccttcacccataattataaaagacactcagagaaacagtcagttcacattggaaggttcattaatctatacatttttgtggacctattttgacctatgcaactttcttggcattcactttaagtgc

SEQ ID NO: 393501 - DNA, 513 bp, Homo sapiens
gttccttttgagcttttgattgagagctggtaggaactacttctcattagtctcaaaaaatgttgttggagattaaattttaatttcaggggtattgggcttagccctttagcatttcaccctattcagcttcaaaatcttagaaatgtgttgaacaagggagttggccatgcttttggggcaggctctcttctttgcaatgagtttgtctcccagttgctgtgatactcttgaagattttattctgtctcttgaaatcttctggaataactcctcattcttgcatatatcacaataattcagtcaataygcctcagggaaaatatcttttgtgtgccactgcttattttacccctaatccatatctgggccaggcccaatcctcagccttcacccataattataaaagacactcagagaaacagtcagttcacattggaaggttcattaatctatacatttttgtggacctattttgacctatgcaactttcttggcattcactttaagtgc

SEQ ID NO: 393502 - DNA, 562 bp, Homo sapiens
ggacttcccagcctccagaactgtgagaaatacatgtccgttgttgaagccacccaatctgtgayatttaatattgttatagcagccttagccaactaagacaggtgtttacagtgttttctgctttaaagtcataagattataggaaaaaacttaagtgtctaagatccttcagggaagtatctctttgattattttagagctgtactgaaaacattgctggattgattttcaagtacagtacccacttcaatactgggcttggtgttactataaagtgaatcctacagtgtggtattttgaaacatcttaaccaaaggaaaactttatgtctaaccttccataggagatggtgttggaataagtgaagaaaagcagctctttaacaatgcctggaaagaaaagtgctatctaaaaatacaagtgtgctttaccacatggtctcacttataagtgggagctaagtagtgtatacacagacagtgtggaataacagacactggagactcagaagagtaagagggtgggaggggggatgagaaatatttaatgggtacaatta

SEQ ID NO: 393503 - DNA, 562 bp, Homo sapiens
ggacttcccagcctccagaactgtgagaaatacatgtccgttgttgaagccacccaatctgtgatatttaatattgttayagcagccttagccaactaagacaggtgtttacagtgttttctgctttaaagtcataagattataggaaaaaacttaagtgtctaagatccttcagggaagtatctctttgattattttagagctgtactgaaaacattgctggattgattttcaagtacagtacccacttcaatactgggcttggtgttactataaagtgaatcctacagtgtggtattttgaaacatcttaaccaaaggaaaactttatgtctaaccttccataggagatggtgttggaataagtgaagaaaagcagctctttaacaatgcctggaaagaaaagtgctatctaaaaatacaagtgtgctttaccacatggtctcacttataagtgggagctaagtagtgtatacacagacagtgtggaataacagacactggagactcagaagagtaagagggtgggaggggggatgagaaatatttaatgggtacaatta

SEQ ID NO: 393504 - DNA, 562 bp, Homo sapiens
ggacttcccagcctccagaactgtgagaaatacatgtccgttgttgaagccacccaatctgtgatatttaatattgttatagcagccttagccaactaagacaggtgtttacagtgttttctgctttaaagtcataagattataggaaaaaacttaagtgtctaagatccttcagggaagtatctctttgattattttaragctgtactgaaaacattgctggattgattttcaagtacagtacccacttcaatactgggcttggtgttactataaagtgaatcctacagtgtggtattttgaaacatcttaaccaaaggaaaactttatgtctaaccttccataggagatggtgttggaataagtgaagaaaagcagctctttaacaatgcctggaaagaaaagtgctatctaaaaatacaagtgtgctttaccacatggtctcacttataagtgggagctaagtagtgtatacacagacagtgtggaataacagacactggagactcagaagagtaagagggtgggaggggggatgagaaatatttaatgggtacaatta

SEQ ID NO: 393505 - DNA, 562 bp, Homo sapiens
ggacttcccagcctccagaactgtgagaaatacatgtccgttgttgaagccacccaatctgtgatatttaatattgttatagcagccttagccaactaagacaggtgtttacagtgttttctgctttaaagtcataagattataggaaaaaacttaagtgtctaagatccttcagggaagtatctctttgattattttagagctgtactgaaaacattgctggattgattttcaagtacagtacccacttcaatactgggcttggtgttactataaagtgaatcctacagtgtggtattttgaaacatcttaaccaaaggaaaactttatgtctaaccttccataggagatggtgttggaataagtgaagaaaagmagctctttaacaatgcctggaaagaaaagtgctatctaaaaatacaagtgtgctttaccacatggtctcacttataagtgggagctaagtagtgtatacacagacagtgtggaataacagacactggagactcagaagagtaagagggtgggaggggggatgagaaatatttaatgggtacaatta

SEQ ID NO: 393506 - DNA, 591 bp, Homo sapiens
tatgagtatatttatttttaaaaattccttgtcttctacagatacatataaggtaattttaaaaatgatatgatatataggttttacttaaaaataattcagaggaagaaggaatgtatataaatgaagtgggaatacaaatggaacaaaacaggatgtggccaggtgcggtggctcacgcctgtaatcccagcactttgggaggccgaggcaggcaaatcacctgatgtcaggagttcaagaccagcctggccaacgtggtgacaccccatctctactaaaaatacaaaaattagccggatgttgtgacgggtgcctgtaatcccagctactcaggaggctgaggcaggagaattgcttgaacctgggaggcagaagtttcagtaagtcaagatcatgccactgcactccagcctgggcaaccacagcaaaagcccacctttaaaaaaaaaarcaaaacaaaaactggccatgccatgaatgaaaaattgttgatgatgtatgtatgtagggcagttatattatttttcttaactttttttaggtttgaaactttttattgaacacatgcaaacatcccttgataactgg

SEQ ID NO: 393507 - DNA, 544 bp, Homo sapiens
cgttactcccctggctgcaaatgcttttctgaaagtatgagtgtcgtgcctacttaattctgataaacctgtttaagcaatacttaggaggctgacttctttggattaaaaaaatgtatgcaactccaaaaaaaaaaaaaaaaaaaagaaattcaacatttaaaagtttcatttctagggcagtcttccggtttggactacaaaattattttgcttgtttttgtaggggatcgttttgtgttgttttgtgtctttctccacatgatgcttagctctttccccacgtcccagattaaagtctgtatttttgtaattgtgggcacacaatcatatctcttttaatctttgcaacgatgttgaacttctgtagacagaaggatagagaaaacagcttgaaggcagtcagtgtgtttttccatgaarggaaaaaaataaataaaaaaattaaaatgggtgcttttttaagagagattgtcctatactttttcattctgtttttcatcacgtagtttgtatcatagcaagttcattgtcattccagagt

SEQ ID NO: 393508 - DNA, 544 bp, Homo sapiens
cgttactcccctggctgcaaatgcttttctgaaagtatgagtgtcgtgcctacttaattctgataaacctgtttaagcaatacttaggaggctgacttctttggattaaaaaaatgtatgcaactccaaaaaaaaaaaaaaaaaaaagaaattcaacatttaaaagtttcatttctagggcagtcttccggtttggactacaaaattattttgcttgtttttgtaggggatcgttttgtgttgttttgtgtctttctccacatgatgcttagctctttccccacgtcccagattaaagtctgtatttttgtaattgtgggcacacaatcatatctcttttaatctttgcaacgatgttgaacttctgtagacagaaggatagagaaaacagcttgaaggcagtcagtgtgtttttccatgaagggaaaaaaataaataaawaaattaaaatgggtgcttttttaagagagattgtcctatactttttcattctgtttttcatcacgtagtttgtatcatagcaagttcattgtcattccagagt

SEQ ID NO: 393509 - DNA, 515 bp, Homo sapiens
tacactaacaggaagaattttcctaaatcttaagaattatgttgsaaatcatgcttatactgccccctgcagtttctctcaccttgaataattgtgattcattaccttaaaacaggataggttttcagatggacttcagttggggaagtattgtaatagcttgggtcaatggaaagacgtaagaagattggattctaatatttttgtacttagaaaaatataagtagcagtattgagtcctttcagaatactgaaaagtgctgagaaaaattctggagagccttattaataatgcattatgtttaatttgagaataaatacttatcttagttttggtcagtctattcagttaagtcatgtctggattattgaacagatgcaaacagtcattgttctcttctctttagactttgggatatactttttgatttaaaaaatgatgttcttgccactgagcttaaggaaacaatacataaacatatttttaaaacttgcccgttatattattacttagg

SEQ ID NO: 393510 - DNA, 515 bp, Homo sapiens
tacactaacaggaagaattttcctaaatcttaagaattatgttggaaatcatgcttatactgccccctgcagtttctctcaccttgaataattgtgattcattaccttaaaacaggataggttttcagatggacttcagttggggaagtattgtaatagcttgggtcaatggaaagaygtaagaagattggattctaatatttttgtacttagaaaaatataagtagcagtattgagtcctttcagaatactgaaaagtgctgagaaaaattctggagagccttattaataatgcattatgtttaatttgagaataaatacttatcttagttttggtcagtctattcagttaagtcatgtctggattattgaacagatgcaaacagtcattgttctcttctctttagactttgggatatactttttgatttaaaaaatgatgttcttgccactgagcttaaggaaacaatacataaacatatttttaaaacttgcccgttatattattacttagg

SEQ ID NO: 393511 - DNA, 515 bp, Homo sapiens
tacactaacaggaagaattttcctaaatcttaagaattatgttggaaatcatgcttatactgccccctgcagtttctctcaccttgaataattgtgattcattaccttaaaacaggataggttttcagatggacttcagttggggaagtattgtaatagcttgggtcaatggaaagacgtaagaagattggattctaatatttttgtacttagaraaatataagtagcagtattgagtcctttcagaatactgaaaagtgctgagaaaaattctggagagccttattaataatgcattatgtttaatttgagaataaatacttatcttagttttggtcagtctattcagttaagtcatgtctggattattgaacagatgcaaacagtcattgttctcttctctttagactttgggatatactttttgatttaaaaaatgatgttcttgccactgagcttaaggaaacaatacataaacatatttttaaaacttgcccgttatattattacttagg

SEQ ID NO: 393512 - DNA, 515 bp, Homo sapiens
tacactaacaggaagaattttcctaaatcttaagaattatgttggaaatcatgcttatactgccccctgcagtttctctcaccttgaataattgtgattcattaccttaaaacaggataggttttcagatggacttcagttggggaagtattgtaatagcttgggtcaatggaaagacgtaagaagattggattctaatatttttgtacttagaaaaatataagtagcagtattgagtcctttcagaatactgaaaagtgctgagaaaaattctggagagccttattaataatgcattatgtttaatttgagaataaayacttatcttagttttggtcagtctattcagttaagtcatgtctggattattgaacagatgcaaacagtcattgttctcttctctttagactttgggatatactttttgatttaaaaaatgatgttcttgccactgagcttaaggaaacaatacataaacatatttttaaaacttgcccgttatattattacttagg

SEQ ID NO: 393513 - DNA, 574 bp, Homo sapiens
ctaaaggaatttaaaatgaacatatgattccatgtccagatattaatgctaacatgtgttcaaattgccagatacaagaatatccatagtaaacttgattgcaatgctgaaaaacgagaaacaaacatgtccagtaaataatgaaatgaattgtgatatagtcatataattgaatattattcagcaagtaaaatgaattaactagatctgtgtgtatcatcatgaatagaagcataatattgagtgaaaaatgtaagttgcaggatgctgtgctcaatactatcccattcatggaaataacacacaacttaatactattatatgtgtatatgtattgtrttttatataatataaaaaataagattttaaaaaaatgcacactgaattaatgatagtagtagtaccttggaagagaggatagaaaatggaattgaaaatgataagagaagaagcttccattttatctagagattctatttattttatattacaaaataaggcacaaattagtttggggtgttgagtgcataacatttattattcttcgtacttttctatatttttaaaccaaaga

SEQ ID NO: 393514 - DNA, 552 bp, Homo sapiens
aacacaagctgggatttaaactcttagacaacatctggccagggacaatctggtggcactgtccctaagagttgcaaataaagtctggagtttgacaaaagggtcgattgtagagttccggatctgagcatcgcctccacaatggagatgaggagtgcatgaatgaaaccagagaggggaagagaaatgcctggagcatgcgtggaggaagttagcatgacgcagcagggatggagagggacactcagagaggtggcaggaggatcaggtggccagggctgagcctgggactaagagttccagagggaaaattgaggcacacttgtagtctacactgctatgagagtggaggggacagaggctaggacaaggcctttggggtcatgaactggagrtcacagagcagaggagaagggagaagcggcagccttggagtgggagcagcattggggctgctggaagcaaagccagaacgtgcctttcctcaggcacagaaggcccaagaggacaggtgtgctcgaagctcttgttcagatgccaaggggatgcacg

SEQ ID NO: 393515 - DNA, 624 bp, Homo sapiens
ggtgactcccttgttgtaaactctgttattatttgcttcctctcctgtttsccatgatatcatagtttggaaagggggctcccaagggcaacagctaagccttccagaggccatgaaaggaagacaaaggaaatgaagcactcactgagcacctttcatgggccaaagatctcagccacatctgcttcagattcaggattccctttatcctctgcaggaagctgagggagaaggtattatcttcctcttgcagatgaagagtttgaggcttaaagagggtgagagtcttgatcaaggtcaaggtcacacagctggtaggctagagctgggattagatcttatatccacagagttccgtggccagtgctctttctgctactctctgctgcatcccccgaaggcagcagtgacacaggtggaaggatgaggtggcagcaaccacacctggccctgtgaacagtgcagtcccagaggggagtggcttcctaacgccagcctgcctccaggaatctgctcacctgccacacacttcacccacccgagggcctctgctcctcaccatggagtcccatctgctctctgacctggagagccccaggaggatctgcagctggtcatacctgt

SEQ ID NO: 393516 - DNA, 540 bp, Homo sapiens
ctccccctgattcattaggatcacatccctcaccataggaaacatcctgtttccttaacaaaaaagggcattggctgtgctgaacygccccaactccacagtaccctgccaatccttccttctgctttggtttgcctgctgttttgtgaatttctgtgggcaaggcagggtggagatgccactgactcagagctgtgagagcagcccccctgggcagacagctaggacttctacccctaggacccgttctccatcctccttttgtatctggaacatactctctacacagtgtgatggtgaagaccacggcctggttcaaactctgcccttctctggccagcttttacctggagttcccaactgtctctaaatcgtggcttcctcacctgtaaagatgagaataataatgcagggctgctgagggtatcctcatacagctctcgtgaggatcaagtgaggcaaggattacaaagcacttagagcaggtcctgccatcctgtaagtttgtgacagatggtagcttttactattgggtagcag

SEQ ID NO: 393517 - DNA, 352 bp, Homo sapiens
ctttcacagtgactcctgggcccagaggaggctgtatcaagtccacatttagctctgtggttttrcagtttcaaaaatacatctgtatctgtccaggaccagagatcactgtaatagaacagatggcactgaaatggacctgattatgtacaaagatgtaggattcattacagctcaatgagggaaggaaaggattacccaataaatggtgttaggacaattaactaccaatttgaagaaacagtaatttcaaaatctcacttcatgtacgcactgaaataaattccagttgggtggaagttaaatgttttctttcgaaacatcaaaatctcagaaagaaatagaattggat

SEQ ID NO: 393518 - DNA, 598 bp, Homo sapiens
gggacctctgaatggtaatcatcctaccaactgtgccgaaggccccttctcagcctgctaggtgcmcttcatgggaggctactatggtgacgcaccattactgcagcctgaggacctctgccctgggatagagacaatgactaggactgcagctaagtgagtagaggccaccctgtagcccagaccctctcagggacctgtctcttcctcccctccctccctgcttcctgacttctgcctgtgcacggattttccctttaagatctgctcacgttctcctcagtggtggctggtaaccatggaaactacaattaggctgctttgctccaagtctctaaaaattaccaagtgcaggcagcagcagcccctgacttatgacaggccccacccgagctctcttgcaggctcttttaggacacaccctttgctgggccaaagacaatgctccaggaactcctgtgaagaaggatcagtttctcttcgtagacatttccaattcatcacagttcaatgtttttgtaaaatgcaatgaaaacaaattagaaatgaaatggaaaaaagatatacaacattcaagccccgttttattgtgataaat

SEQ ID NO: 393519 - DNA, 598 bp, Homo sapiens
gggacctctgaatggtaatcatcctaccaactgtgccgaaggccccttctcagcctgctaggtgcccttcatgggaggctactatggtgacgcaccattactgcagcctgaggacctctgccctgggatagagacaatgactaggactgcagctaagtgagtagaggccaccctgtagcccagaccctctcwgggacctgtctcttcctcccctccctccctgcttcctgacttctgcctgtgcacggattttccctttaagatctgctcacgttctcctcagtggtggctggtaaccatggaaactacaattaggctgctttgctccaagtctctaaaaattaccaagtgcaggcagcagcagcccctgacttatgacaggccccacccgagctctcttgcaggctcttttaggacacaccctttgctgggccaaagacaatgctccaggaactcctgtgaagaaggatcagtttctcttcgtagacatttccaattcatcacagttcaatgtttttgtaaaatgcaatgaaaacaaattagaaatgaaatggaaaaaagatatacaacattcaagccccgttttattgtgataaat

SEQ ID NO: 393520 - DNA, 495 bp, Homo sapiens
gacattcatctttttttttttaacctgatctctgagttttcttcccattttgtaaaattgaagtacactttttttgtacattaaagtgcataaatgttaagaatacaggccagggtagggtgattcacacctataatcctagtgctttgggagccccggcaggaggatcacttgaggctaggagttcgagacaagcctgagcaatataatgagaccttatctcaaaaaaaaaaaaaaaaaaattaaattagccagttgtagtggcatatgcctgcagtcctaggtacttgggaggctaaggtaggaggatcacttgactccaggagttcaaggttacagtgagctgtgattgcaccactgcactccagcctaggkgacaaaatgagaccctatttcaaaaaaagaaagaagaaagaaagaaagagagagagagagagagagaaagatagctctatgaatttttacacattgataccacgatcaaaatatagaaaa

SEQ ID NO: 393521 - DNA, 422 bp, Homo sapiens
gtatagcatttttagtgcacacagatttcatttccttgaggcaaatatccaacaggggaattgctggatcatagagtaggcatatgtttaggtttttaagcagacactgacaagtagttttccaaagtgattgaacaaattgacacttccatcagcaatgtgctgcttggaattccggttgctccccatctctgccacacttgactttatcagtccttttcacattagccattctagtggatggataatgatatctcatcatggttttaatttacatttctctgataaataatgatgtaaaggaccttttcacgtgattattggccacctrggtattctctttcaaaaagtttaactctttcaccctttttaaaaaattggattccttaccaaatgtgtgattcatagcttcttctagtcct

SEQ ID NO: 393522 - DNA, 560 bp, Homo sapiens
ctccatgctgaaaatatttttaaaaacctcacacgctaccacctgattcattcaacatttactggttatcccacatgatcccagcctaggccaagacatctctatcatgccacgctatatgtcctgcaagaggtgaaggaggctgtgttttagggatagttaaggccacaggataaatatggactatctttcttagcattttactttagaattttactttaaaatgtttcagagaaaaattaagtaaatttactactaaataaaaaattatrtggaaataatcacatatattatggaattgaatgcaaaacttgctggacttcttgaagcaaaacttaagccttcaaagaatttccaggcatatggttgtccaccacttgatacaaaatgttaagaaaaagcatattagagtctctgatccctctgcctgtgttgtggaagatctctccagaacatcaaattgctctgggaacctagattccccttcaaaacactactgatagaaagaacagccatttataatctaaccattagaatttaagtgcaagtgctgtatttga

SEQ ID NO: 393523 - DNA, 715 bp, Homo sapiens
acagtattgtgaatgtgatgccattgaattgtatgcttacaaatggttaaaataaatattatgtatattttacaatgataaaaaatccagaagtaaaccctgggactctgagcgttaagcatgggctaaaggtcacacaagtagtaatggtggaggtggcttcagacctagttgggtcttctgatcacggtcttgccccgcacctcatcagctatgatgtggccctccttggtatccatacagcatggttatagtttaamtcttaggataatgagctcctttggtggcctcagcagttaactccctagtcagatgggtccagggtgagatgatcttgtgtggaaatcagcatcatgatgagatctcaacttataagttaactctatatacaagcccagaaagtacaatgtaaaaactattccactttaaactatttagaactcttattttaaaaatagaaagcaaaaacattactcagaaataagagtaagattaaataccaatttctgcaccctcttggccattgtaaagttgttttcttggttagtctcctttatagcctgtcttcagaaatataggctgggtgggccaggcgcagtggctcacgcctgtaattccagcattttcggaggctgaggcaggcagatcacgaggtgaggagattgagaccatcctggctaacatggtgaaaccccgtctctactaaaaataaaag

SEQ ID NO: 393524 - DNA, 581 bp, Homo sapiens
gtcccagcatcagtgatgaagcaggaactcaagcccgggtgttggtgggagccgagaccataacagcctaaagagggtttcgcactcagacacaggctgaatttctcttattgggatgttcatgtccacccaaggacagaacttaagccctcaaatctaggttagttgagaggcagggataaatgcacacttggcatagttgggagcctctgaggggattaaaaaagctcagcaaatctgtttggggaaatttcaagaaagtttgctgtccatgtaggccttgggtgggaaagagtcatatagcagaaatttgaaatctaagcctgcactacctgcacaaattcatactacataggtaatgcctagaaactaacatactggtccasaactggtaaaactagtggggtgttagcgaggcgaaaaaaaagtcttataaagaaagatgtcgccaccattcatagagaggaaataagtttctcaaaggaaattaacttcactgaagaactcccagtaaaaattagaaactatgacaaatacaaggtatgatgagagacacttagaagcagcagcaaataggataa

SEQ ID NO: 393525 - DNA, 575 bp, Homo sapiens
ctgtaaaatacaaatttgtgtgtctgtgtgtgtgtgtgtgtgtgtgtgtcgaatgtgatatggtagcatcagggcacagctaattcctctcattttcccctccttccttatcctctgtcaaatccattcacacctttgcaagacagacacagaaagtttgaaagtagaaggaatgaagaatggcatactctgcaagtaccaccaaaacaaaactgatgcatcaaaacaaatattagaaaaaatatacttaaggcaaaaaaacccatcaacctccccattaattctgaaaaaagcacatcattgytttgtgacaaacagaacaatctagctgagaggaaacataaaaaattaaataccaacataaggcagcatgagatgaatgttaagtgagaagttcaaacaacaagtgctgtggattcagaggaggaggacgtggatctgacctgaagccatccagaaatcgattctggataaagaacatgctgctttaggtagatttgacatgagggtgggccatgaagcaagcgacaagtaaattgcagcttgtttgagacactgaaatatgaattttggga

SEQ ID NO: 393526 - DNA, 603 bp, Homo sapiens
gatttgacatgagggtgggccatgaagcaagcgacaagtaaattgcagcttgtttgagacrctgaaatatgaattttgggactttataaacaaagagcagaaacaaatgctgggtagacctcggtggttgggcagctcttgatcttggtgctggtgggccaagggcagcaatctcatccctgtaaagcctatgtgtctgcctctgctccccacatctattaatataataaatcccatctctagccagcctcctgtgaatgaatagcctaggatgggcctgagtgtttagttacaggtggcctgcaacagccattgtgttcttctggaaaactatggatgactaaccctgggaagaaggactctcaagttcagagaaatgaagtacctggcctaatgtcagctagctcggtacagaattgggaccagaagcccaatctcttgattctttctagacatcacaaatcacagggggcgtgcttttgcctggcttgttcttttgaccttagtggttggctgcccgtatgagagtaagaatttgtgtgttaggggtggggattgggcagggagagtggtaacagtgatgtgatactagggggtacagtt

SEQ ID NO: 393527 - DNA, 603 bp, Homo sapiens
gatttgacatgagggtgggccatgaagcaagcgacaagtaaattgcagcttgtttgagacactgaaatatgaattttgggactttataaacaaagagcagaaacaaatgctgggtagacctcggtggttgggcagctcttgatcttggtgctggtgggccaagggcagcaatctcatccctgtaaagcctatgtgtctgcctctgctccccacatctattaatataataaatcccatctctagccagcctcctgtgaatgaatagcctaggatgggcctgagtgtttagttacaggtggcctgcaacagccattgtgttcttctggaaaactatggatgactaaccctgggaagaaggactctcaagttcagagaaatgaagtacctggcctaatgtcagctagctcrgtacagaattgggaccagaagcccaatctcttgattctttctagacatcacaaatcacagggggcgtgcttttgcctggcttgttcttttgaccttagtggttggctgcccgtatgagagtaagaatttgtgtgttaggggtggggattgggcagggagagtggtaacagtgatgtgatactagggggtacagtt

SEQ ID NO: 393528 - DNA, 572 bp, Homo sapiens
gggggctgtgctttaaaacctggctccctggacatggggcctggggagtttggtgcccacgtgatagggactgctagagaggccccagagcatctgtctggggacactgtggacacatgtcytgagaataccccctcaggggctgaggcggggcatcataccatcttgggagcccaaagccatgtgctaacaagctgttggcagaggactagagaaagacattttcaaaaacaacagcaacaaaaattgcaagccactccatccgggctgcagacccctccctgcatctcattagcgcctggggtgggaggagagggggctggcaggcactgcctacacctacgtgtcctgaaaaccaatgcatgcccacagaggtgggcgggtgggaggcgcagagtggcccagctcccagcctaggaaagatctttccaatgctctgcttgtcatttgttcccttgtgtgtgaatttttagaacaggtatcagattctttctgtgtaggacactttttgtttgtttttggagtcaatgctctaaggtctcttccgtgtctttaaaacttgggttttgaat

SEQ ID NO: 393529 - DNA, 572 bp, Homo sapiens
gggggctgtgctttaaaacctggctccctggacatggggcctggggagtttggtgcccacgtgatagggactgctagagaggccccagagcatctgtctggggacactgtggacacatgtcctgagaataccccctcaggggctgaggcggggcatcataccatcttgggagcccaaagccatgtgctaacaagctgttggcagaggactagagaaagacattttcaaaaacaacagcaacaaaaattgcaagccactccatccgggctgcagacccctccctgcatctcattagcgcctggggtgggaggagagggggctggcaggcactgcctacacytacgtgtcctgaaaaccaatgcatgcccacagaggtgggcgggtgggaggcgcagagtggcccagctcccagcctaggaaagatctttccaatgctctgcttgtcatttgttcccttgtgtgtgaatttttagaacaggtatcagattctttctgtgtaggacactttttgtttgtttttggagtcaatgctctaaggtctcttccgtgtctttaaaacttgggttttgaat

SEQ ID NO: 393530 - DNA, 572 bp, Homo sapiens
gggggctgtgctttaaaacctggctccctggacatggggcctggggagtttggtgcccacgtgatagggactgctagagaggccccagagcatctgtctggggacactgtggacacatgtcctgagaataccccctcaggggctgaggcggggcatcataccatcttgggagcccaaagccatgtgctaacaagctgttggcagaggactagagaaagacattttcaaaaacaacagcaacaaaaattgcaagccactccatccgggctgcagacccctccctgcatctcattagcgcctggggtgggaggagagggggctggcaggcactgcctacacctacgtgtcytgaaaaccaatgcatgcccacagaggtgggcgggtgggaggcgcagagtggcccagctcccagcctaggaaagatctttccaatgctctgcttgtcatttgttcccttgtgtgtgaatttttagaacaggtatcagattctttctgtgtaggacactttttgtttgtttttggagtcaatgctctaaggtctcttccgtgtctttaaaacttgggttttgaat

SEQ ID NO: 393531 - DNA, 484 bp, Homo sapiens
ggtttgatccagtttgatccaattcaccactggcttcgaatgttttgagaatggtatcaggactatcctttcatcaggtcttgggatctgagcattagtgagacttaaaaaaacaaaacaaaaatccttttgatactttgtagccctgttgccggctttctgaaccatgggagggttttctttctttccgctttgcagacaactgccagcttgggtttggggtcctgctcctgggtttttgcaacttgggagacctctctccacccttgggccctggtttcagtcttaggaaggccactgtgctgcacttatgtcccttaagggatttttctcagctctcctttcctgtacccagcctttggcaaaccactgtctctcacttggggaaggtcctctgtaccccargatgattttctcagttctcctgccttgcctttagactttggcctattgcccctttgcacttgaggaagaactgtgagaa

SEQ ID NO: 393532 - DNA, 573 bp, Homo sapiens
gaaccaaaaaagagcccacatagccaaaggggcaagactaagcaaaaacaacaaatctggaggcatcacattacctgatttcaaactatactatgaggccattgtcaccaaaacagcatggtactggtataaaaataggcacatacaccaatgtaacagaatagagaactcagaaataaacccaagtgcttacagccaactgatcttccacaaagcaaacaaaaacataaagtggggaaaggacaccctattcaacaactggtgctgggataattgtctagctacatgtaggagaatgaaactggatcctcatctctcaccttatgtaaaaatcaactcaagatggatcaaggacttaagtctaagacctgacactataaaaattctagaagataacatctgaaaaacccttctagacgttggcttaggcaaggatttcatgaccaagaacccagaagcaaatgcaataaaaacaaagataagtgggacttaattaaactaaagagtttttgcayggcaaaaggaacagtcaacagagtaaacagacaacccacagagtgagagaaaatcttc

SEQ ID NO: 393533 - DNA, 535 bp, Homo sapiens
tagagtttggagcatatgtagcaataaaatatatgacaacaggagcatagaggaggggagtgagataaatataatgatactattgtagtgttcttaccttgttcgtgaagtagttattattttaaaacacgttgctaaacaaatgaytcacagaatcatctatagagaaatttcataacaaaaataggtatagttaaaaggctgttgggtgcagtggctcgtcctgtaatcccaacactttcacaggctgaggcaaaagaattgcttgagcccaggagtttgagaccagcctgggcaatgtagtgagaccttgtctctacaaataatttttttttaaattagccaggcatggtggagcacctgtggttccagctactcaggatgctgagtgggaggatcgcttgagccctggcagtcaaggctgcagtgagccatgattgtaccattgcactccagcctgtgagacagagcaagactccgtccaaaaaaaaaaaaagctaatgaaatacttaatcacttacaaggatacagaaaa

SEQ ID NO: 393534 - DNA, 535 bp, Homo sapiens
tagagtttggagcatatgtagcaataaaatatatgacaacaggagcatagaggaggggagtgagataaatataatgatactattgtagtgttcttaccttgttcgtgaagtagttattattttaaaacacgttgctaaacaaatgactyacagaatcatctatagagaaatttcataacaaaaataggtatagttaaaaggctgttgggtgcagtggctcgtcctgtaatcccaacactttcacaggctgaggcaaaagaattgcttgagcccaggagtttgagaccagcctgggcaatgtagtgagaccttgtctctacaaataatttttttttaaattagccaggcatggtggagcacctgtggttccagctactcaggatgctgagtgggaggatcgcttgagccctggcagtcaaggctgcagtgagccatgattgtaccattgcactccagcctgtgagacagagcaagactccgtccaaaaaaaaaaaaagctaatgaaatacttaatcacttacaaggatacagaaaa

SEQ ID NO: 393535 - DNA, 535 bp, Homo sapiens
tagagtttggagcatatgtagcaataaaatatatgacaacaggagcatagaggaggggagtgagataaatataatgatactattgtagtgttcttaccttgttcgtgaagtagttattattttaaaacacgttgctaaacaaatgactcacagaatcatctatagagaaatttcataacaaaaataggtatagttaaaaggctgttgggtgcagtggctcgtcctgtaatcccaacactttcacaggcygaggcaaaagaattgcttgagcccaggagtttgagaccagcctgggcaatgtagtgagaccttgtctctacaaataatttttttttaaattagccaggcatggtggagcacctgtggttccagctactcaggatgctgagtgggaggatcgcttgagccctggcagtcaaggctgcagtgagccatgattgtaccattgcactccagcctgtgagacagagcaagactccgtccaaaaaaaaaaaaagctaatgaaatacttaatcacttacaaggatacagaaaa

SEQ ID NO: 393536 - DNA, 373 bp, Homo sapiens
gtcagagggaatcagcttttccttgggggctgactggttgtatggctttcttttggggacagwcctactgcagggagaaaaaacatgttggttcccctcaacttgcagctgtgagaaaaagaagagcatcaagactcttcacaagcctgatttgaacatcctccagtggaaactctcttagcacctcactgacattctggaaaatgtgcgtggatcctatttaagttctcttcttagtttctgggcaaaaataaataaataaataaataaataaataaaatttggcaaatctctagttaggtagtcatatcagcagtgagtgggtttcaaagtcaagagaggaagaatgcctggctcaacaggtagggtgggg

SEQ ID NO: 393537 - DNA, 373 bp, Homo sapiens
gtcagagggaatcagcttttccttgggggctgactggttgtatggctttcttttggggacagtcctactgcagggagaaaaaacatgttggttcccctcaacttgcagctgtgagaaaaagaagagcatcaagactcttcacaagcctgatttgaacatcctccagtggaaactctcttagcacctcactgacattctggaaaatgtgcgtggatcctatttaagttctcttcttagtttctgggcaaaaataaataaataaataaataaataaataaaatttggcaaatctctagttakgtagtcatatcagcagtgagtgggtttcaaagtcaagagaggaagaatgcctggctcaacaggtagggtgggg

SEQ ID NO: 393538 - DNA, 634 bp, Homo sapiens
ttttatccttacagctatgctatctggtaggcatagtaaaagtgaaaggcaaaataggagctagtatttacctggtctccaatattgccaggcactgtgcacaggacaagcaatgtcatttaatcctcacatacattttatgagaaatagtatctttagttgtaaattaagaaattaggggttagaaaggataactcgtccactgtcayctaagtcgtcatggcaatactcagattctaactgtcatggttttaatgtgttccccaaaatgtatgcattcgatgacccggtgcggtggctcatgcctgtaatcccagcactttgggaggccgaaaagggtggatcacaaggtcaggagttcaagaccagcctggtcagcatagtgaaacccagctctactaaaaatacaaaacttagctgggtgtggtggacgtacctgtggtctcagctactcaggaggctgggtcagggaatcgcttgaacccaggaggcagaggttgcagtgagctgagatcgtgccactgcacttcagcctggcgacagagactcagcttaaaaaaaataaaaatatgcatttgaaacttaattctggtacaacagggtttgaggtggggcctaatgagaggcaattagg

SEQ ID NO: 393539 - DNA, 618 bp, Homo sapiens
cactatgtaatcacatttataaagtgtttaagctcactgtaaaaggccagctgctcctgctcagatggatagagcagcatgcagagactcacattgtaaaccttcactccaagaactacctcaggaatataccaggaaagctgagagaatccacagaccctttgaaggaactggattaccactgcagkctccctgagatgccagaaaactgagttggcttgctttctcagtagggaggcttgtggtctgggacaagttctcaaccctggtcaccggctgcctggaaatagacttggtgctgttgtggggtcacagtgggagtgagactggcctttaagactgtgggctgcatgggagttgggtgaggcttgtgactgccaactttccctcattttcctggtgacgtgtatgactcagcagaggcagccataattcccctgggaacatcattctattggcctgggaaccatactcacatcccccacagcagctgcagcaagccctgcccaaggagagtgtgagcttagacacacctatcactgcccccacctgttggtctttgtctacccaccgtggtagccaagaacaaaggttataatctcttgggagctctatggc

SEQ ID NO: 393540 - DNA, 605 bp, Homo sapiens
gtttattgattgaatgactcaatgttgttaaatgtttatttttccaaaactgatctataaatttacaacaatcctaatccaaataccagcaagcatttttgtagaaattgacaagttagtttcaatatttgtgtggatatgcgaagagtttagaatagccaaacaatattgaccaagataaacaaggtggaggaattacattaccttatttcaagatttatcataaaactagtgtaattggcactatgtaatcacatttataaagtgtttaagctcactgtaaaaggccagctgctcctgctcagatggatagagcagcatgcagagactcacattgtaaaccttcactccaagaactacctcaggaatataccaggaaagctgagagaatccacagaccctttgaaggaactggattaccactgcaggctccctgagatgccagaaaactgagttggcttgctttctcagtagggaggcttgtggtctgggacaagttctcaaccctggtcaccggctgcctggaaatagacttggtgcygttgtggggtcacagtgggagtgagactggcctttaagactgtgggctgcatgggagttgggtg

SEQ ID NO: 393541 - DNA, 587 bp, Homo sapiens
attggccgtccggaaaaaacacatatatatatgatatgatttccctcctactagaatggctaaaataaaacatattggcaatttcaacttttggcaaagatatgaagcaactgaaactcatatatctctgattgacatgtaaaatgcacaagtctggatattcatataaaactaacatacatctatcctctgtcccagatattacatgtctaggtatttaccccagaaaaatgaaaacrtatgtcacaaaaaaatagaaaatatttgtcaattgtatatggatgtttataacagctttatttgtaagagcctaaaatttgaaacaactcaaatgttcatcaacaggagaatggataaactggtatatttataaaacagaaaactactcagccaaagaaaggaataaaccagtgatacatataaaaatacggatcaatcttaataacattgtgtcatacaaaaataaaatctagacaaaaagaatgtgtttattggattcctttcatatgaagtctaggaacaagcaaaagaaatcaatgatgataaaactacattaaaatctaacattggataataaacaaaacatg

SEQ ID NO: 393542 - DNA, 427 bp, Homo sapiens
atgctattatggcttccatcctcacaactccaccaaaatggctttttctaaggtatctaaggatccagtaggcatttttcagtttttatcttacttgaccttgtagctgctgttgctaatcatcactgcttccctgtagcagtggtccacaacccctgggccatggaatgttaccactctgtggcctgttaggaacagggccrcacagcaggaggtgagtggtggagggagccagcattacctcctgagctctgcctcctgacagatcagcagtgacattagattctcataggagcaagaaccctattgtgaactgcacatgagagaaatctaggttgcatgctccttatgagaatctaatgcctgatgttgtcttccacaaaactggtccctggtgccaaaaagtttggggactgctgccctatag

SEQ ID NO: 393543 - DNA, 544 bp, Homo sapiens
ttgcatctgtgattagtgctaaagaggaaaaattcaaaaggcaggtgagctagaaactttcagtggttcaaattttttgattgggtagctagggaatgcatcactgagatctttgagtaaagatytaaaggaagtgtgccagttatgatttgatggcctcttacctgccaatccactccttattaccagctctgcaacagtggggatgagcccttttagcactgctcctttgcagttaacacaatattaagctttgtcactggaatggtgggggtggacacagtagaaggaaggcacctctgttcctagttctggtgtgttcatttagtcaacgtgtagcgggggtgttttgtttttctgtagctcccttgtggcaccagcatgtgcgccttcccaaaggtagcttcctttaacatccattcaggtaacttcaccatggaaatatgatggtgggacacctcctgtgaatggctttctcaggccagcctcccccagttggctttgcagcagagtgccaaaggcttggtaattcttgcctggcttc

SEQ ID NO: 393544 - DNA, 296 bp, Homo sapiens
agagatattaaatagcatagtmgaggctgtataatcagcataactgcagagctgggatttgaaacctggtcacttaaccgcaaattagatggtcttcaccactcataaaacactgctttccagttggtggaagaaaatatatgtataacttattttgagagattggtttgttgtcccaacatttttttgtgataattttagacagccagcaaaaccaaaagcattttacagcgaacctctatgtactcctgacctatactctgccataaacattctactatacttaccttattaca

SEQ ID NO: 393545 - DNA, 296 bp, Homo sapiens
agagatattaaatagcatagtagaggctgtataatcagcataactgcagagctgggatttgaaacctggtcacttaaccgcaaattagatggtcttcaccactcataaaacactgctttccagttggtkgaagaaaatatatgtataacttattttgagagattggtttgttgtcccaacatttttttgtgataattttagacagccagcaaaaccaaaagcattttacagcgaacctctatgtactcctgacctatactctgccataaacattctactatacttaccttattaca

SEQ ID NO: 393546 - DNA, 568 bp, Homo sapiens
tcctcttcatactgccgctatcacctataaccagcttcttttcatttttcaggggtarttacttataacaattaggtatgtatccttttaagaagaaaagattgtttaaaaactctcagttatattatacatattgttcagtaatttgtttactcatctaattacatatcttgaaaatatttcaatctttgatcatctatatctaactttgtctttctaatagctgtatattattctgttatgtggatagatcattatatatactatatatgttattacacaaatcataatatatatatttagaatatatatagatcatgctcattttaagagcatttaggtttctgtttatttatattaaaatgctgctatatgcattctttttcagacatcattttattatttttatttgacaactaaaaatcatatatattgatagtatacgtgttcatccatttgtattgctataaaggaatacccgagggtttgtaatttataaagaaaagaggtttattttgctcagagttctgtgtgttatacacaaagcatagtgttggcatctgcttct

SEQ ID NO: 393547 - DNA, 577 bp, Homo sapiens
caatttaatagcagaaaaggaaaaaataatttaatgaaaatattttttctacacttaaaataataaacatctaccagtttgggcatttaatctctgctttcatccgtaaaaagttcaggaatattgaattttgttggaagtaacaagttaaattagcacttccatctttcatcttagcccaaattagaaacttaactctagctggtctttgaacagaaagagatttgatacagcctgttgggtacttgtaaaatcactagaaaggctggaggagccaarcttcagccttggtgctctaggaaagactccaagaataaactggaaaactagcttatgaagtggtggctgtcttctacaatcaggaagctgaggaaccagaacatgacatactaattactggctctagtattatattatcttattcataatccaatcggaaagctgttatgagtaccacatcattgtctctaggaaatttattgcttatcagtattatggaagtcaagaagaacctgcaagaaatgttggcttcagatccataatccactggctgggtcttcaacagtaaaatgaatgc

SEQ ID NO: 393548 - DNA, 538 bp, Homo sapiens
attagaaacttaactctagctggtctttgaacagaaagagatttgatacagcctgttgggtacttgtaaaatcactagaaaggctggaggagccaagcttcagccttggtgctctaggaaagactccaagaataaactggaaaactagcttatgaagtggtggctgtcttctacaatcaggaagctgaggaaccagaacatgacatactaattactggctctagtattatattatcttattcataatccartcggaaagctgttatgagtaccacatcattgtctctaggaaatttattgcttatcagtattatggaagtcaagaagaacctgcaagaaatgttggcttcagatccataatccactggctgggtcttcaacagtaaaatgaatgcctcaggtctttactatctttcagggttcacttgactggcagaactaatattacatctagaactctggctgtaaggaagtctgagaaatttcatttttacctttgcaaactctgtctactgaaagcactataaaagaaagctga

SEQ ID NO: 393549 - DNA, 538 bp, Homo sapiens
attagaaacttaactctagctggtctttgaacagaaagagatttgatacagcctgttgggtacttgtaaaatcactagaaaggctggaggagccaagcttcagccttggtgctctaggaaagactccaagaataaactggaaaactagcttatgaagtggtggctgtcttctacaatcaggaagctgaggaaccagaacatgacatactaattactggctctagtattatattatcttattcataatccaatcggaaagctgttatgagtaccacatcattgtctctaggaaatttattgcttatcagtattatggaagtcaagaagaacctgcaagaaatgttggcttcagatccataatccactggctgggtcttcaacagtaamatgaatgcctcaggtctttactatctttcagggttcacttgactggcagaactaatattacatctagaactctggctgtaaggaagtctgagaaatttcatttttacctttgcaaactctgtctactgaaagcactataaaagaaagctga

SEQ ID NO: 393550 - DNA, 596 bp, Homo sapiens
aacttagcagttattcatgcaatagtttacttccagtatttagccttatagaaatcacaattgaaacacgtatttcctacgttaaatgcttccatgttgaccacagtttgctgacatctagaacttttatttgtttataatctgctttctcctgttttaatttccagttattatccttgcagagtttcattttgtctaataggttatttgttctgccctgtaaagttgcactatttttttttgtagtttctcagagttttgcaaaccattcagccattttcttcaaacttttaaactactaataaagaaaaccttgaaaragtatgcgatgcttacatttttatgcattgaaacaagttcaaagttactgacacagaatttgtaaacttattttcaatgaaattaagtaaataaatactcagaaacacacataattcttaacagcagtaactgcatgtcagttaacatttctaggttgagcattccaattctgaaaactccaaatctgaaatgcttcaaaatccaaaactttttgagcactgatatgacaataaaggaaatgctcatcatagcatttgggatttgggattttcaac

SEQ ID NO: 393551 - DNA, 609 bp, Homo sapiens
aaatccatcataatcaagaatggcagttgcaatggaaggaatgagccctctcgatccctcggcacaggcacaactaggtggaaacctgtcaactcctaagttgaggccacaagaagggcgtgggtaacaggaaaaagcacagtgagagtatttctaacaggctcagaattaggcaactgtgtacacrtacaaatatatatatattttttttttaggaaacaaaaaattctgtgcctgagtagttacatgtagctacagcagcttcacaatgaatccagaatctagacctctccatctttctgtgtggctaaccataactaatgtttcttgctcatagttataagacagctgttgatgtcccactcaccagttaggaggattgagaagaagctgctttccaggaaatcccagtcgacttccagatagatctctttggtcaaaaatgtgtcacagctccaactctttttttgtaaggtaatatggggaataaaatattttagtagcaaaactgggtctctgccaataagaaagaaggagaggttagatattgggtagataactagcagcatcctccatgtgataaactggaatgggagactatgctagctt

SEQ ID NO: 393552 - DNA, 588 bp, Homo sapiens
atccatggaattttctgtaccccaatatggagcaaggatcaggcaccaagctctttcatgttctcttgccctctcaagtaaaattctctctctctctctctctctcattttttaccctgactaatatctttattatgttgaaattaaacagattgttgcaagtgatcatatctcaggttacattccttttctttctctgagaacatcaagaaaatccatcataatcaagaatggcagttgcaatggaaggaatgagccctctcgatccctcggcacaggcacaactaggtggaaacctgtcaactcctaagttgaggccacaagaagggcgtgggtaacaggaaaaagcacagtgagagtatttctaacaggctcagaattaggcaactgtgtacacatacaaatatatatatattttttttttaggaaacaaaaaattctgtgcctgagtagytacatgtagctacagcagcttcacaatgaatccagaatctagacctctccatctttctgtgtggctaaccataactaatgtttcttgctcatagttataagacagctgttgatgtcccactcaccagttaggag

SEQ ID NO: 393553 - DNA, 568 bp, Homo sapiens
ggtcacttgcccacatgtgtttaaatcgcttacctgtccttgtatacctgacataatgatctgggagcctggctctgttccttctagttgtagacttctttttgccatctttccttctaccctccatactgagtgtagtttattactttagcacacatatgcggggttataaaacagtctagatttgaagtgctactctggcacttaatagtagtgtaacttagacaaattacataaccacactttgcttcagtttactcatctataaaataagcatcacaataatgtctgcatcataaagctgttatgaagattgaatcagttaatgtattaaagttcttaaaatagtgcccagcatgtagtgtgatataggtggtagctgttattattatcacccagctggataataggacatrgcctaaattagccagcaaaatgactccccgaagtaagtcagccaaaaccagaataaaagaattgtgtggaaatgtgtgtggaagctgacagatattcccccaaatactgcaaatataagggactcagctgagtgatcagggaaagttacctg

SEQ ID NO: 393554 - DNA, 568 bp, Homo sapiens
ggtcacttgcccacatgtgtttaaatcgcttacctgtccttgtatacctgacataatgatctgggagcctggctctgttccttctagttgtagacttctttttgccatctttccttctaccctccatactgagtgtagtttattactttagcacacatatgcggggttataaaacagtctagatttgaagtgctactctggcacttaatagtagtgtaacttagacaaattacataaccacactttgcttcagtttactcatctataaaataagcatcacaataatgtctgcatcataaagctgttatgaagattgaatcagttaatgtattaaagttcttaaaatagtgcccagcatgtagtgtgatataggtggtagctgttattattatcacccagctggataataggacatggcytaaattagccagcaaaatgactccccgaagtaagtcagccaaaaccagaataaaagaattgtgtggaaatgtgtgtggaagctgacagatattcccccaaatactgcaaatataagggactcagctgagtgatcagggaaagttacctg

SEQ ID NO: 393555 - DNA, 440 bp, Homo sapiens
cttgaaatcttccagataggcaaaaaaaaaaaaaaaaaaaaaaaaaaggggggttagtttttcccatttgggcgccaaacttacaatcttaaccttttcctcttctcatctttgcttctattattctgatttcaaaataatgtccagccccattatatacatttgtggagcattttcattttcccaagggtcttcctcatttgacttatatctctcaacaattgtcatcagctttatcatcctcacttgaccaatgaggaaatcaaactttgaaaggattcagcgacactcttctttgatcacatgagtaaaggggaagcctgattaaaaaccracaacaccaccaaacaaaacaaaacaaaacaaaaaacaaagagacaggttttctgagtcattctgtctttcatttattcagtattatcttactaatatgaccgtgt

SEQ ID NO: 393556 - DNA, 529 bp, Homo sapiens
acgtaccctcattcatagggtacgttcacctcattcttcaaataytggtttccttaagtaatcagtttctggcacccaacatttggttttgatatccttcctatgtgttctcagagaaacctggtttgtatgactcaacctatgtagttcagtcttactctgatagatacacaatacatgtttggttgattaattaagaaaaagtctgtgacatccaacttccttcccatccacaagctcttactggggagatagccaacgtaataatgtctgccatgtgacagatacaataaataaataaataaatattaatgctgttgacatttgcaaagtagcatatattatgctaagagcattcacacacattattttgtttcatcctcaagacttcttctaaagccggtgatccttcttctgttcttctccacttccatcttcaggctaaggcaatggaaattgaaactcaaaatgatttttttttttctgaaactgaatataagtctgaaggattctagaaatatatatatat

SEQ ID NO: 393557 - DNA, 529 bp, Homo sapiens
acgtaccctcattcatagggtacgttcacctcattcttcaaatactggtttccttaagtaatcagtttctggcacccaacatttggttttgatatccttcctatgtgttctcagagaaacctggtttgtatgactcaacctrtgtagttcagtcttactctgatagatacacaatacatgtttggttgattaattaagaaaaagtctgtgacatccaacttccttcccatccacaagctcttactggggagatagccaacgtaataatgtctgccatgtgacagatacaataaataaataaataaatattaatgctgttgacatttgcaaagtagcatatattatgctaagagcattcacacacattattttgtttcatcctcaagacttcttctaaagccggtgatccttcttctgttcttctccacttccatcttcaggctaaggcaatggaaattgaaactcaaaatgatttttttttttctgaaactgaatataagtctgaaggattctagaaatatatatatat

SEQ ID NO: 393558 - DNA, 553 bp, Homo sapiens
aaggtttacccataataaggaaaatgaaggcacttacctggcacatttggctgacaagttggccacagtgattctgaacagaggttgctcaaaggaayccattggggcttaggtccacattttgcttaggaaacagatttggctctactataacatggaaataaatgggtagccaaggctcaatgttctactctattaagaatcactggaaaatttttaaagcagatattagtaatcactcaccagagccataaagaactcatcacagggcaacttcctggtgatctcactgaggtaaattaattgcaaaatatacttcattgatagctgcaagatttgacctgatgaataaaatggtcgaaggtgagtcaagtaaacagtgggagacttctgccatgaaaaattattttggtttcagaaacttgtgatgttattacagaaaatagagtatgtgatcaatgccttatctggcaggccttagtatgccactgcataatcatgcctttatcaaagagaaaaatatttatcattatattctcagtggcagaaaggt

SEQ ID NO: 393559 - DNA, 351 bp, Homo sapiens
tccctagtttagaggagactcagcccagaagacatgacaactaaataaaatgtggtattgtggattggtcttggaatataaaaagaacatcatggaaaaactgtgaaatccagataaagtctgaagtttagtaaatagtaatgtaccaatgtcagtttcttagttttgccaaacgtacaagggtaaagtaaaatrgtaacaatgagggaatttagataaggggtgtgataggcagaataatggcctccaaagaatgtccatgccctaaactctgagacagatgagtatgttaaattatctggcaaaggagaatcaaggtagctgatggaattaaggttgttaatcagttga

SEQ ID NO: 393560 - DNA, 609 bp, Homo sapiens
ccctagtttagaggagactcagcccagaagacatgacaactaaataaaatgtggtattgtggattggtcttggaatataaaaagaacatcatggaaaaactgtgaaatccagataaagtctgaagtttagtaaatagtaatgtaccaatgtcagtttcttagttttgccaaacgtacaagggtaaagtaaaatagtaacaatgagggaatttagataaggggtgtgataggcagaataatggcctccaaagaatgtccatgccctaaactctgagacagatgagtatgttaaattatctggcaaaggagaatcaaggtagctgatggaattaaggttgttaatcagttgatcttatgatagggagataatcatgagtttgtccaggtagacacaagataatagtaagagtccttaaatgaggaagagggagaaataagaatcagtgtcagagtgacgcaatagaagaaaatcttgactggctattgctggctttgaagatggaaggcagccacacaccaakcaatgcagaaagcctctgaaagctggaaaaagcgtggatataggctttcctcttgagcctccagaagtaacggagccttggcaacacc

SEQ ID NO: 393561 - DNA, 552 bp, Homo sapiens
gtgcaaacagagtctggcctctgagaccccactgtcagcatgaaaaaagatctccttacttaccagagtgaaaagaaaggggcgctttcaattacttcaccttcttagctctacacaatgaaacaggaggagaaattgcacattaatggagaggaaaacaagtgtaagttcctcagggaagtcatacaaggctgcagaaggtgcrtaaaaagtagtttgcagctctgattggaagtgaaaagagaagaaatcggaagtgaaatcccacaaattaaaattaaaactgcaattcccttgagcgctctgatccacacatcccccagaccatcccccacactgctctaattgtaccacttcaaacctaatgagttgggtttggaagtaccaaggtctctaaatgaaaccatttatcattgtaacgctcttattagatatttgattgagcacttgtttttaaggcttagaaatacaacatagaaatcagtcattggaggcatcttcacttgtgtttagaaaaaaatgaaaaaaatatgcttagactaagaaacagtg

SEQ ID NO: 393562 - DNA, 552 bp, Homo sapiens
gtgcaaacagagtctggcctctgagaccccactgtcagcatgaaaaaagatctccttacttaccagagtgaaaagaaaggggcgctttcaattacttcaccttcttagctctacacaatgaaacaggaggagaaattgcacattaatggagaggaaaacaagtgtaagttcctcagggaagtcatacaaggctgcagaaggtgcataaaaagtagtttgcagctctgattggaagtgaaaagagaagaaatcggaagtgaaatcccacaaattaaaattaaaactgcaattcccttgagcgctctgatccacacatcccccagaccatcycccacactgctctaattgtaccacttcaaacctaatgagttgggtttggaagtaccaaggtctctaaatgaaaccatttatcattgtaacgctcttattagatatttgattgagcacttgtttttaaggcttagaaatacaacatagaaatcagtcattggaggcatcttcacttgtgtttagaaaaaaatgaaaaaaatatgcttagactaagaaacagtg

SEQ ID NO: 393563 - DNA, 578 bp, Homo sapiens
cacatggtaaatgcttcacaagtagtagctkttattattcttgcacttgtgcccaaccttctggagttagaatagcaaatcaacatttgtttgatagcataacattattccccatcattctcaaatacataattaaagaaacacaaaattaaaaaaatacaatgcctataatcttggcaaagatttaaacatttgctaattctcagtattagtgaaagtaaagatactttcaataattataggtagaaatgctttttgagcctttttttttttgaagtgaaatttggcaatatctgtcaaactattaaatgctgatacacctgaatgcaggaattccacttctaggagtattaatcacagcaatttttatagttgcaaaaaaatttggaaatgacttaaatgtttataaatgtgctaacagttaattaaattgtggtacatccatacaatgggattttagctagttattaaaaagcagggtagatctttataatattttgattatgaaaaaataaccaagataaagaattacgtgtcaacagaaggttataaaacaaaatgtataaatgtataaatgc

SEQ ID NO: 393564 - DNA, 578 bp, Homo sapiens
cacatggtaaatgcttcacaagtagtagctgttattattcttgcacttgtgcccaaccttctggagttagaatagcaaatcaacatttgtttgatagcataacattattccccatcattctcaaatacataattaaagaaacacaaaattaaaaaaatacaatgcctataatcttggcaaagatttaaacatttgctaattctcagtattagtgaaagtaaagatactttcaataattataggtagaaatgctttttgagcctttttttttttgaagtgaaatttggcaatatctgtcaaactattaaatgctgatacacctgaatgcaggaattccacttctaggagtattaatcacagcaatttttatagttgcaaaaaaatttggaaatgacttaaatgtttataaatgtgctaacagttaattaaattgtggtacatccatacaatgggattttagctagttattaaaaagcagggtagrtctttataatattttgattatgaaaaaataaccaagataaagaattacgtgtcaacagaaggttataaaacaaaatgtataaatgtataaatgc

SEQ ID NO: 393565 - DNA, 578 bp, Homo sapiens
cacatggtaaatgcttcacaagtagtagctgttattattcttgcacttgtgcccaaccttctggagttagaatagcaaatcaacatttgtttgatagcataacattattccccatcattctcaaatacataattaaagaaacacaaaattaaaaaaatacaatgcctataatcttggcaaagatttaaacatttgctaattctcagtattagtgaaagtaaagatactttcaataattataggtagaaatgctttttgagcctttttttttttgaagtgaaatttggcaatatctgtcaaactattaaatgctgatacacctgaatgcaggaattccacttctaggagtattaatcacagcaatttttatagttgcaaaaaaatttggaaatgacttaaatgtttataaatgtgctaacagttaattaaattgtggtacatccatacaatgggattttagctagttattaaaaagcagggtagatctttataatattttgattatgaaaaaataaccaagataaagaattacgtgtcaacakaaggttataaaacaaaatgtataaatgtataaatgc

SEQ ID NO: 393566 - DNA, 593 bp, Homo sapiens
ctgcacatcctgcatatgtaccccagaacttaaaataaaattwaaaaaaagaatttgtttccagaatatatagaaagaacactttattaatcaataacaagagtaaaaatagcccaatcaaaaatggaaaaaattttgaagaaatattttaccaagaagatataagaatagcaaatatgcatataaaaagatgctcaaaaactttagttgttagagaaatgcaaattaaaatcaccacaatggcatacaactacatagccactaaaatagctaaaattacaaagattaacaatagcaggtgtggcaaggacatatacactagcagtgtatgagactgtagccttcatacactgctagtagaatgtggtttggtgaaaataagtttggcagtttctcaatgacatacacttaccacataaaccagcaattccacatctaggtgtttaccaggagaaatgaaaacacatatttacacaaagatttgtgcttgagtgttcatagtagatttatttaaatagccaaaaattgagcaccatgcaaatgtccatcacctggtgagtagataaataaatcatggtatatagagataacag

SEQ ID NO: 393567 - DNA, 593 bp, Homo sapiens
ctgcacatcctgcatatgtaccccagaacttaaaataaaatttaaaaaaagaatttgtttccagaatatatagaaagaacactttattaatcaataacaagagtaaaaatagcccaatcaaaaatggaaaaaawtttgaagaaatattttaccaagaagatataagaatagcaaatatgcatataaaaagatgctcaaaaactttagttgttagagaaatgcaaattaaaatcaccacaatggcatacaactacatagccactaaaatagctaaaattacaaagattaacaatagcaggtgtggcaaggacatatacactagcagtgtatgagactgtagccttcatacactgctagtagaatgtggtttggtgaaaataagtttggcagtttctcaatgacatacacttaccacataaaccagcaattccacatctaggtgtttaccaggagaaatgaaaacacatatttacacaaagatttgtgcttgagtgttcatagtagatttatttaaatagccaaaaattgagcaccatgcaaatgtccatcacctggtgagtagataaataaatcatggtatatagagataacag

SEQ ID NO: 393568 - DNA, 593 bp, Homo sapiens
ctgcacatcctgcatatgtaccccagaacttaaaataaaatttaaaaaaagaatttgtttccagaatatatagaaagaacactttattaatcaataacaagagtaaaaatagcccaatcaaaaatggaaaaaattttgaagaaatattttaccaagaagatataagaatagcaaatatgcatataaaaagatgctcaaaaactttagttgttagagaaatgcaaattaaaatcaccacaatggcatacaactrcatagccactaaaatagctaaaattacaaagattaacaatagcaggtgtggcaaggacatatacactagcagtgtatgagactgtagccttcatacactgctagtagaatgtggtttggtgaaaataagtttggcagtttctcaatgacatacacttaccacataaaccagcaattccacatctaggtgtttaccaggagaaatgaaaacacatatttacacaaagatttgtgcttgagtgttcatagtagatttatttaaatagccaaaaattgagcaccatgcaaatgtccatcacctggtgagtagataaataaatcatggtatatagagataacag

SEQ ID NO: 393569 - DNA, 418 bp, Homo sapiens
tagcaggtgtggcaaggacatatacactagcagtgtatgagactgtagccttcatacactgctagtagaatgtggtttggtgaaaataagtttggcagtttctcaatgacatacacttaccacataaaccagcaattccacatctaggtgtttaccaggagaaatgaaaacacatatttacacaaagatttstgcttgagtgttcatagtagatttatttaaatagccaaaaattgagcaccatgcaaatgtccatcacctggtgagtagataaataaatcatggtatatagagataacagaataatatttggcaatgaaaagaaatgaactattaatacatgtaacaattggataaaccacaatggcattttggtaggtgaaaaaaaaaaaagccagccacagaagatcacacgctg

SEQ ID NO: 393570 - DNA, 418 bp, Homo sapiens
tagcaggtgtggcaaggacatatacactagcagtgtatgagactgtagccttcatacactgctagtagaatgtggtttggtgaaaataagtttggcagtttctcaatgacatacacttaccacataaaccagcaattccacatctaggtgtttaccaggagaaatgaaaacacatatttacacaaagatttgtgcttgagtgttcatagtagatttatttaaatagccaaaaattgagcaccatgcaaatgtccatcacctggtgagtagataaataaatcatggtatatagagataacrgaataatatttggcaatgaaaagaaatgaactattaatacatgtaacaattggataaaccacaatggcattttggtaggtgaaaaaaaaaaaagccagccacagaagatcacacgctg

SEQ ID NO: 393571 - DNA, 502 bp, Homo sapiens
aattatctcattctcttctgtactcttaattcctttttaccatgaatgtgccttctttatttataaaaaattaaatgagtaaaaaatgaaaaataaagcaccggtttgaatactaagaccatactttcttaaataaaaaatcagggcatagggattcagtagaggatgtgaagtagatattgtctccacagaaattctggtaatcataagaataaattatatttattttcataaaaatggattctgatttctataatttagaaactcttggcacagctggaaaaattcttgggtgctataaatcgataatggtgatcattgatttatgacaaatcaagcatttactataatgatgyctattaatttttggcttaatataccagtaactcatcatttgtatatagaggctagttcagaaataagaggaagaatattcgtaagattattttagttcaaaatgaaaaaaatattttattagatactatggggaaaattgattttt

SEQ ID NO: 393572 - DNA, 651 bp, Homo sapiens
ctgtgagaaatgaggtttattagcatcttcccgggggatgtcagagaataagggaagctttcaggactttcttccaactcttccttactattgttcatgagatggagctgatagtaaggccctgtggggatcaagaatgttagtgatcagaaaactaaattcactgtttcactgctctaaataaaagtggatggacttctgcctcagctcagcttcgagaaggtggaagaggagcggsaacactggaaaactgtttctcctttttctctcctccggccctcatggtgagaggtgagatatcttgatgaaaaagaggatccaggtttgctgggcttcatctcggctctgccagttactagttatgtgaccttggggatattatttcacctctctaaatctcatttttcttatctatatagtgggggcaattcaaatgcatgagatttttgagaactttagatttaatgtacttacattttatagaacaatgttgggcacagagtaagtattctgtgagtgtggtcttttattttcctttattgtcagtaaaatactctcttatcctcactttagatgcatcaagaaccccatatactttctcatacgattcaatgagtcctataattgattagtcagtaaggtgaggcttag

SEQ ID NO: 393573 - DNA, 588 bp, Homo sapiens
ctctcttaccttctaaagccttctctacataccaattaccctatgaataatttccttmtccttctaaattatgcttctttctgagcctgtttcttcatcagtgaaattgggatagtcataccaaacacacagaattgtgctaaggactacattctgtatacaaaacttctggcttagagcttgtcatatagtgggctctcaatacatcttcaaactcctttttttaaccctcatagtcctgtgtggtttctttgttgcacccttgtattttatactttctgaagttacatgtgtgcttgacttaatccccctgtttatccagtaaatatttcagggataataaaattttaaggactaagaccatactgtattcttctttgtatagtatcatcaggccctaatactctgtcattatctgcgtgcttaataaatacttgaattattaacttgaattgagtaactccccagcacaggatgtcttctcagcttccagtcccgagccattgagacttgctggtgaatctgttacacaggggacgagtctgagcccagaaaataagcagtcccccacactgccctgttagcttt

SEQ ID NO: 393574 - DNA, 588 bp, Homo sapiens
ctctcttaccttctaaagccttctctacataccaattaccctatgaataatttccttctccttctaaattatgcttctttctgagcctgtttcttcatcagtgaaattgggatagtcataccaaacacacagaattgtgctaaggactacattctgtatacaaaacttctggcttagagcttgtcatatagtgggctctcaatacatcttcaaactcctttttttaaccctcatagtcctgtgtggtttctttgttgcacccttgtattttatactttctgaagttacatgtgtgcttgacttaatccccctgtttatccagtaaatatttcagggataataaaattttaaggactaagaccatactgtattcttctttgtatagtatcatcaggccctaatactctgtcattatctgcgtgcttaataaatacttgaattmttaacttgaattgagtaactccccagcacaggatgtcttctcagcttccagtcccgagccattgagacttgctggtgaatctgttacacaggggacgagtctgagcccagaaaataagcagtcccccacactgccctgttagcttt

SEQ ID NO: 393575 - DNA, 582 bp, Homo sapiens
aaggaattcaggagtttagtttgggacaaggtaagtttgcaatgcccctcgaatatccaagtggatgtttcaagtaggctgctgggtaagagtctggaattcaggaacaagttctgtgctagagatacaaattttaaaatgattaggatagagatggctttaagagrtctcagaatggatgatattactcagggagtgactatagatagagaagagaataaatgccctaaataccaaatacagtcccagacactctcagaataagagattaagatgatgaggagaaatgggaaggagtgatgagtgaggtagcaagggagccaagccaacatgttccagaagccaagtgaaaagtgtttcaggaagcaggtggtgtaccatgtccaatgcaactgagaagtaaaatgtgataaaacttgagtcaactctcaattcccattgaattactggagtctttctgactgtggttgttttagatcctgagcagatatacatggcagcctaggccagatataaagagccaacagaacctcgcctcaaggcctcttaaattagcatgaggtagggaactagataatagcc

SEQ ID NO: 393576 - DNA, 582 bp, Homo sapiens
aaggaattcaggagtttagtttgggacaaggtaagtttgcaatgcccctcgaatatccaagtggatgtttcaagtaggctgctgggtaagagtctggaattcaggaacaagttctgtgctagagatacaaattttaaaatgattaggatagagatggctttaagaggtctcagaatggatgatattactcagggagtgactatagatagagaagagaataaatgccctaaataccaaatacagtcccagacactctcagaataagagattaagatgatgaggagaaatgggaaggagtgatgagtgaggtagcaagggagccaagccaacatgttccagaagccaagtgaaaagtgtttcaggaagcaggtggtgtaccatgtccaatgcaactgagaagtaaaatgtgataaaacttgagtcaactctcaattcccattgaattactggagtctttctgactgtggttgttttagatcctgagcagatatacatggcagcctaggccagatataaagagccaacagaacctygcctcaaggcctcttaaattagcatgaggtagggaactagataatagcc

SEQ ID NO: 393577 - DNA, 514 bp, Homo sapiens
tttaccactttgtttgctatataaaatgttcttggaaaaatcttatttcatggagaatatagtgaaatgacactaaactccatgtttgatgaatatcaaaatacctttcttggactgttttcattattctttatgctcttccatttcctatgacaaccttgacctgttcaggtgaacctttgacgtgtcagagaagagaaagaacaactgactcattctcagcaaggcaaatatggcttgaaattgaatttcctaaccaatgtgacaggttgtactgagtcatccatakgctcatctggtgtcctctattcttcaccgagactttccacataccattggtaaaagtctcactgggatcaagcatgtgatgtctagctgtgattgtgtgtgtgtgtgtgtgtgtgcatgcgcagggatgtgcaaaaccattggccttcactaggaacaagactaggggtcctaattcattaacagaacagtctacctatgagagagagagttgcctgatacaatt

SEQ ID NO: 393578 - DNA, 514 bp, Homo sapiens
tttaccactttgtttgctatataaaatgttcttggaaaaatcttatttcatggagaatatagtgaaatgacactaaactccatgtttgatgaatatcaaaatacctttcttggactgttttcattattctttatgctcttccatttcctatgacaaccttgacctgttcaggtgaacctttgacgtgtcagagaagagaaagaacaactgactcattctcagcaaggcaaatatggcttgaaattgaatttcctaaccaatgtgacaggttgtactgagtcatccataggctcatctggtgtcctctattcttcaccgagactttccacataccattggtaaaagtctcactgggatcaagcatgtgatgtctagctgtgattgtgtgtgtgtgtgtgtgtgtgcatgcgcagggatgtgcaaaaccattggccttcactaggaacaagactaggggtcctamttcattaacagaacagtctacctatgagagagagagttgcctgatacaatt

SEQ ID NO: 393579 - DNA, 595 bp, Homo sapiens
ggttttagttcctccttaacttttggctttccatattgcctttactgggaattctattccagattccactggactttccctttgcctgaatcattgtttaacttactccagggagagtgacagggtagaagaattagacaggcaaagctttgttaagtgttattcctctttgccatcacaaatatgcaatagaaacacagtgactcttaaccaattttgaataacaagcaattaacagtgaactttgcatggggaaaagctgtgctctcagcatttacagaattctaaccctgactttgaatatttgtgtttgtgcacaagcatgacagttacctttagtgtcttaaaaatcctctgtaaaatttattgtgagaataaagcgatttcttgraaaagcagttatctagattttcatttgtggataattataatgaaattttaaaggcttctataggctgatttttttttccattttatttgggggaataccagaaagtcttgatgaaacttttagtgcttttgtgtgtgtataatgccataaaatatttatatattgaattatgtcatataaactagacacattttagcagaaatt

SEQ ID NO: 393580 - DNA, 598 bp, Homo sapiens
cattatatagtttatgcttaagattttgattaaaakatatcatgaaaatcccatgagagctcagtccaaggtagaggatttgaactgaacatattgaaaaaagattgggtgcccaaataccaattttaagtatcttttcttactgaattgtatattaaacaatccacgtgaatgtaaaaaccagccacttcctgaataatggccacatctgttttcaagtcaaacttaaatccccgatctctaaatttggtgaatgattcaattttagagctagaggggaattttgtccaattccctcaaattacagatgaggaaattgaggcacagggaaattcctttttaataacccataataatccttccaatcttatcctgagtcactccatggggaggtcttttctgcttcctgtcaccaccaaaaaatgagtctcccctaacatacactcacaaattcctccacatttttgcttcatagtacttaatataacttctgattatgcaagcgaaagtcgtgatttttggcttaacatctgttgccacaaataaatgctccattagcttcataatctgggttctcgctgcctagaacattcaaacg

SEQ ID NO: 393581 - DNA, 598 bp, Homo sapiens
cattatatagtttatgcttaagattttgattaaaatatatcatgaaaatcccatgagagctcagtccaaggtagaggatttgaactgaacatattgaaaaaagattgggtgcccaaataccaattttaagtatcttttcttactgaattgtatattaaacaatccacgtgaatgtaaaaaccagccacttcctgaataatggccacatctgttttcaagtcaaacttaaatcccckatctctaaatttggtgaatgattcaattttagagctagaggggaattttgtccaattccctcaaattacagatgaggaaattgaggcacagggaaattcctttttaataacccataataatccttccaatcttatcctgagtcactccatggggaggtcttttctgcttcctgtcaccaccaaaaaatgagtctcccctaacatacactcacaaattcctccacatttttgcttcatagtacttaatataacttctgattatgcaagcgaaagtcgtgatttttggcttaacatctgttgccacaaataaatgctccattagcttcataatctgggttctcgctgcctagaacattcaaacg

SEQ ID NO: 393582 - DNA, 598 bp, Homo sapiens
cattatatagtttatgcttaagattttgattaaaatatatcatgaaaatcccatgagagctcagtccaaggtagaggatttgaactgaacatattgaaaaaagattgggtgcccaaataccaattttaagtatcttttcttactgaattgtatattaaacaatccacgtgaatgtaaaaaccagccacttcctgaataatggccacatctgttttcaagtcaaacttaaatccccgatctctaaatttggtgaatgattcaattttagagctagaggggaattttgtccaattccctcaaattacagatgaggaaattgaggcacagggaaattcctttttaataacccataataatccttccaatcttatcctgagtcactccatggggaggtcttttctgcttcctgtcaccaccaaaaaatgagyctcccctaacatacactcacaaattcctccacatttttgcttcatagtacttaatataacttctgattatgcaagcgaaagtcgtgatttttggcttaacatctgttgccacaaataaatgctccattagcttcataatctgggttctcgctgcctagaacattcaaacg

SEQ ID NO: 393583 - DNA, 523 bp, Homo sapiens
tctatcatcaacatgcagctgagaggaatcccaaacctcattaccagggtttatttgtagataataacggaaggtatgccatgtacttacaacgcatttgtttggtttttttggcaactcagtttaatggtctttatcaagtgttgcccttttaactccccraaactctgtatgctcatgcttagtctgtgtttaaatacactaagtaaagtacaatatttaagcagctatgttaagatgttgtagcaagatagaatgattatttgaaataaccacatattagatgtgcagggcagtgggggaaaggaagtactctggtgagtgctttaaccctgcacttcatggtgaatatttaaatgtacttttcctccctagaggtgagctgttgttccaaagccagaatcataaactgcctgccagatttctctcacagttaaattgcatttgggccatatagtggtttttaaaaattgaaatgctttctatcacttagaaaaaagaaaatttcacatgcagttctagg

SEQ ID NO: 393584 - DNA, 538 bp, Homo sapiens
ttcgacctctggagaagcttgatttattaaaatcacaggaaaacagaatgatgtgactcctggtgttagcatagacattgcagtaggatcatggaaggataagaaagtgggtttgttttaatacatattgccttatccctctgcaggcaagcctgtaggttgcccatgcataacaaagaaatgtttattgtatattagaacatcattcttcctgccacctcccacactgtaaatttctcatgaaggatgaacaccttttgaattaagagataggcaagagtgagagaaaggtagaaatggcactgacttctttgaacatggaaaacagcaagaaagataaaaataaggataggtgactaaatgttggccttatgttatagacagtctagattagaatgaatatatttgttatgatctttaagataaatccatccttyattttaataacaatcaaggaatattaattaacaaggtataatgttgaatatcttatttctgccctgagtaagaaaaatatttatacagcaattatagtatt

SEQ ID NO: 393585 - DNA, 621 bp, Homo sapiens
caacatctcacatacctgttggtcatctttaagtcttctttgaaaaaaggatggattgtttatttatttatttttgctattgtgttgtgtgagttccttatatattttggatattaaccacttatttaggtataggatttgtaaatattttctacacatctacaggctgtattttcatttgctgtacagaacctttttagcttgatgaagttccactttatttttgcttttgttggtgtgatatcaaaaatatcattgctgaggtcaatgtgaaggagattttcccctgtgttttctcataggagttttatagttgaaggtcttaacatttatgtcttcaattcattttaagtcaattttgtgtatggtgtaagaaaaagatccaattttgctcttttgcctgtggatatccagttctcccaacaccatttattgaagaatcctatcctcattgttattcttggtgttttggcctaagattagttaattgtacctactcgggtttatttctgggctctctattctgtcacaatggtctacatatctgtttttatatcagtattatattgttttgattactatagytttataacaaaattttaaattaggaagtgtggtgcc

SEQ ID NO: 393586 - DNA, 598 bp, Homo sapiens
agatccaaggaccccaggactctgcatgtgcctgagcagcagctttgcccagactccacatagctccctgtgtcagtctggaggccccagtttggggactcatgggggatctcctgagcccagggttgcaaatatccatggcagaagtgtgagtacccaagggctctcactcactcaccattttcccatagtggggggcctcccctggctctgtgccactcccagatgggcagttgtcctatctcactcttctccgttctccatgggtcatgttgcttccttgatgaatcctattgtgtccacctggatattccagttgaagagctaatgtttactcaacacttttcttctctctcagtgacagcggcatacactagctgcttctatttagccatctggctggcacaaacaacattttccttatacaatctaccattgacggwcatctaggttgattccatgatactggaatcatgaatagtgttgtgattaacatacgagtgcatgtgtctttttgatggagtgatttttttttcttttgggtatatacccagtaatgggatttctagatcaaatgctagttctaagttatttgagg

SEQ ID NO: 393587 - DNA, 491 bp, Homo sapiens
atggttaaggtttggttgtgttcccacccaaatttcatcttcaattgcagctcccatatttcccacgttttgtgggagggacccagtgggagataattgaattgtgggggtgrtttctcttacactgttctcatggtagtgaacaagtctcacaagagctgatgattttataagggatttccccttttgcttggctctttcattccttctttccctgctgccatgtaagatgtgcctttcaccttcctccatgattgtgaggtctctccagccacgtgcaactgtaagtccattaaacttctttttttatatatatataaattacccagtcttaggtatgtctttatcagcagtgtgagagcagactaatacatcccactgctccatcatattttcattcccactcttccacaaatgctatttgtgtcaatatcattactgacctccacgttgctaaatgcatggaccaattctcagtcttattctgactt

SEQ ID NO: 393588 - DNA, 491 bp, Homo sapiens
atggttaaggtttggttgtgttcccacccaaatttcatcttcaattgcagctcccatatttcccacgttttgtgggagggacccagtgggagataattgaattgtgggggtgatttctcttacactgttctcatggtagtgaacaagtctcacaagagctgatgattttataagggatttccccttttgcttggctctttcattccttctttscctgctgccatgtaagatgtgcctttcaccttcctccatgattgtgaggtctctccagccacgtgcaactgtaagtccattaaacttctttttttatatatatataaattacccagtcttaggtatgtctttatcagcagtgtgagagcagactaatacatcccactgctccatcatattttcattcccactcttccacaaatgctatttgtgtcaatatcattactgacctccacgttgctaaatgcatggaccaattctcagtcttattctgactt

SEQ ID NO: 393589 - DNA, 491 bp, Homo sapiens
atggttaaggtttggttgtgttcccacccaaatttcatcttcaattgcagctcccatatttcccacgttttgtgggagggacccagtgggagataattgaattgtgggggtgatttctcttacactgttctcatggtagtgaacaagtctcacaagagctgatgattttataagggatttccccttttgcttggctctttcattccttctttccctgctgccatgtaagatgtgcctttcaccttcctccatgattgtgaggtctctccagccacgtgcaactgtragtccattaaacttctttttttatatatatataaattacccagtcttaggtatgtctttatcagcagtgtgagagcagactaatacatcccactgctccatcatattttcattcccactcttccacaaatgctatttgtgtcaatatcattactgacctccacgttgctaaatgcatggaccaattctcagtcttattctgactt

SEQ ID NO: 393590 - DNA, 617 bp, Homo sapiens
gactactggcacgtgccaccatgccttgctaattgttttaatcttttgtagaggtggggtctctctgtgttgctcaggctagtcttgaactcctgggctcaaccgatcctcttgcctcagtgtcccaaagtgctgggattacaaatgtgagtcaccatgctcagtctccactctctttagagaagtcttcactgacacacccatctaaggttgctcccactttatcaccatctttctccagccattacacaatttttattgcttccctattatcactatgtaaaacatatatttyacatatttatcttttttttttctccttcagtcttgtaaatgtgtgtaacttctatgctatgaagtaccaagagcttggtacagggctcattcatattatgactgccaacaaatatgtgttatattatcaaataagtactctttaaagccattcttttttaagaatgctataatgaatatactaatgtatattagtggtttccttaagcctcatggtattgtggtcggaaggaaatgagatgacatgttgaaagcactttgtcaactacaaaacattatctgaatataaaaaggtgctcgcattaataaacattcaaggtttc

SEQ ID NO: 393591 - DNA, 600 bp, Homo sapiens
tcttcactgacacacccatctaaggttgctcccactttatcaccatctttctccagccattacacaatttttattgcttccctattatcactatgtaaaacatatattttacatatttatcttttttttttctccttcagtcttgtaaatgtgtgtaacttctatgctatgaagtaccaagagcttggtacagggctcattcatattatgactgccaacaaatatgtgttatattatcaaataagtactctttaaagccattcttttttaagaatgctataatgaatatactaatgtatattagtggtttccttaagcctcatggtattgtggtcrgaaggaaatgagatgacatgttgaaagcactttgtcaactacaaaacattatctgaatataaaaaggtgctcgcattaataaacattcaaggtttcctaaaacaaatgtcttccctgaaggaggaggatccctatatttggtatttttctggccaaggcaagctcataaactgacaaggacacatgtgcgcactcaagattaagggcaaaacttacatcctatgtttatgttacattgttctgtaatgcttgttttggctttat

SEQ ID NO: 393592 - DNA, 600 bp, Homo sapiens
tcttcactgacacacccatctaaggttgctcccactttatcaccatctttctccagccattacacaatttttattgcttccctattatcactatgtaaaacatatattttacatatttatcttttttttttctccttcagtcttgtaaatgtgtgtaacttctatgctatgaagtaccaagagcttggtacagggctcattcatattatgactgccaacaaatatgtgttatattatcaaataagtactctttaaagccattcttttttaagaatgctataatgaatatactaatgtatattagtggtttccttaagcctcatggtattgtggtcggaaggaaatgagatgacatgttgaaagcactttgtcaactacaaaacattatctgaatataaaaaggtgctcgcattaataaacattcaaggtttcctaaaacaaatgtcttcsctgaaggaggaggatccctatatttggtatttttctggccaaggcaagctcataaactgacaaggacacatgtgcgcactcaagattaagggcaaaacttacatcctatgtttatgttacattgttctgtaatgcttgttttggctttat

SEQ ID NO: 393593 - DNA, 371 bp, Homo sapiens
ttggcctcccaaagtgctgggattacaggtgtgagccacygcgcccagccaaattgtaccttttaaagataaaattgatctagaaatttgtttcaaaataatagaagtatacttaaaagcactcaacatatagtttaagtatacagctttaaaatgtttaagatggtaattttatctttttaatcacaaatatttacatctctcaaaaaagttacatttttaaaaattgctttaaataacaagtgtttttctcacacaataacatatattcagacaataaatagacggtaattttaggctgactttttgactactcatctatacaataaaacactgacaaccacccgagaaaagaaatagataattaataa

SEQ ID NO: 393594 - DNA, 502 bp, Homo sapiens
gttggtgaaaagactggttagtgctacagatactggtccaggcagggtagctctgatttacaggcgcccgccaccacatccagctaattttttgtattcttaatagagacagggtttcatcatgttggccagcctagtcttgaactcttgacctcaagtgatccaccctccttcgcccctcaaaatgctgggattacaggcgtgaaccactgtgcccggccacaacattactttagaataaagttgcttcttacctacatctaaatttattttatttgacaatatctaaaaacagccccaaaacaataattacatcctgacagaggacatcataaccctcytcccatctcaactctcattgcacctgcccgtgcacccccacagttaagatggtgacatatactttgacccagcttataggcattatgataactcttacacataggcccagcaaaagagagagattttgactctcatagataggactagggccatgagtaag

SEQ ID NO: 393595 - DNA, 541 bp, Homo sapiens
aagggaaaaatcagtcagatactaagcgatgatatatgtcacaatcacacctgtgaaaaagttcagagataaaatttacaatctctcacacacccccgcttcagggtcagagtcaatacctcctgtgagtttcacccaaaaggcaagtaacaacctcaacagtggactggatccatgcatgagagccccaactccacccgcagagagtgtcccagtcaaaaagtcaaaatatcacagtggtgctgattcttggtgcaaaaatmaccatgttacctgtgtttagaatccatatataaaagtaaaaatgccaacttttgactgcctctaggtgtgagattcagaacctttacagtgcactgtgttcatttggaaagtaaccatactgttggctggttgtgcatatgagagtaacaatttcaccggttttgggcccttttataatgctctctgtagtacctgatggcattataaggtatgcaccagagtcacaataatctgtgagatttgcatgcttgtgtggacacacaatcttacctattac

SEQ ID NO: 393596 - DNA, 544 bp, Homo sapiens
aacagcaaattgaacccatgcatgagagccaaacctcagacagcacctattaggagagttaaagcctaatattggtgctgaatcttggtcagagactcaggctggatccacatattagagtaacaataccaacttctgactgcttttgggtgtgagaatcagaacctcaacagtgggctgtgtctatgtgggagtgtgacaatctttactgttggcagtgtatgcatatgagagtcaaaatctcaacagtgtactgggccttgttatattattactctttgcaccatctgcggcggtakataatatgtgtaagacttgcaatgcactccaaaacatttgtgcctatatgaacccatgatcttactcatttctccaagtctagggatgagattcaccatctcttctattgactggtttagatataagagtcattaccatgcctgtgagctaggtccagcaataagtcaccattttacctgtggccagatccacatatgacagtcaaaattccaactgtaaactgtgtctactagtgacattcagg

SEQ ID NO: 393597 - DNA, 486 bp, Homo sapiens
attcaaagggaatcgagtgttgtaatctaagtctttgatcattgcagtcatatctgcattaggggacaccccaacctgaataacactgtgatgcttgcagacttgtagaggtaccaccttggtggtcttaggtaagaaccaagagagtctctgggttaccaggcagactctttttctgtttttttacattctgtcaaataagtggaattttctctccatactgagctgccgggggctagggtcagtgaaacacaagcacccctgtggccaccatcactaggactacactaagtcagacccaaagccagcacaggactggstctcacataaggtccacagtgaccactacctaggtactgctgatgttcactcaagatccaagttctcttcagtcagtaggtggtgaatccagccaggcttatgtccttgccttcagggcagtgagctctgttactcatcctgggctggggatagcaaaatgccatt

SEQ ID NO: 393598 - DNA, 555 bp, Homo sapiens
cccttttttgtgttaatgttaataatagcacagtagtgtcatatccttctttgttaatcagcacctgatacaaatttcttttaatgtagttgatcttcatttatttacttggtaaatatgctytttgacatatttttttcactctagagttacttattttactctttatttttaataggtaccttggggagttttatcaagtgatgtgcaaaaacaagattaaaccacatttaatctgagagctcttcttcttaccttctctttgcatatcgcttcctatggaaagtgaaggctctcgtctttctttactggtcaaataaactaaaaacctaggctgtgccacttactgaatttttgacaaaatattctccttgggccagaagcagtgataccactggcaaactatcaattcaaaaactcaagctttaccctagatcttcagagtcaaaatctacattttaacaagatctcctgttaattgatttgagaataagatgtgagaagtatgcttttaactcaccatgaagtttccatatgggaagtatagacaactca

SEQ ID NO: 393599 - DNA, 555 bp, Homo sapiens
cccttttttgtgttaatgttaataatagcacagtagtgtcatatccttctttgttaatcagcacctgatacaaatttcttttaatgtagttgatcttcatttatttacttggtaaatatgctctttgacatatttttttcactctagagttamttattttactctttatttttaataggtaccttggggagttttatcaagtgatgtgcaaaaacaagattaaaccacatttaatctgagagctcttcttcttaccttctctttgcatatcgcttcctatggaaagtgaaggctctcgtctttctttactggtcaaataaactaaaaacctaggctgtgccacttactgaatttttgacaaaatattctccttgggccagaagcagtgataccactggcaaactatcaattcaaaaactcaagctttaccctagatcttcagagtcaaaatctacattttaacaagatctcctgttaattgatttgagaataagatgtgagaagtatgcttttaactcaccatgaagtttccatatgggaagtatagacaactca

SEQ ID NO: 393600 - DNA, 573 bp, Homo sapiens
acttcaatatacaactcatattctacattaaatattttattctggttttttttttggaagttctgctttgcataagtgagttccagaatcctgcttcaaaaagaaaaaattgggtatctgttcaggtagaaaatataatctttaagatgtttcatcttaacattaatctttcccttttttgagctcatctgtrtagagtctaaattagtggtaatatcagaaatttaatgcataaaatattgttacccacacctaaaaatgcaattttcacaactgacttttgattcagtatcactgggtaatagagctaagaacccacaaatttaaaatactttctaaatattctaaagtttatgttagtaaacagtagattggaattaattttctagagtcttctataatgttctttcttctctactgagcatagtactagattagtaatcggattatcctagcaagagtcatgttatttttttctaataaaacaggtcttgctatctttaagccagacttgatgacctgtctggagcaaagaaaagagccctggaatgtgaagagacaggaggcagtagc

SEQ ID NO: 393601 - DNA, 573 bp, Homo sapiens
acttcaatatacaactcatattctacattaaatattttattctggttttttttttggaagttctgctttgcataagtgagttccagaatcctgcttcaaaaagaaaaaattgggtatctgttcaggtagaaaatataatctttaagatgtttcatcttaacattaatctttcccttttttgagctcatctgtgtagagtctaaattmgtggtaatatcagaaatttaatgcataaaatattgttacccacacctaaaaatgcaattttcacaactgacttttgattcagtatcactgggtaatagagctaagaacccacaaatttaaaatactttctaaatattctaaagtttatgttagtaaacagtagattggaattaattttctagagtcttctataatgttctttcttctctactgagcatagtactagattagtaatcggattatcctagcaagagtcatgttatttttttctaataaaacaggtcttgctatctttaagccagacttgatgacctgtctggagcaaagaaaagagccctggaatgtgaagagacaggaggcagtagc

SEQ ID NO: 393602 - DNA, 573 bp, Homo sapiens
acttcaatatacaactcatattctacattaaatattttattctggttttttttttggaagttctgctttgcataagtgagttccagaatcctgcttcaaaaagaaaaaattgggtatctgttcaggtagaaaatataatctttaagatgtttcatcttaacattaatctttcccttttttgagctcatctgtgtagagtctaaattagtggtaatatcagaaatttaatgcataaaatattgttacccacacctaaaaatgcaattttcacaactgacttttgattcagtatcactgggtaatagagctaagaacccacaaatttaaaatactttctaaatattctaaagtttatgttagtaaacagtagattggaattaattttctagagtcttctataatgttctttcttctctactgagcatagtactagattagtaatcggattatcctagcaagagtcatgytatttttttctaataaaacaggtcttgctatctttaagccagacttgatgacctgtctggagcaaagaaaagagccctggaatgtgaagagacaggaggcagtagc

SEQ ID NO: 393603 - DNA, 566 bp, Homo sapiens
tcactctctgggtacttaggttggtagaactggccacaaactgtgactatcagtgctgaaactgagtckctgaactgtttcagagagcacagtaaaggccaaggtctgcagacctaccactgtaaccacaaataggcatcttactctgggtccctggatgtgcagaaccactcctagactatggctgggaggagctggagatggttatggagtcactgcaaaattttaagtggggtcaaaataggtgaaccatttcttggtctgtagccaagaccaagggttttcaagtttgccacctgaatgagggcctgccttttcaaaatgactccaatcaatctttagccctagcaggttttaaaaccctctccctgaaaaacaaaattattataatggtctcttctttgagaaggggtctcaccatatcacctaggctggtctcaaactcctggcctaaaatgatgctgcttctgcctcaacctacaaagttgctaggattacaggtgtgaaccacgatgtctgtcaacataatggactccatgtagtatttcttataagactgttctagg

SEQ ID NO: 393604 - DNA, 566 bp, Homo sapiens
tcactctctgggtacttaggttggtagaactggccacaaactgtgactatcagtgctgaaactgagtctctgaactgtttcagagagcacagtaaaggccaaggtctgcagacctaccactgtaaccacaaataggcatcttactctgggtccctggatgtgcagaaccactcctagactatggctgggaggagctggagatggttatggagtcactgcaaaattttaagtggggtcaaaataggtgaaccatttcttggtctgtagccaagaccaagggttttcaagtttgccacctgaatgagggcctgccttttcaaaatgactccaatcaatctttagccctagcaggttttaaaaccctctccctgaaaaacaaaattattataatggtctcttctttgagaaggggtctcaccatatcacctaggctggtctcaaactcctggcctaaaawgatgctgcttctgcctcaacctacaaagttgctaggattacaggtgtgaaccacgatgtctgtcaacataatggactccatgtagtatttcttataagactgttctagg

SEQ ID NO: 393605 - DNA, 566 bp, Homo sapiens
tcactctctgggtacttaggttggtagaactggccacaaactgtgactatcagtgctgaaactgagtctctgaactgtttcagagagcacagtaaaggccaaggtctgcagacctaccactgtaaccacaaataggcatcttactctgggtccctggatgtgcagaaccactcctagactatggctgggaggagctggagatggttatggagtcactgcaaaattttaagtggggtcaaaataggtgaaccatttcttggtctgtagccaagaccaagggttttcaagtttgccacctgaatgagggcctgccttttcaaaatgactccaatcaatctttagccctagcaggttttaaaaccctctccctgaaaaacaaaattattataatggtctcttctttgagaaggggtctcaccatatcacctaggctggtctcaaactcctggcctaaaatgatgctgcttctgcctcaacctacaaagttgctaggattacaggtgtgaaccacsatgtctgtcaacataatggactccatgtagtatttcttataagactgttctagg

SEQ ID NO: 393606 - DNA, 581 bp, Homo sapiens
gaggactagggagacattcagatttggtcaagagatttgagagaggctagggacagatgtcatgtgtcttctgctttataatttccagtcaattctttatacagaaaatgaaagtgagaacttttatcagagcacaaagcttctgattacaagaaaatctaaacatctatttcacttcgaaagtatctttttttaagcagraactaagcttagaaatttaaatgctgtatggcaaatacctctactgtggaatagttgattttatctacccagctcacagaattcctaaaaacagtaataccataggttacttagaacactgtccagcatataatttccaaatcattatctatttcttaataactattatttttaaattttatcttctttactatgaattttactagggctctgtcctatgtatatttttttctttctggtttgctgtataccaactatgcctgtaatttcacaagttctgagctaatgtgctcaaatgtatgttatataaaaagtgaattagataataggcacaccacatgtattaaaatcttttttatatgtttatgtttactacatac

SEQ ID NO: 393607 - DNA, 581 bp, Homo sapiens
gaggactagggagacattcagatttggtcaagagatttgagagaggctagggacagatgtcatgtgtcttctgctttataatttccagtcaattctttatacagaaaatgaaagtgagaacttttatcagagcacaaagcttctgattacaagaaaatctaaacatctatttcacttcgaaagtatctttttttaagcaggaactaagcttagaaatttaaatgctgtatggcaaatacctctactgtggaatagttgattttatctacccagctcacagaattcctaaaaacagtaataccataggttacttagaacactgtccagcatataatttccaaatcrttatctatttcttaataactattatttttaaattttatcttctttactatgaattttactagggctctgtcctatgtatatttttttctttctggtttgctgtataccaactatgcctgtaatttcacaagttctgagctaatgtgctcaaatgtatgttatataaaaagtgaattagataataggcacaccacatgtattaaaatcttttttatatgtttatgtttactacatac

SEQ ID NO: 393608 - DNA, 470 bp, Homo sapiens
gaaagtttaaattgattttacctcttggctttcrtgaataatgcttcagtatggtgtgcaaataacttacttgaccatatgttccagagtttatatctgtgctgcattttgtttcattactttggtgttctacctttataccaataccaaagtgctttgattactgtaggtttgttttgtgtttgaaaattattaaattgaaaaggggtgtgttgaatgtgtgggtcactttaagctgcatggacatcttcacattatgtcttccagcccttgaaaaagagcatgctcaaaagtgtgttgttggctgggtgtggtggctcacgcctgtaatcccagcactttgggaggccggtgggaagagtacaagattgagaccatcgtggccaacatggtgaaaccctgttgctaaaatacaaaaaatcagctgggcatgggggtgcatgtctgtagtcccagctacttgggaggct

SEQ ID NO: 393609 - DNA, 574 bp, Homo sapiens
ggcctcataccttatatatgcagtccttgtgcagggttcctgatctgtggtaagtaaagaatgacactttctgacaggcccaggagctccaaggttaycttgggatcataagaggagaggatcacactacaaatatttgatggcacaaacccctggctgggcttgactttagaaagtcctatttgaaatttcttgtggaacagagttccatcaaagccaatgtaaaagacctatgtagaaatattcttgctgcactttatggaaataatcaggccaagtataagactaaagtttattttacaaacaacccagtactatcatgatttatttttaacaaaaaagagaacttgacagaaaagattatgtttcaaaattatacatttgtcattaaattcttaacttactagttttgaatttttgcctacattttagaccaaccctgcttattcctgtgaaccaactagttatcttcaactgcagctcagaagaaacaaaaaaggacaggtaatgtaaaaatctggattaatattccaattctgggcaattatcctgcaaatcctgtagaatggtggga

SEQ ID NO: 393610 - DNA, 586 bp, Homo sapiens
ttattcttttcttccaggttgtttggctgcttgtggttttttgagtttatatagaaattatagggcaatatttgatggctcactcctgtgatcccagaactttgtgaaaccaaggcaagtgaattgcttgagcccagcagtttgagaccagcctgggcaatatggtgaaaccctgtctctacaaaaattacaaaaacttgctgagcaaggtaacatgcaactgcagtacaaaccacttgtgaggctcaagtgggaggataaaatgagcttgagaggtcaaggttacagtgagccatgattacaacactgcactccagcctaggtgacacagctagatattgactcaracattttagaatattttagtacttctgcaaaacgtaccattggatttttgttaaagatatctcattcatctgtagatcatttcaaataccattaacatctaaagaaacatgcatgttctacatcttgaaaaagagtatgttcaagaatttgtctagttttcatacatatgcagacatgctagttttcttttggtttttaacttcaagttatgttttattgcagtcagaaataatatttg

SEQ ID NO: 393611 - DNA, 538 bp, Homo sapiens
tcttacttaatttatataaggagaaaacttctagggcaaatggacaaatgactaatttgaattataaaatcagagaatcatggcgcctcaatcaatttccagactttagccagtttacagacccagaacctcttgaatgaaagggaggccgggttgtcttgagrggggactccactacattaccgacaatttaagcagtgaatctttctcccatccttctccaaggagacctccggccctttaccagggtaactgtgcatttgggaaaggaaaatgtccagacattttggggactactggacactggctctgagctgatgttaattccaggggatccaaaacgtcattgtggccttcagttaaaataggggcttctggcctcccagaatactagggtgaatttatatttttttgtaggattcgatggtgcaagtcttgtagggcagaaacatcttcctgacgctactccccaccttctgtcctggcatccttccccctgtggaaggaggaacttttctcttatgttctttccagtccc

SEQ ID NO: 393612 - DNA, 538 bp, Homo sapiens
tcttacttaatttatataaggagaaaacttctagggcaaatggacaaatgactaatttgaattataaaatcagagaatcatggcgcctcaatcaatttccagactttagccagtttacagacccagaacctcttgaatgaaagggaggccgggttgtcttgaggggggactccactacattaccgacaatttaagcagtgaatctttctcccatccttctccaaggagacctccggccctttaccagggtaactgtgcatttgggaaaggaaaatgtccagacattttggggactactggacactggctctgagctgatgttaattccaggggatccaaaacgtcattgtggccttcagttaaaataggggcttctggcytcccagaatactagggtgaatttatatttttttgtaggattcgatggtgcaagtcttgtagggcagaaacatcttcctgacgctactccccaccttctgtcctggcatccttccccctgtggaaggaggaacttttctcttatgttctttccagtccc

SEQ ID NO: 393613 - DNA, 633 bp, Homo sapiens
aactggagaggaagggatggatggtaggtgatatggtttccctgtgtctccacccaaatctcatcttgaattgtaataatccccaggtgtcaagagtggggccatgtggagataattgaatcatgggggtggtttcccccatactgttctcatggtactgaataagtgtcatgagatctgatagttttacaaatgggagttcccccacacacgctctctcttgtctgccaccatgtaagacgtccccttgctcgtcctttgtcttctgccatgattgtgaagccaccccagccatgtagaactgagttcattaaacctctttcctttgtaaattacccagtcttgggtatgtctttattagcagcatgaaaacagactaatacagcaggaggtatctgcttgtcagaagggttgaaggagatakgggctaaattcagtgagtggatggctgctattggctcactttcctttgcgtgtgtcagtataagagctctgcactgggatcaggaagcccagtgtctcctccggtgctgccactgttcgccttttagaaccattcacctgccagggtcaggctctgcttggtaaaataagacagagcagctaactcccacccctgacatcctggtaact

SEQ ID NO: 393614 - DNA, 633 bp, Homo sapiens
aactggagaggaagggatggatggtaggtgatatggtttccctgtgtctccacccaaatctcatcttgaattgtaataatccccaggtgtcaagagtggggccatgtggagataattgaatcatgggggtggtttcccccatactgttctcatggtactgaataagtgtcatgagatctgatagttttacaaatgggagttcccccacacacgctctctcttgtctgccaccatgtaagacgtccccttgctcgtcctttgtcttctgccatgattgtgaagccaccccagccatgtagaactgagttcattaaacctctttcctttgtaaattacccagtcttgggtatgtctttattagcagcatgaaaacagactaatacagcaggaggtatctgcttgtcagaagggttgaaggagataggggctaaattcagtgagtggatggctgctattggctcactttcctttgcgtgtgtcagtataagagctctgcactgggatcaggaagcccagtgtctcctcckgtgctgccactgttcgccttttagaaccattcacctgccagggtcaggctctgcttggtaaaataagacagagcagctaactcccacccctgacatcctggtaact

SEQ ID NO: 393615 - DNA, 303 bp, Homo sapiens
ttggttaagcaagtaactaaggtcaaccagatttataggaaggaaaattaaactccacttcttgttgagaaaatgataaagtcacattacaggagaacatatgggaaaggaaatactgttgctgctatttttgaaaaatacaatctgccatatagatatttgaaaacataaccatttttcccactaactctttgagaatggaaacattggcttattttatttttatcctccctctttgttctatatcccaatctgcaygcctactccatgtcaagactaatatcataaatgttttatttaaaa

SEQ ID NO: 393616 - DNA, 590 bp, Homo sapiens
ggtctttctctgtcacctaggctggagtgctgtagtgcaatcacagctcactgcaacctcaaactcctggacaccagcaatcttcccacctcagccttctgagtatctgggactacaggcatgcactaccgggcttggctaatttttatttttattttcttggagatattttatttcttgctatgttgtccagactggtctcaaactcctggcctcaagtgatcctctcgtctcagcctcccaaaaatgctggaattacaggctcaagctatggcatccagcccgagctttttttgtctcagtttatggattggctgtgtattatcagkgttgtccagtgaaacaaaatcaacaggagagatacagagatgatagacagatggagagatagtgagatggtcaggagatagacagacacatatctatatagatagcaaaactaaaataaaatgttgagtgctgtagaggagatatgggggtgctcagagcagacagtgaacaactgctctgaggactgacaacacccacaatgagaaatggcacatggcctctcagcccatcacttgacagagccgtctatgtgccctact

SEQ ID NO: 393617 - DNA, 594 bp, Homo sapiens
gacttcgggagactccaccacctatctctggagttctgtgtacaactcctgcctctctggtactctgcgccacaaatgatggtgaccttccctccccgccaacccccaccttgtcctctcaattctaagataccaggctctatttggcttccccatccccgctctgtagcctgaaaagcagctccagataataaattggggaaacagagctcagtaagtttgtttcccacctttcagtgaccacagtcttgcattgcctgttacctaattcctacaaattggtatttcgtatattgtccagttttctagttgcttaaaatagcaaggtaaatccagtccttgttattccatcactgctggacagaatatatactgtaaatcaagtaacagtttctcaattttgtatcttattgttatcrctgttttgagacagggtctcactctcacccaggctggagtgcagtggctcataactcactgcagcctcaaactcctgggctcaaggcatcctcccacataggcctcccaaagcgctgagattacaggcatttgccagccactacgccctcaatttagtatctaaaggcttagtct

SEQ ID NO: 393618 - DNA, 610 bp, Homo sapiens
tttgtagtgactggtaatcgtctttttcttgtttagtgccttcttcaagagctcttgtaaggcaggtcttgtggtaacagatttcctcagcatttggttttctgaataggatcatatttattttttgcttccgaaggttactttggccggatatgaacttctgagttagaattattttttaagaatgttgaatattggcccttaatctcttctgacttgtaggatttcggttgaaagytttgttgtttgtctgatgggcttctttttagaagtgacctggcctttctctctagctgcctttaacatattttttcttttattttgaccttgaagaacctcatgattatgtatcttggggatgaccaccttatggggtatctcactggggttctccacattttctgcctttgaaatgttggcctctgtatctaggttagggaagttctcatggatgttatcctgaaatatgtgtttcaagttgttttcttactcctattgctttcaggcactctctttaatcatagatttggtttcttcacaggtttctttacataatcccatatttctcagaggttttgttaattctgctttattctttcttcagtattct

SEQ ID NO: 393619 - DNA, 582 bp, Homo sapiens
tgtagtgactggtaatcgtctttttcttgtttagtgccttcttcaagagctcttgtaaggcaggtcttgtggtaacagatttcctcagcatttggttttctgaataggatcatatttattttttgcttccgaaggttactttggccggatatgaacttctgagttagaattattttttaagaatgttgaatattggcccttaatctcttctgacttgtaggatttcggttgaaagttttgttgtttgtctgatgggcttctttttagaagtgacctggcctttctctctagctgcctttaacatattttttctttkattttgaccttgaagaacctcatgattatgtatcttggggatgaccaccttatggggtatctcactggggttctccacattttctgcctttgaaatgttggcctctgtatctaggttagggaagttctcatggatgttatcctgaaatatgtgtttcaagttgttttcttactcctattgctttcaggcactctctttaatcatagatttggtttcttcacaggtttctttacataatcccatatttctcagaggttttgttaatt

SEQ ID NO: 393620 - DNA, 572 bp, Homo sapiens
gaattattttttaagaatgttgaatattggcccttaatctcttctgacttgtaggatttcggttgaaagttttgttgtttgtctgatgggcttctttttagaagtgacctggcctttctctctagctgcctttaacatattttttcttttattttgaccttgaagaacctcatgattatgtatcttggggatgaccaccttatggggtatctcactggggttctccacattttctgcctttgaaatgttggcctctgtatctaggttagggaagttctcatggatgttatcctgaaatatgtgtttcaagttgttttcttactcctattgctttcaggcactcyctttaatcatagatttggtttcttcacaggtttctttacataatcccatatttctcagaggttttgttaattctgctttattctttcttcagtattcttgtctgtcttatttcagaaagtcagtcttgaggctctgagattcttccccctgcctggtgtattcttctattaatacttgtggttacattataaaggttttgtattgtgtttttcagctctattaatttg

SEQ ID NO: 393621 - DNA, 572 bp, Homo sapiens
gaattattttttaagaatgttgaatattggcccttaatctcttctgacttgtaggatttcggttgaaagttttgttgtttgtctgatgggcttctttttagaagtgacctggcctttctctctagctgcctttaacatattttttcttttattttgaccttgaagaacctcatgattatgtatcttggggatgaccaccttatggggtatctcactggggttctccacattttctgcctttgaaatgttggcctctgtatctaggttagggaagttctcatggatgttatcctgaaatatgtgtttcaagttgttttcttactcctattgctttcaggcactctctttaatcatagatttggtttcttcacaggtttctttacataatcccatatttctcagaggttttgttaattctgctttattctttcttcagtattcttgtctgtcttatttcagaaagycagtcttgaggctctgagattcttccccctgcctggtgtattcttctattaatacttgtggttacattataaaggttttgtattgtgtttttcagctctattaatttg

SEQ ID NO: 393622 - DNA, 526 bp, Homo sapiens
aaagccgctggtgggggagtaggggctacctgctggagactgtgtgctgttgcactaaaggtattgttggcttggggcaggatactggccagtgaaggttctgatgccttctctgtgtcccccaagaaggagtgattgttcagagtgtgggaggataccctgttctccccacagtgttaccacaaaggccagggtggggctttctggctgtctacccaccaaagcttcatctacaatggcaattgcttgggggtggcagggtcatactgcatttccatttgatggtggagcaagcaaagccaaactcacctttgcaggcatatgccagcaaagtaatttggggagttgtcatggtctcaggggaagctgtagtatggrgaagaaacatgtgggctggtccattcatagacgctaccttgctggagctcttcatgggtcaggcatggcccaccagtgcatatgctctgatatgggctcctaatgtacctgagactgccctgtaagcagctgtggtcagactgagttc

SEQ ID NO: 393623 - DNA, 608 bp, Homo sapiens
gattggggacccacctaagaaagtagtgtaggctgggtgcagtacctagcactttgtgaggccaaggtaggtggattgcctgagctcaggagttctagactagcctgggcaacatggtgaaatcctgtctctactaaaatacaaaagaagaaaattagctgggtgtggtggcgcgcacctgtaatcttatctactcgggaggctgaggcaggagaattgcttgaacccaggaggcagaggwttcagtgagccaagattgtgccacttcattccagcctggcgacagtgagactctgtcccaaaaaaaaagcagtctagccacatttttataggatagctctgttgtgctgaagtaccacttccacccccagtttatttggactctccaaagccagaaggctggaacagctaagtcacacaaacatcaaaaatggcagctcactcttccctctaggaactgtatcccaaagaggattcaaaactccactgatcaaagagcaccagtggtggtagctggagaccctggttgggaagtagtttgcagttaggaggaactagattggggacctgctttaacagatagtctggccatgtctttttagagcacc

SEQ ID NO: 393624 - DNA, 608 bp, Homo sapiens
gattggggacccacctaagaaagtagtgtaggctgggtgcagtacctagcactttgtgaggccaaggtaggtggattgcctgagctcaggagttctagactagcctgggcaacatggtgaaatcctgtctctactaaaatacaaaagaagaaaattagctgggtgtggtggcgcgcacctgtaatcttatctactcgggaggctgaggcaggagaattgcttgaacccaggaggcagaggattcagtgagccaagattgtgccacttcattccagcctggcgacagtgagactctgtcccaaaaaaaaagcagtctagccacatttttataggatagctctgttgtgctgaagtaccacttccacccccagtttatttggactctccaaagccagaaggctggaacagctaagtcacacaaacatcaaaaatggcagctcactcttccctctaggaactgtatcccaaagaggattcaaaactccaytgatcaaagagcaccagtggtggtagctggagaccctggttgggaagtagtttgcagttaggaggaactagattggggacctgctttaacagatagtctggccatgtctttttagagcacc

SEQ ID NO: 393625 - DNA, 608 bp, Homo sapiens
gattggggacccacctaagaaagtagtgtaggctgggtgcagtacctagcactttgtgaggccaaggtaggtggattgcctgagctcaggagttctagactagcctgggcaacatggtgaaatcctgtctctactaaaatacaaaagaagaaaattagctgggtgtggtggcgcgcacctgtaatcttatctactcgggaggctgaggcaggagaattgcttgaacccaggaggcagaggattcagtgagccaagattgtgccacttcattccagcctggcgacagtgagactctgtcccaaaaaaaaagcagtctagccacatttttataggatagctctgttgtgctgaagtaccacttccacccccagtttatttggactctccaaagccagaaggctggaacagctaagtcacacaaacatcaaaaatggcagctcactcttccctctaggaactgtatcccaaagaggattcaaaactccactgatcaaagagcaccagtggtggtagctggagaccctggktgggaagtagtttgcagttaggaggaactagattggggacctgctttaacagatagtctggccatgtctttttagagcacc

SEQ ID NO: 393626 - DNA, 483 bp, Homo sapiens
atgctttctgcccccagtcagcttgggctcttcaaagcatgaaggctggaatggctaagttgcccaagaagcaaagatgatggcccattcctctttctggtagctccatccctggggggtgcagtgctgctaccagtggttggctgtaattctaagccagtaggtgttaccctgtgaggcactgtggaagtgggtcctacrgaccatcactgctcagccacttgggtcccgcctctttctcatgggtatgtacagaggtgtaatgccctactttgctagagttgcagctactttttctgggaagcctggaaagccagagtatctaagactcttgaatctctatgcaggcctcagtggctgctctgctgagactccgtgtagctctgtgtgttaaactgaaggccttggtgaagtgggttcatgagggtatctcctcacctgaaggttgcaaaggtctgtgggagaatcatgggtttctagggt

SEQ ID NO: 393627 - DNA, 483 bp, Homo sapiens
atgctttctgcccccagtcagcttgggctcttcaaagcatgaaggctggaatggctaagttgcccaagaagcaaagatgatggcccattcctctttctggtagctccatccctggggggtgcagtgctgctaccagtggttggctgtaattctaagccagtaggtgttaccctgtgaggcactgtggaagtgggtcctacagaccatcactgctcagccacttgggtccygcctctttctcatgggtatgtacagaggtgtaatgccctactttgctagagttgcagctactttttctgggaagcctggaaagccagagtatctaagactcttgaatctctatgcaggcctcagtggctgctctgctgagactccgtgtagctctgtgtgttaaactgaaggccttggtgaagtgggttcatgagggtatctcctcacctgaaggttgcaaaggtctgtgggagaatcatgggtttctagggt

SEQ ID NO: 393628 - DNA, 483 bp, Homo sapiens
atgctttctgcccccagtcagcttgggctcttcaaagcatgaaggctggaatggctaagttgcccaagaagcaaagatgatggcccattcctctttctggtagctccatccctggggggtgcagtgctgctaccagtggttggctgtaattctaagccagtaggtgttaccctgtgaggcactgtggaagtgggtcctacagaccatcactgctcagccacttgggtcccgcctctttcycatgggtatgtacagaggtgtaatgccctactttgctagagttgcagctactttttctgggaagcctggaaagccagagtatctaagactcttgaatctctatgcaggcctcagtggctgctctgctgagactccgtgtagctctgtgtgttaaactgaaggccttggtgaagtgggttcatgagggtatctcctcacctgaaggttgcaaaggtctgtgggagaatcatgggtttctagggt

SEQ ID NO: 393629 - DNA, 609 bp, Homo sapiens
ggtcaacagatggtaacaatatactattgtgtgactgtggaataacatctctagtgatttctttgtcagtggtctttaacttaacataatttggagaatatgattcctacaaattaacatttttgtttttcttgtaactacaggttattatgatggttgtaatgaagattatatgagtataatggagctatatgtttctgaattctgaacaactagttacaaaatattcttttttctgttgaacatgtgaygtatctggtctgttaaacatagagacctttagttttgatatatatagatttaaatatacagacgtgtaatgtaaaataaactttagttgtaacagatttatagagaaagtaatcatttgtttatgtttgtatacctattttgaaaagaaaaatattagaatgaaacagataattttacaagtgttgatatcttaccagcaaaccagaaatttcaaagattttgaaagcaaatctattttctctgctttgtatgaaattcatttatctaaaatgttattgcttctggcttagaattattttgtgcaaattctctttttctttttttggtttgtctgtttgcctgttgctcaccatagac

SEQ ID NO: 393630 - DNA, 592 bp, Homo sapiens
tggagaatatgattcctacaaattaacatttttgtttttcttgtaactacaggttattatgatggttgtaatgaagattatatgagtataatggagctatatgtttctgaattctgaacaactagttacaaaatattcttttttctgttgaacatgtgacgtatctggtctgttaaacatagagacctttagttttgatatatatagatttaaatatacagacgtgtratgtaaaataaactttagttgtaacagatttatagagaaagtaatcatttgtttatgtttgtatacctattttgaaaagaaaaatattagaatgaaacagataattttacaagtgttgatatcttaccagcaaaccagaaatttcaaagattttgaaagcaaatctattttctctgctttgtatgaaattcatttatctaaaatgttattgcttctggcttagaattattttgtgcaaattctctttttctttttttggtttgtctgtttgcctgttgctcaccatagacataatatatacttttctattcatctaatttcataaaacattctttgtataatcccctcagagattatgacagtg

SEQ ID NO: 393631 - DNA, 663 bp, Homo sapiens
cctaatgtgtgtcttgccactgatgttaattatctcatcttacccaaggttgtaggtcaacagatggtaacaatatactattgtgtgactgtggaataacatctctagtgatttctttgtcagtggtctttaacttaacataatttggagaatatgattcctacaaattaacatttttgtttttcttgtaactacaggttattatgatggttgtaatgaagattatatgagtataatggagctatatgtttctgaattctgaacaactagttacaaaatattcttttttctgttgaacatgtgacgtatctggtctgttaaacatagagacctttagttttgatatatatagatttaaatatacagacgtgtaatgtaaaataaactttagttgtaacagatttatagagaaagtaatcatttgtttatgtttgtatacctattttgaaaagaaaaatattagaatgaaacagataattttacaagtgttgatatcttaccagcaaaccagaaatttcaaagattttgaaagcaaatctattttctctgctttgtatgaaattcatttatctaaaatgttattgcttctggcttagmattattttgtgcaaattctctttttctttttttggtttgtctgtttgcctgttgctcaccatagac

SEQ ID NO: 393632 - DNA, 571 bp, Homo sapiens
ggaagtctttgctgtcaaatctggaattgctgacacatgttaagagtatgctccaccagttttgaaactgaaaatgccctgaactcttttcatttagattaacaaaatagggttttagtcttccttgtctatgttctggcttagacagaattatcaagccatttcaagtagaatttattctagatttttttttttttctttctgaaatggagtctcgctctgtcgcccaggctggagttccatggcacaatcttggctcactgcaacttccacctcccagtttcaagcaattcttttgcttcagcctcccgagtarctgggactacaggcaacccccccaccgtgcttgactaattttttgtacttttagtagggatgggttttcactgtgttagccaggatggccttgatctcctaacctcatgatctgccccgctcagattcccaaagtaatgggaatacaggcatgagccattgcacccagccttggttctagatcttgacacagcacatcttcaacttactgtctccgagatgagaaaacctgtgtgatatggaagaacaaaaccaa

SEQ ID NO: 393633 - DNA, 566 bp, Homo sapiens
tagtcttccttgtctatgttctggcttagacagaattatcaagccatttcaagtagaatttattctagatttttttttttttctttctgaaatggagtctcgctctgtcgcccaggctggagttccatggcacaatcttggctcactgcaacttccacctcccagtttcaagcaattcttttgcttcagcctcccgagtagctgggactacaggcaacccccccaccgtgcttgactaattttttgtacttttagtagggatgggttttcactgtgttagccaggatggccttgatctcctaacctcatgatctgccccgctcagattcccaaagtaatgggaatacaggcatgagccattgcacccrgccttggttctagatcttgacacagcacatcttcaacttactgtctccgagatgagaaaacctgtgtgatatggaagaacaaaaccaaacgtgttataacccaaggagattttatttctgccctgctatcctgggctctcagaagtgtagttctggcagacattactggaaggtagaagtgggaaacaaggctaaatg

SEQ ID NO: 393634 - DNA, 622 bp, Homo sapiens
tcactatcacgagaacagcatggaggaaaccactccatgattcaattacctccacctggtccctcccttgacacatggggattacagtttgagatgagatttgagtgaggacacagagacaaactatattacatacattacctcactaaatgtatattcaaatttctagcattaacaaaatagacaactatggagcaaataagtacaattctataattaataaatttcatcttttatcrttttataatttatttccatatattttatagtttgcttgttaatatttgaacaaacttaatcaataaatattaatgcaataaatacttattgaatacttattatatattaggtggttagattctgggtatccaggaatttatcctccaataaaaataactttaaaaacacataataatgttatatcacaagcacaataacaaataccatttattaagtacttactgagtacttactatctaccagacttcatgtaagcatgctttttatattagtttatttagtcttccatacaaattgccagataattgttattaaccattatatcctttatttcttaaaaaagtataaaactgaagctcatgaagatgaaacaaccttactg

SEQ ID NO: 393635 - DNA, 622 bp, Homo sapiens
tcactatcacgagaacagcatggaggaaaccactccatgattcaattacctccacctggtccctcccttgacacatggggattacagtttgagatgagatttgagtgaggacacagagacaaactatattacatacattacctcactaaatgtatattcaaatttctagcattaacaaaatagacaactatggagcaaataagtacaattctataattaataaatttcatcttttatcattttataatttatttccayatattttatagtttgcttgttaatatttgaacaaacttaatcaataaatattaatgcaataaatacttattgaatacttattatatattaggtggttagattctgggtatccaggaatttatcctccaataaaaataactttaaaaacacataataatgttatatcacaagcacaataacaaataccatttattaagtacttactgagtacttactatctaccagacttcatgtaagcatgctttttatattagtttatttagtcttccatacaaattgccagataattgttattaaccattatatcctttatttcttaaaaaagtataaaactgaagctcatgaagatgaaacaaccttactg

SEQ ID NO: 393636 - DNA, 622 bp, Homo sapiens
tcactatcacgagaacagcatggaggaaaccactccatgattcaattacctccacctggtccctcccttgacacatggggattacagtttgagatgagatttgagtgaggacacagagacaaactatattacatacattacctcactaaatgtatattcaaatttctagcattaacaaaatagacaactatggagcaaataagtacaattctataattaataaatttcatcttttatcattttataatttatttccatatattttatagtttgcttgttaatatttgaacaaacttaatcaataaatattaatgcaataaatayttattgaatacttattatatattaggtggttagattctgggtatccaggaatttatcctccaataaaaataactttaaaaacacataataatgttatatcacaagcacaataacaaataccatttattaagtacttactgagtacttactatctaccagacttcatgtaagcatgctttttatattagtttatttagtcttccatacaaattgccagataattgttattaaccattatatcctttatttcttaaaaaagtataaaactgaagctcatgaagatgaaacaaccttactg

SEQ ID NO: 393637 - DNA, 602 bp, Homo sapiens
taaatcttatacccagtgtaatgaaattataatattggtaatcaacagtcttgggttmaataagtagtagttctgttagggaccacctctgggacctcgagaaaataacttaagctttaatcttacgttcccttctctcatctatgtatatttaacatctctgttgatccttataatctatttaaaatgtgaaatctgctgaattcgtttttcaaaaacagaatttaacaccaattatgtaaaaccataaatgatttttcttaagttagcaaatcatttgaatcatacatcctactattataataaacttaaatttaagaaaaaacttacatttaagaaaatgagacactgaattcctaaacatagttttttaatattttccctaggattcaaatggttatatagataaattatttccatcctctctgttttagacataaaagagacatattctgcctttagcaaaaataaaagtgagacttctgctgtagaatgacaattattgccagtaacagttgaagatttgtcatatagtttaaacagcaaattcaactttttcgctgtgggcataaataagaaagataaccacatactgttaaaaa

SEQ ID NO: 393638 - DNA, 602 bp, Homo sapiens
taaatcttatacccagtgtaatgaaattataatattggtaatcaacagtcttgggttcaataagtagtagttctgttagggaccacctctgggacctcgagaaaataacttaagctttaatcttacgttcccttctctcatctatgtatatttaacatctctgttgatccttataatctatttaaaatgtgaaatctgctgaattcgtttttcaaaaacagaatttaacaccaattatgtaaaaccataaatgatttttcttaagttagcaaatcatttgaatcatacatccyactattataataaacttaaatttaagaaaaaacttacatttaagaaaatgagacactgaattcctaaacatagttttttaatattttccctaggattcaaatggttatatagataaattatttccatcctctctgttttagacataaaagagacatattctgcctttagcaaaaataaaagtgagacttctgctgtagaatgacaattattgccagtaacagttgaagatttgtcatatagtttaaacagcaaattcaactttttcgctgtgggcataaataagaaagataaccacatactgttaaaaa

SEQ ID NO: 393639 - DNA, 602 bp, Homo sapiens
taaatcttatacccagtgtaatgaaattataatattggtaatcaacagtcttgggttcaataagtagtagttctgttagggaccacctctgggacctcgagaaaataacttaagctttaatcttacgttcccttctctcatctatgtatatttaacatctctgttgatccttataatctatttaaaatgtgaaatctgctgaattcgtttttcaaaaacagaatttaacaccaattatgtaaaaccataaatgatttttcttaagttagcaaatcatttgaatcatacatcctactattataataaacttaaatttaagaaaaaacttacatttaagaaaatgagacactgaattcctaaacatagttttttaatattttccctaggattcaaatggttatatagataaattatttccatsctctctgttttagacataaaagagacatattctgcctttagcaaaaataaaagtgagacttctgctgtagaatgacaattattgccagtaacagttgaagatttgtcatatagtttaaacagcaaattcaactttttcgctgtgggcataaataagaaagataaccacatactgttaaaaa

SEQ ID NO: 393640 - DNA, 602 bp, Homo sapiens
taaatcttatacccagtgtaatgaaattataatattggtaatcaacagtcttgggttcaataagtagtagttctgttagggaccacctctgggacctcgagaaaataacttaagctttaatcttacgttcccttctctcatctatgtatatttaacatctctgttgatccttataatctatttaaaatgtgaaatctgctgaattcgtttttcaaaaacagaatttaacaccaattatgtaaaaccataaatgatttttcttaagttagcaaatcatttgaatcatacatcctactattataataaacttaaatttaagaaaaaacttacatttaagaaaatgagacactgaattcctaaacatagttttttaatattttccctaggattcaaatggttatatagataaattatttccatcctctctgttttagacataaaagagacatattctgcctttagcaaaaataaaagtgagacttctgctgtagaatgacaattattgccagtaacagttgaagatttgtcatatagtttaaacagcaaattcaactttttygctgtgggcataaataagaaagataaccacatactgttaaaaa

SEQ ID NO: 393641 - DNA, 481 bp, Homo sapiens
atactcatctcattttactttattcttgtatttggcacattacatttttaaaacttatttactaagcccatttcacttacctcctaggaaggaaagaatatatattttctacctcaaactgacaattttgtaaagaacattttggtcttgaatatctagaggcaaagtcaagtaggtctggagttacagtagttggccaacatgcacaccaccatgttttatacgtgttttgagaaagaattccagtaagagtagttaaaaacacttgacaggataaatcacttgtcttcagatttgtatgccaggatataygtaataatgtgttcatgacttaaatcttaaaatcagcaaaaagaacagttctggataaagatgactgattttatgtttggcatcctaattattgtctccttgcctaggcattcaaatttaactaaaatatgctcttacaaaaagataactggagcactgtgtgtgaaat

SEQ ID NO: 393642 - DNA, 604 bp, Homo sapiens
cctggtacttgattttaggataaatgattttattaacatatttttaagaaagaatgccactcagaggactgttcaggttgcagcaacacaacaccaccaatgatgatactgatattaggaarccttactaagctcttgctatgtaccaggcatcttcacatattgttcctttttcctcttacaatgacctttagttaggtatttgggaagatgacagaactcaaattctatacctaggcagtgtggctcatgatactatacaacaatttatgacagagtcatagaggtatatatcagcttgctcaactaatatagtcctagaaagactgtctgcaggtcacaggaaattacttacttagttgtatcaatgaaaaatacaaaaattactaccatttatttagcattttctagttgctagggactgtgttaattttttatgcatattactttcctcaatccttaataattcaagagttagctgtagataccagttttagttccaatttttggggagagtaaaataagcctgaaaaagttaaataaatatcaaaggttacatagctagaaatttgcaaacacagggctcacacccaaactatctgat

SEQ ID NO: 393643 - DNA, 604 bp, Homo sapiens
cctggtacttgattttaggataaatgattttattaacatatttttaagaaagaatgccactcagaggactgttcaggttgcagcaacacaacaccaccaatgatgatactgatattaggaagccttactaagctcttgctatgtaccaggcatcttcacatattgttcctttttcytcttacaatgacctttagttaggtatttgggaagatgacagaactcaaattctatacctaggcagtgtggctcatgatactatacaacaatttatgacagagtcatagaggtatatatcagcttgctcaactaatatagtcctagaaagactgtctgcaggtcacaggaaattacttacttagttgtatcaatgaaaaatacaaaaattactaccatttatttagcattttctagttgctagggactgtgttaattttttatgcatattactttcctcaatccttaataattcaagagttagctgtagataccagttttagttccaatttttggggagagtaaaataagcctgaaaaagttaaataaatatcaaaggttacatagctagaaatttgcaaacacagggctcacacccaaactatctgat

SEQ ID NO: 393644 - DNA, 604 bp, Homo sapiens
cctggtacttgattttaggataaatgattttattaacatatttttaagaaagaatgccactcagaggactgttcaggttgcagcaacacaacaccaccaatgatgatactgatattaggaagccttactaagctcttgctatgtaccaggcatcttcacatattgttcctttttcctcttacaatgacctttagttaggtatttgggaagatgacagaactcaaattctatacctaggcagtgtggctcatgatactatacaacaatttatgacagagtcatagaggtatatatcagcttgctcaactaatatagtcctagaaagactgtctgcaggtcacaggaaattacttacttagttgtatcaatgaaaaatacaaaaattactaccatttatttagcattttctagttgctagggactgtgttaattttttatgcatattactttmctcaatccttaataattcaagagttagctgtagataccagttttagttccaatttttggggagagtaaaataagcctgaaaaagttaaataaatatcaaaggttacatagctagaaatttgcaaacacagggctcacacccaaactatctgat

SEQ ID NO: 393645 - DNA, 637 bp, Homo sapiens
tttttatataaatgaggactttcacaaggccagaattaaactctttataaaatttatrtaaagtgatttggtaatgtaaaaattgtatcatcttaattttttaaaatgtggaattaatttgaattttacaaattatatttcttttggaagataatttttctatttactagttttatcagtacatgcagatatactttacaatgaagtaaataacatcgcatacagtttttgacataaggaaataaaaagctgtttccattgctccctaattattattgttgtgattctaactccaagtatggtcaacaagaacattgtcataatattttaggaacattgcaatgtaacttttcagtatcagtcttaaataagactgccttaaatagacatattcttagcttcaggttttgatggtagtggtggtggtagttgtgtttgcgtgtttgtgtgtgtgtgtgtgtgtgtgtgtgttttgaacaaaattggcaatattacttcatctaaaatttgattagtcattaattgtgttacaaagatttacaagtgttgattgcatgttttaaacaatgttacttagaaaatgtgccatgtgttgttcatgatgttaaacagcaaaaatatattgtagtcagttagc

SEQ ID NO: 393646 - DNA, 637 bp, Homo sapiens
tttttatataaatgaggactttcacaaggccagaattaaactctttataaaatttatgtaaagtgatttggtaatgtaaaaattgtatcatcttaattttttaaaatgtggaattaatttgaattttacaaattatatttcttttggaagataatttttctatttactagttttatcagtacatgcagatatactttacaatgaagtaaataacatcgcatacagtttttgacataaggaaataaaaagctgtttccattgctccctaattattattgttgtgattctaactccaagtatggtcaacaagaacattgtcataatattttaggaacattgcaatgtaacttttcagtatcagtcttaaataagactgccttaaatagacatattcttagcttcaggttttgatggtagtggtggtggtagttgtgtttgcgtgtttgtgtgtgtgtgtgtgtgtgtgtgtgttttgaacaaaattggcaatattacttcatctaaratttgattagtcattaattgtgttacaaagatttacaagtgttgattgcatgttttaaacaatgttacttagaaaatgtgccatgtgttgttcatgatgttaaacagcaaaaatatattgtagtcagttagc

SEQ ID NO: 393647 - DNA, 638 bp, Homo sapiens
atttaatgcttaagctcctttaattaatgtctcttctcttaggaaaatgactgaaaatgctatttaaactggtctatggaacatgcatgttttccttcttgtttacctatacagtcttataatttttacctttcttcatcattatctggactctaataccacaatatctttgagaacttcgaataagacatgcttttatttcatcacacatattttccacatgctactctccatgcctagactatatccaccattgtattctacatagttagcttctatacatccatctctcaactcaattttctaatcttcacaagggcttccttaayctctaaactatgttgagctcttgtagtactgtttacatttcttttagactacttaacattgcttgtaattaaacagtatattgactaataatgtcttattactgtctccatatgataagctctatgacagcagaagttgtgtttgttctagtttaccattttgtgccaagtgctatcacataaaaatgatgttattttaaaattaattcataaatgttacgcttttgagctgcagttttcttatctatgatgcgtaagttgtagctaactcaaagctttgttatgatgactacatttacccaaactacc

SEQ ID NO: 393648 - DNA, 638 bp, Homo sapiens
atttaatgcttaagctcctttaattaatgtctcttctcttaggaaaatgactgaaaatgctatttaaactggtctatggaacatgcatgttttccttcttgtttacctatacagtcttataatttttacctttcttcatcattatctggactctaataccacaatatctttgagaacttcgaataagacatgcttttatttcatcacacatattttccacatgctactctccatgcctagactatatccaccattgtattctacatagttagcttctatacatccatctctcaactcaattttctaatcttcacaagggcttccttaacctctaaactatgttgagctcttgtagtactgtttacwtttcttttagactacttaacattgcttgtaattaaacagtatattgactaataatgtcttattactgtctccatatgataagctctatgacagcagaagttgtgtttgttctagtttaccattttgtgccaagtgctatcacataaaaatgatgttattttaaaattaattcataaatgttacgcttttgagctgcagttttcttatctatgatgcgtaagttgtagctaactcaaagctttgttatgatgactacatttacccaaactacc

SEQ ID NO: 393649 - DNA, 638 bp, Homo sapiens
atttaatgcttaagctcctttaattaatgtctcttctcttaggaaaatgactgaaaatgctatttaaactggtctatggaacatgcatgttttccttcttgtttacctatacagtcttataatttttacctttcttcatcattatctggactctaataccacaatatctttgagaacttcgaataagacatgcttttatttcatcacacatattttccacatgctactctccatgcctagactatatccaccattgtattctacatagttagcttctatacatccatctctcaactcaattttctaatcttcacaagggcttccttaacctctaaactatgttgagctcttgtagtactgtttacatttcttttagactacttaacattgcttgtaattaaacagtatattgactaataatgtcttattactgtctccatatgataagctctatgacagcagaagttgtgtttgttctagtttaccattttgtgccaagtgctatcacataaaaatgatgttattttaaaattaattcataaatgttacgcttttgagctgcagttttcttatctatgatgcgtaagttgtagcyaactcaaagctttgttatgatgactacatttacccaaactacc

SEQ ID NO: 393650 - DNA, 480 bp, Homo sapiens
ggtgataaatgggctgggggacagaagcagaataccacagaggaagatgagagcaggacaccctccccactcccttgcgttctaccaagtgctgggcaggcacctcctcacctgcctgcgaaatatcatcccaatatggagagtcaaactcatagtcaccagccaggatcttgcggaagagattcttatcatggttctcataatcatcttcttccacctcctcatagaaaggtggrttgcctgaaagcctgcatgggggaagggtcacacagaaaggccacagacacatgcccccaccccatctgactgcaagcctgcttgtccatctgtccactcacaggatgtacatgatgactccaatggcccagcagtccacagggcgtccataccgctgccggcctaccacctctggggctacaaacacagcgcccatctgctggtcagtatcaggcctagccaggtccagtaccatccacacca

SEQ ID NO: 393651 - DNA, 537 bp, Homo sapiens
aacaatcagtgatagcctggataaagaaaatgtggtacatgtgtaaaatggaatactatacagccataaaaatgagatcatatttttggcaggaacatggatggatccagagcccattatccttagcaaastaatgcagcaacagaaaaccaaaagccacatgttctcacgttacaggtgggagctaaattgtgagaactcatgaacacaaagaagagaacaatagactcttggatctatttgaggatggaggataggaggtgggagagaagcagaaaagatagctatagggtcctgggcataatacctgggtgataaaataatctgcacaacaaactcttgtgacacaagtttacctacataacaaaccttcacatgtactcttaaaccaagaataaacgtttttaaaaaattaaaaaattgcacataaatactaaggtttagggttgctggatttttgcaatttcaactatgtcttaactctcatgatgtttaatggtctctcagtgttggagaaaaatactttgaaatacagtg

SEQ ID NO: 393652 - DNA, 619 bp, Homo sapiens
ctgcttgctttcacagccaggaggctggtagcctggggcaacttctgagccctgctcatccattgcctggaaataaacttaatgctgttgttgggggcatggtgggagtgacactggccttttgggctgtgtgggagctgggtgaggcctgtaactgccggctttcccctgcttccctagcaacctgcatgacacagcagaggtacccrtgttcccaggaggataataaatcctcctcagaacataactccattggcctgagaaccacatcctcaatccccacagcagccacagcaagccctgccccagcagagtctgagctaagacatatctagccctgtccccacctgatggtctttctctactggatctggtagtggaagacaaaggatataatctcttaggagttctaaggccccgcccaccaactgatcttctctagactaccaggggtgatgcactcctgaaagccccacctcctagcaagaggccagccaaaacaaaactagtgcaataaacaacactacaagtaaagaatctcacagagtccatttcactcccctgccacctccaccagagcaggtgctggtatccatggctgagagatctgaccatggtt

SEQ ID NO: 393653 - DNA, 628 bp, Homo sapiens
aaaacctataaaacctatccaggacatgctaagagatggtgaaattgttcttacaagtgttagtgaacttgtattttcaaagctaaagtggttgaagttgcagaggccaggaaatccaggaaatgagcatttatctttgcagaattattgtatatcagtggtcatcttcttccctctcttattgaaaatatcattatttcccagagtaatgcttatctgcttttctctccttttctttttgcaaataggcaacaccttccactcacctcttttcccattatgtttctttgaacttagtagacacattatcgttaacacattgtagacccaacaaaaaaatactgcttactaaatgaagtaccacagaacagatatacatattttaaaaaaaagactttttgaaactgagatgaatatctagtaaatagaatcttggagtcagagtaggctatayatatcattggctgaactttcattttatagctacgattctttgcttaaacaacaaaaaaaattcacccaagctcatttaattaaaaatgaagaatggataagaggcatagttagttaacagtaaagaatagactattcagttgattaacagagaacagtgagtgaatgattagtt

SEQ ID NO: 393654 - DNA, 531 bp, Homo sapiens
acaccaccatgcctggctaatttttgtacttttagtatttacgtggttcaccatgttggtcaggctggtctcaaactcttgacctaatcaagcagattcttaaacaccttctatsactttgttattgttcttcatgtttatagctatgataaaatgagactgatgagcaataaccacccctgattttccacctttgtagtccttaatcacttttaattttgtttcccagtcaatcacttattaacaacaccacctattgacaacattagtcatggattttgtatcccttggatcatgaggaacaaaacaacaaaagattaaaccaagcacaagagaaaatgaagcaatcaagttacaccataaatgagatgtatgaggctgctgccaacataacacagcaaactattgtacagtaaacttttttataggtagaaagagtacacttcaaaatgatgatgaaaagtataatatagtaaatacataaaccagtaacatagtcaatcattatcagtattgatggaagcagcagcc

SEQ ID NO: 393655 - DNA, 531 bp, Homo sapiens
acaccaccatgcctggctaatttttgtacttttagtatttacgtggttcaccatgttggtcaggctggtctcaaactcttgacctaatcaagcagattcttaaacaccttctatgactttgttattgttcttcatgtttatagctatgayaaaatgagactgatgagcaataaccacccctgattttccacctttgtagtccttaatcacttttaattttgtttcccagtcaatcacttattaacaacaccacctattgacaacattagtcatggattttgtatcccttggatcatgaggaacaaaacaacaaaagattaaaccaagcacaagagaaaatgaagcaatcaagttacaccataaatgagatgtatgaggctgctgccaacataacacagcaaactattgtacagtaaacttttttataggtagaaagagtacacttcaaaatgatgatgaaaagtataatatagtaaatacataaaccagtaacatagtcaatcattatcagtattgatggaagcagcagcc

SEQ ID NO: 393656 - DNA, 531 bp, Homo sapiens
acaccaccatgcctggctaatttttgtacttttagtatttacgtggttcaccatgttggtcaggctggtctcaaactcttgacctaatcaagcagattcttaaacaccttctatgactttgttattgttcttcatgtttatagctatgataaaatgagactgatgagcaataaccacccctgattttccacctttgtagtccttaatcacttttaattttgtttcccagtcaatcacttattaacaacaccacctattgacaacattagtcatggattttgtatcccttggatcatgaggaacaaaacaacaaaagattaaaccaagcacaagagaaaatgaagcaatcaagttacaccataaatgagatgtatgaggctgctgccaacataacacagcaaactattgtacagtaaacttttttataggtagaaagagtacacttcaaaatgatgatgaaaagtataawatagtaaatacataaaccagtaacatagtcaatcattatcagtattgatggaagcagcagcc

SEQ ID NO: 393657 - DNA, 602 bp, Homo sapiens
aaagtctatttcactaaacagaggagaaattttaacaaattaattttcaaacataatgttgagaattctacctctctccatgatgtagtaaaatagagtatatttatcacctcaccttaaataaccaacaaacaagacaaaacatgtgaaacaagagtttcacatactggacaatagataatacaggacatttactcctgagagaatggaagtacctgggatgaaccacagaattggctgagctaaccgattgcagagagattacaggcagcagtaacactgatgcggattagaaacactagaaaaggccagaggttccccagagttgagaacacgaagttcagagctcaataagcccagacatccagagatcgcatgctagagtaccaaaggggagaaaactgtggagagaactctggagatccaaagagagttmctctcaagtctttagctgaatagtgaacaggtcacggatgaaaagaaacagagccagggaaacaaccactaaaaaggagcacgtagagaaatcctcagactcaagaagacctgcaaataattcaggtacttataagtcagagtagaaatatctcctacacgagaag

SEQ ID NO: 393658 - DNA, 602 bp, Homo sapiens
aaagtctatttcactaaacagaggagaaattttaacaaattaattttcaaacataatgttgagaattctacctctctccatgatgtagtaaaatagagtatatttatcacctcaccttaaataaccaacaaacaagacaaaacatgtgaaacaagagtttcacatactggacaatagataatacaggacatttactcctgagagaatggaagtacctgggatgaaccacagaattggctgagctaaccgattgcagagagattacaggcagcagtaacactgatgcggattagaaacactagaaaaggccagaggttccccagagttgagaacacgaagttcagagctcaataagcccagacatccagagatcgcatgctagagtaccaaaggggagaaaactgtggagagaactctggagatccaaagagagttcctctcaagtctttagctgaatagtgaacaggtcayggatgaaaagaaacagagccagggaaacaaccactaaaaaggagcacgtagagaaatcctcagactcaagaagacctgcaaataattcaggtacttataagtcagagtagaaatatctcctacacgagaag

SEQ ID NO: 393659 - DNA, 650 bp, Homo sapiens
caggcaactgggttttgatcacaaaagcaaaaatctagttctcagctctaggccactgctttttgaaaaaaaaaaaaaaaaaaaaactggctgaaaaatataatattagggtagcagggaatacttagggaaatttatctccatagcttaattccctctctctttctctcttggctaatttttycattcccccctctttttctctctctattccatttggccaaatggctgaaattttattactctttaacttttacagcacttaaaatatatttatactatttgtttaaataattttctatttaaactttaggaaaacaatgcattgtatttgctaaacctgtatttggttaggttagctagataatcagtcaccaagttggtgaccaaaatagttaccgatgaaaaataacagactctttagagctagggctgtatcataaatttcaacttttcatgtgttgctcaatacgcatagcatggctgattgtatgggagtcattgttaagaataataaaagtgtttagtccatttgatacaaatgtgtaatgtttaaaagtacatgaaaagatagataaaatatgcccatgacagctatattttaaaatatttaataatattgttttctgttcacaaaagtggagtttcct

SEQ ID NO: 393660 - DNA, 650 bp, Homo sapiens
caggcaactgggttttgatcacaaaagcaaaaatctagttctcagctctaggccactgctttttgaaaaaaaaaaaaaaaaaaaaactggctgaaaaatataatattagggtagcagggaatacttagggaaatttatctccatagcttaattccctctctctttctctcttggctaatttttccattyccccctctttttctctctctattccatttggccaaatggctgaaattttattactctttaacttttacagcacttaaaatatatttatactatttgtttaaataattttctatttaaactttaggaaaacaatgcattgtatttgctaaacctgtatttggttaggttagctagataatcagtcaccaagttggtgaccaaaatagttaccgatgaaaaataacagactctttagagctagggctgtatcataaatttcaacttttcatgtgttgctcaatacgcatagcatggctgattgtatgggagtcattgttaagaataataaaagtgtttagtccatttgatacaaatgtgtaatgtttaaaagtacatgaaaagatagataaaatatgcccatgacagctatattttaaaatatttaataatattgttttctgttcacaaaagtggagtttcct

SEQ ID NO: 393661 - DNA, 611 bp, Homo sapiens
cattacctatttccaattttaaaatgagatcatccagtttctcactactaaatacattgtccaatagaggttatttgtatatgtgctttatcaagttgagaaagctcccctctcttcctagtttgttgagaatttttgacatgaatgagtgtttcatttagtcaataatgcaaaggcctatttgcattacataatttgttaaaatatgttgaaaatattggaagatttcagtgtcattttacaaagattaaatagacttttggaagtaaaaaatggtaacaaagtatgtataaggtatatttatatttttaatagaactgcttagattatragtagtgtttgagtgtagtgtcgtagcatggttttttcctccaaagatattcaaccactggaaaagctgtcaaagaagcatatcaagctgtgctggagtggtcgtttgacaattttataacgcaaagtgtcacttgtactgtcagtttaaattcagatttctgggcttcactcttttaagtgtatgattttatggatggttttgctatgtgctactgatgcaaagttgatgcaaaagtatttgataaattttggtctagaggtatgacacgatgagttct

SEQ ID NO: 393662 - DNA, 541 bp, Homo sapiens
tggtcgtttgacaattttataacgcaaagtgtcacttgtactgtcagtttaaattcagatttctgggcttcactcttttaagtgtatgattttatggatggttttgctatgtgctactgatgcaaagttgatgcaaaagtatttgataaattttggtctagaggtatgacacgatgagttctaatgtttattctaaactttgtatcccatgaatttaaaaagataaatgcttctagcagagatgtgattcagcctgggcctcagatgatgagtataacttcacagtgaatcttaacrttgttcaaaatgacattgcccagactggcattatctacatcagaagacagataagtcttaaatctcaactaatttttaaaatattaacaaatccatcgctggaataaaaagtatttggcttaatgagggtatctttccagttgtcatatcttaaatgtaatgaagcaaaaagtaggttgcatttattgcttctgaggcaataaataaatgtatacccaatgtactctatattaataaatgttga

SEQ ID NO: 393663 - DNA, 565 bp, Homo sapiens
ctttttactgggtccatagtttggccttttttcaggatatcatgtagttgaaagcatacagtgtgtagtattttcagattgtcttattttacttactaatgtccatttatatttcccctttgtatgttcatggcttgacagctcatttccatttagagttgaataatgttctattgtctggatgcagcatggttaatgtattcattcacttactgaaaaaacatctcagtcacttccaagttttgaaaattatgaatgaagttgctataaacatctgtgtgcaggtttttgtgtagacataagtttttagctcatttagttaaatrccaatgaatgtcattgctggttgctatggtaggattatgttttgcattgtaagaaactgccaaacagtcttccaaagtaactgtaccattttgcattcccatcaacaattgtttgtgttactccatatcatccccagaatttgccattgttcgtgttttaaactttgaccattctaatagatgtgtctgagtatctcattattgttctaattttcatttctctggtggtacatcttttt

SEQ ID NO: 393664 - DNA, 645 bp, Homo sapiens
ttttagctcatttagttaaatgccaatgaatgtcattgctggttgctatggtaggattatgttttgcattgtaagaaactgccaaacagtcttccaaagtaactgtaccattttgcattcccatcaacaattgtttgtgttactccatatcatccccagaatttgccattgttcgtgttttaaactttgaccattctaatagatgtgtctgagtatctcattattgttctaattttcatttctctggtggtacatctttttatatgcttacttttcatcaatatawcttcttttgttggttgtctgttcaagcctgttgcccattttagggggttatttttcctattattgaactttaagtgttcttcatataattgaataacagtcattgatcagatatatctttggcaaatattctcttccagtctgtgtcttctatattcattcacctaacaatgtatttcaccagaacagtaatttttaattgtattgaggttaagtttattaataatttgtttcatgcagtgtctttggtgttgtgactgcatacattttaactgtaatttctcagtcattaatgtgggaagctgaaacaatatgttttaaatgttggcataaagttgccttttataaggcaaaaagaga

SEQ ID NO: 393665 - DNA, 555 bp, Homo sapiens
aggattgcttaagtcccagaggtcaaaactccagtgagccaagattgtgccactgcactccagcctggatgacagagtgagaccttgtctcaaaaaaaaaaaaaaaaaaaaagaaagaaagaaaaagtgtagagaacctccccccttgctctcttgctcctsctttcaccatgtgacaagtctgctcccactttgccttccaccatgcgtaaaagctccctgaagcctcccaaagaaagaaaaagaaaaaagaggtggctgaaaatggaaaactaagaattttggaaaaggatgataataaaatactttgcactttttgtaagtacttcttttttcattattttaaaactatttaaaaatctttatgcttgataatatgagcactttaagaagtactatgtggaagatagcatagtagttgataaatttgattctctccttgtgggaggcttgatgagctatgttgctaccatttgtcattacttccaaagacctcatgtgtcagaggataatgacaacaaggtcaataacaccctgtaagttacacacagaaag

SEQ ID NO: 393666 - DNA, 555 bp, Homo sapiens
aggattgcttaagtcccagaggtcaaaactccagtgagccaagattgtgccactgcactccagcctggatgacagagtgagaccttgtctcaaaaaaaaaaaaaaaaaaaaagaaagaaagaaaaagtgtagagaacctccccccttgctctcttgctcctcctttcaccatgtgacaagtctgctcccactttgccttccaccatgcgtaaaagctccctgaagcctcccaaagaaagaaaaagaaaaaagaggtggctgaaaatggaaaactaagaattttggaaraggatgataataaaatactttgcactttttgtaagtacttcttttttcattattttaaaactatttaaaaatctttatgcttgataatatgagcactttaagaagtactatgtggaagatagcatagtagttgataaatttgattctctccttgtgggaggcttgatgagctatgttgctaccatttgtcattacttccaaagacctcatgtgtcagaggataatgacaacaaggtcaataacaccctgtaagttacacacagaaag

SEQ ID NO: 393667 - DNA, 522 bp, Homo sapiens
cccaataatgccctaagaacataattcatgatttctgaatctttctttatggttaatattattttcagattctgtctgattcaaagatcattttcagatgagctatccaaataatctaatgttkgctgaatgccaacaatgcaccaaggaatattttgcactaattttataaaaacaacgtattgcaggaactattaataacccaaatatatatggagggaaagtggggagtgaaagtgacttatccaaagttagctaggaaatggagaagtgaaaatgcaaagatgttttgattttatgaccagggctttacaacatatcttttttttttaattttttgaatgcctaaatcagtgttaaataaaacaatatatgttaaataaaagtcccctaaacagaaccacagggcacctttaaaaatgataaagtttttacaaatgccatctttttttagttcttatagactattaaactgtactgtctttagagttaggagtcagtgatgacgatgctgtcattttc

SEQ ID NO: 393668 - DNA, 522 bp, Homo sapiens
cccaataatgccctaagaacataattcatgatttctgaatctttctttatggttaatattattttcagattctgtctgattcaaagatcattttcagatgagctatccaaataatctaatgttggctgaatgccaacaatgcaccaaggaatattttgcactaattttataaaaacaacgtattgcaggaactattaataacccaaatatatatggagggaaagtggggagtgaaagtgacttatccaaagttagctaggaaatggagaagtgaaaatgcaaagatgttttgattttatgaccagggctttacaacatatcttttttttttaattttttgaatgcctaaatcagtgttaaataaaacaatatatgttaaataaaagtcccctaaacagaaccacagggcacctttaaaaatgataaastttttacaaatgccatctttttttagttcttatagactattaaactgtactgtctttagagttaggagtcagtgatgacgatgctgtcattttc

SEQ ID NO: 393669 - DNA, 593 bp, Homo sapiens
aataaggccatgaggtggtactgtcaagtaattgttcatgttgtgtctataaataaagtgtgaggaaagaattagtccctsacgctagcgttgtagttggatggccctgtggctactgtgataagtgggttaggttcctactgttctcaatctatatttcagatgctgggatcacccgtattccaagaaggcaacaaccctgtgttgtacaattctccttgtctattattttgttcatgacttctataaaccaataagaaaaaaggcagatgcttttgcccttgtctcattgattaccataacaagtttccaagggattcagcaataatatgtaactgctttaaggagatatctctggattggggacgtaggttgaaaaggccaagaaagtaatcattttgcaatttttgctgaaatctttaccaatgatgttaatcaatgaaggaaattatttacaatccaaattattttctaagaggtggaaataattaattaacaaaaatatattgagtctctacttgaagtttaacactgatgtagggatcacactttttccagcatttatatttggtcttaaatctcaatttgttata

SEQ ID NO: 393670 - DNA, 509 bp, Homo sapiens
tagacctcccaggctcaggcagtccccccaccccagtctcccgagtaactaggtccacagttgtacaccatcatgcccagctaagtttttatttttaaattttctgtagacatgagttctcaaacaccaatatcaacacaaaattgtatcttaatgaaatcatgagtagagtaaaagttgcttttttaaaaatcattatgtcacattggaattttacctatgtctattcaatcatttttctggaaaaaagatgaaaggatgagactgtaatacacttcttcccttagaccaatgtttcacactggtatagttattggcattttggcagraaaaaatgtgtttttaaatacatttagtatctctgggccctggacattacatgcaggtcatatgtttcagttattttgacaactaaatcaccctctaactttcccagatataccaagtgaacatggagatatgcttaagacacttggttgaaaaagctaaccattcatcctacctggctt

SEQ ID NO: 393671 - DNA, 509 bp, Homo sapiens
tagacctcccaggctcaggcagtccccccaccccagtctcccgagtaactaggtccacagttgtacaccatcatgcccagctaagtttttatttttaaattttctgtagacatgagttctcaaacaccaatatcaacacaaaattgtatcttaatgaaatcatgagtagagtaaaagttgcttttttaaaaatcattatgtcacattggaattttacctatgtctattcaatcatttttctggaaaaaagatgaaaggatgagactgtaatacacttcttcccttagaccaatgtttcacactggtatagttattggcattttggcaggaaaaaatgtgtttttaaatacatttagtatctmtgggccctggacattacatgcaggtcatatgtttcagttattttgacaactaaatcaccctctaactttcccagatataccaagtgaacatggagatatgcttaagacacttggttgaaaaagctaaccattcatcctacctggctt

SEQ ID NO: 393672 - DNA, 545 bp, Homo sapiens
ttttctccttctctattctctcccccttttartgatagcctaatgaatctagttatgcaaaccagtgacctgggatcactggtgtgctggggccagctacttaatggcttgtgagagccaattgtgtgtatctctttccaacattgtactcaatgacatcatgttggcagcttgaatttggctttcacgggaatatttataccactagaaattggcaaatgctgtcatttggcactttgatttttgttcttgttttcaggaagtcagtttaccagcatgtcactgcctgggaacatcctccatgacagtcattcttcttttccaattttttttttttgcaaatatgccaggtttttaaagattttaacttatttcatgtctgtttaacacttttattcagatacatccatttatcctcaaggatcatcactgaaataatttcctcataatttattttctttcttccttggaatagttctgcagcactgctatgaaaatgatctttctgtaatgaaaatctgatcctataattttacatatcatag

SEQ ID NO: 393673 - DNA, 545 bp, Homo sapiens
ttttctccttctctattctctcccccttttaatgatagcctaatgaatctagttatgcaaaccagtgacctgggatcactggtgtgctggggccagctacttaatggcttgtgagagccaattgtgtgtatctctttccaacattgtactcaatgacatcatgttggcagcttgaatttggctttcacgggaatatttataccactagaaattggcaaatgctgtcatttggcactttgatttttgttcttgttttcaggaagtcagtttaccagcatgtcactgcctgggaacatcctccatgacagtcattcttcttttccaattttttttttttgcaaatatgccaggtttttaaagattttaacttatytcatgtctgtttaacacttttattcagatacatccatttatcctcaaggatcatcactgaaataatttcctcataatttattttctttcttccttggaatagttctgcagcactgctatgaaaatgatctttctgtaatgaaaatctgatcctataattttacatatcatag

SEQ ID NO: 393674 - DNA, 582 bp, Homo sapiens
atagcctccattaaagaaaaattgttgctgagagctgagcgtaaaaattatactgtaataaagcttaaggcaaaatcctgcaagccaatctagaccytttactaatgctttagctttttaattcttttcatcccactattgggccacaggagattggggggaatgtaaacaatctttttttgttgttccttcctctatgcccatgtaggaaagaatttctaaaaataatcatagtaataaaattataattcaggtttaagttatattaatgaataagaataataatgatgaaatatttgtatagtgattcataatatccttagtaccctctcaggcataaacatatgaaatgacctatgtaaagaattggcacaatctgtgtgctcaggtagttcctgttcagtctccagaaatcattgcttctcccatggcaattcatttccttttctgggaagacacttgggtgggtgtgattctttgccttcacactgcatttcactgcactaactcacatgggtcaaccatgtctgaagtcacatggggaaagctctgtgagctaacagggatttttgcttgcatgta

SEQ ID NO: 393675 - DNA, 582 bp, Homo sapiens
atagcctccattaaagaaaaattgttgctgagagctgagcgtaaaaattatactgtaataaagcttaaggcaaaatcctgcaagccaatctagaccttttactaatgctttagctttttaattcttttcatcccactattgggccacaggagattggggggaatgyaaacaatctttttttgttgttccttcctctatgcccatgtaggaaagaatttctaaaaataatcatagtaataaaattataattcaggtttaagttatattaatgaataagaataataatgatgaaatatttgtatagtgattcataatatccttagtaccctctcaggcataaacatatgaaatgacctatgtaaagaattggcacaatctgtgtgctcaggtagttcctgttcagtctccagaaatcattgcttctcccatggcaattcatttccttttctgggaagacacttgggtgggtgtgattctttgccttcacactgcatttcactgcactaactcacatgggtcaaccatgtctgaagtcacatggggaaagctctgtgagctaacagggatttttgcttgcatgta

SEQ ID NO: 393676 - DNA, 582 bp, Homo sapiens
atagcctccattaaagaaaaattgttgctgagagctgagcgtaaaaattatactgtaataaagcttaaggcaaaatcctgcaagccaatctagaccttttactaatgctttagctttttaattcttttcatcccactattgggccacaggagattggggggaatgtaaacaatctttttttgttgttccttccyctatgcccatgtaggaaagaatttctaaaaataatcatagtaataaaattataattcaggtttaagttatattaatgaataagaataataatgatgaaatatttgtatagtgattcataatatccttagtaccctctcaggcataaacatatgaaatgacctatgtaaagaattggcacaatctgtgtgctcaggtagttcctgttcagtctccagaaatcattgcttctcccatggcaattcatttccttttctgggaagacacttgggtgggtgtgattctttgccttcacactgcatttcactgcactaactcacatgggtcaaccatgtctgaagtcacatggggaaagctctgtgagctaacagggatttttgcttgcatgta

SEQ ID NO: 393677 - DNA, 646 bp, Homo sapiens
gagaactgtatttgatatccttaggagactcggtgttttttttcctttcaggctcttgaggttaaaaactcagaaatttgcctttgtgagggagtacttgagttttaacatcaccatgaaggatgaattcaaaagacaagaatatcagatggttcgtgggtagtgttgaagctgggcatgtttctaaataatggcatttcaactttctatgaattaaatagacaaaaactattttgacactgtctcattttctaaccttcaacaaatacggtctgattcttaaaaaatagactctcatttcagaattctgagtattgagaaccattacatatggagtaggtggaaatttaattgccttttctagtaaataattaactgttgttctgattaaccatgcttacatacacctttttttcaaacaagcaaattcaacaagaaatcacttgtacctctggattctctatagttatatcaatctactctggttaacagcagtcacracaaatcacgtgaaaagaaaggtgaaattgtgctcaatgacaacatacaattgtctttcatgtggtaattgcatattgtgtttctgttgtttattcatcctacataaagaaagtctcaacacttccagtatgtagcatagtaacca

SEQ ID NO: 393678 - DNA, 573 bp, Homo sapiens
tattgatttgctactccctctgtgatggcatcctatggttcatctaacaaccctcctttggatattttcatgcctgtaatcccagcactttgggaggccaaggcaggcagatcacgaggtcaggggatggagaacatcctggctaacacggtgaaaccccatctctgctaaaaaaatacaaaaaaaytagtcaggtgcggtggcagacgcctgtagtccagctactcgggaagctgaggcaggagaatggcatgaacccaggaggcggagcttgtagtgagccgagatcatgccactgcactccagcctgggccacagagcaagactccgtctcaaaaaataaataaataaaaataaataaataaaataaaataaaataaaaaaaagaatgttacactcttctcatctgggaaggtttctctaccctcttcatgtacagatgaaccccagagcagctatttgtatgtggcctctaaaaaagcatcaatcatatgaatcggcatctatgtgttttcttgttttcttcactacttggggcctttgagacaagaacataggcacagtctccttttt

SEQ ID NO: 393679 - DNA, 520 bp, Homo sapiens
aacattagcccacacggtagattagaaagaaccagcacaagaactctggtaactctacgaagcaaagtgtcttcctrtctccaaatgatcacactagctccccagcaatgattcttaaccggactgaaatagggtaaatgacaggcatggaattcagaatctagtggcaaggaagctcattgatatacacaagaagtttgaaagataatccaaggaatacagtaaaatggtctaagagttgaaagaatgtagccattactttcttctcttattttcttcaacaattactttatttcttaatctcacatattgattgaatgtacatggattgatactgcaattatatatataatatctgctcttaagaacttatcctctagtctggggcataaacaaaaacataaacaaataatggcagaagctacaaaaggtaaaaataaatataatacagtaattttatgctttatctcctttacttttgatttctcaactactattactatacaataaaaattaaaaa

SEQ ID NO: 393680 - DNA, 569 bp, Homo sapiens
agcaactttaaagagtaaaggaacattagcccacacggtagattagaaagaaccagcacaagaactctggtaactctacgaagcaaagtgtcttcctatctccaaatgatcacactagctccccagcaatgattcttaaccrgactgaaatagggtaaatgacaggcatggaattcagaatctagtggcaaggaagctcattgatatacacaagaagtttgaaagataatccaaggaatacagtaaaatggtctaagagttgaaagaatgtagccattactttcttctcttattttcttcaacaattactttatttcttaatctcacatattgattgaatgtacatggattgatactgcaattatatatataatatctgctcttaagaacttatcctctagtctggggcataaacaaaaacataaacaaataatggcagaagctacaaaaggtaaaaataaatataatacagtaattttatgctttatctcctttacttttgatttctcaactactattactatacaataaaaattaaaaatatgatgtattgaggcactgggaggtca

SEQ ID NO: 393681 - DNA, 520 bp, Homo sapiens
aacattagcccacacggtagattagaaagaaccagcacaagaactctggtaactctacgaagcaaagtgtcttcctatctccaaatgatcacactagctccccagcaatgattcttaaccggactgaaatagggtaaatgacaggcatggaattcagaatctagtggcaaggaagctcattgayatacacaagaagtttgaaagataatccaaggaatacagtaaaatggtctaagagttgaaagaatgtagccattactttcttctcttattttcttcaacaattactttatttcttaatctcacatattgattgaatgtacatggattgatactgcaattatatatataatatctgctcttaagaacttatcctctagtctggggcataaacaaaaacataaacaaataatggcagaagctacaaaaggtaaaaataaatataatacagtaattttatgctttatctcctttacttttgatttctcaactactattactatacaataaaaattaaaaa

SEQ ID NO: 393682 - DNA, 538 bp, Homo sapiens
taccaggtatcaagtgttatatgctaatcaaggtgctaaatatattacataaaattattacttttaattctcacaaccatttgagatttttacccttcacattacagacagattcctaaaatggtgcataagattttctgctcctattgtggatgtcctacataatacatagggttgtacaaagaaaatgttttactcctgtgatcaagttatattaggtggcacatatgtgtctttaagaatgagaatttatccaagtagactgatttaatcatgttattcctgcaagagcacagagattgctctgactggtcaaaaagaagaagtaagaaatatccastctggctggcctgaggaaagcaaacacccatgttgggttcccagtgagagcatctgcttctaggaactgagacagtccccagttgatagtttttagggaaatagaaacctcagttcatcaactgcaaggaacttcattctaccaaccacaagactaagtttggaagcagattccctcccttaccctgcaacccccaga

SEQ ID NO: 393683 - DNA, 541 bp, Homo sapiens
gtcatttttacctccatgtcattacagacattcagggtgtgggggggaaatttagccaaggttgaaaacctgctagggtgtgaatcaggtttatcactctaatctgtgtggctctccaatctctgtacttaccctactgaatgaatcccactgcccttcagractgcccttgggatggtctggcatgtgtgtcttcgttctcagctgtctcagcttcttacttctgtggcaactaacctttccaattgtggagagagcatctcaacaatctagaggagatctaggtgaaaaaactcaggaatccaggtcctttccatattcctcatgttcttagaacatcaagtcctaatataatgaatagttctttgaaacatcctatgaaaaatacaatgggaatcttctgttttctgcctttttcccctagaactcattttgtgttcctgacctttttttttcttttcttttccttttgtctaccttcaccttcctttaggaagtgttagcaattaaaacctcaccctcaggtataaatgtctcctgc

SEQ ID NO: 393684 - DNA, 554 bp, Homo sapiens
attcttccaattgccagaaaattttgttataattctgacttacttctcatcctttaattcttgttaattgaagttcccaaggagacatccaataaacgaaatcatttccccacatatattctaaggaaatagaaagttcaaagaatgttcagataattgccaaaatattattaatcatttatcacttcatattatttgatactattatttgatgataaatttattatttattaagtaataatattaaatgaaggtaaatatcaaatattatcatttaataaaaataaaattatcatttaacaaataacattattcatcatttaatattattttattataatcatttatcatttaatttgcagatgtggtttggtgtgaacccaaatgtgccagttctctaaattccagaattaggcaaacttatcyatccagtttcagaaaggactagactgaggtaggttctttcagacttagaggtttgctaggtaagacttagagttgcactgtctaatgaggtagctacttgctatgtgcagttaatgaacacttgaaat

SEQ ID NO: 393685 - DNA, 499 bp, Homo sapiens
aacaagttacataactcctattacacacagaattccatgacagacattttgttatttggattcctggccaagtgatttaatgaatgttcagttaaagaatatgtgttttaaaattaccatatcagaactgacagaagagttcctctactgttaaaaatgtcccaagttaggcaaaaatctgttaatgccacacacacacaaaattgaaattagcaagtcactgaaagaaaacaggaactcccactctccatagtcaggcttttctgaaattcagacccagaaacccttatcttgccttgggctcactctatctgcttctctaaatttctgttttccctgatgcttccatgcatgtttaccatagctactgtcgactcttcttctcctgggatagcagcagagatgcttcaggtacaattttagccctgtactacaygagcaattcttttcacttctgccgtttcatcttcaggtaccttgtgctttgaaggtgctccct

SEQ ID NO: 393686 - DNA, 575 bp, Homo sapiens
aggtttaggtgtatttaatgcattttccacttaggatattttcaatttaggatgagtttattgggatgtaaccactctataagttaggaagcatctgtgtttgtcagatgaccaaacaaaccaatcccgacacctagctcctgggtgagggcatctcttaggcctaggtaatgacttgcacacttcattgcacacatgtctctgtgatggtccttaggctgtgcagtaattcctggygctgccccataacacttcaagtgccttgtgggtaaggagggtgaactgtcggggagggagtggaatcgggtttgggggttgtgtgctagacttggaatgaccagcttagaaccctggctccactaggaactctgcaccttggggcaatgttcttaatctactcaaacctcattctctttctctccacgagggactggtaatttgcatggagctactcggaggattaaccgtgattacccagagaaaggacaccttgcctgggccgtttcaagtactccacacatgttccttgatattattgatctcattcttgcaacatcagcatctgtcctggtggg

SEQ ID NO: 393687 - DNA, 603 bp, Homo sapiens
tgtgtattaatgacttgtgattccaaaatgtggcccattattcggaacttcagttctttctttttcttttagaaaattattcttaaaaagagaagctaaccatttcggagggattaaataggccctcaagtctggaagacataagttagaacttccaggayttttttttttttttccgagacagagtctctcactggctggaatgcagtggcgcgatctctgctcactgcaacctcgccctcccaggctcaagtgagtctcatgtctcggcttcccaagtagctgggattacaagcacgtgctaccacacctggctaatatttgtatttttagtagagatggggtttcaccatgttggccaggctggtctcaaactcctggcctcaagtgacccgcccgcctcggcctcccaaagtgctgggattacagcactgctcctttcctcaggacattttttacaaagatatgcattgtagggaagctgtatagggggtgcactggtgtgtatgcttgtgcacatgtgcgggtgtatgtgtgtataaatctaggcttttattctggcccatctccccctttgagatgtggttttcaataagcaggctc

SEQ ID NO: 393688 - DNA, 528 bp, Homo sapiens
ctgtgctgtacctagattaaattacttactttagttttccaaaactcatacatgttcacaccttcatgtatttgcttatggtattatattccctaaagttaccctgattcctcacctaaagagttttgcttcatctttcaaaactaattcttggccggttataatggcacatgcctataatcccagcattttgagaggtcaaagcaggtggattacttgaggccaggagtttgagaccagcctggacaacatagcaagaccctgtctctacaaaaatataaattgaaaattagccaggcatggtggcacatgcctrtagtcccagttacatgtgaggctgaggtgggaggatcacttgagcccaggaatttgagactgcagtgagatgtgatcccaccactgcactccagccttgggtgacagagtaagaccccatctcttctgaaaggtccctatgaccatccagaaagaactgatcattctcccactcctgtctttgttttttgccttgtgcagtctcctataact

SEQ ID NO: 393689 - DNA, 600 bp, Homo sapiens
ctgtctggcatcaaagcccattaacatgagatttctttcccaccaatttccctcccaacttcacaatactgactttatacacaaaagttttacttggagtgaaggccaggtgtgggaaatttaaagacaaaaagccatttaaaaatatctgcagagtggaagaaagagcacaagaccaggagtcaaaagatttgagttttactcctacctgagtcacaacatcactgtgagaccttgaatagttcacttcacggctctgggcctcagtcctcttacrtgccatagagaatcatatgtgccatgcctatttctaaggattatttgaagatgaaatgaatctatttggaagtgttcttcgaacaactgagagctgaaagcatagatgtgtgtctgtggaggtgtaggactccaaggattaagtattgcattgccaagcaacctgagacaagcagcatcttggcacagagtaaaatcgcagctgcctgctgaaagcttgtgcatcctgccagaccacgaagcagaagtttggatggaggaaaaagatttttaaagtacttgcagcatttgagtttcccaaagagtaggatttctggcccaagt

SEQ ID NO: 393690 - DNA, 600 bp, Homo sapiens
ctgtctggcatcaaagcccattaacatgagatttctttcccaccaatttccctcccaacttcacaatactgactttatacacaaaagttttacttggagtgaaggccaggtgtgggaaatttaaagacaaaaagccatttaaaaatatctgcagagtggaagaaagagcacaagaccaggagtcaaaagatttgagttttactcctacctgagtcacaacatcactgtgagaccttgaatagttcacttcacggctctgggcctcagtcctcttacatgccatagagaatcatatgtgccatgcctatttctaaggattatttgaagatgaaatgaatctatttggaagtgttcttcgaacaactgagagctgaaagcatagatgtgtgtctgtggaggtgtaggactccaaggattaagtattgcattgccaagcaacctgagacaagcagcatcttggcacagagtaaaatcgcagctgcctgctgaaagcttgtgcatcctgccagaccacgaagcagaagtttggatggaggaaaaagatttttaaagtacttscagcatttgagtttcccaaagagtaggatttctggcccaagt

SEQ ID NO: 393691 - DNA, 650 bp, Homo sapiens
tctggatgggtgactttgagtctctcattcagcctctgtgggtgttggtttttctatgtgttaaataagcacatgaaaatagataatattcaaactatttttggctctaaaattttggtctatgttcaaaaaaaaagtgggagagggagaactaaaatgtgagagaatgagactcatctaggctctgtcaccctcttattctacaaccttaaccaagtcctgggcctcagttttcccaaaggttaaaaaaaaaagaaatcattgctaactcttaaatttactgtgcaccagacactaatctaagccttttagttcctatagccctacaagttagacatactatcattatattaatatatatttatagagaggaaactgagaggtacagagaggttaagaacatgttcaaaagccacacagctggraagaattggaactggacttcaagccaggccatttgaccccagagtccgtacacttaggcatgacattagaatgtctccaaaagggttgaattagatgatctctaaggacccttctggcttaaacattctataggtctatgattctaaatcatcttgtgccatcttactttcccctctcctctataccagcctaccttctcccctcctcacctcccacgtacctcc

SEQ ID NO: 393692 - DNA, 560 bp, Homo sapiens
cacattttctttattccctcatcattgatgggcacttacattgattccatattgtggctatggtgaatagygctgcaataaacatgaaagtgcagatatactgattgccctttttttttttgggatagatacccagcagtgggatgctggatcatatggtacttctatttttagttttttgagaaatatctatactgctttccaaaatggctgtactactttatgtttctacaaacagtgtatgagcattcccctttctctacattcttgacaacatttgttatttttcatcttcttgataatacccattctaactgaggtgagatagtatatcattgtagttttgatttgcatttctctgatggtcaatttctctgatggtcaatgattttgaacactttttaataaacctttttgccatttgtatgtctacttttgagaaacatctattcaggtcttctgctcatttttaaatcagatttttttttttttttgctgttgaattgtttgagtttcttacatgttctggttattaatccattgtcagatgggtagtttgc

SEQ ID NO: 393693 - DNA, 560 bp, Homo sapiens
cacattttctttattccctcatcattgatgggcacttacattgattccatattgtggctatggtgaatagcgctgcaataaacatgaaagtgcagatatactgattgccctttttttttttgggatagatacccagcagtgggatgctggatcatatggtacttctatttttagttttttgagaaatatctatactgctttccaaaatggctgtactactttatgtttctacaaacagtgtatgagcattcccctttctctacattcttgacaacatttgttatttttcatcttcttgataatacccattctaactgaggtgagatagtatatcattgtagttttgatttgcatttctctgatggtcaatttctctgatggtcaatgattttgaacactttttaataaacctttttgccatttgtatgyctacttttgagaaacatctattcaggtcttctgctcatttttaaatcagatttttttttttttttgctgttgaattgtttgagtttcttacatgttctggttattaatccattgtcagatgggtagtttgc

SEQ ID NO: 393694 - DNA, 586 bp, Homo sapiens
tctccttgtggaacatagaaaaggagtgaagaaaggtagttttggtctcctgcctaggccccacaatctttcctagtggacccaaagctcagggataccttgggttgcaatacttcactgggtatggtaggctcagtgaagttgttgatcctcagcggggcagtttattctgtttttaaaactgtagtcagtttctcttcaaccattatgcaagaggatatgggagaagccacacatcaagagrcaccttttggaaatctaccagcaaggttgatggagcaacctggaaatacaaggctaacagcagacaagggttccaaaaggcctcactcagacctgtctttctgcttctctcatgcggaggttcacagctaccttactgctcaaaaagggactttcttctcagatgagacctcctgactacctccccaatctggcagtttgacaaaattccgtagattttaaggtgctcatggtgtgaaagtgttgggaaccttccagactgagtctctttcagttcttcaagagttacacgcttgttatctgcaggcctttgcccatgtggtcatctcaccttggaacactc

SEQ ID NO: 393695 - DNA, 569 bp, Homo sapiens
tattgtctctgtagcccacaagtttaacctttatcttgatttctaacagcacataataattttgcctgtttctgttcttcaaatgtagttagcgttttatatctgcamgttctgcatccacagattcaggcaaccacagattgaaaatattaaaaaaaagacacaatgataaaaataatataaattaaaaaatacagtatgacaactatttatatagcatttacattgtgttaggtattataagtaatctagagatgatttaagtatacaggaggatgcgtgtaggttatatgcaaacactatgccatttaatataagggacttagacatctgtggattttggtgtctttggggggtcctagaaccaatcccttgcagctactgagggacgactgtaaatggaattatctaatatatgtatgtgtcttttgtgtttgatgagctcccttttaaaatataacttaggatttatgcttcttgtatgccgtgataagaacacattaaaaagataataaaaaatcttaaagggtatgtagatgaaaaaagtaggaaaggaggtaatattaaat

SEQ ID NO: 393696 - DNA, 569 bp, Homo sapiens
tattgtctctgtagcccacaagtttaacctttatcttgatttctaacagcacataataattttgcctgtttctgttcttcaaatgtagttagcgttttatatctgcacgttctgcatccacagattcaggcaaccacagattgaaaatattaaaaaaaagacacaatgataaaaataatataaattaaaaaatacagtatgacaactatttatatagcatttacattgtgttaggtattataagtaatctagagatgatttaagtatacaggaggatgcgtgtaggttatatgcaaacactatgccatttaatataagggacttagacatctgtggattttggtgtctttggggggtcctagaaccaatcccttgcagctactgagggacgactgtaaatggaattatctaatatatgtatgtgtcttttgtgtttgatgagctcccttttaaaatataacttaggatttatgcttcttgtatgccgtgataagaacacattaaaaagataataaaaaatcttaaagggtatgtagatgaaaaaartaggaaaggaggtaatattaaat

SEQ ID NO: 393697 - DNA, 442 bp, Homo sapiens
caggaagagttctttaccgcctcttaactgcctaaatatagagtataaatttcccctttttgcaaaggaaaggtacatttataaaggaaatttacatttgtaaatgtgtctcctcccaggaagaaagctactccttgggacagctcttataacttcagagcctcttacttggatcactaaacagctcttgkgtgtcacacaatcccccctcatcttcccacaacttacctcttgtttccagaagcccaaaccccacttttctgctcccagaagcccaaacctgctttttccttgtttaccttaagatggtatacaagtcttaatcatctggtcacttccttaagttttcatttctttgtgaactctgctgcatgtgtatataattaaacttattttttccccctgtttcttattaatttgattccagggtccagccagtaaa

SEQ ID NO: 393698 - DNA, 549 bp, Homo sapiens
ctctgttgcccaagctagagggcagtggtgctatcatagttcagtgcaacctcaaactcctggtttcaagtgatcttcccacctcagccttctgagtagctgggactacagtctgaccccactgtgcctcacttaaaaaacaagacaaaacaaaacaaaactgtagagctgggctcttgccatgttgctcaagctggtctcaaattcttggcctcagtcaatcttcctgcatcagcctctctgtgcctgtagggtgtgtgtggggttacaggagtgagccaccacacccgaccaagatgttttattacaatatcaactacctacttggcatttgatgtctaagaaacattcaagctcatcatggccaaagcaaaacttttgatttacaactgctttgccccacaacttatctcttggtcctccccatttaataatagggcactgtaattcacccacgtgctcaggccagacacctaggagtcaccttggatttctcgacrttgcttattcctgcatcaggtaggctctcccctctgtctctcctgtcac

SEQ ID NO: 393699 - DNA, 681 bp, Homo sapiens
tggtggcaatcttaacttccagtttaatggaatcgttgttgtgtctcctggtggcagccttccttcctctggaactaagacctttaggccagcagaacataatgtcgtgggaacaggagcaaaaattttctagtggatcactaggggtgatggtgagtggtgccatttccacttccacttccatcccttgaatcctggacccacgaatcctggctatgggagaaacagtaccatatattggatgctgatttagagcatacacggccttctggataactttgtcccagccctgcaaagtattgtcacctcactggtgttgtaattgtgacttcaaaaggccattccaccactcttatcaatccagctgcttcaggatgatggggaacataaggccagtgaactccataagcataagtctactgctacacttctttagccataaagtgagtgccttggtcaggcaatgctgtgtggaataccacgacagtggataaagcattccgtgagtccacagatggtartcttggcagaagcattgtgtgcaggataggcaaatctatatccagagtaattgtctattccagtgaggacaaacctcttccctttccatgatggaagaggttgaatatattcaacctgccaccaggtaactaatcaccatgagtaatggtgctatatcaa

SEQ ID NO: 393700 - DNA, 650 bp, Homo sapiens
tctggataaggaaggaagcttaagatgcagaatattctgtgatgtgcactatccaygaagaaaagcaagctgtaaaaagcaatttattttttcaaagttaattgttaccaactaaaactcaatacacataagaaattcacttcacagataaaggcatggcataagattcgaactgtctagtaactttgttgaagtgaagtaatgttttccactactcaattagcaatattttcttttaaaatactagtaactaaagttaataaatatatggttaaatcagtctatccaatcattcttagtatcagggtaaattaaattaattcttgtggaaagaattatccagctggaataagtaggtctaaagtgactaatccactccaccatcccaatctccctaagcttttggatcccttcctcttcattaaaccaagggagatcaggcatttccatcttgctcacagtgggctatcttttaatccatatttcagctaactaagcaaataaactattagaaccttttttttttaactccctgagctgcaacattaaaagaagagtccctactcagtgggcccaaatcaacaaattcagcctgatccaactctgttccttccaccattatcccatacccttaatacccattcccaatt

SEQ ID NO: 393701 - DNA, 563 bp, Homo sapiens
tcttgggcagctccaaccctgtggccttgcagggtacagcctccttcctgactgcttccatgggctggcattgagtgtctgtggctattccaggtgcatggtgcgagctgtgggtggatctaccattctggtgtctggaggacactggccctcttctcacaacttcactaggcagtgcctcagtagggactctttgggggggctctgaccccacatttcccttctgcactgccctagcagaggttctccatcaaggctctgcccctgcagcaaacttctgcctagacatccaggtgtttccatacatcctctgaaatctaggcrgatgttctcaaacctcaattcttgacttctgtgtactcacaggcccaacaccacatgtaactaaccaaggcctggggcttgcaccctccaaagcaatgtcctgagctgtaccttggccccttttagccacagctggagctgaatcagctgggatgcaaggcactttgttctgaggctgcatagaggagagggggccctgggcccagcccagtaaaccatttttccatcctgggcctttg

SEQ ID NO: 393702 - DNA, 566 bp, Homo sapiens
agcaaagagagattattcacccttcctctgcctttttgttctattttggccatctacagattagatgacacctacccttactggtgagggtgggatcttctttactcagtctacctattcaaatgctaatctcttccaggaacaccttcacagatacacccagaaataatgtttacaccagatatttgggcatcccttagctcagtcaaggtgacacatgaaattacccatcctatctagtttggctgatatagtagataaaagataatttggagcgatgctacactgctaaaattgtcagtgacacctrgagtaagaggtaaaacattgtagatgatcagaatcactggttctctggaagaaagcaaaaccttctccccatcagaatgtggagaatctgtgatttttccaccttcattctacatttgggaaaaatcaagacagagaggaaagtgacccatccgggttcacaaaaccatcaagcagagatgggtctaaagtcccttccctgcagtgaaagcaactagagttcagcaagttcacactaaagtagaagatgcaagctt

SEQ ID NO: 393703 - DNA, 569 bp, Homo sapiens
ctttgtgacaggctttaatcctctctccccaactacattcactggtctgtcgtcttctcgatcttgtatgatcacatgtggaaagcaaatacgagttaaagggtaatcacatagtaggggtactcagtacgtgagcacccagcagatgtcagacactgggctgagcactggatagagaacagcaaatggagctcctctttcctcaaggtacttacagacatagagcggaggattcaaaagaaagagaacaaatcaactaaaattgtaacaaggcaagatagcagtttattgggaataaatgaagaaaaccatgaaatactttcttaatgaaaaatggaaggcctggcacagtgactccygcctataatccgagcatcttgggaagccaagacaggaggattgcttgagcccaggagttcaagaccagtttgggcaacatagtgagaccctgtctctacaaataataatttttaaaaattatatgagtgtggtagcacatacttgtggtcctagctgctcaggagcctgaggcaggaggatcacctgagcccaggaggttgaggctgcag

SEQ ID NO: 393704 - DNA, 587 bp, Homo sapiens
ctctccacagtcgttcagtcttctcatattaagttggaattccacactggcagagctagagggctcttggagttcatttagtccagccctgctattctaaagagaaactaaagcccagagaagaacagcagctatttgtccaaaaagccaaggctagaaaaacaatacttgctccagtctgaggtacctcacaaaaaacaaaaatgagattttatacagggctgcagttgggataagaggatcaggaattgtttacctcacccctgaactaccactccctgtgctcagtgattcttttgacaggaagcaaacaaagtcttctgctcttcggggagaatgaagaatgttgggactgacatttattgagcgctttgtatgtgccagccactgtgctccttgcttcatattcatgatctcatttaatcttcaccacaacctaataacctggcttctctgagcaccagtttcctcatctgtaagatgaccttcctaaggtcacatagagtaagtttgtttgccttttaaayagcaatggtgctggggagtggggtggattttggaaccacttggataaagacacacaaaaa

SEQ ID NO: 393705 - DNA, 499 bp, Homo sapiens
ctcattacatcacgagctctgatctggcctatttgccttcatgtttccaagggccactccccagaggagactcctaaacaccctgaaaccttagagagctttgcccagcctccttggccatttgaccctgcttcatactttataggccatgttaaggaaaaagattgaaattacagtggacctggagccaggaaaccccatgttgaagcccttgatttgccactttgaggcttagaaaaattagagtgctacatagttatcgtttctgcatttatcaggggaagagatttggagtcaggcagcttactgtactggctccgctcttactatgtgacatctgatggatgartctctcttcgaagcctcggcttcctcatttgtgcaatctctctaggctacccctgcttcatgggagtattgttgtattcagtgttagcatgttttcaatataattagtacagtacctggcacagagtacatggttaatacattttcttta

SEQ ID NO: 393706 - DNA, 499 bp, Homo sapiens
ctcattacatcacgagctctgatctggcctatttgccttcatgtttccaagggccactccccagaggagactcctaaacaccctgaaaccttagagagctttgcccagcctccttggccatttgaccctgcttcatactttataggccatgttaaggaaaaagattgaaattacagtggacctggagccaggaaaccccatgttgaagcccttgatttgccactttgaggcttagaaaaattagagtgctacatagttatcgtttctgcatttatcaggggaagagatttggagtcaggcagcttactgtactggctccgctcttactatgtgacatctgatggatgagtctctcttcgaagcctcggcttcctcatttrtgcaatctctctaggctacccctgcttcatgggagtattgttgtattcagtgttagcatgttttcaatataattagtacagtacctggcacagagtacatggttaatacattttcttta

SEQ ID NO: 393707 - DNA, 524 bp, Homo sapiens
gatgcctggtacagggctgccatttatgaagtgtgtctcattacatcacgagctctgatctggcctatttgccttcatgtttccaagggccactccccagaggagactcctaaacaccctgaaaccttagagagctttgcccagcctccttggccatttgaccctgcttcatactttataggccatgttaaggaaaaagattgaaattacagtggacctggagccaggaaaccccatgttgaagcccttgatttgccactttgaggcttagaaaaattagagtgctacatagttatcgtttctgcatttatcaggggaagagatttggagtcaggcagcttactgtactggctccgctcttactatgtgacatctgatggatgagtctctcttcgaagcctcggcttcctcatttgtgcaatctctctaggcyacccctgcttcatgggagtattgttgtattcagtgttagcatgttttcaatataattagtacagtacctggcacagagtacatggttaata

SEQ ID NO: 393708 - DNA, 524 bp, Homo sapiens
gatgcctggtacagggctgccatttatgaagtgtgtctcattacatcacgagctctgatctggcctatttgccttcatgtttccaagggccactccccagaggagactcctaaacaccctgaaaccttagagagctttgcccagcctccttggccatttgaccctgcttcatactttataggccatgttaaggaaaaagattgaaattacagtggacctggagccaggaaaccccatgttgaagcccttgatttgccactttgaggcttagaaaaattagagtgctacatagttatcgtttctgcatttatcaggggaagagatttggagtcaggcagcttactgtactggctccgctcttactatgtgacatctgatggatgagtctctcttcgaagcctcggcttcctcatttgtgcaatctctctaggctaccccygcttcatgggagtattgttgtattcagtgttagcatgttttcaatataattagtacagtacctggcacagagtacatggttaata

SEQ ID NO: 393709 - DNA, 614 bp, Homo sapiens
agacactattgttcccactttgcaatgagtttaaaaagactctcattgtttaagtgacttgcccaagacctcacaggggcagaaccaggaagtgaaccttggttggtctgactctagaatctcctccttttcactctatcgcatgggacagagttgtggtcctgcctccttcccaagatttctgcaccccatgtgtcattgttagatcctctgctaactttagattccagtaagatagccctgttcctgacacactgtagatacacaaacaaaatttaactgaaatgaaaatgtgatgaagtgygtgacattgggcaggacccaggtttttctattcataaagtgaggaggttgatgagatggttgatgagagttgtatgctttagggcagtggttctcaatacagactacacatttgaatttcttggggagcttttcaaaaacaccaatacccacatatttttctagaagttttggtttaatcaatttggagagggtcctagatgtagtattttataaaaatgtaccagtgattctaacaggccggcaggattgagaagtactgatttagagttccccaacccttctattcttgcaccttgttggtaaaagtg

SEQ ID NO: 393710 - DNA, 508 bp, Homo sapiens
gcctttgcctatttgtgcagcatcccgatgatcactcctctgcattctcaatgctcccactgcagagacatgtcatgttttaatagccaatgctctttcttacctctgtgctttctcactcatttcctctgacgggaacacactcttccctcctctgctcctgaccattctcacatgagtaactctgagatgatccctcaggtctcagcttgattgccattttcttgggaacctkcccaagtctgcagtgggggccctaatctgcatgttttgaccatagtgcttattacactgcctgcttagctgtgagttccatgtgggcagggttgatgtcttatttccttaggcatccagtgcccagggtaatagctggcacatggtagacatataataaatatttgttcagtatcaagtgatgagaagaatgcaatcttttccctttctcttttttacagtgtttataaggcttttgttccctctcaagtaaattactatctgaatgtaagtt

SEQ ID NO: 393711 - DNA, 616 bp, Homo sapiens
gctgggacttaggagactcctgagtaatgaatgtggcagacaggatccatctatggaggatttttggttaggatctttcttaaaggactggatctttagcgctcttaggaaaaggtctgagcatccagcatggctcctaagtcccttcactgtagggcctttgcctatttgtgcagcatcccgatgatcactcctctgcattctcaatgctcccactgcagagacatgtcatgttttaatagccaatgctctttcttacctctgtgctttctcactcatttcctctgacgggaacacactcttccctcctctgctcctgaccattctcacatgagtaactctgagatgatccctcaggtctcagcttgattgccattttcttgggaacctgcccaagtctgcagtgggggccctaatctgcatgttttgaccatrgtgcttattacactgcctgcttagctgtgagttccatgtgggcagggttgatgtcttatttccttaggcatccagtgcccagggtaatagctggcacatggtagacatataataaatatttgttcagtatcaagtgatgagaagaatgcaatcttttccctttctcttttttacagtgttt

SEQ ID NO: 393712 - DNA, 559 bp, Homo sapiens
caaggctgcagaattgtctttctggtcaatttcactacctatagatattcccgtttcttttcatgccttttaatatattaagatcctaggcagaccgggccaaggatttctgtcccctggtctgaaagctagacatttatcacttagcacccaccttttaaactgtcattcaaaacttgtggcctaagacagaatggaaaggaatgactcttagacaatctcagtggsaagaaggcccttagcctctaacccaggggttttcaaactattttctacccatatgccccaggggctctagagagaaaagaaaagggagagaccaagagaagaataggggataaggcctgagaaggaaagaagaaaataggctagagagagagaagagaggagtggaagagagaggaagggaaggaagagaagaagagggaagggagcaagaggttagcctacagctctaggaaatgaacaatggcaactttcctgcccatgagccagtgtgttatttggggctttgaactcctcaggacagtatgctttatcatctggaataataaacaca

SEQ ID NO: 393713 - DNA, 537 bp, Homo sapiens
attgctttcagcctctacattgtggggtgatttgttatgtagcaaaaactgcctgatacacattataatgacacatctcaaaggtggtgcttgtttcccacttggctggtaatcttcatgtgatgagccatttttgctgcagaaggaaacaggtattgagtacttggaaccactgcaggaatgacagcttcctcataaggttgccagcaatcctaagagggctaccaggtatggccacccaagttatgaacagcactattctaggaggttcttgaacatctgtaaagtaatatatactmtatgagataaatggtgccccctggatttgtgcaatatgagtggcccttaggattaagcaacataatatatgtaaagtctctggcatatagttgatgtgaaataaacatttttataataatttcttggtatagaaatattttattctgttgaactttataattaatacttaattatcaaataaacttccattttctcatcagagaagtgtctggagagtgataatagtggcggtcgtgg

SEQ ID NO: 393714 - DNA, 594 bp, Homo sapiens
aacctttggggaatcctaattgtgtatcttgaaagtcaggcaaagtagagctttgttcccacgcagaggactcagaggtgaatttactttcttcctaatcaggaaagaattgcagatgggtgggcaaggttgggccagcttcaagcctggcagataaccagttaggcttagctgtgtctatcctggtgccaaaaaatgctcatccacagagcagggctttatcctcagggaacgagggaacagctgcccccagctgtgcttgccacatgttactttgctttgttgagacaagcactgcatgtgacctgctgcccagcratgtcccttcctctgaggctggcaggggctctttccagagcacccctcctcaaagggacaaaacagtatgattcaggtaacagccactgatctactcttcagcaccaggctgtttgatctgcgcttgctcactgaatcttcaactagcttaagaaatagccacattgtgcctatttaatacacgggggaactagtaccagcaaatctgtgatgctagaattatttgatttatctcagctttaaaaactgaattctttcttctctatagtagcatag

SEQ ID NO: 393715 - DNA, 594 bp, Homo sapiens
aacctttggggaatcctaattgtgtatcttgaaagtcaggcaaagtagagctttgttcccacgcagaggactcagaggtgaatttactttcttcctaatcaggaaagaattgcagatgggtgggcaaggttgggccagcttcaagcctggcagataaccagttaggcttagctgtgtctatcctggtgccaaaaaatgctcatccacagagcagggctttatcctcagggaacgagggaacagctgcccccagctgtgcttgccacatgttactttgctttgttgagacaagcactgcatgtgacctgctgcccagcaatgtcccttcctctgaggctggcaggggctctttccagagcacccctcctcaaagggacaaaacagtrtgattcaggtaacagccactgatctactcttcagcaccaggctgtttgatctgcgcttgctcactgaatcttcaactagcttaagaaatagccacattgtgcctatttaatacacgggggaactagtaccagcaaatctgtgatgctagaattatttgatttatctcagctttaaaaactgaattctttcttctctatagtagcatag

SEQ ID NO: 393716 - DNA, 561 bp, Homo sapiens
aaggcccaggatggaaaaatggtttactgggctgggcccagggccccctctcctctatgcagcctcagaacaaagtgccttgcatcccagctgattcagctccagctgtggctaaaaggggccaaggtacagstcaggacattgctttggagggtgcaagccccaggccttggttagttacatgtggtgttgggcctgtgagtacacagaagtcaagaattgaggtttgagaacatccgcctagatttcagaggatgtatggaaacacctggatgtctaggcagaagtttgctgcaggggcagagccttgatggagaacctctgctagggcagtgcagaagggaaatgtggggtcagagcccccccaaagagtccctactgaggcactgcctagtgaagttgtgagaagagggccagtgtcctccagacaccagaatggtagatccacccacagctcgcaccatgcacctggaatagccacagacactcaatgccagcccatggaagcagtcaggaaggaggctgtaccctgcaaggccacagggttggagctgcccaaga

SEQ ID NO: 393717 - DNA, 530 bp, Homo sapiens
aataaataagattgttattatacacaagtgacataatggtgtatgtggtacatgtagaaaatctaaatatatggatgaattattagaagtgatgtgaatccagtaagaccactaagttcataaggtcaacatacaattaaaaataaatttaaaaaaatctaaaaataaattttaaaatatagatgtatagtctaccacacatctagtcaatatacattaaaagtaaattttttaaaaaattaaaaatatagatgtatagcctactacacagctaggctacatggtayagcctattgctcctaggctacaaacctggacagcatgttactgtgctgatactgtaggcaattgtaacacaatgataagtatttgtgtatctaaacatatctggacatagaaaatacacagtaaaaatgtggtataaaagattaaaaatggcacatctgtataaggcatttactgtacaaggagctttcagactggaagttgctctgggtgagtcaatgagtgcatagtaagtggacatgaag

SEQ ID NO: 393718 - DNA, 613 bp, Homo sapiens
cagcaccaaagatgccaggggcgcctcacggatccccccgggggggcctccttgagggggagcaggaggaggggccaggctgagggctcaggctgtgtgaaagacaccctggttttgaaaagggagaggggctagagaggtggggcccgagggcctggtggggcttccagcaggggctggcttatgttttcaagcttactctggggtctggagaccactgccgaacatacgccctccaagcagtggccacaagaagaccatgaggagctcgggcggggtctggggaaagggtgggggctgccacagacagaagtgggttcgtcgaggctgcagaaggctgggtgggagtggaggaggtgaygtgaccaggatggggtcggtgacccctgcacaggggctacaggggatgaaaggggagggagcagcagactgctgagattggggtggcattggccctggtgggactgactgtccccggctcagtctccctcctccttggctggcttttctggcagacagtggcatggtccagagctgcctccctggggagggaaagggcatccccaagtcactcctgaggctgtgtccccagagtgtccaccgggctgtgcca

SEQ ID NO: 393719 - DNA, 602 bp, Homo sapiens
tcagtaagcttgcagtctggcagttggattaaaaaaatgaccatacgaagccgtgataacagcctctaggagggaactctactatgtggtggagatatgtgtccccctgcaaataccaagaaagacagttaattagtgtccattacagaatgttcttctggtgtcctttttaaagagattcagtcagtctttaaagatgatgctattgctgctactgctaataataatagtgatagctaccacttactgtttactatgtaccttgtgctaaacacttgacataagttaactcgtttaatcttaaaccarggaagtagataatgattctcattttacagatgaagaaactgaaatagacagagatgaagaaatgtgcctaaggttacgcggtttagtgaactgggatcagaacctgggttctctggccttagactataaaccatagataggaattgagcacatttattaatcagcattgcaaggctggtggaattttgataaacacccaaaccagattcttttctgcactagtgataccagacagattttggaaatataaacaggatagggtgcattaaagttcactcacatttgttcagtta

SEQ ID NO: 393720 - DNA, 555 bp, Homo sapiens
ctgttctattcatcatgctatttgttgcctgaataccttgggttttttttcattgtgttgttgttttataggtcctgtgagatttatgctttaaggaaattgtattttggtgtgatttgaggatttgtttcaagatttagagctccttttagcaattgtgtagtgctggctttgtagtggtgaattctctcagcatttgtttgtctgaaaaagacatctttgtcttttttgtcttaaaaagtatctttccttcatttatgacactggatacaaaattcttggctgataattcttttgtttaaagaggctaaagataggaccccaatcccttctagcttgtagggtttctgctgagaaatytgctgtttatctgataggttttcctttatagattacctggtgcttttgcctcacagctcttaagactcttcccttcgtcttgactttagataacctgatgactgtatgtttaggtgatgatctttttgcaatgaatttctcaggtgttctttgagcttcttgtatttggatgtctaggtctctagcaaggccagg

SEQ ID NO: 393721 - DNA, 552 bp, Homo sapiens
aacaacagttttcattaggttgttggtatttttgtgtttagtgctctataaaacaataaattgggaaaaatgtcggtgactttatattgtaatgtaagcaaatgtagctgttgagataatttcagtaataaytgtaattgacattttatcataataggctaaatgttataaaattacatttataaaatctgctccattcatcccctgctcccattccagatgctaatatggaacttggcttcttattcacccttttctttgctttcaagccataggttactatgaaagggaaaaaaggaaaggataaacaaaaaatgagagactggcaacaagcatttgttgtggcctatattattaatttacattttgttaatgtttgcattttaacagcaactacagaaggggcaatttttaaacacttaacctgtaaaatgaagctaaggaagtttaaatggcttgcacagcgtctggattatggcgagtcatcaatatagacaaaccgacactataatttgacactccctcacaaagtaaactgtgattatcatatag

SEQ ID NO: 393722 - DNA, 552 bp, Homo sapiens
aacaacagttttcattaggttgttggtatttttgtgtttagtgctctataaaacaataaattgggaaaaatgtcggtgactttatattgtaatgtaagcaaatgtagctgttgagataatttcagtaataactgtaattgacattttatcataataggctaaatgttataaaattacatttataaaatctgctccattcatcccctgctcccattccagatgctaatatggaacttggcttcttattcacccttttctttgctttcaagccrtaggttactatgaaagggaaaaaaggaaaggataaacaaaaaatgagagactggcaacaagcatttgttgtggcctatattattaatttacattttgttaatgtttgcattttaacagcaactacagaaggggcaatttttaaacacttaacctgtaaaatgaagctaaggaagtttaaatggcttgcacagcgtctggattatggcgagtcatcaatatagacaaaccgacactataatttgacactccctcacaaagtaaactgtgattatcatatag

SEQ ID NO: 393723 - DNA, 570 bp, Homo sapiens
tcttcatgtacttaaacaatgcacatgttcatatctaaagatacagtggcattttaccagacagagaaaatgttctagtcctaagaaaaaatatttggatatattgcaaataaaaatatctactctaaaatcccaatagcttctttaattgttgatatatgaattataatgggatctctatctgtgtggtaatcctatatattggggatgtctagacattggcatttttcttctttggactgattcctacttctcttaaagttcaactcaagtgtcttctattaaaagccttttctgaaccccctttcaggtggcatagatgctacccactggggttcctttaatataatatacacatctttaccactgtgttgctatattctctttttatgcaattgtcttccccactagaccawgagcttcttgagggcagagacgtttgtttttttgtatcaaagaactcatttccagccccagtgcttggaacataatgggaacttgcagaagtccctggcatgaaggaaatgaatgacaaagaaatatggagagaatgtgaggaaggtaagcaga

SEQ ID NO: 393724 - DNA, 571 bp, Homo sapiens
ttctcaccttcatttacaatagacttttgaaatggccatctcaaagcattttacctttctgttaccccctgccttggctgtctagttcaaactctctcatttctctatcaacctttgcacagtacttccttcttttaaccaagttgaaacctcgcattttcttctatggccttagctttagatgatgatgagctagaggaagaagaagaggaatgagaagttgtgaggtttccaggtcttctattcaagagcccacctcaacagcttcattatgttgctacttttctgcctcccacctacaaagatgaagaagatgaggaggaagaggaaaaagtattttatagagaactgactgctttgcacaattgtggtgtgtaaaagaatttaccttaytatacttacttctatttttagataatttactacatttttgtagacaattttactatcaatatttaatgccatcatatgttttaacatgaagtttgcaagaaaagtagggccaaagtcacttcttcagagcttcctatgaaatccatcatcttttgtcttttttatttccttttgtaca

SEQ ID NO: 393725 - DNA, 593 bp, Homo sapiens
ttaatgacatattctactttatatcattttactgatgattgacctgtttgtggactgttttgtctgttttctctcagtcttttgtataatgaacagtcacttataagcacatttagagccaaatctttgaatatcttcagggttatttccatagaatcaatcagcacacataggattgtgtttattgtgattatttacatcagaaataatcctgttacaaattgtcctccagaaagtatgtatttaaattttcatcatcaatatgttagaaaaatctattttttttcatagagacatgatctatgttgccttttttatgttcttcacgcaaaacctatacattgcstattatacttgttcctcaacttgagacgggactatgtctggataaacccattgtaaattgaaaatactgtaagttgaagatatattttcacagtccctgtacatttttgactatttctgtatgttttcaacttatgatgggtttatccagatgtagtcccatcataagtcaaggagtgtgctgaaggtgtatcaccttgtcaagccaaaagattgtaaatcaaaccatgtaagtcagggacttcctg

SEQ ID NO: 393726 - DNA, 593 bp, Homo sapiens
ttaatgacatattctactttatatcattttactgatgattgacctgtttgtggactgttttgtctgttttctctcagtcttttgtataatgaacagtcacttataagcacatttagagccaaatctttgaatatcttcagggttatttccatagaatcaatcagcacacataggattgtgtttattgtgattatttacatcagaaataatcctgttacaaattgtcctccagaaagtatgtatttaaattttcatcatcaatatgttagaaaaatctattttttttcatagagacatgatctatgttgccttttttatgttcttcacgcaaaacctatacattgcctattatacttgttcctcaacttgagacgggactatgtctggataaacccattgtaaattgaaaatactgtaagttgaagatatattttcacagtccctgtacatttttgactatttctgtatgttttcaacttatgrtgggtttatccagatgtagtcccatcataagtcaaggagtgtgctgaaggtgtatcaccttgtcaagccaaaagattgtaaatcaaaccatgtaagtcagggacttcctg

SEQ ID NO: 393727 - DNA, 620 bp, Homo sapiens
aactccttaaccatatgtaactccttmaccttatgtagtttgataactggaggaccaagcagaagctgtgtcagttatgaagccttcccccatctaaaatctgtatgttgttctcattgaatgtaaccacgaaatttagctgggcaagagtttgagactaagaagataaataagaaatagatgtctaaataaagaatagaggaattttgagaattatgaagtattagaaaagagagatggggatgaaaagcaagatctagaggagtctgttttgattcttagataattctgagatgtgttcacagagccagtaaaacgacaaataataatatatgtgaaaggaggcttaaatgcattaaaattctttaagtgaaaactatttaaatcattaacgtatttcaaatgtgacctctggtgaattatgtattattttcctttcatttccctcgtcttttgaatcagaataacaataatgcttatgttgacaaattgttgtgaggacaagggttacaatattaaaaaagtcttctcagggtgcatcttcaacaactagtaacttttattatgccaattaatttttaaagtatccagatatcatttttgaaaaacttttaaaaaca

SEQ ID NO: 393728 - DNA, 568 bp, Homo sapiens
ttgccttgctttgtctgttgtgagtatatttgcatgaaaacaggtgtgtgacaaaattcaacaytcattacaatgaaacacacccacacttatacacactttattttgcaaatgaagaaataaagagaacttcttaaatctgatttttaaagacaatctataaacatacatatagcaaagattatacttggtggcaaaatgctgaaagcatcctctgaggtcaggaaaacaagacaaggatgctgctttcaccaactttcaatatttcactggaggtccagtctagcctaataagttaagaaaaagacttactggaaataaacatattaaactgctattattcctagatgacatgattatttgtctaggaaatctaaaagaaggtatatactattagaactaataagtaactttagcaaggtcactaggtactatgtcaataaatagactaattgtatttctgtacatcagaaacaaaaatgaatttttaaaagacatttataatcatattagagacctataaaatatcaaaaaccaaattagatgcaagatgtataatgcctctaat

SEQ ID NO: 393729 - DNA, 568 bp, Homo sapiens
actggaggtccagtctagcctaataagttaagaaaaagacttactggaaataaacatattaaactgctattattcctagatgacatgattatttgtctaggaaatctaaaagaaggtatatactattagaactaataagtaactttagcaaggtcactaggtactatgtcaataaatagactaattgtatttctgtacatcagaaacaaaaatgaatttttaaaagacatttataatcatattagagacctataaaatatcaaaaaccaaattagatgcaagatgtataatgcctctaattaaaacctcaaaatattattgagagaaattacagaagacctaaaaaaatagaggcatataccatggccatggattgggaatgatgtatagttctaactcaatcataattaagatttctacagcattttgaatcaataaacttatgctaaaaagtatgaaaaagaaaagatccaagaagagccaagaaatcttgaagagtaagaacagagctgacaactttcaatgctagataacgctatwgtaattaacataatatattattggttca

SEQ ID NO: 393730 - DNA, 523 bp, Homo sapiens
tgacctttcttaagactcaatttctttatatccaaaatgagaataataatatctatctcatataggcttgaatctgtatatggctgaatgtaggcatgacattaattttttgcagagtgtaatatttccgtattttaatatccatcctttaaaatatttaattttgagttttggaagagaatgaaatttgagcacctatatgcarcaagcagactgagtacggaataactaggagagcaggtgaaaaacgtgaatgatgtgggacaaataagaaattctgaacactgtgtgcagcccatcaattgcaatgaggacctggggagttgtaacctatgaaactgtagatgctgttgctgtactgtgaagcactactgctctgacaggctctctgagctcccattccacctagcacacgtggcaataaagtgcagcacatggaatccatattagagcaatagctgcatcttcaaaaaaacgttttaatgacttttctagtctgcatttagaaggatgattttagatc

SEQ ID NO: 393731 - DNA, 556 bp, Homo sapiens
aaataaataaataaactaacaaatagcaggcatcattattgaaagaaacataaaatatctgtttgcagatgacatgattttgtgtatagaaattcttaaaaatatacttttaaaaactattagaactaataaaaattcaacaaatttgcatgatacaagatgaacacaaaaattatattttaatatactagcatagagcatgcagaagtgaaattaagaaacaattccatttaccacagcatcaaaaagaaaaaaatgcataagaacaaatttaataagtgcaaaagtgatatactgaaaactaggaaacatttctgaagtaaraatctaaacaaatggaacgatatctcatgttcatagatcagacatcctattgtttaaatggcaatactccccaaattaatctgcagattcaactcaatccctctctatcaaaaaaagcaaggagtagaacaatgtatattgttctgtattacttatatttccataaagaatgtctagaaacattcacaagaaactaatgaaagcatttatgtatcataatagttgggttgaa

SEQ ID NO: 393732 - DNA, 538 bp, Homo sapiens
ccattctcatactgttataaagaactacctgagactgggtaatttatgaagaaaagaggtttaattgaactcacagttctgcaggctgtacaggaggcatgactggggaggcctcaggaaacttaacaatcctggcagaagggccaaatcaagtgcttggaagccagcacttcttcacgtggcagcaggagagagagagagagaagggggaagtgctacacaattttaaacaactagatcttgtgagaactcactcactatcacaagaacagcaagggggaaatccacccccatgatccaatcacctcccaccaggtccctcccccaacactgggaattagagytcaacatgagatttgggtggggacacagagccaagccacatgagtgcccattgtttagctcccacttataagtgagagcatgctgtatctggttttctgtttctacgttcgttgacaggataatggccttcagctctatccatgttgctacaaaggacatgatttcattctttttttttttttatggctgctgg

SEQ ID NO: 393733 - DNA, 587 bp, Homo sapiens
gcatcatttcatttaatcctcaaaacaaatatttgaggtaggtattattcttcttatatatagataagaaaactaaaatctagagggattaagtaacatgcccaaggtcacacacccagtaaaaaaacaacaacaacaacagaaaaacactcaaagctttttactactgttccactcagcttcccttctgatgagtatggtaatagtaatattttctactattttccattctaactgcacaagttttcaatttagctttaaaagccttttgcgttctagtctgagaaagtagccttgttttcagaatcttaccaatgtaaaagtgtgtacccaatggaaacagatatttggaccacaatacatccctgccctgctctgattccttccaaacgatcccttctagatcatgcctgaagacacaccatctccattttctgtcatttctttgatcatccttgtctctcctgtttgaattgytcaacatcactgcataaagattgaaaaccagactgacagtgatggtgacgaatcttccaatagcctgatggccaaattaccaaagatctgggacaatcctgtagcatata

SEQ ID NO: 393734 - DNA, 587 bp, Homo sapiens
ggttttaatagattttatttctgtattttctcaacattcctaggcaactcccaggataacctgtatggttgttgtttattcctacaagtgtggagaatgggatactataggaaggcccagtagcaagattaagccctggaacagtgtgacattttctctaagcccctcacatgccaccataatgtcaattatcagtcacaggaagcattttagggcaatatggtaagaacaacagtcaattatcaggaaaatgtgccatatagaaacttggtcacattcttgacctccaaatttggcttctacaattgttttytctccatttctaccagctgctttaatgatctgttaatatgttagttattggatccttgatatttgcaatccttccaaatctatagatgagattctgaatattttaataataaattagttctttagggagtaaagttctttactttagttatttagggagtaaagaacaagaatggcattttatgaaagagaacatcaatttcatttttggctttactaactatgcactgtgcatccttaggtaagttatcaactactccaagcttcaaattttt

SEQ ID NO: 393735 - DNA, 579 bp, Homo sapiens
agctcttcaaaatactcaaaaagggaatacttccaaactctttccacaaggccagtataaccctaataccaaagccaaacaaggacattacaaaaaagaaaattataggccagtatccttgattaacataaattcaaagattctcaacaaaatactagcaaaaagaattcaacagcacattaaaaggatcatccaccatgatcaagtggaatttacccctggaaagtaagagtggatcaacatgtgcaaatcaataaatgtgatacatcctattaatggaatgaaaaatgaaaatacatgatcatctcatttgatgcaaaaaaattttgacaaaattcaacattctttcataataaaaactcttaccaaattaggtaaaagaaatgtacctccatgtaacaaaggccatacataagaacctcacagttagcattatacaaaatggtgaaaaattaaaagccttttctctatgatctgaaatgagacataatattagaaatttttcccagagcaatcaggcaagaaaaagacatawaaggcaaccaaatagcaaacaaagaagcaaaactgccaatgttt

SEQ ID NO: 393736 - DNA, 593 bp, Homo sapiens
gccatagcatggtgagagagtggtcacacactctgagttctcaggaaacgcagcttttgacaaacatcctactttatactcctaaaccagaacagttcctataaccagagccaagataaactgtgaccaataatccccaccagtcatttgaaagaaatatatgacagagacttctggctttgggcttggaaatcacccaatcagagcttgactatttcaaccaatgagaamagaagaagctgaattcttcatttgcataaacaaagctgattgagaacctaggtaagaacttttcttattcaagccagaacatccctttgttcttcagagtgcacaccagaggctgcaagctcccagtctgcagattgttttctataaaaaaaataaagattttcttttttccctatagatctcatgatctcttgttaacaccttacatgacaatgttagtaagttaagaattttgagctggggagattaccctgaattatctgagtgggcccaatataatgacaaagttcttataagtgaaaaagggaggcaggagaagagtcagagaaggaaatgtgatgagggaagtagaggttagagtg

SEQ ID NO: 393737 - DNA, 593 bp, Homo sapiens
gccatagcatggtgagagagtggtcacacactctgagttctcaggaaacgcagcttttgacaaacatcctactttatactcctaaaccagaacagttcctataaccagagccaagataaactgtgaccaataatccccaccagtcatttgaaagaaatatatgacagagacttctggctttgggcttggaaatcacccaatcagagcttgactatttcaaccaatgagaacagaagaagctgaattcttcatttgcataaacaaagctgattgagaacctaggtaagaacttttcttattcaagccagaacatccctttgttcttcagagtgcacaccagaggctgcaagctcccagtctgcagattgttttctataaaaaaaataaagattttcttttttccctatagatytcatgatctcttgttaacaccttacatgacaatgttagtaagttaagaattttgagctggggagattaccctgaattatctgagtgggcccaatataatgacaaagttcttataagtgaaaaagggaggcaggagaagagtcagagaaggaaatgtgatgagggaagtagaggttagagtg

SEQ ID NO: 393738 - DNA, 605 bp, Homo sapiens
agaagttcaacctagcttaagtacctagacagctagcctctatgcacagcctcagggcttacctcaacaacccagcctaggcagtgagacttccacctctgtgaatttcagaaaagcatragtgctagacctccttgatctgaaaagtcaaactcggccaaaaagcccacccaatgaccctacctaagcagggaggctcctacctctctgcattttcaataagtgtaggggctagagctgctatatttattcaaatttttggctgcttgactcagccaaaagtccaccccacagctccaccctgacagggaggcaatcctccattgcatatttctaaagagcatagactcttgtcctttccatcccaagtggtgactcccactaaccccagaacaaagcctgtaagcctcgtgcaactgcagataccaaatagcagaatttggttgccagggaacaaattctgtgaccagcctgaccagataccatcacagtatacagtcagtgactttgcctgatagcagagaccagcaaatgatctcgctggaaatcagagcctagcctgaggccccacccaacatcagagcaaaggcagcagcccagacacc

SEQ ID NO: 393739 - DNA, 605 bp, Homo sapiens
agaagttcaacctagcttaagtacctagacagctagcctctatgcacagcctcagggcttacctcaacaacccagcctaggcagtgagacttccacctctgtgaatttcagaaaagcataagtgctagacctccttgatctgaaaagtcaaactcggccaaaaagcccacccaatgaccctrcctaagcagggaggctcctacctctctgcattttcaataagtgtaggggctagagctgctatatttattcaaatttttggctgcttgactcagccaaaagtccaccccacagctccaccctgacagggaggcaatcctccattgcatatttctaaagagcatagactcttgtcctttccatcccaagtggtgactcccactaaccccagaacaaagcctgtaagcctcgtgcaactgcagataccaaatagcagaatttggttgccagggaacaaattctgtgaccagcctgaccagataccatcacagtatacagtcagtgactttgcctgatagcagagaccagcaaatgatctcgctggaaatcagagcctagcctgaggccccacccaacatcagagcaaaggcagcagcccagacacc

SEQ ID NO: 393740 - DNA, 605 bp, Homo sapiens
agaagttcaacctagcttaagtacctagacagctagcctctatgcacagcctcagggcttacctcaacaacccagcctaggcagtgagacttccacctctgtgaatttcagaaaagcataagtgctagacctccttgatctgaaaagtcaaactcggccaaaaagcccacccaatgaccctacctaagcagggaggctcctacctctctgcattttcaataagtgtaggggctagagctgctatatttattcaaatttttggctgcttgactcagccaaaagtccaccccacagctccaccctgacagggaggcaatcctccattgcatatttctaaagagcatagactcttgtcctttccatcccaagtggtgactcccactaaccccagaacaaagcctgtaagcctcgtgcaactgcagataccaaatagcagaatttggttgccagggaacaaattctgtgaccagcctgaccagataccatcacagtatacagtcagtgactttgcctgatagcagagmccagcaaatgatctcgctggaaatcagagcctagcctgaggccccacccaacatcagagcaaaggcagcagcccagacacc

SEQ ID NO: 393741 - DNA, 605 bp, Homo sapiens
agaagttcaacctagcttaagtacctagacagctagcctctatgcacagcctcagggcttacctcaacaacccagcctaggcagtgagacttccacctctgtgaatttcagaaaagcataagtgctagacctccttgatctgaaaagtcaaactcggccaaaaagcccacccaatgaccctacctaagcagggaggctcctacctctctgcattttcaataagtgtaggggctagagctgctatatttattcaaatttttggctgcttgactcagccaaaagtccaccccacagctccaccctgacagggaggcaatcctccattgcatatttctaaagagcatagactcttgtcctttccatcccaagtggtgactcccactaaccccagaacaaagcctgtaagcctcgtgcaactgcagataccaaatagcagaatttggttgccagggaacaaattctgtgaccagcctgaccagataccatcacagtatacagtcagtgactttgcctgatagcagagaccagcaartgatctcgctggaaatcagagcctagcctgaggccccacccaacatcagagcaaaggcagcagcccagacacc

SEQ ID NO: 393742 - DNA, 673 bp, Homo sapiens
ctgtgtaagcctcatggtaaccttaaagcaaaaacactaaaacttattwagtggaagcacaaaacagaaagaaaaagattcaaagcataccactatgtaaaatcatcaaaccaccaaggaagacatcaaaaaagaaagaaacaacatatctataacacaaccagaaaacagtaacaaaacggcaatggtaagtcttcatctgtaacaattaccttgaatgtaaatgaattaaattattcaattaaaaatatattgactgaataaaaaacaagaactagctatatgctgtctgcaagagactctcttcattttaaggacaaacagactaaccttgatgggatgggaaaacatgttttatgcaaatagaaactaaaagagagcaggaatagctatacttatataagacaaaataaactttagtccaaaactgcaaaaagaagtacattatataatgagaaagtggccaatttatcaagaggatataacaattaaaatgtagatatacaccatgtaagagcacctaaatatataaaacacatatttaaaaatctgaaaggagagatagactgtaatacaatgacagtaggagacttcaatatcccatttttaacaatggacatataacttacacagaaaattaataagtaaacatggaatgaaaaactttagacca

SEQ ID NO: 393743 - DNA, 673 bp, Homo sapiens
ctgtgtaagcctcatggtaaccttaaagcaaaaacactaaaacttattaagtggaagcacaaaacagaaagaaaaagattcaaagcataccactatgtaaaatcatcaaaccaccaaggaagacatcaaaaaagaaagaaacaacatatctataacacaaccagaaaacrgtaacaaaacggcaatggtaagtcttcatctgtaacaattaccttgaatgtaaatgaattaaattattcaattaaaaatatattgactgaataaaaaacaagaactagctatatgctgtctgcaagagactctcttcattttaaggacaaacagactaaccttgatgggatgggaaaacatgttttatgcaaatagaaactaaaagagagcaggaatagctatacttatataagacaaaataaactttagtccaaaactgcaaaaagaagtacattatataatgagaaagtggccaatttatcaagaggatataacaattaaaatgtagatatacaccatgtaagagcacctaaatatataaaacacatatttaaaaatctgaaaggagagatagactgtaatacaatgacagtaggagacttcaatatcccatttttaacaatggacatataacttacacagaaaattaataagtaaacatggaatgaaaaactttagacca

SEQ ID NO: 393744 - DNA, 673 bp, Homo sapiens
ctgtgtaagcctcatggtaaccttaaagcaaaaacactaaaacttattaagtggaagcacaaaacagaaagaaaaagattcaaagcataccactatgtaaaatcatcaaaccaccaaggaagacatcaaaaaagaaagaaacaacatatctataacacaaccagaaaacartaacaaaacggcaatggtaagtcttcatctgtaacaattaccttgaatgtaaatgaattaaattattcaattaaaaatatattgactgaataaaaaacaagaactagctatatgctgtctgcaagagactctcttcattttaaggacaaacagactaaccttgatgggatgggaaaacatgttttatgcaaatagaaactaaaagagagcaggaatagctatacttatataagacaaaataaactttagtccaaaactgcaaaaagaagtacattatataatgagaaagtggccaatttatcaagaggatataacaattaaaatgtagatatacaccatgtaagagcacctaaatatataaaacacatatttaaaaatctgaaaggagagatagactgtaatacaatgacagtaggagacttcaatatcccatttttaacaatggacatataacttacacagaaaattaataagtaaacatggaatgaaaaactttagacca

SEQ ID NO: 393745 - DNA, 673 bp, Homo sapiens
ctgtgtaagcctcatggtaaccttaaagcaaaaacactaaaacttattaagtggaagcacaaaacagaaagaaaaagattcaaagcataccactatgtaaaatcatcaaaccaccaaggaagacatcaaaaaagaaagaaacaacatatctataacacaaccagaaaacagtaacaaaacrgcaatggtaagtcttcatctgtaacaattaccttgaatgtaaatgaattaaattattcaattaaaaatatattgactgaataaaaaacaagaactagctatatgctgtctgcaagagactctcttcattttaaggacaaacagactaaccttgatgggatgggaaaacatgttttatgcaaatagaaactaaaagagagcaggaatagctatacttatataagacaaaataaactttagtccaaaactgcaaaaagaagtacattatataatgagaaagtggccaatttatcaagaggatataacaattaaaatgtagatatacaccatgtaagagcacctaaatatataaaacacatatttaaaaatctgaaaggagagatagactgtaatacaatgacagtaggagacttcaatatcccatttttaacaatggacatataacttacacagaaaattaataagtaaacatggaatgaaaaactttagacca

SEQ ID NO: 393746 - DNA, 565 bp, Homo sapiens
tagaaactaaaagagagcaggaatagctatacttatataagacaaaataaactttagtccaaaactgcaaaaagaagtacattatataatgagaaagtggccaatttatcaagaggatataacaattaaaatgtagatatacaccatgtaagagcacctaaatatataaaacacatatttaaaaatctgaaaggagagatagactgtaatacaatgacagtaggagacttcaatatcccatttttaacaatggacatataacttacacagaaaattaataagtaaacatggaatgaaaaactttagaccaagtggacctaacatacatatacaaagcattttatccaatgccaatggattcttctcatatgcaaacaaaaattctcaggccaaatcacatataagagcacaaaacaagccttagcaaatttaataagattgaaatcatatcaagtatctcttctgaccacaatagtatgaarctagaaatcaacaataggaataatttcagataatacacaaatatatggaaataaaacatgtttatgaatgacaaacgggtcaa

SEQ ID NO: 393747 - DNA, 421 bp, Homo sapiens
ctagcaaatcttccagacaggcaacacctggcttgggcccacagcacagaccctctatcctgggctgaatccacwgagtgatttctgacctacatctctcaagggtgaagacccccaaaagataagcaaaagacccttggccacaacaactattgaggttccttcctctgctgccttcagtttagggaaggaacataaaaactgagatcacctcagagcttcagtgggcaacccaggagcaccaggccacgatctacagccaacacttaaggggaagaggaacctacattttcagaacattaagagggaacacgactgcaactgtgagtaaatacaggacagtcacacaaccaaacaagagtccaccaactggccaacatgcctgtcatctactggattacaccccaaagtttcaacacca

SEQ ID NO: 393748 - DNA, 597 bp, Homo sapiens
aaatcttccagacaggcaacacctggcttgggcccacagcacagaccctctatcctgggctgaatccacagagtgatttctgacctacatctctcaagggtgaagacccccaaaagataagcaaaagacccttggccacaacaactrttgaggttccttcctctgctgccttcagtttagggaaggaacataaaaactgagatcacctcagagcttcagtgggcaacccaggagcaccaggccacgatctacagccaacacttaaggggaagaggaacctacattttcagaacattaagagggaacacgactgcaactgtgagtaaatacaggacagtcacacaaccaaacaagagtccaccaactggccaacatgcctgtcatctactggattacaccccaaagtttcaacaccaaaaatacctgactaacataccccatttgaaatcaaagagaagaagttggcttaaaataaaaaccttgtacaatgcctcagcctgtggaaaaatccagaaaagaagcctactgactgtactcaatctacactgcaattaaaggaacatccacacacagagttgagaaagaaccaatacaaga

SEQ ID NO: 393749 - DNA, 421 bp, Homo sapiens
ctagcaaatcttccagacaggcaacacctggcttgggcccacagcacagaccctctatcctgggctgaatccacagagtgatttctgacctacatctctcaagggtgaagacccccaaaagataagcaaaagacccttggccacaacaactattgargttccttcctctgctgccttcagtttagggaaggaacataaaaactgagatcacctcagagcttcagtgggcaacccaggagcaccaggccacgatctacagccaacacttaaggggaagaggaacctacattttcagaacattaagagggaacacgactgcaactgtgagtaaatacaggacagtcacacaaccaaacaagagtccaccaactggccaacatgcctgtcatctactggattacaccccaaagtttcaacacca

SEQ ID NO: 393750 - DNA, 597 bp, Homo sapiens
aaatcttccagacaggcaacacctggcttgggcccacagcacagaccctctatcctgggctgaatccacagagtgatttctgacctacatctctcaagggtgaagacccccaaaagataagcaaaagacccttggccacaacaactattgaggttccttcctctgctgccttcagtttagggaaggaacataaaaactgagatcacctcagagcttcagtgggcaacccaggagcaccaggccacgatctacagccaacacttaaggggaagaggaaccyacattttcagaacattaagagggaacacgactgcaactgtgagtaaatacaggacagtcacacaaccaaacaagagtccaccaactggccaacatgcctgtcatctactggattacaccccaaagtttcaacaccaaaaatacctgactaacataccccatttgaaatcaaagagaagaagttggcttaaaataaaaaccttgtacaatgcctcagcctgtggaaaaatccagaaaagaagcctactgactgtactcaatctacactgcaattaaaggaacatccacacacagagttgagaaagaaccaatacaaga

SEQ ID NO: 393751 - DNA, 496 bp, Homo sapiens
gcgagtcacctacaaagggaaccccatcaggctaacagcagatctctgctgaaaccctataagccagaatagattgggtggccgatattcaacattcttaaagcaaaaaaaaaaaaatcttcaaccaagaattttatatccagctataataagcttcctaggtgaaggagaaataagatccttttcatataagcaaatgttgaaggaatttgctatcaccagacctgctttacaagagatcttgaaaggaatgataaatataggaaggacagaccactatcagctaatacaaaaccacaattaaagacacagaccagtgacattataaagcaaccaaccaaccaaagaaaacaaagagatcttcaactaagaatttcatatccagccaaacttagctccctaactgaaggaaaaataagatctttttcagataaggaaatattgagcatatttattcccaccagacytgccttaaaagagatcttgggccaggcac

SEQ ID NO: 393752 - DNA, 556 bp, Homo sapiens
gtcaaatcagcagtggcattagattttcacaggagcatgaatgcttgcacatgcgagggatctaggctgcatgcttcttatcatctcatgcttgatgatctaaggtggaacagtttcaacccaaaaccatccctcttcttcatccatggaaaagctgtcttccaaaaaactggtcyctggtgccaaaaaagttggggactgctggtgtaaactataacgtatatgcttggtcaagcaatatcagcagagcactccagcctgggcaacacagtgagacccagtttcttaaaaaagatgctctaaatacgtcaattatattcatcttcactgaaactctgtgacattgatattataaccccattttacaagtgaggaaattaagacactaagatcacacaactaatgtgaaagtccagtgtttttctagaacactttaaaattttaaattaagtttaaaaaaaaatcttgttcatgtcactctttgattcaattttacttgacagtacactctccgctggaaaagccccacctaaggaatccctgaactgtgctatct

SEQ ID NO: 393753 - DNA, 572 bp, Homo sapiens
ctttaacaatgtagttaatctgcccaccaagccagcaaaattatgtcaaattatatttcctaatctttccatcagcgctatgattttgaattagactccttttcagaaaaaattgggtcatrgtctaatggcttcagaaaaggcttacccatgcaccacagatagaggagacatttatctgtaggccgtatcgtcccctgctacagatgtatccctaataagaagccctcccaattctcagctttgaaggattagacaacgaaaactacagacacacacacacacacacaaaggtccaaagtccaactcactagtaacccctcagaaagtgattttttttagcatttaactggcttcccttgaagaagaaattatgctaccctaaagtaaactctaatctgttagcccacagagaaaaggcagcaagctaccaaatatctgctcatcacaatgagcttaaatgaagcatggatttaagcctcttttatgtgtataacccatgatctttattagagtttactttgcataattaactcagggaactgagttaattatgagagaagcccagagct

SEQ ID NO: 393754 - DNA, 572 bp, Homo sapiens
ctttaacaatgtagttaatctgcccaccaagccagcaaaattatgtcaaattatatttcctaatctttccatcagcgctatgattttgaattagactccttttcagaaaaaattgggtcatggtctaatggcttcagaaaaggcttacccatgcaccacagatagaggagacatttatctgtaggccgtatcgtcccctgctacagatgtatccctaataagaagccctcccaattctcagctttgaaggattagacaacgaaaactacagacacacacacacacacacaaaggtccaaagtccaactcactagtaacccctcagaaagtgattttttttagcatttaactggcttcccttgaagaagaaattatgctaccctaaagtaaactctaatctgttagcccacagagaaaaggcagcaagctaccaaatatctgctcatcacaatgagcttaaatgaagcatggatttaagcctcttttatgtgtataacccaygatctttattagagtttactttgcataattaactcagggaactgagttaattatgagagaagcccagagct

SEQ ID NO: 393755 - DNA, 541 bp, Homo sapiens
aggaaaactatcttttttaagtataygcttaactgtttttgaacataacatgccccttatatagaaaacaaacaaaaaagaacagctttctttttttgaagtccatattttttctcactataaaagtaatatctactcataataaaagtttcaaaaaagtagaattttcagaaaaatagaaggaagattcaatatctctcataaatccactattcaactaaaattttaatgtatttccttttcattctctttttttagcaatgctagttcatatatatatatataattttcatcacatagagatcactcagaattcggaaatattcaaaggtgtttggtaatcatcaaagacttctaaagcttagtgacaaaataatataaaacctgtaagaacatttatatcagagatttagaaagtactacatgtaaagcctacatgtgtaggtactgtacacctatagtaggtaacacagtttgggagaaaaaaataaaatatatgactctaagagttctgaaagtgattccaaataggtgttctgaa

SEQ ID NO: 393756 - DNA, 541 bp, Homo sapiens
aggaaaactatcttttttaagtatacgcttaactgtttttgaacataacatgccccttatatagaaaacaaacaaaaaaraacagctttctttttttgaagtccatattttttctcactataaaagtaatatctactcataataaaagtttcaaaaaagtagaattttcagaaaaatagaaggaagattcaatatctctcataaatccactattcaactaaaattttaatgtatttccttttcattctctttttttagcaatgctagttcatatatatatatataattttcatcacatagagatcactcagaattcggaaatattcaaaggtgtttggtaatcatcaaagacttctaaagcttagtgacaaaataatataaaacctgtaagaacatttatatcagagatttagaaagtactacatgtaaagcctacatgtgtaggtactgtacacctatagtaggtaacacagtttgggagaaaaaaataaaatatatgactctaagagttctgaaagtgattccaaataggtgttctgaa

SEQ ID NO: 393757 - DNA, 541 bp, Homo sapiens
aggaaaactatcttttttaagtatacgcttaactgtttttgaacataacatgccccttatatagaaaacaaacaaaaaagaacagctttctttttttgaagtccatattttttctcactataaaagtaatatctactcataataaaagtttcaaaaaagtagaattttcagaaaaatagaaggaagattcaatatctctcataaatccactattcaactaaaattttaatgtatttccttttcattctctttttttagcaatgctagttcatatatatatatataattttcatcacatagagatcactcagaattcggaaatattcaaaggtgtttggtaatcatcaaagacttctaaagcttagtgacaaaataatataaaacctgtaagaacatttatatcagagatttagaaagtactacatrtaaagcctacatgtgtaggtactgtacacctatagtaggtaacacagtttgggagaaaaaaataaaatatatgactctaagagttctgaaagtgattccaaataggtgttctgaa

SEQ ID NO: 393758 - DNA, 579 bp, Homo sapiens
ggcaccaccatcattcagtttttcaaagcagaaacatagatataatctttattgccttcccctcaccccttatattcagtgtagcttgttcagttgatttcagccctaaacttcctagatctgtgcatatccattgccaccatcccattctaagtgacagaaataacgtggagttgtcaaagaaaactgcttagtctactataataccctcctaattggactccaagatctctcttgcctctacaatttgttctttccagcagtaagagatatctttttggaatgcaaatctgataacaccacttaaaattcttcagtgaattccatgttcttaacagaatttaacctcaacagaattagcatgaaccatgagactttgccagatctctgccctgcytatcaaactctactcttgccgggaacacaagcacattagtcttctcccaaatcctcaaacatcagtccttttttctgccgtgagacctctgtacacactacatccttatgtggaataagcctgtgcctctgcctggaatgaccctgttcatgcacgtgcatgcacacacgcatacacacaat

SEQ ID NO: 393759 - DNA, 614 bp, Homo sapiens
atttaacctcaacagaattagcatgaaccatgagactttgccagatctctgccctgcttatcaaactctactcttgccgggaacacaagcacattagtcttctcccaaatcctcaaacatcagtccttttttctgccgtgagacctctgtacacactacatccttatgtggaataagcctgtgcctctgcctggaatgaccctgttcatgcacgtgcatgcacacacgcatacacacamtgtattagtccatttacccatttcatgctgctgatgaagacatatccaagactgggaaatttacaaaagaaagaggtttattggacttacagttccatatggctgaggaggcctcacaatcatggtggaaggcaaggaggagcaagttacatcttacatggatggcagcaggcaaaaagagagcttatgcagggaaactcctgtttttaaaaaccatcagatcttatgaaacccattcactataacaagaatagcacaggaaagacctgcctccatgattcaatcacttcctacagggaccctcccacaacacatgggaattatgggagctacaaaataagatttgagtggggacacagagctgaaccatatcat

SEQ ID NO: 393760 - DNA, 507 bp, Homo sapiens
gttgtcaatgacttaactaagttatactatatcctgtaggattgtgatttaagagtgtaactaagcaggaaaaggaataaacatcattcagagatgatgtggtaactgatagggttttaggtcttaccttttggggaaaggatttcatgtataccaaaaatagttgcattatgctaggcaggggcatattgttgtcctttagaaggttgtggcaggtgttggcttaaatttaagaacaaggaccttgtctacttacccatctttgtatccacaatatgcccaacttaagcctggcccatacctgaaactcaataaatattgaaggaacatcgatatggaacctatcatgggttgaggcgatggaactctctataaaattattgtgcagcacatgactgtatttgcttttcccytcctcaatcgcttttctaaatagactggtacctatactgatcctctctctaaaataaagagtgaaatagggtggtgcagctaggagctagcaga

SEQ ID NO: 393761 - DNA, 603 bp, Homo sapiens
tgttggcttcatctctgccttcccccgattctaatcgcttctgtgcctacatagaactgtccagtaaaaatagtattactgctaactacctttaacatattgtacttttcaaggttgcccagccacagttattttctcctgttgccatttctcaagtgaattacagtgcttttcttctctccctccctctgtttttgcctcttctatgtagggaagatcatggtctcgatattctctggataataatgctgctttccattaagtacaaggaaatagaattatacttggaaaaaaagcacagctaggtattgaatcaatagaaccaaagtttttatccataattatttaactgagaaaagcaattgtaaacatacaaacttaatgtcaggtaatattctaggargttagaaagaacttttagaagggatccctttttcggtctagcagttaacaggaaaagcacaacggtgggaaatggagggaccctactcatcattaaccacattgggcaaacaatttgcctgaattccatagtgaagaccatcaaccctggcttgatgagtacaaattctgttttgttttataacttttttttttttttac

SEQ ID NO: 393762 - DNA, 603 bp, Homo sapiens
tgttggcttcatctctgccttcccccgattctaatcgcttctgtgcctacatagaactgtccagtaaaaatagtattactgctaactacctttaacatattgtacttttcaaggttgcccagccacagttattttctcctgttgccatttctcaagtgaattacagtgcttttcttctctccctccctctgtttttgcctcttctatgtagggaagatcatggtctcgatattctctggataataatgctgctttccattaagtacaaggaaatagaattatacttggaaaaaaagcacagctaggtattgaatcaatagaaccaaagtttttatccataattatttaactgagaaaagcaattgtaaacatacaaacttaatgtcaggtaatattctaggaggttagaaagaacttttagaagggatccctttttyggtctagcagttaacaggaaaagcacaacggtgggaaatggagggaccctactcatcattaaccacattgggcaaacaatttgcctgaattccatagtgaagaccatcaaccctggcttgatgagtacaaattctgttttgttttataacttttttttttttttac

SEQ ID NO: 393763 - DNA, 603 bp, Homo sapiens
tgttggcttcatctctgccttcccccgattctaatcgcttctgtgcctacatagaactgtccagtaaaaatagtattactgctaactacctttaacatattgtacttttcaaggttgcccagccacagttattttctcctgttgccatttctcaagtgaattacagtgcttttcttctctccctccctctgtttttgcctcttctatgtagggaagatcatggtctcgatattctctggataataatgctgctttccattaagtacaaggaaatagaattatacttggaaaaaaagcacagctaggtattgaatcaatagaaccaaagtttttatccataattatttaactgagaaaagcaattgtaaacatacaaacttaatgtcaggtaatattctaggaggttagaaagaacttttagaagggatccctttttcggtctagcagttaacaggaaaagcacaacggtggraaatggagggaccctactcatcattaaccacattgggcaaacaatttgcctgaattccatagtgaagaccatcaaccctggcttgatgagtacaaattctgttttgttttataacttttttttttttttac

SEQ ID NO: 393764 - DNA, 574 bp, Homo sapiens
gattaaaatctagaacttaaagctataattatttcatcatgacgtcaaatatgataggaaacctttatgttatgctaatagacatgagtggaatccaaaactatttgtctcccatttccttcacgtgatccaaaattagattgccttgcagcattaacaaattataatgaaagcttatcatcatttcggtcaattgattgtattttaaaaattgaaaataggatgcatacattgctatttacatcacagattcatctcattatgcaagaaaacaaatatggcaagtttttgcagctcagctcaggctacaggaaaaatggcaaaagccaggcagcccagcttcacaaaggctataaggggtgctgtagttcctaggcatccctgctgccaagatgcccaagaagtcagctcaactgaaggagcagtgaaggaagaactcaagaaaggttgggtgccctcatcagctaaacctgctcaggcaaaggtagaaacgaagacaaaaaaaaaaaaaggcagcaggaaaggataaatcttcagacacaraagtgcaaacaaaagggaaaaggggccaggt

SEQ ID NO: 393765 - DNA, 596 bp, Homo sapiens
gtgcctgcatgtgtgcatatacatgtagcatgtgtatgtgtgtgtttgtgtgtgtccagaaggccaaacattttytcaagccaaaaagagtgccaacgagtaataactttgtttttgaaacattaaggccaagtgatttgcattcatccattgtgaaatgaaaatagaatttgtcaattattcatgaataggacataaatctttatgccacctccatggcagtgatatacaatgtcatgtcaagtaataacatctgttggtgggcagttgtaaatagaaaactagacaaagcagaagagagaccctatgggcttctaggcctaaaacttgggaaatagaatatgggctatgaactttactcttacaagaccaatatcctatttaatgtattataaaatataatttgcagtaatgatttgcaatctggcatagggtcaagaatattagatttttttttaagaagagaagcaacgtttttctaaagagatcagaagagagaaacaagctatattcaactttatttttaaaaagcctatgacaactagtaaaagtatccaaataacaatatgttgcattttctgatgaatagcttgaaa

SEQ ID NO: 393766 - DNA, 575 bp, Homo sapiens
acattctttcctccctcagttttccatggaataatttaggaaccaattcatgaaacacaaatccattgtactcactattggaaaaggggaagtcaaaaagatatgtttaaatctacatatctctttggaaaaaatactgtgtgcaatctggtgctgtcaagcaagctcaccagactggaaactgtgggctttagtgcatgggtttytggaggttgatcgtctatttctatatctttcttgtctctctgattctctctgtttttctctatttcttttcttttttttttttttttttttgagatgtagtcttgctctgtcgcccaggctggagtgcagtggcgcaatctcggctcactgccagctccacctcttgggtttatgccattctcctgcctcagcctcccgagcagctgggactactggcacctgccaccacgtccgactaattttttgtatttttagtagagacggggtttcactgtgttagccaggattatctccatctcctgacctcgtgatccgctgcctcggcctcccaaagtgctgggattacaggcatgagccaccgcgcacag

SEQ ID NO: 393767 - DNA, 575 bp, Homo sapiens
acattctttcctccctcagttttccatggaataatttaggaaccaattcatgaaacacaaatccattgtactcactattggaaaaggggaagtcaaaaagatatgtttaaatctacatatctctttggaaaaaatactgtgtgcaatctggtgctgtcaagcaagctcaccagactggaaactgtgggctttagtgcatgggtttctggaggttgatcgtctatttctatatctttcttgtctctctgattctctctgtttttctctatttcttttcttttttttttttttttttttgagatgtagtcttgctctgtcgcccaggctggagtgcagtggcgcaatctcggctcactgccagctccacctcttgggtttatgccattctcctgcctcagcctcccgagcagctgggactactggcacctgccaccacgtccgactaattttttgtatttttagtagagacggggtttcactgtgttagccaggattatctccatctcctgacctcgtgatccgcygcctcggcctcccaaagtgctgggattacaggcatgagccaccgcgcacag

SEQ ID NO: 393768 - DNA, 551 bp, Homo sapiens
atttatatgaggcactctttttcattaacttgtttattaaaggctatttattacttctatttgtactttatcttttcctcttactaaatttatgctttaggaatgatctgttttctgttagaatttttttttcatttttaacatcagaataatatatatttgtttatttcattgataaactttaccagttttatttcatattccattatttttaatcacaatttaaaagaattaaagagcaggtacagtttatataaatgctaatcaggaatctgttaatcttcacttatggaaatgttccmaaattttttccaagctgaaaatacgagcatctcctcaaactagcttcctttcaccagtgtcccacagatgctcacatcaatacaatctgacacaaggaaaaaagtcacataggaaaagttataggggaaagaacctggaaagtattcttaccaaatacacttaaaatagcttatttttgcagagatttaaaaaagtaatattttgcttggtgcttacttgagccttggaagagaatgaagaagtgaagg

SEQ ID NO: 393769 - DNA, 682 bp, Homo sapiens
ctgtattctaccagaggcagaggacaataggggagatatgagcggtggacagaaactacagaaagctggcacaagtttgggaaacacatctacactgggaggtataaacacatcctctttatacttggtttctttattctcacacacttccaaatagcatgcttttgccatactgctggaggagtagcttgcccatccctttccctggcttgagtttctcctgccctctttctttctttggtggagctctggattctgggtacacagtgtaatcatcacaattgctgtttcttgccagctgtcccttgtttggtgcatgccaggtctgagaatcgaactccttccaaggacagtaaggtaacagctttttgttgttgctgccatctctcacccttttcttctcctgtagaacagcacatacttctccatctccaaccaatgtttcccacagtcaagcactagttttggtacacaatgtaatcagtagatgctcttttggagggatttctgtatgtaacagtgctttgtgcagggttttcttattttcatgtttaggattgtttatttatttgctcccagaagagccattactagtcaagaccatgtgaacattatataattcttgwtatttatttatgttgtctttcagattaaaaaatgattttgtccaagttattaatca

SEQ ID NO: 393770 - DNA, 635 bp, Homo sapiens
caaatcagaaaaagcacacaccccaggtaaaaggggaagctactatcagactcctacagagtgttcccttttagaaaaataagcccagggcagttatctgatttttcaagagaaaccataaatttagaattttatgtgaaattgattttcaagttctacccactaattaaaaaaataaaccctgtgaatggaaacaatttgtgggcccaacaaaacacatctgctgggcagactggccaaaagacccaagtgtccagtttctgggctactatgcttgatcstctccttctcaaggtgtagccctttctcaatatcaaaggaaaacaccaatgaaaagagggtttctttttgtttgacttaaaattcaattttagatcaacgaaaaagtatacattttatctgcaagtgtcatgaccataatgattcccctgtgacaagtaacatgtttgtagtgggctgatctttgggggttattcttaaatttcaaccaggaaccaaatgttagttccgagacatatcttcctgagagcctgatgtggtaggaagtacaaaatacataactaggatttaagagacaatgattctaggcctgactcgattgtgctgctgtccagagcgaacaggtagggtttaac

SEQ ID NO: 393771 - DNA, 635 bp, Homo sapiens
caaatcagaaaaagcacacaccccaggtaaaaggggaagctactatcagactcctacagagtgttcccttttagaaaaataagcccagggcagttatctgatttttcaagagaaaccataaatttagaattttatgtgaaattgattttcaagttctacccactaattaaaaaaataaaccctgtgaatggaaacaatttgtgggcccaacaaaacacatctgctgggcagactggccaaaagacccaagtgtccagtttctgggctactatgcttgatcctctccttctcaaggtrtagccctttctcaatatcaaaggaaaacaccaatgaaaagagggtttctttttgtttgacttaaaattcaattttagatcaacgaaaaagtatacattttatctgcaagtgtcatgaccataatgattcccctgtgacaagtaacatgtttgtagtgggctgatctttgggggttattcttaaatttcaaccaggaaccaaatgttagttccgagacatatcttcctgagagcctgatgtggtaggaagtacaaaatacataactaggatttaagagacaatgattctaggcctgactcgattgtgctgctgtccagagcgaacaggtagggtttaac

SEQ ID NO: 393772 - DNA, 594 bp, Homo sapiens
atgtcattgccatgctcagtactatacaatagcttccaatctcacttcaaattaaaggcaattttttaaatggctgtttccacatggctcactatcccacaggtttttgttttgtgtttttgtttttttgtttgtttttgctttttgttgttgttgttgttgctgttgttttttgagacggagtctcactcttttgcccargctggagtgcagtggtgcgatctcggctcactgcaagctccgcctcccgggttcacgccattcacctgcctcagcctcccgagtagctaggactataggcacccgccaccacgcccggctaatttcccacagttcttcttaaaattactttcttactacgcttcccaatggctctctgtgttcttcctggggcatactaggtgtgcttctgcccgaggattgttgcctctgctgaggtttatgcttcaaatattcatttgccaaatatgcagacttcactcccttttggaggtttatgcttcaaatattcttttgccaaatatgcagacttcactccatttgcctctttcacctttttaatgatgcttttcatgaccaccctacttaaaattt

SEQ ID NO: 393773 - DNA, 594 bp, Homo sapiens
atgtcattgccatgctcagtactatacaatagcttccaatctcacttcaaattaaaggcaattttttaaatggctgtttccacatggctcactatcccacaggtttttgttttgtgtttttgtttttttgtttgtttttgctttttgttgttgttgttgttgctgttgttttttgagacggagtctcactcttttgcccaagctggagtgcagtggtgcgatctcggctcactgcaagctccgcctcccgggttcacgccattcacctgcctcagcctcccgagtagctaggactataggcacccgccaccacgcccggctaatttcccacagttcttcttaaaattactttcttactacgcttcccaatggctctctgtgttcttcctggggcatactaggtgtgcttctgcccgaggattgttgcctctgctgaggtttatgcttcaaatattcatttgccaaatatgcagacttcactcccttttggaggtttatgcttcaaatattctttygccaaatatgcagacttcactccatttgcctctttcacctttttaatgatgcttttcatgaccaccctacttaaaattt

SEQ ID NO: 393774 - DNA, 580 bp, Homo sapiens
ctttggcctcttgtttgtccattccaaaaatatttattaaatgccyacaatgcgtaaggaaatatcgaagatgctttgtatatagaaataaacaaagtaaacatgatttctgctttaatggaattaacattctcgatttaagattagtgacttaaaataagccattgattatttaaaatacagctgaccctgcagcattttcctaaacagggtattatgcatatgcagccacttcatatatacaaaagactcctatatttagggattatgtcagttgttttgtattctctatacttcctagtccataggcagtgttcataaaagctaggtgagttaaaaagaaaaaagtatacacggagctaaatttaagatgaaataattttttctttattcccatctctttaaacttcaagaaagattaacaatatgaaaggttgtatttgaattccaggattcaaaacagtatttcacatagatctttaaacttaaaaataaaatgactttaaaggctaatatgtccaatagatggtcatctctagagaatataatccttcagaggttttccaacactttattaata

SEQ ID NO: 393775 - DNA, 579 bp, Homo sapiens
agctcttcaaaatactcaaaaagggaatacttccaaactctttccacaaggccagtataaccctaataccaaagccaaacaaggacattacaaaaaagaaaattataggccagtatccttgattaacataaattcaaagattctcaacaaaatactagcaaaaagaattcaacagcacattaaaaggatcatccrccatgatcaagtggaatttacccctggaaagtaagagtggatcaacatgtgcaaatcaataaatgtgatacatcctattaatggaatgaaaaatgaaaatacatgatcatctcatttgatgcaaaaaaattttgacaaaattcaacattctttcataataaaaactcttaccaaattaggtaaaagaaatgtacctccatgtaacaaaggccatacataagaacctcacagttagcattatacaaaatggtgaaaaattaaaagccttttctctatgatctgaaatgagacataatattagaaatttttcccagagcaatcaggcaagaaaaagacataaaaggcaaccaaatagcaaacaaagaagcaaaactgccaatgttt

SEQ ID NO: 393776 - DNA, 507 bp, Homo sapiens
tactgtgctgaatgccgtaggcaactaatataatggtatttgtgtatgtaaacatgtctaaatatacaaaagggaatatgttatgctacaacattataacagctatgacatcactaggtgacagaaatttttcatctccactatgctcttaggggaccacagtcatctctgcattttagtcattgactaaaatgtcattatgtagtgcataactgtgtttctctctctgaaagccatacctgtgcatcggacgtccaatcacataccctcactcagctctctcagagatagtcaaaattcatgaagtccaaaacatgtcttttccccagtcacgcttctctgctcatgtcctctgtctttgtgactggcccttctgaaaagtaatccctcaattagccaggtccatagctgaactcattgtgtgtgtctgtataygatcaatcgggctctgctggagacaactgcatgaactgagatcacaataatcatctccaacctcagctagcc

SEQ ID NO: 393777 - DNA, 579 bp, Homo sapiens
agctcttcaaaatactcaaaaagggaatacttccaaactctttccacaaggccagtataaccctaataccaaagccaaacaaggacattacaaaaaagaaaattataggccagtatccttgattaacataaattcaaagattctcaacaaaatactagcaaaaagaattcaacagcacattaaaaggatcatccaccatgatcaagtggaatttacccctggaaagtaagagtggatcaacatgtgcaaatcaataaatgtgatacatcctattaatggaatgaaaaatgaaaatacatgatcatctcatytgatgcaaaaaaattttgacaaaattcaacattctttcataataaaaactcttaccaaattaggtaaaagaaatgtacctccatgtaacaaaggccatacataagaacctcacagttagcattatacaaaatggtgaaaaattaaaagccttttctctatgatctgaaatgagacataatattagaaatttttcccagagcaatcaggcaagaaaaagacataaaaggcaaccaaatagcaaacaaagaagcaaaactgccaatgttt

SEQ ID NO: 393778 - DNA, 559 bp, Homo sapiens
gacctggctccagtcctgttcaatcagggtatcagaggcagtccagttctcctgaggatccagcagaaactgcatcacyaacctatgccttgatagcaggcctgccaatcagagattcagctgcagaccaggcagcagccatgtgatatggctccaggcccacttgactgtgatccagtcaagggatccagcaggaaaaggtttgtacctgctgaaaccaatctataaagacagaaagagattgggcatggtggctcacacctgtaatcccagcactttgggaggccaaggcgggcagaccacttgaggccaggagtttgagaccagcctggacaacacggtgaaactctgtctctacaaaaaatacaaaaaaattagccaggcgtggtggcacatgcctgtgatcccagctgcttgggaggctgaggcaggagaatcatttgaacctgggaggtggaggttacagtgagctgagatcacgccactgcactccagctgagtgacagagcaagactctgtctcaaaaaaaaaaaaaaaaaaaaaaagaagaggtttttgc

SEQ ID NO: 393779 - DNA, 559 bp, Homo sapiens
gacctggctccagtcctgttcaatcagggtatcagaggcagtccagttctcctgaggatccagcagaaactgcatcactaacctatgccttgatagcaggcctgccaatcagagattcagctgcagaccaggcagcagccatgtgatatggctccaggcccacttgactgtgatccagtcaagggatccagcaggaaaaggtttgtacctgctgaaaccaatctataaagacagaaagagattgggcatggtggctcacacctgtaatcccagcactttgggaggccaaggcgggcagaccacttgaggccaggagtttgagaccagcctggacaacacggtgaaactctgtctctacaaaaaatacaaaamaattagccaggcgtggtggcacatgcctgtgatcccagctgcttgggaggctgaggcaggagaatcatttgaacctgggaggtggaggttacagtgagctgagatcacgccactgcactccagctgagtgacagagcaagactctgtctcaaaaaaaaaaaaaaaaaaaaaaagaagaggtttttgc

SEQ ID NO: 393780 - DNA, 559 bp, Homo sapiens
gacctggctccagtcctgttcaatcagggtatcagaggcagtccagttctcctgaggatccagcagaaactgcatcactaacctatgccttgatagcaggcctgccaatcagagattcagctgcagaccaggcagcagccatgtgatatggctccaggcccacttgactgtgatccagtcaagggatccagcaggaaaaggtttgtacctgctgaaaccaatctataaagacagaaagagattgggcatggtggctcacacctgtaatcccagcactttgggaggccaaggcgggcagaccacttgaggccaggagtttgagaccagcctggacaacacggtgaaactctgtctctacaaaaaatacaaaaaaattagccaggcgtggtggcacatgcctgtgatcccagctgcttgggaggctgaggcaggagaatcatttgaacctgggaggtggaggttacagtgagctgagatcacrccactgcactccagctgagtgacagagcaagactctgtctcaaaaaaaaaaaaaaaaaaaaaaagaagaggtttttgc

SEQ ID NO: 393781 - DNA, 559 bp, Homo sapiens
gacctggctccagtcctgttcaatcagggtatcagaggcagtccagttctcctgaggatccagcagaaactgcatcactaacctatgccttgatagcaggcctgccaatcagagattcagctgcagaccaggcagcagccatgtgatatggctccaggcccacttgactgtgatccagtcaagggatccagcaggaaaaggtttgtacctgctgaaaccaatctataaagacagaaagagattgggcatggtggctcacacctgtaatcccagcactttgggaggccaaggcgggcagaccacttgaggccaggagtttgagaccagcctggacaacacggtgaaactctgtctctacaaaaaatacaaaaaaattagccaggcgtggtggcacatgcctgtgatcccagctgcttgggaggctgaggcaggagaatcatttgaacctgggaggtggaggttacagtgagctgagatcacgccactgcactccagctgrgtgacagagcaagactctgtctcaaaaaaaaaaaaaaaaaaaaaaagaagaggtttttgc

SEQ ID NO: 393782 - DNA, 388 bp, Homo sapiens
gcaatcagtccctatttttccctctcctcaccccctggcaaccaccctaatcttttttttatggggaacaagaaagcagctttgaccgtgggtgaacataaaggctgcttaggakcgggatatatggatttgggatggctgtttgcaggcattgcttgggaatgccagcatccctgtacctggagacctcagtatctgtgggaaaccccggtatccccacactcagagtggaggaagccactgggcttgtgggaagctgagcttgaatatgacctcttccactggaataaagtgcctttggcttccaaaggaaagagctgggagaggctagttggttgaggcaacccagagggagcttctgggaccattttaaggtagttcagctcct

SEQ ID NO: 393783 - DNA, 507 bp, Homo sapiens
agaaaatgtggtatacacatacagtggaccactattcagcattaaaaaaaggacatctgcttcatgcgacaatgtgaaggagcctggaggctttctgctaagtgaaataagccagtctcagaaggacaaatactrcatgattccacttctgtgaggcatcaaaaataatcaaactcatagaaacagaatagaatgatggttgccaggggcttggaagagagggaaatgagaagttgctgttcaatgagtgtatattttcagttatacaagatgaataagttctagaagtttgctgtacaacactgtgcctgtagttaacaatactgtattgtgtacttaaaattttgttgagagggcagatctcatattaagtgttcttaaataaaataaaatgctctgtaaaaataataataattggaaaaaatccagcatctctggtggagggagcaaataaatacatacctataatcaattttcagtttactaccttaatgaatgggaacatta

SEQ ID NO: 393784 - DNA, 469 bp, Homo sapiens
gttaattgtacctgaaaattatttatataatgaaatgtgaagtattttttattataaattgcttcttttagattatcttttatgtacatttaggatattcatgttttaaagctgcatgtacagtagttaatattatcaacaaatttgattttagagtagtaaatgggacatgacagaatttttttgtcatataaagagagctatgagaataatggatagggttttgaaccaatgaaccaatccstgcctcagcgtttaaggaaggagggtatgcaaattacccagataggagggatgcttatcttcttcatgaagttccccagggaagatttcacgtgtacctcattaatttgtattagtattttgaaatcttcatagtaagctagttcttctgtattaatattttctaggagtcttcatatgtcactctaaaaacatgaccgggccaggtgcagtggctcatgcctgt

SEQ ID NO: 393785 - DNA, 577 bp, Homo sapiens
tagctatttagtcttcaccagacgtttgtttaattttttttagaaaattatctcccttttcttatttttgctctgaagtggggaagctataaggtttttttttataaagacaggaagtagtcatgaaaagaataattgttatttccagacttttcaattactcttctcctttctacctttcttgtcacttctgtcacagttcttacttttcctgagtctggagcctgtttggggtccatctgaataaaatcaactcttcactgccttggcagtacccgctcagaactctccgggctgtaagctgcctctgctcagcttcatcgctcagtgctctccccacatccttctggcttcctgacatttggtgaaatctctcaggcccctgaaacttgttgttgttgtgggtctacataccccttttataaccgtagtggggtcttccaggygccctgaccgccatcatgaaaggagaagtactttcatttgttgatttgtcagaaatatatctgaacaagtaaattggaaatacctttagtcaggcatttagccaggaaaaagattagatggagcatgatga

SEQ ID NO: 393786 - DNA, 549 bp, Homo sapiens
ggatatgtgtggattcaaaaatgagtgatttggaacttattataatgaaatgtgggccagacaaaaaataaatactcttaagaaagatgtttttcataatgtaaagatgcttgtaaaggaaaaaattgttttaataacaagtatattgtatgcaaaagtagatctgattttaaagaagccttgtctatgagtagaatctctacttggaaaggtttttgtaaacggtttggttgagcatatttatttgaatatagaactttctttcttttaaaagattccttgatttggaaaccaaaggctgaatagagtaggaaatgcacccaaattattctgttagaaaggtacagtaaatggtgatgctctcttttgataccctaaattttaggactttgaatttggtgctttcatggtgtggtggtatagggaagtgattagcgcgggactctgaggctgggctgcctggattggaataccagctctgcyactgaacaccggcgaaggaatcgacgttcttgtctctctccctaaatggggagaataagagtacgt

SEQ ID NO: 393787 - DNA, 640 bp, Homo sapiens
gtagtaatgtatcattcatctagtggtaagattttcagcaatgagaacattctgaagcagctgagaaagccctaataaaataactgtcagaatgctcatgagcttctctctgttggaraagaatcaagccatttcctcctcttccaggcatagagaatagttatcctttttgccatattacaaggacagagtggagaagttcgtcatgcagctgtgggcgcaggctagtgtgtggggctgggggaagcagacaagtggtgagatggtgggctctgctaagccctggggtgggcgtaggagcagaagccagagcctggggcctctgagtgagtgggctcagtgaggggcaggcccagcctcatgtgctttgaggtctttgagagcctcagacaccaacctggtagaagaggcatttggagggatgccttccataccccaagaccctgggaaaggagagtggtgagtcagggttgggtgggtgggaggcctgagttgattgccagcagctgccagataccatgcccctttgtgtatatacttcctttattcatcaaatagctgctgccgtctactcaggtgctgggtatctattcagtgcctgctgtgtggcagagtgttctaggggctggggataccacag

SEQ ID NO: 393788 - DNA, 584 bp, Homo sapiens
tctcttggggtgaataagagttagacaagctagaagaaagaaggcgttctgatctctgctgaggggcttcaaaattaaatgctgaaaccatcttatcaaagagtgagtgctttatctataattgttttactaatagggttttttcaaacaaaataatttatagatctgtatctccccaaatgaaaaagaaagtatttttgtccgaatgagtgtatattattacaagaaacttgaatttttatttggctacttttttgtctagcaacatgaaccatatttaacatttgtaactcaggctagatgartaactgctgattgacatcaaagtctctccaatggcaggattctccctcccctcttgccccaccctgtctttcctcccgatgggcacatgcctgcccagcggaaggagacacggcagactctctttcctgcgcacaaggactgttgattctagaagccccatgtgctccctgggcagggcacctctacccatgagctttcatctgcttttcaatagcaggcttggaattttctggaatctctgctgtgacttgctgctatcaggaagcccctccatcatt

SEQ ID NO: 393789 - DNA, 563 bp, Homo sapiens
tgaacttcactccatataggaagcacggcttacttcaaaatggaaaaaatgtgtgaaagaatcttagagatggtattacaatttagttttcattattactgagtggttagagaaggagtggacaaatccaagactatcttgaagtgaatagaaactttcactttattctagcacttgctaagttgctctcaktctgcaaagtcactttcacagcatccttttgacatttagacccattattgctatgaactctcattgtcctgtgttcctaaactgtcactgcatcctttgttttgtttgacttgttactgttttttataagagttcattttgaatgtgacctcaatgtgataaatgttatagttgtttatcaggtgggtctaatcttgccaagcataactctgactcaagttccacagactcccaactaagccactagtttattcacaaaagttgccaggttttctggttatatggctctttctcactgtgtatattactgctctgtagttagaagacacagctagagttttggaggttatctttgtttttgttgttgttgt

SEQ ID NO: 393790 - DNA, 622 bp, Homo sapiens
tgcccatcatctcccaaatactttagtgtatttccaaaataaagacatcctcctacataaccaaaatacaatcatttgattcttccatctactctcagacgccattcaagttttgccaattatctcaataacgctttttatagcaaaagaatctaattcagaatcacatgcagcactgaattgtcatgtttctttattttctttctgtctgaaatggtctctccatctctacttgaatttcctaaccrtgacatttttgaggatgacaagccagtaattttgcaaaatgtccttcaatttggttttatcagaggtttcctaatgattagattcaaattatgcatctttggagggcagtatcacagaagggatgttgtttctttcattgtgtcccatcacattttgatttgtcccattattgtgttgttaattttgattacttgattgagtgatgtctgataggcttctacactataaaattactctttttctctttgtaattaataagtattttgtgaggaggtattttgagactatataaatattctgcatctcagccaaattttatttacttctatcatttatttatatctatatgaacttatagttacaatattattga

SEQ ID NO: 393791 - DNA, 378 bp, Homo sapiens
tttctttcattgtgtcccatcacattttgatttgtcccattattgtgttgttaattttgattacttgattgagtgatgtctgataggcttcyacactataaaattactctttttctctttgtaattaataagtattttgtgaggaggtattttgagactatataaatattctgcatctcagccaaattttatttacttctatcatttatttatatctatatgaacttatagttacaatattattgatgtcactgtcatcatttattttatactcaaattaactcatagttgaccacctggggtgccttcaatgtattcctttgttatgtcaccatctttctttgtatctttctcctttctggtgcaagatgtttcagg

SEQ ID NO: 393792 - DNA, 532 bp, Homo sapiens
atctgctttttagctctgctgaatgcatttctcagagtctccttacggcagacttgtttttgtcatttaccactccatctaatcttgtgtttcctattttctactatgccttgtttctcagtaartatggattaaagaaatgattgattgaatgaatgaatgatgtttcctcctctgcaattttattcatgtttatctttgtctgtttactctgattctttttaacaaagtttgtggtcattggtgaacctcctttcatttctttagccactgctcaaggatgagccttatgagtctccgtgtgcctggcacttcacacagcacctggcacgggctagtaaaactgtttacagtgacctgaaggtagccttcatatttttccactaggagatggatttccaatgtatacagttttggggctacgtgacttgaacaaatatagatttttatgcttttagagcaggcagggatcagcaaacttttcctgtaaaggaccagacagtaaatattttaggctttgtggaccatatgg

SEQ ID NO: 393793 - DNA, 588 bp, Homo sapiens
tctcctcctctgtgtattctttgcygtcagaccctgaataacaaaatgatattatgtagctggggtgccttgctctcattgaaaacctcttctcttgccagtaatgtgggggttcttaccccactctggtgtgatgtgctgtgatgcctctttgaatcctggggcaacccaggttttgacatttcctgctgggccaactgctgctcccggcttctgtattgacaagaccatgactgtggatgctgtaagaagttctctgtggccttgtgcacatccaggcctccatggtcatatttatattggttatttattaagctttgatatgtggcacaccagaagcacactccttcagactaggagccatgctttgttacttatctctgtagccttggcatttgggcacagagtttacttgcaacacttattttaaaaataaatttggttgaactgagctcctggtcatttcttcagcctcatctctcagattcaatgttctatgcagttggccaagtggtcagggactcagggtgtgaatcagactgagctagttttcagtctgggcacctctacttcctagctgctgtcctt

SEQ ID NO: 393794 - DNA, 588 bp, Homo sapiens
tctcctcctctgtgtattctttgctgtcagaccctgaataacaaaatgatattatgtagctggggtgccttgytctcattgaaaacctcttctcttgccagtaatgtgggggttcttaccccactctggtgtgatgtgctgtgatgcctctttgaatcctggggcaacccaggttttgacatttcctgctgggccaactgctgctcccggcttctgtattgacaagaccatgactgtggatgctgtaagaagttctctgtggccttgtgcacatccaggcctccatggtcatatttatattggttatttattaagctttgatatgtggcacaccagaagcacactccttcagactaggagccatgctttgttacttatctctgtagccttggcatttgggcacagagtttacttgcaacacttattttaaaaataaatttggttgaactgagctcctggtcatttcttcagcctcatctctcagattcaatgttctatgcagttggccaagtggtcagggactcagggtgtgaatcagactgagctagttttcagtctgggcacctctacttcctagctgctgtcctt

SEQ ID NO: 393795 - DNA, 535 bp, Homo sapiens
ctcctcctctgtgtattctttgctgtcagaccctgaataacaaaatgatattatgtagctggggtgccttgctctcattgaaaacctcttctcttgccagtaatgtgggggttcttaccccactctggtgtgatgtgctgtgatgcctctttgaatcctggggcaacccaggttttgacatttcctgctgggccaactgctgctcccggcttctgtattgacaagaccatgactgtggatgctgtaagaagttctctgtggccttstgcacatccaggcctccatggtcatatttatattggttatttattaagctttgatatgtggcacaccagaagcacactccttcagactaggagccatgctttgttacttatctctgtagccttggcatttgggcacagagtttacttgcaacacttattttaaaaataaatttggttgaactgagctcctggtcatttcttcagcctcatctctcagattcaatgttctatgcagttggccaagtggtcagggactcagggtgtgaatc

SEQ ID NO: 393796 - DNA, 592 bp, Homo sapiens
taaatgaagcaacatgattccatttatatgrcattggtatataagtaagcttatccggacagaaatgaggtcattggttgccaagggctggaggtgtgagaagtggattgatcccagacaggcactgggaactttttggagtgatggaaatgttatacatcttgattgccattgtggttatacagctgtatatatttattaaaactcattgaagtgttaacctagaaaggtaaattttactgcaggtatattatgcctaaataaaccctatttttaaaaagactattgcagtggtttaaaggaaagatggcttgggctacgatggtggtggatgatggtaagtggtagagaaacccatgtattagaaggtaaaataaacagggccaggttaatggattgacacaggggatgaagcaaaaggagttgtatttctttcttacgaaaaaacaccatagtacatctaaaattataatcaattttctgtatatccatcaatcttatcaggatgcacactctaagaagtggagagaaggaaagagatcagaacaagaccttacaaatggcaatgttggtacagctcaaaatagagtcc

SEQ ID NO: 393797 - DNA, 496 bp, Homo sapiens
atttaagctcccacatatgagcgagaacatgtgatatttgtttttctgtgcctggcttatttcacttcatataatggcttccagttccatccatgttgttgcaaatgataggatttcattctttttatgtctgaataatattccttgtgaatatgtaccacattttctttatccatttatctactgatgtacatttaggctggttcaaaatctttactattgttaattrtgctgcagtaaacatgggagtgcagctatctcttagatatactgatttcttttcttttggatatatacctggcagtgggattgctggataatatggtagtacaattgttagttttttgagaaacctccatgctgttctccatctcagtgactgtacaaattaacattcccaccaacagtgtatgagagttcccctttctttgcatcctcacaagcattcatttattttttaaatggacataataataagacctacttcaaaaggtta

SEQ ID NO: 393798 - DNA, 583 bp, Homo sapiens
ttaacttgctcagtctcttgactgctaagcagctggaccctgatgtgaagccaggcatgcatgactccaaccagtgaatttctactgggcctggttgctggcactcagttttcagagtctgtgagatgtagagtcattcactcttgtgggtagaaggaacctcagaggttatctggcccattagctgatacacttttgaatctcrtaggtcactataattttaaaagacattttggcaaccaacacagagtagttaaactattttttttcctccaagtcaaggcatttgcttgtcattctcatttcattatgaaaaagaaatgtgatgccaaaaagcataatttttaaataaaggacagttgtttaaattgaattaattcagtattgtgaaaaacttgctacttttgtttatattttgttgtggtagctttacatcagtccaaagagtggaatttaggagcccctaacctagactactattctgtttaagaatccactctaaaactttcctaacatgtgatcttccattcattgcctgtgtaattctaatgacagacagctcactattacctgaagcagctta

SEQ ID NO: 393799 - DNA, 583 bp, Homo sapiens
ttaacttgctcagtctcttgactgctaagcagctggaccctgatgtgaagccaggcatgcatgactccaaccagtgaatttctactgggcctggttgctggcactcagttttcagagtctgtgagatgtagagtcattcactcttgtgggtagaaggaacctcagaggttatctggcccattagctgatacacttttgaatctcataggtcactataattttaaaagacattttggcaaccaacacagagtagttaaactattttttttcctccaagtcaaggcatttgcttgtcattctcatttcattatgaaaaagaaatgtgatgccaaaaagcataatttttaaataaaggacagttgtttaaattgaattaattcagtattgtgaaaaacttgctacttttgtttatattttgttgtggtagctttacatcagtccaaagagtggaatttaggagcccctaacctagactactattctgtttaagaatccactctaaaactttcctaacatgtgatcttycattcattgcctgtgtaattctaatgacagacagctcactattacctgaagcagctta

SEQ ID NO: 393800 - DNA, 521 bp, Homo sapiens
tcgtttttccagactcatgttatacacaacttgccccagctttgaaatcagctatctctctgtggtgccctggttccttttggtggggaatggcattagagacaaaaatgtgggagctaagtmtgctcattgctactggagtgtctttgcttctagaccctttcagcagacagagctaggaaagaaccaggaaaggtacacacaaacacatatatattagaaaaactgaatccctaacaatagcctccaatttcaatccaccctcataggattctttatttccttcttctactccatatttacacatcccttcttccacattgaaaactctggatcccatcaacatcaaaacatttctttatttgctcacttccataatacatataaaatagttttcgaattgcttcacttaaaccactacaaaaaacaaactcattaaaaagagttcagaatgtatggtttcccaccctctaccctgcataaatgaatgcagtgttcatatgacttttgttaaacttctc

SEQ ID NO: 393801 - DNA, 624 bp, Homo sapiens
ttctaggtttaaccttaacttcttaaatgtatttggacctgctccatttaggctcaatgtcttcagttaaaaaagttgaactctgtgtctgtgctggctaatatggtagacacttacaactattgaaatgtaattaaatgaacaaaaattcagttcctcagtcacactagtcacatgtccagtggtcaatagctacatgtkgttactggctaccacattggacagatatagaacatttccatcatcatagaaagttcttttgagcaatgctgcctagattatctctgagttcatgtgggaatcatgaagcaaattaccatgtatcagggatgaaactagaagccatttctgcccaccttaagatctctctgtggcaatctttgcaatgaagctcctgtttgagctggtggaaactttcttcagctgaaccatagtctgagacttttctactcaatcctcctgcctccctatcttctttcacaagtagatctgcattgtaacataaagacttgccctgcctactgtttctccctctcctttccctcatacaggcattgtcctcaataaatctcttacacttccaactccaaattggcctatggtttttggaggacctgaatgaac

SEQ ID NO: 393802 - DNA, 623 bp, Homo sapiens
  misc_feature (1)...(623): n = A,T,C or G
aatgctcattattcaacctctgctactcaaatctcacacaagttcctcttttaactgacctgaactcagaatcatattaagaaggaattctaggacacaaagtttctagtttaacaagttgacaatagaacaatccagcataaatacattcatatcttatgccattaatagttactacatgaacacagaattagaaaattttgatgctctcttattattntttcccaactgcacagtcttttccccctttttgattatctaggcatcaattttatatagctyatttttcccactgggagaaaaattaatgtcccttataagagcactgtttaaatagcccataaattttaatagcaccaacagggggtttctgtgtatcaagtactgtctgctggtacccacttaattttaggaatgtcagaaagagcctcttattgtacattaatggaaaattaaatcatcttacagggagtttccttcttttccgattatttttctgggagaaagctgtatttattttattgtaaccaattcttcctttgatctaaagtattccaaagcatttgatgcttttcctactatcttttttttgtggtgaaaattcagcctgcactgaagaactt

SEQ ID NO: 393803 - DNA, 576 bp, Homo sapiens
gaaaaagagatataaaaatgtgaaaagtcagagtttcttttgctatagctaggataccctgggcaagaaaggggaatgggaggttaagttacacctagggcttgaaatcaaactatttgaaggagggatctgggtcttaggtaagagggactgatattttatagttcaatcaatgtaagcattaataataagagcagggacagagtatactgatctattcttatagaaggttttcatgggcttaataagggaaagaaggaagagcaaggggagaaggaggtaagagtaggaaaaatttgaattttctcttccatacatgacatttacacaatacttgatacatatttataaatttaattgaaaaaatttgttaggtaggtattactatcccacttacagataaggacattaaagtttagaagtaggatattgtttaaygtcacaaagctagagggtggaaaaaattggctttgaaacttggtttgcataaccccagaccctgtgtgctttctatggttccatgctgcacctgagctgtataaatccctagattggctaagaaggcaggactaacag

SEQ ID NO: 393804 - DNA, 654 bp, Homo sapiens
acttcttcttcctgcatatattctcatctttctccacctattctttaaagagagagctttcataaatgtaaatcttaccatgttactcctctgctcaaaagcttttactacttttttattgctttaatgaaaaagacaaaatctgttttgttaatcactgtgtactaggcacctaatattaatgcattgcatatatatcaattcgataaatatttgttaaataagtgatcccttttttcagcatccatctggctgcttttaatggcaaaacccacaattacctttkcaccaacctgatagagtcatctcatccactgctactcgatatgctatgtttttcacatatataaacctgcaaggacgatagtataatttctgctttaagtcttcacatataaaacaattaagaggaaaaacaatctttgatatttacccaggcatttagtacttccaatgatcttcattccttcctgaagatctgagttttcatgttattgatagccctcagtctaaaaagctttttgagaatttcttttaaaatgacaaattatcttagttttctatctaaaaatgtctttattctgccctcattcttgaaggatattcttgctaggttaggattctgggttggcatttattttttttcagcacttt

SEQ ID NO: 393805 - DNA, 654 bp, Homo sapiens
acttcttcttcctgcatatattctcatctttctccacctattctttaaagagagagctttcataaatgtaaatcttaccatgttactcctctgctcaaaagcttttactacttttttattgctttaatgaaaaagacaaaatctgttttgttaatcactgtgtactaggcacctaatattaatgcattgcatatatatcaattcgataaatatttgttaaataagtgatcccttttttcagcatccatctggctgcttttaatggcaaaacccacaattaccttttcaccaacctgatagagtcatctcatccactgctactcgatatgctatgtttttcacatatataaacctgcaaggacgatagtataatttctgctttaagtcttcacatataaaacaattaagaggaaaaacaatctttgatatttacccaggcatttagtacttccaatgatcttcattccttcctgaagatctgagttttcatgttattgatagccctcagtctaaaaagctttttgagaatttcttttaaaatgacaaattatcttagttttctatctaaaaatgtctttattctgccctcattcttgaaggatattcttgctaggttaggattctgggttgrcatttattttttttcagcacttt

SEQ ID NO: 393806 - DNA, 591 bp, Homo sapiens
tttgtttgtgttgccataaaggtacacttgaggctgggtagtttataaaattaaaaaaaatttatttggctgttggctctttgggctgtacaagatacatggcaacggcatttgttcagctcctggtgagaagctcaggctgcttccacttatggcagaaggcaaggggtgctgggtgtgcagtgatctcatggtgagagaggaarcaaaggtgagaaaggggaggtgccaggctctttttaacaaccaggggttatgggaactaacagagcaagaactaactcactactgtgagaatggcaccaagccatccatgaggaatttgccctcaggacccaaatacctccattaggccctaccttctaacatcactactctggggattaaatttcaatgtgaggttggaggggacaaacatccaaactacagcacttactttatcaattttctcaacaaaactataaaatatgcaaccctattttcaatgttagaatttgccaagatggctagccttcttttccctttaaaactactttaaagagtaaaatattaaataaatagaaggaagaaacctaaaaatcaagtcagctg

SEQ ID NO: 393807 - DNA, 600 bp, Homo sapiens
cactactctggggattaaatttcaatgtgaggttggaggggacaaacatccaaactacagcacttactttatcaattttctcaacaaaactataaaatatgcaaccctattttcaatgttagaatttgccaagatggctagccttcttttccctttaaaactactttaaagagtaaaatattaaataaatagaaggaagaaacctaaaaatcaagtcagctgatttatggtcatgtgattttcaaaaatcttttctctaaccaggcctgcatacgtaaaggaaggctcaaaccttccacagaayttcaaatcctcttctacccaaacatcatatttcctcagaactggcttaatgtttcttggtcaagccatataacctgttctagaaaggaaccccctctgtctcatttttatgcgtacaaaaaatggttaaaatgagacaatgtcacttttttttttatcctgaatggtggctgccagctattaaaatgctagttaccccaaaaatacaaaaacaccaaatacaggagccaaagacagccagaaaacaagaggaatgaagtctactgagtgattaatcatttgattaaccaggtaggt

SEQ ID NO: 393808 - DNA, 553 bp, Homo sapiens
tctccctgctgaaatattccactggtttcccatcttgcccagagtaaatatctaagtctttatgtggcttccaaggccctttgtgatcttagcctctgcttacctctcactccttatctctcctgttctctacttggttctctctacttcacccacactggcatcctagctgtttctcagccatggcaggcatactctgacctcagggcttttacatctgctgtcttctctgcctcaactgctctatctccagatatttacaatgcttgtctccttgctacatttagatgtcagatgatacctcatcagcaaggccttccataaaccgcccacctagaatagccrggactcccttattctcccactcattcccctgcttaatactttacctctgtattttattttatttttttcttgtgcctataacgatctgacatattttatatatgtaatttattgggctggtggtggaccagtatctgtcagatcttacaggcccagccttcaatagtggcatgagaggcaacattagcagagagctgactttagaccc

SEQ ID NO: 393809 - DNA, 608 bp, Homo sapiens
ctcccgtctcccaaatcctcttcctcacaggtacaaggcctcagagagatgccaacacctgcttctaccacgagactctttaaaggctcaaacaaatatttgacgagaggtgttcagagtcacactccaaatatctattttattcattcactgaactcttgcatctgccaagaaaggtgacaatcactggacaactgaagaagaatccaagaaatgcccaacattgccctcattgtcttatcttcctttccccatcccctgttgtttctgaaggagaagggatactcctggatctaccaggttcaaatagggcacgaagcctactcactgtcattggagaaaagagttgagctatggaccataaattctaagcccaaatttgccactaactttaagtaggccatttgatttctctgggtacaggtggatcctgtgacawacaatggagattccctcccacctattaggaatattagtagctgacagctctcagctgaaactcctttgcattttttctttgcttggaaagaattgtccagcctggagtctcttccttttccctgaaaatagctctcattcaattgctggtgatccattataggagtaca

SEQ ID NO: 393810 - DNA, 604 bp, Homo sapiens
tctaaaattcgaagatggttcttcagcagcctcctttcttaggcatccctaactacaaaaatccctttggtctacttgtgcatgaacaatctggacgagcactgagattttaactcaactttaaaggagtcatcacaaactcaccagttactatagcctcacacttggtcctattacaagagcttaagcccttgtatatcttaggrcaatagctgctgcaaccaaactcattcatgcctctgaggaactagtttttagctccttgcttgaccccacagtttctcacccagcacagaattactactgattgagcacacattatgtttcccagccatctgattaactacttaagagattctgtcactttcttcctttcctattactatttaccactaaaacactctcagtcctgccattctcctgcccctaaaggaagcaagggaaaacttatcattctctaacctcaattagggagctctctttattttactgatgtgtagaagagactcccatcaagaacttggtctaaatattatttgttgatggaccatacttaaatcagaaggtagtagttatcaaacaggatatcctatcactaatttaa

SEQ ID NO: 393811 - DNA, 604 bp, Homo sapiens
tctaaaattcgaagatggttcttcagcagcctcctttcttaggcatccctaactacaaaaatccctttggtctacttgtgcatgaacaatctggacgagcactgagattttaactcaactttaaaggagtcatcacaaactcaccagttactatagcctcacacttggtcctattacaagagcttaagcccttgtatatcttaggacaatagctgctgcaaccaaactcattcatgcctctgaggaactagtttttagctccttgcttgaccccacagtttctcacccagcacagaattactactgattgagcacacattatgtttcccagccatctgattaactacttaagagattctgtcactttcttcctttcctattactatttaccactaaaacactctcagtcctgccattctcctgcccctaaaggaagcaagggaaaacttatcattctctaacctcaattakggagctctctttattttactgatgtgtagaagagactcccatcaagaacttggtctaaatattatttgttgatggaccatacttaaatcagaaggtagtagttatcaaacaggatatcctatcactaatttaa

SEQ ID NO: 393812 - DNA, 585 bp, Homo sapiens
tttttttggcttgacaccaaaagcataggcaaactatgaagttttgatggcagaaaatgtgtcttgtttgttgttgcattcccagaacctagcattgggcttgcacatagtatgtgttcaatatttgttttaaaataaattaatggataatatattactctgtggttcactgactcaaagattgtgcagggattgaggtactatggtatgactagggagataaatgtgactatagaggttatgcaggttattacaggggtaccatttacataaactgtacaaagttgttctgagagagacattcttggaaactatgaataaatagttttttcacatgaataattatttattcttaagagttgatttcaatgactaaaaccattgaaatacttataaattcatttttttaagttatattttagataggactcagagatgtgacctgtatratgtatcctttcttcttctttttaaaaataatctaagattttgaaataggacttaggggaaatgctggaatggaaggatgtgtctaagtggtctaaccgaactgtaatcatgacactcctctctgcctgacctttt

SEQ ID NO: 393813 - DNA, 583 bp, Homo sapiens
aggtattacagctttgatatttacattatcctatgaaattggtgctcttataggctccccttttcaggtgagaaaacaggttctgagagattaagtcaatttacctaaaatcatatgtggcagatttgaacacagatctatatggctcagactcctgcttgtaaccactggtgatgctgatatgaagagcacaatgaaaagcacaatacagaaagtgtaaacccatcaggcatggtggctcatgcctgtaatcctagtacttygggaggccgaggaggatggatcacgaggtcaggagattgagaccatcctggctaacatggtgaaaccccgtctctactaaaatacaaaaattagctgggcgtggtggtgggcacctgtagtcacagctactcaggaggctgaggcaggagaatggcataaaccggggaggcagagcttgcggtgagctgagatcgcaccactgcactccagcctgggcgacagagtgaaactgtctcaaaaaaaaaaagaaagtgtaaaccaaaaataaaatgctaagacccccaaccatctgaatggacccctcctctcgaccaagggc

SEQ ID NO: 393814 - DNA, 599 bp, Homo sapiens
tattgctcaaaccaataggacaatttgctgaggcctgggagctcccccatccagagaatccctgatgtcccccaatttggttgtgatctaaggtttattttgctgtacaactccttttctggagttttactctaacaaaggaccctaaaagtttgtgtctttgagaattggatcttgtgaattatatcattggaatcccttgtgagttgccttctgattgggttcaaccaatgggagattggtgggcaggagagagatgtctcctgtgtagcagtgtcccacatctggtaatagctgcatccctccgggtagcctgttctccttcaggktgcttgtcttcacagagctctggtagaagcttttccttcatttgtccctttagccatagggggtagtaatccttccagctgttgctggtcttttggtttttcacttgcacctctctaagtagaggcttcattcaagtctccccatttgaaccatctgggaatgaattgtgtctcctgctgtgctcctgagtaatagagacagtagccaaggggtaatagggacatgaggactgaaagatttaactgacagcaaagcctatacactacatc

SEQ ID NO: 393815 - DNA, 501 bp, Homo sapiens
tcttctgacctgagaccatgagaacaatcttatgacctcagataatggacagcttcccctccagaccaagacccctgtataattcctgttttgtttttcatctgcttgcttataaacacttttcttctcatgttctatagatccctgattgttgtccacccataatggcttcttttttattttcattcatctttatgataactattaggttggaacattctcattcaaactcattctttgattattccaaaccatagccctgccttcaactttaccaacttttggatatgccattaatcaatggacccccatgatatcttagggcaatttcagtctcaccaaatgaagccatgaggaactactgattgcatttccatttgcacctacaaggacaaatgtactaaaatgaaccaacctrtaactttgccagtgtccttctttcccccagaaaaggagtacattgttacaatctattgattggaacttaggtaatataaattt

SEQ ID NO: 393816 - DNA, 417 bp, Homo sapiens
tatatatgatatacactgctctgaaccccacagctctagctacagactgaataatttcttgacatttgtayaaaaagcaagctgtactgagctcatccacaagtggtgtgcaattcagatttgtttcatctggtaatctccgagataaactgttgtgttgagtaaataagggttatgtctttgcctgtgacaccaatgtcaaaatttcacttcttatatcttgtttatttatacgtttttaggtaaaaaaaaatttattatagtgataaaaagaagacattgtacaataaaggatgtcatttttcaagagtcattatgacaaattattaacactacagtcacagtgtgaggtaagtttgcaactcctctaaggttgcatagctagtaagtggcagagcctggatttgaacgatgttt

SEQ ID NO: 393817 - DNA, 417 bp, Homo sapiens
tatatatgatatacactgctctgaaccccacagctctagctacagactgaataatttcttgacatttgtacaaaaagcaagctgtactgagctcatccacaagtggtgtgcaattcagatttgtttcatctggtaatctccgagataaactgttgtgttgagtaaataagggttatgtctttgcctgtgacaccaatgtcaaaatttcacttcttatatcttgtttatttataygtttttaggtaaaaaaaaatttattatagtgataaaaagaagacattgtacaataaaggatgtcatttttcaagagtcattatgacaaattattaacactacagtcacagtgtgaggtaagtttgcaactcctctaaggttgcatagctagtaagtggcagagcctggatttgaacgatgttt

SEQ ID NO: 393818 - DNA, 630 bp, Homo sapiens
gttatcatgcttaataaaacgtactttataaaccccatgaaggctgtaattaaatttacaaacagccttccccacaactttaacaaaagatatctgaatggtgtgtgtgtgtgtgtgtgtgtgtgtgtgtgtgtgtgtgtgtgtgcatgtrtgtgtgtgtgtgtgtgtgttttaaagtgtcctgttccataaggattatagctcccctgctgtttggaaaagacaatttcacttgtaacactaataacttgagcaggggagaagctggcctggtgaatggaatgcacttcactgcacatcttggctcagctagaaatcggaaacagatggtccttgcggctggtttcccactcgagcccgctcactgccagcctgtggtcttctgtgggctgctgctggcagtctgtgacttgaacatagtaggacagtggcaaaagaaatcaaatcttttccaatgagcagcaagttgtaatgaaatttgacagatctgacattctatacccaacatctagttagaatatattaacctttagttttcttaagcgccttgcatagaagttgtgaatatacttattagagggttatgttgtatgtgtttttttttttccttttttttcttttttaacaggg

SEQ ID NO: 393819 - DNA, 409 bp, Homo sapiens
ttatagaagctatttatatattaaagatattgtctgtgacaagttgcacatattttgcctcggatcatttgtcttttgactctgtttctagtacttttgcatgcaaatactttaaatatataaagttggatttatcagatttttcttgtccagttattgcattttgtataatatcgaaaagatgtttctcattcctggacaataaaataatcctcacatattttcttctactacctttatgatttaattttttacttttaaatrgttgattcatttggaactcatcttggtgcacagtgtgactgtgaatccaattttttttccaaatagttacccatctattactattacagactagtctgccccccaatttcaacacaccactgatttgagctgccaattttattat

SEQ ID NO: 393820 - DNA, 598 bp, Homo sapiens
tgattgctctattatgacaagcactgattgatataagtgttttgcatgtattcactcctttctaccttacaacaatctccatctcatttgttcactcgtgtgtcccaagctcctataacatggactgatagacagtggacaaaataaatatgtgctatgtgaataagcaactttatgaaatatatactggacagtatatatttctatgtacattttgcagataaataaacagaggcacagagcagttatgcttcatttccaagattttatactcagtagtaataactaagattcaggatagggaaagtgattctcctaaacttcaagtgaggtggtcaacgtcattagagccaaaacaactctagattctctaacttcaaacctatacataatttataggattttctgccaaataaaaataaattttgtgcacatgcacacataacaccaacacatgtgttcatgtaacagccagcagctttcctttcagaggtttcctaagaaacaagcaaaatcatagccataaaaagtgctttgaaagatrtaaaatagacccatgcaaggtgctataaaaataataatgattaaaatttatcac

SEQ ID NO: 393821 - DNA, 555 bp, Homo sapiens
atgcatacacaacaattcaaatatgaattatacatacttcactgataacatggatgtatacaccacaacagtttttttatacttcactgataacacggatgtatacaccacaacaattttttaaayatatggtgatgattggtgttgcccacaaatttgagtagttcaaaatttgccatatagggttctttttctcttatggatgaagaagctccaactgcaccaagccttctgcatataactatatactttagacaatatatgaagaaacaactacctcatgttaccagagagtgagcaaaagaaaaaagttctatagagaaggaaacagcataataagtatcacttttaaaatagatcgaccctgagggcaggccacagttggcaccactacatagctaaaactctgatagaaatcccaaaagaaaacctagcatctttctgtcctgaaaaattagagaacagagttcactgtaaccataactgctgtaaagtcagtgggggaggtctcaaaaaggagaaaacaagtgtgggaagccccaaattctgtatata

SEQ ID NO: 393822 - DNA, 529 bp, Homo sapiens
aaatagcatattaatgtaattcacaaattatactgagctgtaagatataacaagcaacagagtgaataaagacataatacaaatggattttgaggggttagagactcacagataagagcaacattggatttagtcaaaaacaaattcactaagggacaaatgttataaaaaaaacttactataggggaagatagggtgaaagkgtggtgtagggaaaagtgtcgttatttacattagtagcctgtaaatatatgaaaaaattatgtaggtatgaaagaaaaattggagcatatcactgtgtttctctcactgcattcatttactaggacattgagcaaacggccgtcaaatgctcatcctctgcctagcactaccactactctaagtactggaagtaagagctaagtaggacacaacccttcttttcctagaaagctcacagtctccaggggctggtggacaggcacacaattattgtactgggtgataaaggcaaaaacagaggcatttataacatgtattagaaaca

SEQ ID NO: 393823 - DNA, 514 bp, Homo sapiens
atctgttttttgcaaaatctattcaatcctcttctatcattttttctttctttatattcataacccttccaaactaagtaacattgaaacatttaatttagtaggcacctactttattcttggtaagaagctacatgaaaagaggtacagtacatgagatttcgaagcgagagtaaatagcatattaatgtaattcacaaattatactgagctgtaagatataacaagcaacagagtgaataaagacataatacaaatggattttgaggggttagagactcacagataagagcaacattggatttagtcaaaaacaaattcactaagggacaaatgttataaaaaaaacttactataggggaagatagggtgaaagggtggtgtagggaaaagtgtcgttatttacattagtagcctgtaaatatatgaaaaaattatrtaggtatgaaagaaaaattggagcatatcactgtgtttctctcactgcattcatttactaggacattgagcaaac

SEQ ID NO: 393824 - DNA, 521 bp, Homo sapiens
gagcaaaaaacagaaaccatcccaaccctcttcctttcttagccccatcccactacagactttcacctttttaaatcggatctaatcattgacctccactcaaaggcagtttctgaattagcagtgtttatctttcctccatgatggataaatcttgtttggagaccctcccccyttctacttgtctggaaaactctttttttttaatttaaggtatgctgccaacaattttcatagaggtctatctgtctccaccatcacacacacctgaatcaggctgggcaggttttctactttcttctcccaaaatatttacatttcttatgccctagggtaaatcactaactcattacttccgttcccgcattttctactagttggtgatattttgaagtacagaagctggaattgattgcaaggcatcttgaggtgtgtagcctcagacataatctgtagtaggagctcaatcaatgtttgtgaaataagtgagagaagaattggcacattcagtctaggaaaaa

SEQ ID NO: 393825 - DNA, 648 bp, Homo sapiens
  misc_feature (1)...(648): n = A,T,C or G
nnnnnnnnnnnnnnnnnnnnnnnnnnnnnnnnnnnnnnnnnnnnatatgtacacaccaggtgcccttctgctaaggaattatacaaattatctcaaggaatcctattaatatcccatctgatcaagaaacctgaagttcagaaaagttaagaagcttgtctgaagtcacacagcttgtcaatagcaaatycaactttgtaatctggtttgtcagaatctgaagtccatgccacccaataattcctccccattgagaggttaaatatggtcactgtgatgttccatgtgtcacatagaacttggctaggctaagatgctcagttgtctagccaaacacaagtcttgatattgctgtgaaggtattttttagatgtaactaagtttagtaactttgagaaaagttgttagtaatgtgtgtgggcctcatcaaattaatttacaaccataagaaaagattgggatttcgtgaagaagaatgggttctggaattctcctcaagaccacaacgtggaacccttgtctgagtttccagcctgctgctctgtggaactcaaactcaacactgaaacctcagctcttacctgaatttccagcctgccagcctatcttgcagatttcagacatgccaggccctactattgtaacgac

SEQ ID NO: 393826 - DNA, 648 bp, Homo sapiens
  misc_feature (1)...(648): n = A,T,C or G
nnnnnnnnnnnnnnnnnnnnnnnnnnnnnnnnnnnnnnnnnnnnatatgtacacaccaggtgcccttctgctaaggaattatacaaattatctcaaggaatcctattaatatcccatctgatcaagaaacctgaagttcagaaaagttaagaagcttgtctgaagtcacacagcttgtcaatagcaaatccaactttgtaatcyggtttgtcagaatctgaagtccatgccacccaataattcctccccattgagaggttaaatatggtcactgtgatgttccatgtgtcacatagaacttggctaggctaagatgctcagttgtctagccaaacacaagtcttgatattgctgtgaaggtattttttagatgtaactaagtttagtaactttgagaaaagttgttagtaatgtgtgtgggcctcatcaaattaatttacaaccataagaaaagattgggatttcgtgaagaagaatgggttctggaattctcctcaagaccacaacgtggaacccttgtctgagtttccagcctgctgctctgtggaactcaaactcaacactgaaacctcagctcttacctgaatttccagcctgccagcctatcttgcagatttcagacatgccaggccctactattgtaacgac

SEQ ID NO: 393827 - DNA, 648 bp, Homo sapiens
  misc_feature (1)...(648): n = A,T,C or G
nnnnnnnnnnnnnnnnnnnnnnnnnnnnnnnnnnnnnnnnnnnnatatgtacacaccaggtgcccttctgctaaggaattatacaaattatctcaaggaatcctattaatatcccatctgatcaagaaacctgaagttcagaaaagttaagaagcttgtctgaagtcacacagcttgtcaatagcaaatccaactttgtaatctggtttgtcagaatctgaagtccatgccacccaataattcctccccattgagaggttaaatatggtcactgtgatgttccatgtgtcacatagaacttggctaggctaagatgctcagttgtctagccaaacacaagtcttgatattgctgtgaaggtattttttagatgtaactaagtttagtaactttgagaaaagttgttagtaatgtgtgtgggcctcatcaaattaatttacaaccataagaaaagattgggatttcgtgaagaagaatgggttctggaattctcctcaagaccacaacgtggaamccttgtctgagtttccagcctgctgctctgtggaactcaaactcaacactgaaacctcagctcttacctgaatttccagcctgccagcctatcttgcagatttcagacatgccaggccctactattgtaacgac

SEQ ID NO: 393828 - DNA, 413 bp, Homo sapiens
ctcagctcttacctgaatttccagcctgccagcctatcttgcagatttcagacatgccaggccctactattgtaacgacccaataggttcttcttgcccattgcccagatagagccaatttatcaaaacaggggaattgcaatagagaaagatctttacacacytagagctgactagataggagactggagtttcattactactcaaattagccttcctgaaaatttggaggttagcagttttcaaagatattctggggctggggggagtagggtggataaggaatgggtgctgctgatcagttgcggatgcaatcataggggtgtggaaaatggtcctcccgcatgctgagttcgcttctggttggggccacaggacagattggtgggtcagtcatcagaaatgcaaaaaac

SEQ ID NO: 393829 - DNA, 413 bp, Homo sapiens
ctcagctcttacctgaatttccagcctgccagcctatcttgcagatttcagacatgccaggccctactattgtaacgacccaataggttcttcttgcccattgcccagatagagccaatttatcaaaacaggggaattgcaatagagaaagatctttacacacctagagctgactagataggagactggagtttcattactactcarattagccttcctgaaaatttggaggttagcagttttcaaagatattctggggctggggggagtagggtggataaggaatgggtgctgctgatcagttgcggatgcaatcataggggtgtggaaaatggtcctcccgcatgctgagttcgcttctggttggggccacaggacagattggtgggtcagtcatcagaaatgcaaaaaac

SEQ ID NO: 393830 - DNA, 413 bp, Homo sapiens
ctcagctcttacctgaatttccagcctgccagcctatcttgcagatttcagacatgccaggccctactattgtaacgacccaataggttcttcttgcccattgcccagatagagccaatttatcaaaacaggggaattgcaatagagaaagatctttacacacctagagctgactagataggagactggagtttcattactactcaaattagccttcytgaaaatttggaggttagcagttttcaaagatattctggggctggggggagtagggtggataaggaatgggtgctgctgatcagttgcggatgcaatcataggggtgtggaaaatggtcctcccgcatgctgagttcgcttctggttggggccacaggacagattggtgggtcagtcatcagaaatgcaaaaaac

SEQ ID NO: 393831 - DNA, 510 bp, Homo sapiens
tccattatttcttctagagaaatgattctcaaatggagcctattttgcctcccagaaaacatttggtaaaatctgaagacatttttagttgttacaaaagaagaggtgctaactggccaaaaatgccaatccttcagaggttgagaaatcttactttataattgttatgcataggcctataatccatttaaattaatcttggaacatagagtgaaataggagataggtgtatttttcagccttaactactttactgccattacatttaagtctttatccatcttsagttgatttttgtatatggaataaggaaggggtccagtttcaatcttctgcatatggctagccagttatcccatgaccatttattgaatagggactcttttggtcccattgcttgtttctgtcaactttgctaaagttcagatggtcataggtgtgcagtcttaattctcggttctctattctgttgcattggtccttgtgcctgtttgtttgtttgtttttgcc

SEQ ID NO: 393832 - DNA, 513 bp, Homo sapiens
taaataatggtactcccaacactagaatagtgcctgtaatgtactagctgcttgataaatatttgatggtttgtaactcaaaggataaatgcttgacgggatggttaccccattctccatgatgagcttatttcacatggcattcctgtatccaaacatcttatatacacccataaatatatacatccactatgaacccacaaaactttaaaaaatattaaaaaagaaaaaaataaatatttgataaatcagtgaatggataaataccttaatataagtattagaaagaagaacttttagggagagaggtctacargtgcccagaatattttactattctcatattcacttattaattctccttttagttttgacatcttttattactagaatgataatgatgataactactatctttatagctattatgtatgtattgacaccataaaacaggcactgaaactgtgcctggatctgtgtccccacccaattctcatgttgaattgtaaaccc

SEQ ID NO: 393833 - DNA, 513 bp, Homo sapiens
taaataatggtactcccaacactagaatagtgcctgtaatgtactagctgcttgataaatatttgatggtttgtaactcaaaggataaatgcttgacgggatggttaccccattctccatgatgagcttatttcacatggcattcctgtatccaaacatcttatatacacccataaatatatacatccactatgaacccacaaaactttaaaaaatattaaaaaagaaaaaaataaatatttgataaatcagtgaatggataaataccttaatataagtattagaaagaagaacttttagggagagaggtctacaggtgcccagaatattttactattctcatattcacttattaattcyccttttagttttgacatcttttattactagaatgataatgatgataactactatctttatagctattatgtatgtattgacaccataaaacaggcactgaaactgtgcctggatctgtgtccccacccaattctcatgttgaattgtaaaccc

SEQ ID NO: 393834 - DNA, 513 bp, Homo sapiens
taaataatggtactcccaacactagaatagtgcctgtaatgtactagctgcttgataaatatttgatggtttgtaactcaaaggataaatgcttgacgggatggttaccccattctccatgatgagcttatttcacatggcattcctgtatccaaacatcttatatacacccataaatatatacatccactatgaacccacaaaactttaaaaaatattaaaaaagaaaaaaataaatatttgataaatcagtgaatggataaataccttaatataagtattagaaagaagaacttttagggagagaggtctacaggtgcccagaatattttactattctcatattcacttattaattctccttttagttttgacatcttttattactagaatgataatgatgataactactatcttyatagctattatgtatgtattgacaccataaaacaggcactgaaactgtgcctggatctgtgtccccacccaattctcatgttgaattgtaaaccc

SEQ ID NO: 393835 - DNA, 462 bp, Homo sapiens
taattaatgtaaagaagcaaattgcattatatcactcattacttaataaaaaattgagcatttattttccagggaagacaaatgtggttggggttcctactttataacatttggtgtggatttttacaagattattatgcaatccgtcaatggactgtgggcggtgcrgggcagcacggattccaaatatttacaaatcacatgcattaccttgaattgtgttattacggcctccacaaccattgtgccatcaactcaaaggaagaaatatcttcctcaagctctatttgaaggctaaatatatcttcccacctttgtttctactattctaatttatcacctggtcattttctgacatctccctttaatacagcttcgttttacacctctaggtcttttgatgcacgctcttaggcatctctgccttactgctgcacacatccaccatgttattcagactca

SEQ ID NO: 393836 - DNA, 462 bp, Homo sapiens
taattaatgtaaagaagcaaattgcattatatcactcattacttaataaaaaattgagcatttattttccagggaagacaaatgtggttggggttcctactttataacatttggtgtggatttttacaagattattatgcaatccgtcaatggactgtgggcggtgcggggcagcacggattccaaatatttacaaatcacatgcattaccttgaattgtgttattacggcctccacaaccattgtgccatcaactcraaggaagaaatatcttcctcaagctctatttgaaggctaaatatatcttcccacctttgtttctactattctaatttatcacctggtcattttctgacatctccctttaatacagcttcgttttacacctctaggtcttttgatgcacgctcttaggcatctctgccttactgctgcacacatccaccatgttattcagactca

SEQ ID NO: 393837 - DNA, 462 bp, Homo sapiens
taattaatgtaaagaagcaaattgcattatatcactcattacttaataaaaaattgagcatttattttccagggaagacaaatgtggttggggttcctactttataacatttggtgtggatttttacaagattattatgcaatccgtcaatggactgtgggcggtgcggggcagcacggattccaaatatttacaaatcacatgcattaccttgaattgtgttattacggcctccacaaccattgtgccatcaactcaaaggaagaaatatcttcctcaagctctatttgaaggctaaatatatcttcccacctttgtttctacyattctaatttatcacctggtcattttctgacatctccctttaatacagcttcgttttacacctctaggtcttttgatgcacgctcttaggcatctctgccttactgctgcacacatccaccatgttattcagactca

SEQ ID NO: 393838 - DNA, 618 bp, Homo sapiens
tataataggactaaataaagacattgctttagctggcttttgctgactataacccaggggtctgacccatggattagatttaaagtgacacagttccagttaactagcgaatcatggagaaggttttgagaatgaaaatatttcaagtaataattctctcctccatccaaatactcaggaattaataaataaataagaatctcagataaagagtcttagaagtacagatttctaggcattcacccaagacatgttaaaatataatcttaagaatatttttattttttattaattccatagatgatataaagtgtaactagtgctgagaatcataggtttatgggcatgcaaccctgaactgtgcaatttcttctgatttcaaaagccagatggaatacaacctagttaataagcatcaggatttggggaaagacaagggggatgataggtcagcttctttagctttcaaraaatcctttttattttaaataataaggaaaatcttagccagatgacccatttaagtcaacatagactgtgcacatttgatgagtcagcaaaatccaaaccataaccaaaaataatgacaaagacatgcaattgtcatgcagcatttta

SEQ ID NO: 393839 - DNA, 644 bp, Homo sapiens
ttaataaataaccataatatattaaaagtcaaattataatagtgtgatgttattgaattagggcaaatacatgacactgtgaaatccttaataaattatgcatgaggcattctgaattgtttacctcaatttggacaattttagagattaaagagtactgtgtaatttagtttgtagttttagggcataatggggagaagagaaacatagcttgtatttgttccagcttatttttgtattagtgtcttacttcacaattgtgtttgaaaacatttatttatttactttacattaatattgcttatcgttcaatgttttcagaagtaaatcaacttcaatagaagttaaaaatgaaagcttcttttggaaataaatgtggttactctcacaaatcttatctatctcttgactctttgtaagacaattgtytactcatacatttattttcaaaatcatctacttcaagctttaacatcagagcaaaatgtttcttgctcatgaaacaatgagaaatagtagagtgtgtgtgtgtgtgtgtgtgtgtgtgtgtgtgtgtgtgcgaattttccctggaggaagagttggatgtctaaaataggcaaaataaaacacaataaggtaaatgttttcatagagatacttaa

SEQ ID NO: 393840 - DNA, 595 bp, Homo sapiens
tctctaaataactacgtggaagaccactcaccaaatattcaataagacaggctgtgtcagggacatcaaatacatttttaytttttaaaatcattgatgtatgtgtgtttgttacagtagctagtattaagacaatagagaaagctaccttgaactagaaggtggcaaaaacaaaattctaacagtttcagtctcagcagtcaccacagtagacagaaaggacactaacatcagaggctgggaaaatgtcaatgcatgatataaactagcaaaatatttggtaagcacgtaggccctgttaacttgagaatcataccatgtaactgttgagcttgtggttgaaaaacagaatattcatggtcaacatagggggaaaaaaaagcaaaaacaaaaaccaggtaatttgtaagctgatgcaaagctaagtaaagaaaatccagacactcaggaccttgttgaattagaaaacctgactgtttctagaatcaaagagatggtatcttcaaaggacatgagtgatgtgtgagtgagaaaactctggcaaaacttctctgttaaacaaagtgactcagggcatggatgtgattgaagtgtg

SEQ ID NO: 393841 - DNA, 551 bp, Homo sapiens
ggactgagatacacataagggattcaagagtgagtttgtgaagattcaaaatcattgagcttgctctgggcgtacttcatgttccatcccatgtgtcacatgacagcagaggattcaaggtgaagttaatagcacagagattgcaaagaaaaagacaaagaaatgagataatgagaaatgctatctttttttttttttttttttttttttttgtgacaraacctcgctctgttgcccagactggatgcaaccttggctcactgcaacctttgcctccagggttcaagcgaatctcctgcctcagcctccccagtagctgggatcacaggtgcgcaccaccacacctggctaattttgtattttagtagtagagcatgggggtttcaccctgttgatcagactggtctcaaactcctgacttcaggtgatccgcatgcctcagcctcccaaagtgatgggattacaggcgtgagccaccacgccctgccctaatgctgtccttcttagtgaccacttgcctgtttcatttatgcttaacgttcactacagtg

SEQ ID NO: 393842 - DNA, 551 bp, Homo sapiens
ggactgagatacacataagggattcaagagtgagtttgtgaagattcaaaatcattgagcttgctctgggcgtacttcatgttccatcccatgtgtcacatgacagcagaggattcaaggtgaagttaatagcacagagattgcaaagaaaaagacaaagaaatgagataatgagaaatgctatctttttttttttttttttttttttttttgtgacaaarcctcgctctgttgcccagactggatgcaaccttggctcactgcaacctttgcctccagggttcaagcgaatctcctgcctcagcctccccagtagctgggatcacaggtgcgcaccaccacacctggctaattttgtattttagtagtagagcatgggggtttcaccctgttgatcagactggtctcaaactcctgacttcaggtgatccgcatgcctcagcctcccaaagtgatgggattacaggcgtgagccaccacgccctgccctaatgctgtccttcttagtgaccacttgcctgtttcatttatgcttaacgttcactacagtg

SEQ ID NO: 393843 - DNA, 608 bp, Homo sapiens
taaatagcataatggactttagaaatagacgctcagtgtaatcaatagtactcaagataagtgaactggctaaaatattttagagacagtctcaacatggcatggwaaggactacagatctagcagtgctttttctgttcaataccatatggattggcattagaggtataatatagtaaatgtcttgagttcaccttgaactttgaggatttcatttgctgacaataactaggtcttactgacttctcctctagaatattgctgtttttccacaaaagaatttttcatgcaaagtgccctcagagtacctaaaagaatagtgagttgagattttttttcaagctatatgactgtctttttatttgcttgataacaaatgtttgttttcaaaatatcttatggagcagtccttgtatgattgtactggtcacttgcagtaggaatgaccaattaataatgccccagctcctcgaagctcatgatctgccaagaagacaacactaatgggtgcatgaataattacataatttgtgtccatgatatgggagggacccttctgaaaggggcagagccagtcccctcctggcctgtggtcctcactgggagcc

SEQ ID NO: 393844 - DNA, 551 bp, Homo sapiens
tccaattacttatgactaaggtatttggatgaaaacaacaaaaccaacaactgttagtggaaataaggccagcattttgtacaatctcacaggggttctgataaggctgtgtgaatacggaaaaagaaaaccagaagacagacagctttacgatgcttagaccacagtcatcctatttctaatcccattttcttttcttttcttttttttttttttttgctttcaagacctgcatcagagagagattattcctaactgtgtattcttttgaattaatttgccagatttgaagaaaatgagggaaattaacaaggaccaagataagaggtcagtaacagaagagaactcatttttagcatatttacttagcagacggttttgagcrgaccacggagttttgaagtaagaaggatagctactgaatagtggtttgaccacttgatatgtccctcaggtaaccctcacatctctcatcagtgaaataagaaaaataaaagccacttcaaggtgacatcattgaggaaacacaactagttattgcatgcaaagct

SEQ ID NO: 393845 - DNA, 626 bp, Homo sapiens
cacaactcagttactttcagctggactccctcagctgcaaactggtggccagggaccgaagtacatccatgttttatttagtctcgtaaattttgtgtgtgtgtgtgtgtgtgtcaaagtttgtttgtgttagcattcaaatatcaaatattgccacagtaaactatttagagcacactgataaaagttatttttaaaagctgtcctgagaagtgagaggatctgcctgccttcacagaaaatcttagcatggatgtgagtagctgttgtyttcttttgatctggtttgtgtttcctaacttgccataccccctgtctgtagttttcactcatttgtgatatctgcttaacccccaaggcttcagtatttgtggctgctgagataatttctaggctccttttcaacttgaaaattttgtgattctgagcataagacatgactcttatctttaagaaatgtattttcaatcaatcaaaaaatttatttggagtactaagaatccagagtattgaactaagagcctcagctggcatttatgtgattacctaccaaattatgttttcctttctcctgtgtatttttaaataaataatgcctgcatcaattccccttgacattaattcta

SEQ ID NO: 393846 - DNA, 588 bp, Homo sapiens
cagaatatgtatggctttttttttttaagttctgggatacatgtgctgaatgtgtaggttttttacataagtatacatgtgctgtggtggtttgctgcacctatcaacctgtcatctaggttttaagccctacatgcattaggtgtttgtcctaatgccctttctcccctttcccctcacccactgacaggctccagtgtgtgatgtgtctacatgttctcattgttcaactcccacttacgagtgagaacatgcggtgtttggttttctgttcctgtgttggcttgmtgaggatgatggtttccagcttcatccatgtccctgcaaatgatctgattgctgaaacatttttttaatggcatgttcagcaaaggtttcactaaagaatcaagaaaataattgacaaaaattcaggcattcaggagtgttaggaggcaatctagacaggacttacacatgaaacagctgaaaaacaggctgtgatccctccataacacataatttgagggcaaaaatgggttaacattgaggacaagaagttcagatttatagaatacctgtcaggagagatatagagttactttgtat

SEQ ID NO: 393847 - DNA, 588 bp, Homo sapiens
cagaatatgtatggctttttttttttaagttctgggatacatgtgctgaatgtgtaggttttttacataagtatacatgtgctgtggtggtttgctgcacctatcaacctgtcatctaggttttaagccctacatgcattaggtgtttgtcctaatgccctttctcccctttcccctcacccactgacaggctccagtgtgtgatgtgtctacatgttctcattgttcaactcccacttacgagtgagaacatgcggtgtttggttttctgttcctgtgttggcttgctgaggatgatggtttccagcttcatccatgtccctgcaaatgatctgattgctgaaacatttttttaatggcatgttcagcaaaggtttcactaaagaatcaagaaaataattgacaaaaattcaggcattcaggagtgttaggaggcaatmtagacaggacttacacatgaaacagctgaaaaacaggctgtgatccctccataacacataatttgagggcaaaaatgggttaacattgaggacaagaagttcagatttatagaatacctgtcaggagagatatagagttactttgtat

SEQ ID NO: 393848 - DNA, 588 bp, Homo sapiens
cagaatatgtatggctttttttttttaagttctgggatacatgtgctgaatgtgtaggttttttacataagtatacatgtgctgtggtggtttgctgcacctatcaacctgtcatctaggttttaagccctacatgcattaggtgtttgtcctaatgccctttctcccctttcccctcacccactgacaggctccagtgtgtgatgtgtctacatgttctcattgttcaactcccacttacgagtgagaacatgcggtgtttggttttctgttcctgtgttggcttgctgaggatgatggtttccagcttcatccatgtccctgcaaatgatctgattgctgaaacatttttttaatggcatgttcagcaaaggtttcactaaagaatcaagaaaataattgacaaaaattcaggcattcaggagtgttaggaggcaatctagacaggacttacacatgaaacagctgaaaaacagrctgtgatccctccataacacataatttgagggcaaaaatgggttaacattgaggacaagaagttcagatttatagaatacctgtcaggagagatatagagttactttgtat

SEQ ID NO: 393849 - DNA, 570 bp, Homo sapiens
  misc_feature (1)...(570): n = A,T,C or G
cacagattcatgagtcttgttaatttcatgtgtgtagggggtgggggcacatacacatgcatgagatatacaacctgggttgaaacctacatcagttgcaacaataattggggcttgaattgggagttttaagcagccaatagcttttgcatcattgaggataaaaaatccccagcaatgtgagtctccaaggataccataaaaatggtgcattagaaaaaagtgtaaactttgactgcttccntaagccagagaggattttattaatcaccccttgtgggcgttagaatttaattccagcttcaatagaatgagatttatctcactttcttacccttcctcccaccctcagcttttattctgtagaagatgcagttaagagtttcctctcctactgcaggctgatttctttcagctgacyatggctggggaagaaaagaatcgaggattgtgtatgaagttcagagtttgaatgagacccaggtcatgacatattagtaacagaactaagaccattcttgtgataaaaggtcagtattttatttgaagtggccatatgtgtggtggaaa

SEQ ID NO: 393850 - DNA, 528 bp, Homo sapiens
agaagatgcagttaagagtttcctctcctactgcaggctgatttctttcagctgaccatggctggggaagaaaagaatcgaggattgtgtatgaagttcagagtttgaatgagacccaggtcatgacatattagtaacagaactaagaccattcttgtgataaaaggtcagtattttatttgaagtggccatatgtgtggtggaaaccaccttagtttttatccaattggattagggaaaagaagcaaatagaaaaggttgcaggggaagttgtgagaaagaatacaattgctttatggttttattctaaaattgtgctctttcaatctaacattgacattattatttttatctttactatartaatgatcattatcttcatcattattattttagacggttgggaaactaagctagctttctaatggctctttttaaaaaaaaaaacttacaaaaaagcttattatgggattggctcataattaatcttatgggaaggccaaactgaggaattatgtgtgacagaag

SEQ ID NO: 393851 - DNA, 576 bp, Homo sapiens
tactggcaatcaccattctattttctgcttctatgagtttgatatttttagattccacatatatgtgagattgggtagcatctgtcttctaagccaggcttatttcacttagcatcatatcttccaggttcttctatgtggttacaatcayaagaatcctttttatttttgagttttgatgaacttactgaaacaaaatcctcatttctatgaagcccatggggtgtacataaaaatgatggtgattatttttgttctccattctttttctttgtcctaaatctaactctactatgaaatctgcatgttaaaaatgatttttctatgggaagatgtttgggttcaaggtgtggagggactatggtttttaagaggaaaatcattaacaaagctgaagaattgtaggctgacattagtcgcttattagtgtcactgcattcagtttagatctctagatccttcacaggaaagcccttaataagcaaccttcctacttccttcttggtccattaatttgaaccataatcttatccattccagcattgggcttttatcatgcactgtctagatgagcta

SEQ ID NO: 393852 - DNA, 576 bp, Homo sapiens
tactggcaatcaccattctattttctgcttctatgagtttgatatttttagattccacatatatgtgagattgggtagcatctgtcttctaagccaggcttatttcacttagcatcatatcttccaggttcttctatgtggttacaatcacaagaatcctttttatttttgagttttgatgaacttactgaaacaaaatcctcatttctatgaagcccatggggtgtacataaaaatgatgrtgattatttttgttctccattctttttctttgtcctaaatctaactctactatgaaatctgcatgttaaaaatgatttttctatgggaagatgtttgggttcaaggtgtggagggactatggtttttaagaggaaaatcattaacaaagctgaagaattgtaggctgacattagtcgcttattagtgtcactgcattcagtttagatctctagatccttcacaggaaagcccttaataagcaaccttcctacttccttcttggtccattaatttgaaccataatcttatccattccagcattgggcttttatcatgcactgtctagatgagcta

SEQ ID NO: 393853 - DNA, 473 bp, Homo sapiens
ttctgggagcaggaatagcccatttcctaatgaggagatatgaaagtggttcatactttggagtagactgcaataacttggtttgatttataaaaaggaatttrtaggtgacacaggtcagggaaacagtggtgtattagccctttttttgtgttgctatgaagaaatatctgaggctgggtaattgataaagaaaagaggtttaatgtgctcatggttatgcaggctatacaagcatggcacctgcacctgcttctggtgaagccacaggaagtttagagtcatgatggaaggtgaagtgggagatagtgtatcacagagtgggagcaagagagagggggccgaggtgccacactcttttaaaaacaaccacatctcacatgagctaacttatcactacatcttaacaacaacttaacaccactcacttatcaccacagggagggtgctaaaccattcatgagggatcctcc

SEQ ID NO: 393854 - DNA, 590 bp, Homo sapiens
ttggtttgatttataaaaaggaatttataggtgacacaggtcagggaaacagtggtgtattagccctttttttgtgttgctatgaagaaatatctgaggctgggtaattgataaagaaaagaggtttaatgtgctcatggttatgcaggctatacaagcatggcacctgcacctgcttctggtgaagccacaggaagtttagagtcatgatggaaggtgaagtgggagatagtgtatcacagagtgggagcaagagagagggggccgaggtgccacactcttttaaaaacaaccacatctcacatgagctaacttatcactacatcttaacaacaacttaacaccactcacttatcaccacagggagggtgctaaaccattcatgagggatcctccgtgctcatgatctgatgacctaccrccagatcccacttccaacaatgagattcacacttcaacatgagatctggagggagcaaacatccaaaccatatcaagtggtgaggaatggggaggtcagaggaagaataaatgtgtcagagatggccaaggaggccttcttggagagggacctgtaagctcacctctgt

SEQ ID NO: 393855 - DNA, 355 bp, Homo sapiens
ctccgggccaaaaagaaatcaggcaaggtataaatagaaactggcagtggcatgaaagctcctatagcattgataaatttccatgaggacatgaaagcaatacttaagagtcagaaacgtgtgcttccagttcaatcctgtccacaaagcaacgccttcccccaaatctgtgcttgctgaaacgctaccactccttctatctcctttcaaatgctacttcctccaagaagctggctcagattctcctcaactgaatgtgactccacgtgtttttaaagacatacacgtattatgcttgcttgtrttgcagtccttctttgctagcccaattaatcagtgttacgatcatctctcc

SEQ ID NO: 393856 - DNA, 536 bp, Homo sapiens
tgggaaatacaagaatcagcaagatatatcccctgcccttaagaccatggcagccaagtaagcatggtattaaaatacgaggatataagtgctgaaagaaaggtaatttaagataatatctggagcacatagaaaaagcacctatttaaaataggactaaccctttactcgtgagccatgtgacctgagagcagtattaggtatcaaggaaggctttctggaagtggtgacatctaagttgaaacctgcaggatgactgagctgaataaagaacaggtaccagtgcsttctacacaaatcgggcaatacatgagaacaattcatagaatgatacaacacaagaaagtgaactttcagacaaactatggatttcagctaacaatagtgtatcaatgtcaggtcatcagttgtaatgcactacacaaatgtaaaatatcagtaataggggaaacttgatgggggctaaggtgtcaggagaaggagtaccagggaactgtgctttctgcttaattttttttacaaatcaacaaacgatg

SEQ ID NO: 393857 - DNA, 575 bp, Homo sapiens
tatcccctgcccttaagaccatggcagccaagtaagcatggtattaaaatacgaggatataagtgctgaaagaaaggtaatttaagataatatctggagcacatagaaaaagcacctatttaaaataggactaaccctttactcgtgagccatgtgacctgagagcagtattaggtatcaaggaaggctttctggaagtggtgacatctaagttgaaacctgcaggatgactgagctgaataaagaacaggtaccagtgccttctacacaaatcgggcaatacatgagaacaattcatagaatgatacaacacaagaaagtgaactttcagacaaactatggatttcagctaacaatagtgtatcaatgtcaggtcrtcagttgtaatgcactacacaaatgtaaaatatcagtaataggggaaacttgatgggggctaaggtgtcaggagaaggagtaccagggaactgtgctttctgcttaattttttttacaaatcaacaaacgatgttaccaatagagttgataaattttttttaaggctaatgctacagatgacttattgtttagagaac

SEQ ID NO: 393858 - DNA, 575 bp, Homo sapiens
tatcccctgcccttaagaccatggcagccaagtaagcatggtattaaaatacgaggatataagtgctgaaagaaaggtaatttaagataatatctggagcacatagaaaaagcacctatttaaaataggactaaccctttactcgtgagccatgtgacctgagagcagtattaggtatcaaggaaggctttctggaagtggtgacatctaagttgaaacctgcaggatgactgagctgaataaagaacaggtaccagtgccttctacacaaatcgggcaatacatgagaacaattcatagaatgatacaacacaagaaagtgaactttcagacaaactatggatttcagctaacaatagtgtatcaatgtcaggtcatcagttgtaatgcactayacaaatgtaaaatatcagtaataggggaaacttgatgggggctaaggtgtcaggagaaggagtaccagggaactgtgctttctgcttaattttttttacaaatcaacaaacgatgttaccaatagagttgataaattttttttaaggctaatgctacagatgacttattgtttagagaac

SEQ ID NO: 393859 - DNA, 552 bp, Homo sapiens
ttagtaaatgaataaacaaaccagagttgaagagatcacttttttctagtggacctcagcaggcctcagggagaaacggatgctttagctacactgtggtaaatctaggttctaatagcttatcaagataggcataacccttgttaggcagagagatgagataatttctagttactgaaatatggctggatgggataaccattgacccacagcagggagagaagaccagcaggtttttcttcccaaaggctgtattatttatgcaaygagcatgctgaattacatcacttcaacacaacttagaaatacaggaggagtgctttcattatagacgtactaaaagtagagtcagccttctgtttaaagctttctgttccaggcacatcactcttcacttattctctgctataccctttctgctaatagttaacgaacaaccaccgctttcttactctgtttcactctgcaaatgttgagataataaatggcgcaaggcttagtgagcattttacccagtgtcagacactaaatgctttacttgtatcatcccat

SEQ ID NO: 393860 - DNA, 440 bp, Homo sapiens
acacagctgcctaaaaaatttatatttacacttacagtacctgtaatagtacctcatccatgcacaaacacaataaatatttatggaatgaatgtataaatgcacaaatgttggtatatttcaaatccaacttacataaatgtgggaaaaagagagatcagattgttactgtgtctgtgtagaaagaagtagacataagagactccattttgttctgtactaagaaaaattcttctgccttgagatgctgttaatctgtaaccctacccacaaccctgtgctccctaagacatrtgctgtgtcaactcagggttaaatggattaagggctgtgcagggtgtgctttgttaaacaaaggcttgaaggcagcctgcttgttaagagtcttcatcactccctaatctcaagtacccagagacacaaaacactgcagaaggcca

SEQ ID NO: 393861 - DNA, 585 bp, Homo sapiens
ttaaatggattaagggctgtgcagggtgtgctttgttaaacaaaggcttgaaggcagcctgcttgttaagagtcttcatcactccctaatctcaagtacccagagacacaaaacactgcagaaggccacagggacctctgcctaggaaagccaggtattgtccaaggtttctccacatgtgatagcctgaaatatggcctcgtgggaagggaaagacctgaccatcccccagccsgacaccagtaaagggtctgtgctgaggaggattagtaaaagaggaaggaatccctctttgcagttgagataagaggaaggcttctgtctcctgctcctccctgggcaatggaatgtctcagtgtaaagcccgattgtatattccaactactgagataggggaaaaccaccttagggctggaggtgggacatgctgtcagcaatactgctctttaaggcattgagatgtttatatatatgctaatcaaaagcacagcacttttttctttaccttgtttatgatgctgagacatttgttcacgtgtttacctgctgacctctccactattatcctattgtcctgccacatcc

SEQ ID NO: 393862 - DNA, 585 bp, Homo sapiens
ttaaatggattaagggctgtgcagggtgtgctttgttaaacaaaggcttgaaggcagcctgcttgttaagagtcttcatcactccctaatctcaagtacccagagacacaaaacactgcagaaggccacagggacctctgcctaggaaagccaggtattgtccaaggtttctccacatgtgatagcctgaaatatggcctcgtgggaagggaaagacctgaccatcccccagccggacaccagtaaagggtctgtgctgaggaggattagtaaaagaggaaggaatccctctttgcagttgagataagaggaaggcttctgtctcctgctcctccctgggcaatggaatgtctcagtgtaaagcccgattgtatattccaactactgagataggggaaaacsaccttagggctggaggtgggacatgctgtcagcaatactgctctttaaggcattgagatgtttatatatatgctaatcaaaagcacagcacttttttctttaccttgtttatgatgctgagacatttgttcacgtgtttacctgctgacctctccactattatcctattgtcctgccacatcc

SEQ ID NO: 393863 - DNA, 585 bp, Homo sapiens
ttaaatggattaagggctgtgcagggtgtgctttgttaaacaaaggcttgaaggcagcctgcttgttaagagtcttcatcactccctaatctcaagtacccagagacacaaaacactgcagaaggccacagggacctctgcctaggaaagccaggtattgtccaaggtttctccacatgtgatagcctgaaatatggcctcgtgggaagggaaagacctgaccatcccccagccggacaccagtaaagggtctgtgctgaggaggattagtaaaagaggaaggaatccctctttgcagttgagataagaggaaggcttctgtctcctgctcctccctgggcaatggaatgtctcagtgtaaagcccgattgtatattccaactactgagataggggaaaaccrccttagggctggaggtgggacatgctgtcagcaatactgctctttaaggcattgagatgtttatatatatgctaatcaaaagcacagcacttttttctttaccttgtttatgatgctgagacatttgttcacgtgtttacctgctgacctctccactattatcctattgtcctgccacatcc

SEQ ID NO: 393864 - DNA, 528 bp, Homo sapiens
ggcttcttccttccctccctgacatcttatcctcttcactttgacccacttcaggaacctggccttccaagtcctggaatgagctgtcaacattctccatgagtcttttccatgtgaccgagtgggaatcggtgtcttgaccagggggatttaacccagtgattgggttggcaaaatttgattttccctcacttagaaatttggaagtgaaatgtggagatgggtttaattaatcataggttccagactagatgaaaggctcatgtgactcaggactgcaggcaaagtcagaggctgccagaatggaatacacaaaaaagatgagggaacctgtatgtagagaaaaaagtataaaatgcacaaatatgggagatgcatagttaaaagtatacaaatgtgttagttttctattgctgctgttgcaaattaccacaaattrggtggtttagaaaagcatacaattacaattcccagtgctgtgggtcaggaggctgacatgggtctcactgggctaacatccaggtgctg

SEQ ID NO: 393865 - DNA, 582 bp, Homo sapiens
ctgcctgtattgtagtaaattacctggtttaaatgctggagttttgcttgtggtcaggataaagtagttaatcacaacccctgagatgcaaatataaattgctatagaactgaacactgtatttgagaaaatagctacyaggctttggacaacaggacaagatcaaagtcctgtaattcctaggagaatggaaatacactagatgagtcccatcttgccatgtctttagctgagggcacttcctggattgtaatgtaattaggtaacacccaagcagagaatggcggttccactgagctaatgaggcagagacaagagtttaatgatactgaagcagctttcacacggtgaaccggggactggaaaggagagagatgagggtaaagacataggcataggacttctccacaggtttttgttgaagacttggcctgcatttttgtagaataaactttgcaatgtctactagagagtggtagctatagggatgagagctaaacagatatgttgaagatattgcagagctagtatatgctatatttctggccttgcagtatgtaaaatactcttaatgagcaactc

SEQ ID NO: 393866 - DNA, 582 bp, Homo sapiens
ctgcctgtattgtagtaaattacctggtttaaatgctggagttttgcttgtggtcaggataaagtagttaatcacaacccctgagatgcaaatataaattgctatagaactgaacactgtatttgagaaaatagctactaggctttggacaacaggacaagatcaaagtcctgtaattcctaggagaatggaaatacactagatgagtcccatcttgccatgtctttagctgagggcacttcctggattgtaatgtaattaggtaacacccaagcagagaatggcsgttccactgagctaatgaggcagagacaagagtttaatgatactgaagcagctttcacacggtgaaccggggactggaaaggagagagatgagggtaaagacataggcataggacttctccacaggtttttgttgaagacttggcctgcatttttgtagaataaactttgcaatgtctactagagagtggtagctatagggatgagagctaaacagatatgttgaagatattgcagagctagtatatgctatatttctggccttgcagtatgtaaaatactcttaatgagcaactc

SEQ ID NO: 393867 - DNA, 597 bp, Homo sapiens
gtgggtggtctaagggtgggtggtccaagatggtgcatggactacagtctggagaggacccatcctcacttaggtcgtgggtccagmaggaaggcagttctcacagagcacgtggccttccaaagggaagcagctgctgtcttctgcctcagttgacaggggcttcccacagtcccctcacttgtaacacttgaattgatttgacatccttatggaaatatccctgaagttttaatacctgaacttaaatctctgattgactgctgattatctgtgagcttcttagtgggactactctgattatcttttctttcttgcctataactcccctttgaatatacactaaatccaacttcatttgatttagtgtctatcaatcaccataaaattatatatattaaaaataaatgacccacttgatgacagccaccttgaaattgtccatgggacagtacagagaaaaaggaaatagaaaactattagatactgaattaatatgaataaattacatagaattaattcattaaaattattgattaaaaattatatgcttaacatattgacagttttgaatagaggtctttggttgtcagtctc

SEQ ID NO: 393868 - DNA, 597 bp, Homo sapiens
gtgggtggtctaagggtgggtggtccaagatggtgcatggactacagtctggagaggacccatcctcacttaggtcgtgggtccagcaggaaggcagttctcacagagcacgtggccttccaaagggaagcagctgctgtcttctgcctcagttgacaggggcttcccacagtccyctcacttgtaacacttgaattgatttgacatccttatggaaatatccctgaagttttaatacctgaacttaaatctctgattgactgctgattatctgtgagcttcttagtgggactactctgattatcttttctttcttgcctataactcccctttgaatatacactaaatccaacttcatttgatttagtgtctatcaatcaccataaaattatatatattaaaaataaatgacccacttgatgacagccaccttgaaattgtccatgggacagtacagagaaaaaggaaatagaaaactattagatactgaattaatatgaataaattacatagaattaattcattaaaattattgattaaaaattatatgcttaacatattgacagttttgaatagaggtctttggttgtcagtctc

SEQ ID NO: 393869 - DNA, 597 bp, Homo sapiens
gtgggtggtctaagggtgggtggtccaagatggtgcatggactacagtctggagaggacccatcctcacttaggtcgtgggtccagcaggaaggcagttctcacagagcacgtggccttccaaagggaagcagctgctgtcttctgcctcagttgacaggggcttcccacagtcccctcacttgtaacacttgaattgatttgacatccttatggaaatatccctgaagtttkaatacctgaacttaaatctctgattgactgctgattatctgtgagcttcttagtgggactactctgattatcttttctttcttgcctataactcccctttgaatatacactaaatccaacttcatttgatttagtgtctatcaatcaccataaaattatatatattaaaaataaatgacccacttgatgacagccaccttgaaattgtccatgggacagtacagagaaaaaggaaatagaaaactattagatactgaattaatatgaataaattacatagaattaattcattaaaattattgattaaaaattatatgcttaacatattgacagttttgaatagaggtctttggttgtcagtctc

SEQ ID NO: 393870 - DNA, 597 bp, Homo sapiens
gtgggtggtctaagggtgggtggtccaagatggtgcatggactacagtctggagaggacccatcctcacttaggtcgtgggtccagcaggaaggcagttctcacagagcacgtggccttccaaagggaagcagctgctgtcttctgcctcagttgacaggggcttcccacagtcccctcacttgtaacacttgaattgatttgacatccttatggaaatatccctgaagttttaatacctgaacttaaatctctgattgactgctgattatctgtgagcttcttagtgggactactctgattatctttyctttcttgcctataactcccctttgaatatacactaaatccaacttcatttgatttagtgtctatcaatcaccataaaattatatatattaaaaataaatgacccacttgatgacagccaccttgaaattgtccatgggacagtacagagaaaaaggaaatagaaaactattagatactgaattaatatgaataaattacatagaattaattcattaaaattattgattaaaaattatatgcttaacatattgacagttttgaatagaggtctttggttgtcagtctc

SEQ ID NO: 393871 - DNA, 569 bp, Homo sapiens
gtccaatgccagcctgtcgtggtctcttgggcacttccccttgggtgtctcctgtccttgccctactgtgttccaaagtggcctaagcatctctcctctccctgtttcagcccaccatccattcctcggccagagccccaggcctctcccaattactccttcctccccatcccctggccccagccctggtccatcaccgyggacctcccagcctccccatcaccctggatcctccctatcaccctgggctcctagcctccagtttcatccccttcaggcagcaaccacaggatcttcccaactctgaatacagctgttccctgcttaaaatcgactgctcccaggaaaaacaaaagcccaaacactctgacgtgactcacaggccctgcaagaccagggatttccctggcttctcagctttgttacttaacccactacgactgcgctggtcttctctcacttcctcaagggcgtcaggatcccctgtctaggcctatgatcctgcagttccctctgcctccatcactctcacccctttccatcccatccttggtgaactaactcgttca

SEQ ID NO: 393872 - DNA, 382 bp, Homo sapiens
aataataggtaacttaccatattgcctactgtgcgtcaagtgctgcctctacaagagcccagctaagagcttatgttttcctctgggaatgtgtggcccagattccagcagggtttgcatcccatctgtcaccccctagctgtgttgccttgggyatgttactccacttctctgtgcctcaatgtccacatctataaaatggagataatactaaggcctgcctcttggagttgttagaattaattgcgatgtaatgctcagagtaatgcatggcccatggtaagctacttacagcctcactgctttccctgtgtttaccattcacagcagcctcatgaggcactattactatccctccttttatttttctttctgagacagg

SEQ ID NO: 393873 - DNA, 615 bp, Homo sapiens
gttgccaaatcttctaagcaaccaagatgttcttcaataagtgaatggataaatgaactgtggtatgttcatacaatgaaatatggcygggcgtgatggctcatgactgtaattacagcactatgggagaccaaggtgggcagatcgtttgaggtcaggaattcgagaccagcctggccaacatggtgaaaccccatctctactaaaaatacaaaaactagccgggcatggtggcatgcacctgcagttccagctacttgggaggctgaggtgggagaattgcttgaacccatgaggcagaggttgcagtgaactgtgatggagccactgcactccagcctaggtgacacagtgagactttgtctcaaaaaacaagcaaaaaaaaaaaaaaatatttggcaatacaaagaaatcaggcctcagaaagacatggaagatctgaaatgtatgtagctaagtgaaaaaagccagtctgaaaaggccacatcctatataattccaactatatgacattctggaaaaatgaaactatgaagacagtacaaagatagtagttgccaggagtttagggaggaggaagtatgaataggtgcagcacatgtggtttttagggca

SEQ ID NO: 393874 - DNA, 615 bp, Homo sapiens
gttgccaaatcttctaagcaaccaagatgttcttcaataagtgaatggataaatgaactgtggtatgttcatacaatgaaatatggccgggcgtgatggctcatgactgtaattacagcactatgggagaccaaggtgggcagatcgtttgaggtcaggaattcgagaccagcctggccaacatggtgaaaccccatctctactaaaaatacaaaaactagccgggcatggtggcatgcacctgcagttccagctacttgggaggctgaggtgggagaattgcttgaacccatgaggcagaggttgcagtgaactgtgatggagccwctgcactccagcctaggtgacacagtgagactttgtctcaaaaaacaagcaaaaaaaaaaaaaaatatttggcaatacaaagaaatcaggcctcagaaagacatggaagatctgaaatgtatgtagctaagtgaaaaaagccagtctgaaaaggccacatcctatataattccaactatatgacattctggaaaaatgaaactatgaagacagtacaaagatagtagttgccaggagtttagggaggaggaagtatgaataggtgcagcacatgtggtttttagggca

SEQ ID NO: 393875 - DNA, 615 bp, Homo sapiens
gttgccaaatcttctaagcaaccaagatgttcttcaataagtgaatggataaatgaactgtggtatgttcatacaatgaaatatggccgggcgtgatggctcatgactgtaattacagcactatgggagaccaaggtgggcagatcgtttgaggtcaggaattcgagaccagcctggccaacatggtgaaaccccatctctactaaaaatacaaaaactagccgggcatggtggcatgcacctgcagttccagctacttgggaggctgaggtgggagaattgcttgaacccatgaggcagaggttgcagtgaactgtgatggagccactgcactccagcctaggtgacacagtgagactttgtctcaaaaaacaagcaaaaaaaaaaaaaawtatttggcaatacaaagaaatcaggcctcagaaagacatggaagatctgaaatgtatgtagctaagtgaaaaaagccagtctgaaaaggccacatcctatataattccaactatatgacattctggaaaaatgaaactatgaagacagtacaaagatagtagttgccaggagtttagggaggaggaagtatgaataggtgcagcacatgtggtttttagggca

SEQ ID NO: 393876 - DNA, 590 bp, Homo sapiens
ttatgttttgttaggtctgttgctggatatttatcatcgtgaagaatggtaatgaaataaaagttgaagtatttgcagaatgctggaatttagaatagtttgttggtttataagtgattgctttgattttactccttcccccccttttttttttgccagatgtgggaagataaatgaaggggtctagatgtaaatgtcagtggaraggagagctaccatcactaaggtatgaaaatgttcactgaaagaatttgcactatacaaaatagtcttttgagtggaaagcatcacccatttttgtgattctgtctttaaaaatgtagaatgaaactacatgagttattaagttctgttctagaagaaagtgtgtattgaagttgtgattggaatggattcactttaaactagaaatagctttttattgctgaaatgtaatttgctcatttttgactttaaaaatgttaagtaaaataaggttgaaatcacagagttcttaatacccttacccttgtttttcttttccttctgttagagttcagctgatttttaccttgattttcatttataaagaactttagttaaaaaataat

SEQ ID NO: 393877 - DNA, 532 bp, Homo sapiens
tctttttctgggtgggcttatcatgagaccccccgaggcaacacagcagggtcctgggccatcagagcccgagtgtctcctttcccagcacaacaggcattggctatagcaaggccagtgttgggtcattctttctggcrgcagctagatttggcgatcttgaggaacgttggctccctgagttccagatgctggtatcccacctgaagcatggtgtaacatttcggttgagtgcagagttttaaaaatttttaatttttttaaagttttattttatgttcaggggttccatgtgcaggtttgttatataggtaaattgtgggttttgggggtttggcgtacaaatgattttgtcatacagatactatgctatcacccaccatagttttttgatctctccctccttccatcctccaccctcgaggaggccccagagtctgttgctcccttctttctatacatatgtcctcaaagtttagctcccactgataagtgagaacatgtgggatttgattttctgttcctgtgttag

SEQ ID NO: 393878 - DNA, 532 bp, Homo sapiens
tctttttctgggtgggcttatcatgagaccccccgaggcaacacagcagggtcctgggccatcagagcccgagtgtctcctttcccagcacaacaggcattggctatagcaaggccagtgttgggtcattctttctggcggcagctagatttggcgatcttgaggaacgttggctccctgagttccagatgctggtatcccacctgaagcatggtgtaacatttcggttgagtgcagagttttaaaaatttttaatttttttaaagttttattttatgttcaggggttccatgtgcaggtttgttatataggtaaattgtgggttttgggggtttggcgtacaaatgattttgtcatacagatactatgctatcacccaccatagttttttgatctctccctccttccatcctccaccctcgaggaggccccagartctgttgctcccttctttctatacatatgtcctcaaagtttagctcccactgataagtgagaacatgtgggatttgattttctgttcctgtgttag

SEQ ID NO: 393879 - DNA, 608 bp, Homo sapiens
aaaactgggttgttcccatgtgatacctcttttatgccctctcaattcctacccccacgcatatttataataaaataaatctcaatgagtggagttggaagattagaactttcaaacccggtggtgtgtgttgttgtgtggaggagtgcactttaaggaactaaaccaatctgastatttgtaggaaggtagaacaattgaaaagggagggtgacgctgaacactgatgggcagaaagaaaaatattatctgttttagggaaaagaaacaagttgttggaaacctggatgaataaatatgttggttctgcagctctacacagagctactctatgtggccacacgttcttaggaagattggagattctgccactgattacctcttcctacaggatctctttttctttatccaacaggtgaacttcatatctatgtggccatcgtggagatctggacacactgtttctattatctatcagtcatttactgatccatcttctacctccacatgtccggtgacttccctttatatttaaaatccaatcaaatgccttagcttctagaaacgtggtctcataaaactctcaggatgtaccacaggattgaaag

SEQ ID NO: 393880 - DNA, 608 bp, Homo sapiens
aaaactgggttgttcccatgtgatacctcttttatgccctctcaattcctacccccacgcatatttataataaaataaatctcaatgagtggagttggaagattagaactttcaaacccggtggtgtgtgttgttgtgtggaggagtgcactttaaggaactaaaccaatctgactatttgtaggaaggtagaacaattgaaaagggagggtgacgctgaacactgatgggcagaaagaaaaatattwtctgttttagggaaaagaaacaagttgttggaaacctggatgaataaatatgttggttctgcagctctacacagagctactctatgtggccacacgttcttaggaagattggagattctgccactgattacctcttcctacaggatctctttttctttatccaacaggtgaacttcatatctatgtggccatcgtggagatctggacacactgtttctattatctatcagtcatttactgatccatcttctacctccacatgtccggtgacttccctttatatttaaaatccaatcaaatgccttagcttctagaaacgtggtctcataaaactctcaggatgtaccacaggattgaaag

SEQ ID NO: 393881 - DNA, 608 bp, Homo sapiens
aaaactgggttgttcccatgtgatacctcttttatgccctctcaattcctacccccacgcatatttataataaaataaatctcaatgagtggagttggaagattagaactttcaaacccggtggtgtgtgttgttgtgtggaggagtgcactttaaggaactaaaccaatctgactatttgtaggaaggtagaacaattgaaaagggagggtgacgctgaacactgatgggcagaaagaaaaatattatctgttttagggaaaagaaacaagttgttggaaacctggatgaataaatatgttggttctgcagctctacacagagctactctatgtggccacacgttcttaggaagattggagattctgccactgattacctcttcctacaggatctctttttctttatccaacaggtgaacttcatatctatgtggccatcgtggagatctggacacactgtttctattatctatcagtcatttactgatccatcttctacctccacatgtccggtgacttccctttatatttaaaatccaatcaaatgccttagcttctagaaacgtggtctcataaaaytctcaggatgtaccacaggattgaaag

SEQ ID NO: 393882 - DNA, 522 bp, Homo sapiens
catacccccgggaagctaggggtccggaggcttctttgcttccaggagcaccctgaggtgggtgagaaaaccgcagcctccccagagggtgcccaggggcatccgaagcggaaggggcrgagaggacaagatttggacttaactcccgggacagcagaccaacagacctccaaaaagtcactcagaggcagttcccccctgaagacagatattgttaaaatgtcaaggaagtggagtgaatctgggcaggacagctgctttacatgccttttctttctcttggacaccaacagggtgcctgaggaaagtgacaccggtgattctggcaagggcaggggggaaagtgcggcatctccctcggcttcgttcccatatttcctggtccttctctcctccctattgtccatgctcaccaggatgctggggtcgcagatgggagattaagaactttaaagggatccatgttgaagtagcatttccaaagcctcctctgcctagcggctgctgccgagaaggtagtgg

SEQ ID NO: 393883 - DNA, 522 bp, Homo sapiens
catacccccgggaagctaggggtccggaggcttctttgcttccaggagcaccctgaggtgggtgagaaaaccgcagcctccccagagggtgcccaggggcatccgaagcggaaggggcggagaggacaagatttggacttaactcccgggacagcagaccaacagacctccaaaaagtcactcagaggcagttcccccctgaagacagatattgttaaaatgtcaaggaagtggagtgaatctgggcaggacagctgctttacatgccttttctttctctyggacaccaacagggtgcctgaggaaagtgacaccggtgattctggcaagggcaggggggaaagtgcggcatctccctcggcttcgttcccatatttcctggtccttctctcctccctattgtccatgctcaccaggatgctggggtcgcagatgggagattaagaactttaaagggatccatgttgaagtagcatttccaaagcctcctctgcctagcggctgctgccgagaaggtagtgg

SEQ ID NO: 393884 - DNA, 568 bp, Homo sapiens
aatgctatcattacaaaaattcaatatgaattcagtagcatagrattttcaggaagtaaggcatacctgcacgtgcctgtattatcaggaaccccaatgccatgttttctctggagactgtaggactatcttgtcaccccaacggtgatgtcactgacagtattatggaactcaaattgtggttgtgagtgaggttaagctaatcagcactgagctcacagcattattctgtgtaaaccattacagaggggctgtctgattctggtaatgctaatttcatcttcttatgaatgggaagtcaagagactgggactcaatgttggttcagtcaattcctagtggctgttcttgggctaatcccatagcccttggatgccctttgttcatctgtttaatcagaagtttgtcctagagagtctgtgcaggtcattctcgacctaatttcctcattctttgatcacattcagctatgtggataggaggctgggactctcttgggagttgcacaggagattttggaattttacttcatctgattacagttctacgggttttaaggaatttcaca

SEQ ID NO: 393885 - DNA, 568 bp, Homo sapiens
aatgctatcattacaaaaattcaatatgaattcagtagcatagaattttcaggaagtaaggcatacctgcacgtgcctgtattatyaggaaccccaatgccatgttttctctggagactgtaggactatcttgtcaccccaacggtgatgtcactgacagtattatggaactcaaattgtggttgtgagtgaggttaagctaatcagcactgagctcacagcattattctgtgtaaaccattacagaggggctgtctgattctggtaatgctaatttcatcttcttatgaatgggaagtcaagagactgggactcaatgttggttcagtcaattcctagtggctgttcttgggctaatcccatagcccttggatgccctttgttcatctgtttaatcagaagtttgtcctagagagtctgtgcaggtcattctcgacctaatttcctcattctttgatcacattcagctatgtggataggaggctgggactctcttgggagttgcacaggagattttggaattttacttcatctgattacagttctacgggttttaaggaatttcaca

SEQ ID NO: 393886 - DNA, 605 bp, Homo sapiens
ctcaatgttggttcagtcaattcctagtggctgttcttgggctaatcccatagcccttggatgccctttgttcatctgtttaatcagaagtttgtcctagagagtctgtgcaggtcattctcgacctaatttcctcattctttgatcacattcagctatgtggataggaggctgggactctcttgggagttgcacaggagattttggaattttacttcatctgattacagttctacgggttttaaggaatttcacagaacacatagaggtaagaaacagcatttctaaaagacagtgttgtttcatggttacatacttccaggaaggatacgaaaagcccagactggattgacccaagataagggatcatacattactgacattcccactcctcttgcaggacctagagggaaactgaagttcttcygcccaaacactggactgtgaaaactctaggtcacatgtaggctcctggagatgaggaggcttctttgctgtggctgttatcatctttaaggtgcaacacttcccttttcagcacctcagtttccctgtctgtaagatggttcacttgtcaattcttagtttttgactcatggaacact

SEQ ID NO: 393887 - DNA, 608 bp, Homo sapiens
aaggttaaagagaaaatgggagacatgcccacataaagatgtgcaaatgacctacacacttgactttgatgtttgttattatttgataggcagatccccggacttaacaagcaaagctcacagggaatttcaaactcccaaatgaaaaggcaagcatagacacttactaagtcaaaacagctacattacagaacaaaaagcccatactactcagacgaccttctaaaatcaaaacatgcwagcagagaaccaccgctttctttcatggttttgtaccaatatgctttctcattgggttagcacaaaataaaacaaactcggtgtactctaccaaaaaagaagttttggctttccatttctccctcacactttctcaaataccctggcaccacatttagaatagtcagtcacaaacactgtctaagaatgatgtattcaaacgtaatcgtgtcaacagtcaagacctcggaagcattcttttgaatggcattggtgtgcgcaaagagaattttatcttaatgaaaggatggcctaaatactgtcaactacagacttcaactgtctgaaattttgtttctatcaaatttttaaaaattcaagtacaaatt

SEQ ID NO: 393888 - DNA, 560 bp, Homo sapiens
taacgttttggaaccatattctgaagactatacccagagggctgtcataaccaatgctgttttataagagtgttcatagatttgtgccrccctttggtgaaccacagaagagaataagtcattgtgttatgtaatacacagtggcttcaacaagccatcaagacaattcttagaaaggacctcagatttttggtcttattgaataactccatgattggcactcaagaacacaataagaatactgctacatcctagaagagagaaacataactatattctgaggccaaagattttggtctactgggaaaaaaaacaaaaatcaagaaacctcatgtagtagttaaaacatgaattattagagtcatccaggtttaggttcaaatctcagttctacatgttttaagtagcgtgattttggtcaaatcaccaaaattttctgatcttctgtttctgtatctgttatatgaaggtgttcacagtactggtttacattgttattgtgagcattgaattagatgtgtaaaggacttagcacacaataaggtgcactcaataaatta

SEQ ID NO: 393889 - DNA, 550 bp, Homo sapiens
aaaactgtttactgggggcattttgagacaggtgggttgggggataaaaagaatatagttaagtagctctccatatttaagccatttataaaaagctatattacaaacaaaaatatgtttggtggagtagactggagttactkgcatctgaatggcactgggaaacaactttttcatatatcatattaatgtaatcattataatgtgattgatggcaatagaatattacatgaagctatacaagagtgctattttatttaaaaaaacaaaacactgaactggtctgaagtaaggacaaactgtccaaaaatattgagaaagtaacctaacacatgttattcaatggattaatacattagaagaacactaccaattactgaaaagtgaactaagttgaatagatagagcaaatacaaaaattttccatgtgaatcacatgtttatttagaacaattgtcatttcaaatggtttgtaatctctaggatttaagggatctgcttttatgtgtctcatctaaatttcatgtattagctgatgaaacacggaggc

SEQ ID NO: 393890 - DNA, 613 bp, Homo sapiens
gcaaaatcacaaatttgagttaactatcacacctttcattttggagcaawactgaagtctgtataattcagaaaataggtgtttatcaaaatcgacttttcaaaattgtttttatgtgtctctcaggttttatacatacacataatattattctgggttttatacatgaacatatatagtaaaataataagtatgaaagttagatccaactttagccaaaggaattctttgatctaacttactaggccttatcttgctatttcttacaaaccggaaactggatctcagtataagttagagttaaaacaataaataaataaataagtcatttacatatgttaggaactcaactatcatttttggttaatttgttgattttaataaatcctctgaagtaatttgaacctcatctaggtaagatatttactgaaacattgtgaatcacttaccgtaattaatttaggaatttatttatgtcttcctatgtcaacaggcaagtctggggaacagagaaagccattttttttccctatacagttatttgaataatgttgtattttgtgtttcttcgtcagagtagaaaagtggggcatgctaagagaaagagtatgag

SEQ ID NO: 393891 - DNA, 613 bp, Homo sapiens
gcaaaatcacaaatttgagttaactatcacacctttcattttggagcaaaactgaagtctgtataattcagaaaataggtgtttatcaaaatcgacttttcaaaattgtttttatgtgtctctcaggttttatacatacacataatattattctgggttttatacatgaacatatatagtaaaataataagtatgaaagttagatccaactttagccaaaggaattctttgatctaacttactaggccttatcttgctatttcttacaaaccggaaactggatctcagtataagttagagttaaaacaataaataaataaataagtcatttacatatgttaggaactcaactatcatttttggttaatttgttgattttaataaatcctctgaagtaatttgaacctcatctaggtaagatatttactgaaacattgtgaatcacttaccgtaattaatttaggaatttatttatgtcttcctaygtcaacaggcaagtctggggaacagagaaagccattttttttccctatacagttatttgaataatgttgtattttgtgtttcttcgtcagagtagaaaagtggggcatgctaagagaaagagtatgag

SEQ ID NO: 393892 - DNA, 556 bp, Homo sapiens
tgtcattgtgatataaatctctacaactttcattgtcttagaaaaaggcatataaactaatatttaaattacaaaacatagccgagcacggtggctcatgcttgtaatcccagcactttgggaggccgaggcaggcggatcacagggtcaggagatcaagaccatcctgtgaatggtgaaaccctgtctctactaaaaaaaaaaaaaaaaaaattaaccgggcgtgaaaaaattagctgggtgtggtggcaggygcctgtagtcccatctactccggaggctgaggcaggagaatggcgtgaacctgggaggcggagcttgcagtgagctgagattgcgccactgccctccagcctgggcgacagagcgagactccgtctcaaaaaaaaaaaaaaaaaaaaaaaaattacaaaacttatatacatggccagagaaagacaaagaatagaacatgtcattttttttaatatagatttggtttttgacattagatttgaagcctgacaaagtaagacagagggaatgagggtaattctaggcagactaacgaatgcaa

SEQ ID NO: 393893 - DNA, 633 bp, Homo sapiens
gtttaagaaaaacacactacagggtattttagtatttccagtttctcttgtaaatggagaacttaaaagaaacattatctaccactgtgagccaaagaggaaataatgttgagaaaytgcaaacttttgagggattaagcaatgacctctacagaaaaaaaaaattcacaggggaaagaatccttgggaattgaaatgtattagacaatgcatcaaaggggataaaggaaaaagaaagccaggtagtttacaatgagatttagagaagtaaagtcctgaatgtcctacttctcatgactgggaaacaatgaggtaacaatggggctctgcactcaaggtacttaatgagaacaaacatagaactatattaatagtccatagcaatcacaaataaataaatatatacatatataaaaccactcagtcccatggctctatttccatctgctcacattgctcccacctgctatagtttatcagagccactcaagtgtcatatgaaggacacccttgttgctttggcttgggctgtgccatgtggcattttggagaagtttcagctggttctctgcttcctcatgtaactttggagctgcttttatatgacctaagatacacttttttccaataaag

SEQ ID NO: 393894 - DNA, 633 bp, Homo sapiens
gtttaagaaaaacacactacagggtattttagtatttccagtttctcttgtaaatggagaacttaaaagaaacattatctaccactgtgagccaaagaggaaataatgttgagaaattgcaaacttttgagggattaagcaatgacctctacagaaaaaaaaaattcacaggggaaagaatccttgggaattgaaatrtattagacaatgcatcaaaggggataaaggaaaaagaaagccaggtagtttacaatgagatttagagaagtaaagtcctgaatgtcctacttctcatgactgggaaacaatgaggtaacaatggggctctgcactcaaggtacttaatgagaacaaacatagaactatattaatagtccatagcaatcacaaataaataaatatatacatatataaaaccactcagtcccatggctctatttccatctgctcacattgctcccacctgctatagtttatcagagccactcaagtgtcatatgaaggacacccttgttgctttggcttgggctgtgccatgtggcattttggagaagtttcagctggttctctgcttcctcatgtaactttggagctgcttttatatgacctaagatacacttttttccaataaag

SEQ ID NO: 393895 - DNA, 526 bp, Homo sapiens
aaaaaacctttttttttcttttttttttttgagacagactctcacactgtccaggctggagtgcagtgrcacgatctcagctcactgcaagctccacctcctgaaaaaaccctcatttttaacaatcaccactggcatcctagtaaaaaaaaaaaaaatccaacagctcattctttgttaatccttatcaattgttctaaagtcttcctactgaaggtgtggtctgtggaccagatcattattgccaactaggagctctggagaaatgtagactctctagacttacctctggcctacagaattagaatctgtagtttaacaaactacccaagtcattcttatacacattattgtttgagaagcactcaggtaaaatatttgacatcgtcaatcacatataagtgttaaaattttctcttatcttccactttccttattgacttcttaatttttaaaaattatctctagctcatttcctcctttcatcacaaaaaagcaggtattcttcaaagtcattagtttggcc

SEQ ID NO: 393896 - DNA, 456 bp, Homo sapiens
tggcaatgtccctgaatgtgattcagggatatgagctgcttcctttgtcggactttggtttctcaatatacttcacttccaatcatgtgaattgtgcaggaaggagaaagtagaatgatgcataagttttaactacagctctggaaatgctgtaccttgsctctgcacccattccttggccaacctggtcacatggctgcaaaaggtgcaaagaatgctggcaagtgtgctctttctgagcaacaaggaggagcagctggaactggggagcatcagctggtctttgccacactgcttaatctttggtcttcactcacccttccaactgtccacagggtatctccacttgaatatttgaccagcattaacaagtgaccacattttcaacaaaagcaaaccctgattctccatgaccctttttcagcttgaacgttctcttaaatgtattaatattac

SEQ ID NO: 393897 - DNA, 456 bp, Homo sapiens
tggcaatgtccctgaatgtgattcagggatatgagctgcttcctttgtcggactttggtttctcaatatacttcacttccaatcatgtgaattgtgcaggaaggagaaagtagaatgatgcataagttttaactacagctctggaaatgctgtaccttggctctgcacccattccttggccaacctggtcacatggctgcaaawggtgcaaagaatgctggcaagtgtgctctttctgagcaacaaggaggagcagctggaactggggagcatcagctggtctttgccacactgcttaatctttggtcttcactcacccttccaactgtccacagggtatctccacttgaatatttgaccagcattaacaagtgaccacattttcaacaaaagcaaaccctgattctccatgaccctttttcagcttgaacgttctcttaaatgtattaatattac

SEQ ID NO: 393898 - DNA, 633 bp, Homo sapiens
gtttaagaaaaacacactacagggtattttagtatttccagtttctcttgtaaatggagaacttaaaagaaacattatctaccactgtgagccaaagaggaaataatgttgagaaattgcaaacttttgagggattaagcaatgacctctacagaaaaaaaaaattcacaggggaaagaatccttgggaattgaaatgtattagacaatgcatcaaaggggataaaggaaaaagaaagccaggtagtttacaatgagatttagagaagtaaagtcctgaatgtcctacttctcatgactgggaaacaatgaggtaacaatggggctctgcactcaaggtacttaatgagaacaaacatagaactatattaatagtccatagcaatcacaaataaataaatatatacatatataaaaccactcagtcccatggctctatttccatctgctcacattgctcccacctgctatagtttatcagagccactcaagtgtcatatgaaggacacccttgttgctttggcttgggctgtgccatgtggcattttggagaagtttcagcyggttctctgcttcctcatgtaactttggagctgcttttatatgacctaagatacacttttttccaataaag

SEQ ID NO: 393899 - DNA, 633 bp, Homo sapiens
gtttaagaaaaacacactacagggtattttagtatttccagtttctcttgtaaatggagaacttaaaagaaacattatctaccactgtgagccaaagaggaaataatgttgagaaattgcaaacttttgagggattaagcaatgacctctacagaaaaaaaaaattcacaggggaaagaatccttgggaattgaaatgtattagacaatgcatcaaaggggataaaggaaaaagaaagccaggtagtttacaatgagatttagagaagtaaagtcctgaatgtcctacttctcatgactgggaaacaatgaggtaacaatggggctctgcactcaaggtacttaatgagaacaaacatagaactatattaatagtccatagcaatcacaaataaataaatatatacatatataaaaccactcagtcccatggctctatttccatctgctcacattgctcccacctgctatagtttatcagagccactcaagtgtcatatgaaggacacccttgttgctttggcttgggctgtgccatgtggcattttggagaagtttcagctggttctctgcttcctcatgtaactttggagctgctttyatatgacctaagatacacttttttccaataaag

SEQ ID NO: 393900 - DNA, 490 bp, Homo sapiens
aaaatacttgcagacagaatttccagtgctttctattatctgaaattttctctattttaccttttagaaaaataaatcttatttgctttttttagtaaaatatgtttctataggactaagcttgttgtctacaaaataatgtattactagttagaaatgttaacagtacaaagaaaataatcatcattattttgtgtgcatatttttggcagtctacccgtgcatatgagttcgcttgtccttacaacagtctctgagatttgccaagtggtttgccaaccccacaaagccaataaatggcayactaggactgtaatccaggacctctgactttatgtccactacgcttcataacaccttattctatctttggaatagaatatattgcccacagaattataagttaaaaataacatattataaatacataatcgaatatattttaaaatttacttactatgcagagtatagagtatgtgccattttcaat

SEQ ID NO: 393901 - DNA, 517 bp, Homo sapiens
ctgttggtacctaaaaagcctcctagtctgactgctcctgggaatcaccaaatgtgtttcccaacttttcatgctatacacatgctttaygcactcacatatacacagaaacactacttaaaattagctctgttaatgtctgtgttattttccattctgtcttcaacaatttccctatcacgttcttccctatgacagtcttggatgaaaaaggtctacttgatgtcgtcacatatattttcacctaagaatggaaaaggaatttttttttaatttcaacttttcttatagattgaaaggcacacgtgcaggtttgttacatgggtagactgtgtgactctgaggcttgggtccctaccaatctcatctcctaggccataagcatagaactcaacaggtgcttcttcagcccatacccgcctcctaccatcttctgtctagtgacccccagtgtccatcgttcccatctttacaatcatgcgagtccaatatttagctcccacttataggtgagaat

SEQ ID NO: 393902 - DNA, 583 bp, Homo sapiens
tggtcttcctcacccagtgagtgcttctattcagattttgttgaaaatgaccactagggctgagttgggaactcttgcctgttggtacctaaaaagcctcctagtctgactgctcctgggaatcaccaaatgtgtttcccaacttttcatgctatacacatgctttacgcactcacatatacacagmaacactacttaaaattagctctgttaatgtctgtgttattttccattctgtcttcaacaatttccctatcacgttcttccctatgacagtcttggatgaaaaaggtctacttgatgtcgtcacatatattttcacctaagaatggaaaaggaatttttttttaatttcaacttttcttatagattgaaaggcacacgtgcaggtttgttacatgggtagactgtgtgactctgaggcttgggtccctaccaatctcatctcctaggccataagcatagaactcaacaggtgcttcttcagcccatacccgcctcctaccatcttctgtctagtgacccccagtgtccatcgttcccatctttacaatcatgcgagtccaatatttagctcccactt

SEQ ID NO: 393903 - DNA, 622 bp, Homo sapiens
ttttctttatccaatcaaccgtcgatgggcatttaggttgattccatttgtttttgctattgctattgtgaattgcactgcaatgaacacgtaagtccatgtgttccttatgacagaatgacttattttccttcaggtatatactcagtagtgggattgctgggttgaatggtagttctattttaagttccttgaggaacgaagtgctttccacggtggatgaaatagttagcattcccaccaacagtatacaaatgttcaaacagggatttgttaattccatgatttaatgaaattacctaaggtttctactaaacacgattatcatttgacatccataattagtaagcaatgtaccctaaggactttaaagcaatttttaaataacctatggtaatctagaaaccattagaaagtgtgagtcattatttcaggcccyatttataaggaccctgactaccttaattaaaccaaatgaatctaaactgtctcgtgttacacaattcattgtatcttaggataaagatacacattaactaaataaacttcatctactatattcaccagataatgagttagtgaagtaattaaacataaatatttttaatgccaaggaaaatga

SEQ ID NO: 393904 - DNA, 540 bp, Homo sapiens
caaagcccaactctacctcttctgggcctgaactcaaaaggccttacacactggaaacaaaacaaaacaacgcacaatgctgccagttttcatgttacatatatgatttttttaaaaaactgcaatgtgcttacagcrcaattataatgcaattctccagcatagcaaccaataactgggtaggagttccagaggagctagaagtctcagataagtggttgcaagggtgaatactggagtctaacacatctgcgtctaaacttgtctccgactttcaccaattgagtggcccggggcaagatacctaaacttcttacagctttgttgcctaatcaagaaaatggggaaatgatagtttatgcttaataagcttttttgtgaacgtgatatggtatcaagtattcagcatatttgcccagctactagtaagcacttggtaaatactggctagtattattatcatatgctattgaactttaaaaccataccttaatttttaccaaagtagaaatgatttttgaatataaggtaaaagttaag

SEQ ID NO: 393905 - DNA, 540 bp, Homo sapiens
caaagcccaactctacctcttctgggcctgaactcaaaaggccttacacactggaaacaaaacaaaacaacgcacaatgctgccagttttcatgttacatatatgatttttttaaaaaactgcaatgtgcttacagcgcaattataatgcaattctccagcatagcaaccaataactgggtaggagttccagaggagctagaagtctcagataagtggttgcaagggtgaatactggagtctaacacatctgcgtctaaacttgtctccgactttcaccaattgagtggcccggggcaagatacctaaacttcttacagctttgttgcctaatcaagaaaatggggaaatgatagtttatgcttaataagcttttttgtgaacrtgatatggtatcaagtattcagcatatttgcccagctactagtaagcacttggtaaatactggctagtattattatcatatgctattgaactttaaaaccataccttaatttttaccaaagtagaaatgatttttgaatataaggtaaaagttaag

SEQ ID NO: 393906 - DNA, 524 bp, Homo sapiens
tggatgtcagctattgtgtgtgaacaattatggagaattttggataatactttatttctgcagaaagtattaactttttcatggcagactaagttttagcatctgtaatagtgtgtctgtttctaggagtgcctatcctcctgattcgtagacctcaaggggtctcaactaaaagcctgacctaacccccaattattatctcacagcatcatgcatccgctagcagctgcactgctatttggcctggaactgctccygtatgcctgctgtcccactgcccacctttggcattagcaaatgtctatgcgtaatattaatgcagaatgtgagactcatatcttagggtccctttctccgggatctcggcacctcaagcccttgctgccttggtagccctgacctccagtctttgtatttgtaatactgctgaaatacaattacgatgctgctattgtaatgctgttcaagattctgagtcaccccttttattttgccacttagccccttgactgcttacggatgag

SEQ ID NO: 393907 - DNA, 524 bp, Homo sapiens
tggatgtcagctattgtgtgtgaacaattatggagaattttggataatactttatttctgcagaaagtattaactttttcatggcagactaagttttagcatctgtaatagtgtgtctgtttctaggagtgcctatcctcctgattcgtagacctcaaggggtctcaactaaaagcctgacctaacccccaattattatctcacagcatcatgcatccgctagcagctgcactgctatttggcctggaactgctcccgtatgcctgctgtcccactgcccacctttggcattagcaaatgtctatgcgtaatattaatgcagaatgtgagactcatatcttaggrtccctttctccgggatctcggcacctcaagcccttgctgccttggtagccctgacctccagtctttgtatttgtaatactgctgaaatacaattacgatgctgctattgtaatgctgttcaagattctgagtcaccccttttattttgccacttagccccttgactgcttacggatgag

SEQ ID NO: 393908 - DNA, 453 bp, Homo sapiens
taaaacaaaattatcccccttaaatgcagttctgttacttctgcttaccaagcttttctcaaatgttatttctttctactctcattgccattaccttgtcatactacctgtggcagctgtgtaacgaagcatatactcccttgctaatccatcccacacgctaatcagaagaatctaccaaaaatgcaaatctgattattccattctcttcttacacttacatggcccttgggataagatgggagcacagacttccgttcgtatacccacctagcaccacttcagccccatttattatcacttctcacccttctcatctaccttccatctattctcaactttcattcggcacatacttttttttttttggccttcaggtctattattctgttacttcctcccattctgctttgcttaactctctcccactyaccctccatgtcctgaatttga

SEQ ID NO: 393909 - DNA, 635 bp, Homo sapiens
tggtcatatgttatgatattgctgatctaatcatttgtgaatacagaatacatgtatctctagcttatcattacagctatagtaacattgtgcctggcatatgggcatacttgttgcacaaacaaatggtttgtccttgaaagtcacatacatgtaacagcacagaataacatgggcttttggatgagagaaaagtttgaatcttgggtctgtcatttatttactgtatttgttttgacaaattacttatctggacctgttttgtatgtacaaaatgagtacaatagcaatcaactcatgaggttgttgtaattgccaaacaggcctgtaaagaactgggcacatttaagtgctcaraaaagggagcttttagaattattagctgattcattgaaggtttcattaagtgaaacttacatcaaatgcctatttgttcagaaaatgttggtgtgatctggcaagacataatcctttccttgatacttaatttcttgaagaactgtgttgtttctgtgtttatgttcctctctagtctgtttgtttgttcagagatgggtctcatcatattgcccaagctggtcttgaaccccaaggctcaaatgatccgcctgccttggcctcccaaagtgctggga

SEQ ID NO: 393910 - DNA, 418 bp, Homo sapiens
acaacttgttattctcacataaaacttactttgttcastatcaaaagttctatttggagtcagatatggtggctcatgcctgtaaccctggcactttgggaagctgaggtatgagcatggcttaagcccaggagtttgagaccagcctggacaacacagggagacttaatctgtaagtatatatgcataattagcccagcatggaggtgcgtctgaagtcccagctacttgggagactgaggtgaaaggattatttaaacccaggagtttgagactgcagtgagctatgattgtgtcacttcactacactctgggtgacagagcaagatcttatctcaaaaaaaaaaaaaaagttgtatttgttggttagccagtgtcttagtttcttgttgctgcagtaataagttgccataaactt

SEQ ID NO: 393911 - DNA, 418 bp, Homo sapiens
acaacttgttattctcacataaaacttactttgttcagtatcaaaagttctatttggagtcagatatggtggctcatgcctgtaaccctggcactttgggaagctgaggtatgagcatggcttaagcccaggagtttgagaccagcctggacaacacagggagacttaatctgtaagtatatatgcataattagcccagcatggaggtgygtctgaagtcccagctacttgggagactgaggtgaaaggattatttaaacccaggagtttgagactgcagtgagctatgattgtgtcacttcactacactctgggtgacagagcaagatcttatctcaaaaaaaaaaaaaaagttgtatttgttggttagccagtgtcttagtttcttgttgctgcagtaataagttgccataaactt

SEQ ID NO: 393912 - DNA, 583 bp, Homo sapiens
gtacttgactgaaataagcacagttaatgctcccagatgtcctaagaggtaaatcttattgctccactttgtagataagaaaaatgaaactgcaagatgtgctttcttgctgattgtgactggccatcagcagaagagggttctgagcctctttttgctgcctgcagtcgggttctgtgctctttgcaaggaggtcctgaagcctcttgtgtggggccctcctgtctctgtcatctcacatccttatcargcatggtctccaggggttttcccagttcattgtaagaagaaagaatatgtattaacattcagcgtattatctgaaatacattttatttatttttctctgctgcaataacatagggaaatctaaatatccaagccaactctaattttcaaataaaaaagtgagcttcttggcacagaaacacaaaaatcaaaatccacaatttataaaaattgaagccgctttcaaaattaattttaaattgacaaataaaggtggtatatatttaaggtgttcaatgtgatctgtttgaagcagatttaaagactgtaatgaagcaatgcctttgaatacaca

SEQ ID NO: 393913 - DNA, 626 bp, Homo sapiens
ataaatgaatttaattttccacatacctttttctctttaatccaaactttacaatagcctagtatgatgtaaataataattcacttatatatttattttatgtattcatcatataaatttacatatacttttccaaatactgtatacacatcacatttgtatttgcaaatatgcaaatattatggaaacattcttatttccaaatattgcaaaatctggagtttccggagatttcacagggccagaagttaaaaccataaatttaaattccttattttttctcctagagctggaacctgattgttgaccttatctttraactgctagccaactgatctggattacaaagatcatgtatgtcaagccacatgttcgtctctaatatgtggtataaagaaatagggaaggacatgtggtcacagagttctttgatggtgatgggggtgggaagggttgaagcatttgtgtttttcatagttagaatccagaaagttctgaaatgaacaaaaaataaatttgttttagcagcttctccgctggggtaaggaatgctgattcttaaaagaacttgggagagaatgttttggtgaacttgtatactgtaccataaatatttttgctaaaat

SEQ ID NO: 393914 - DNA, 635 bp, Homo sapiens
tctgcttctctctctacatataatttccaactgagacttccgcttttcttaccattactcaaattgcccagtcagaggcaaaaacacctggtcatatgaatgcatttccccagctgaatgaaaatgggtctgctgggtgaagagaattagaatttctttttttttttttttaaacttttagtttaagttcaggggcacatgtgcaggatgcgcagatttgttacataggtaagcgtgtctcataggggtttgtggtacagattatttcctcacctgggtattaagcctagtatctattagttttttttcctgatcctctctctcctcccaccctccaccctccaacaggcctcagtgtgggttgttcccctctatgtgtccatgtgttctcatcatttagctcccacttatttcatggcagttttgtaaagagtttttgacrgttaactgattgcacagtacaacagaatgaaattacattaaatctatgtatttgcatagatttaacaccatgagtggaattaaatggacagaaaactttttgatttttttgaatcataaatttaacaccatgagtgggattaaatggaccgaaaactttttgattcttttgactcataaatttcaagatcgtc

SEQ ID NO: 393915 - DNA, 543 bp, Homo sapiens
tctgaaacaaaatatacaatacatttaccaaataaaggtaatcattctgtcatacgaaaataattactgttgtaagttgaatgcctgttattcatttatgtatgtatatatgcatatgtgtgtgtacatgtacacacaccccccaacacatcttttcttttaggaggccacaagatgcaacaatttgttatgtacaaaagggagagaagtaatgttctggattgattcagacaactggactgataaatcagttctctgagtatttgtgggtttaccatccatcaaatggaacatgtgttttaccaaggccacttaccacttcatgctaattagatttaattggtgtgtcattgtcaatacaattggctagtgcgatgttctacaaaatgtcaagatggtgaaggtcattgaggatggtatcacagagaatggartcaccatgggaattgagaaaaacatatttaccaaattggaagctggataccaagtgtttattgtgctaaaagaaaaactgttgataaattaaatgtaacagagtttaac

SEQ ID NO: 393916 - DNA, 587 bp, Homo sapiens
attttttcatatatgtacctttttaacaattagctcttcgcaccgatgttttgtagttttggcatttaaatcttgcacatctcttgtcaaacttatttttaattatttcctgagtttgaggctattgtaattgttgatgctgttctgggttccattttaagtgtttayggtgatatatagaaatgtagcatattatctttcatccttaaacattgttaacctcacttcttagtcctggtagctctcttgtaaattctttgttgttttcctatgtaaatgataatgtgttctgtgaacaaagtggtttacttcttcttttccaatctattgcctttacttatcctctttgttttattgcagtgacagaacctccagtacaatgttaaataaaaatgggcagagtaaacatccctggctttttccccattgtaggaggattgtattcagtcattcacattaagtatgaggttccttgtaggtttttcatagatgtccttaattaagttcaggaatttcagtctgtttctagtctgctgaaagttttttaataagtagacattgaattttgttaagtattattttgcacg

SEQ ID NO: 393917 - DNA, 587 bp, Homo sapiens
attttttcatatatgtacctttttaacaattagctcttcgcaccgatgttttgtagttttggcatttaaatcttgcacatctcttgtcaaacttatttttaattatttcctgagtttgaggctattgtaattgttgatgctgttctgggttccattttaagtgtttatggtgatatatagaaatgtagcatattatctttcatcctkaaacattgttaacctcacttcttagtcctggtagctctcttgtaaattctttgttgttttcctatgtaaatgataatgtgttctgtgaacaaagtggtttacttcttcttttccaatctattgcctttacttatcctctttgttttattgcagtgacagaacctccagtacaatgttaaataaaaatgggcagagtaaacatccctggctttttccccattgtaggaggattgtattcagtcattcacattaagtatgaggttccttgtaggtttttcatagatgtccttaattaagttcaggaatttcagtctgtttctagtctgctgaaagttttttaataagtagacattgaattttgttaagtattattttgcacg

SEQ ID NO: 393918 - DNA, 587 bp, Homo sapiens
attttttcatatatgtacctttttaacaattagctcttcgcaccgatgttttgtagttttggcatttaaatcttgcacatctcttgtcaaacttatttttaattatttcctgagtttgaggctattgtaattgttgatgctgttctgggttccattttaagtgtttatggtgatatatagaaatgtagcatattatctttcatccttaaacattgttaacctcacttcttagtcctggtagctctcttgtaaattctttgttgttttcctatgtaaatgataatgtgttctgtgaacaaagtggtttacttcttcttttccaatctattgcctttacttatcctctttgttttattgcagtgacagaacctccagtayaatgttaaataaaaatgggcagagtaaacatccctggctttttccccattgtaggaggattgtattcagtcattcacattaagtatgaggttccttgtaggtttttcatagatgtccttaattaagttcaggaatttcagtctgtttctagtctgctgaaagttttttaataagtagacattgaattttgttaagtattattttgcacg

SEQ ID NO: 393919 - DNA, 593 bp, Homo sapiens
accaggtaggaagtgaaactgtcacctgagcctgagtttatttaccaaggatatgctcttatttactgaatgctactccattgccattaatactgttgyttatcaaataattctagttcattcctatttaaggcacatggaaggatttcatttctttgccatcatcaggttagatgtggccaatgacttgctttggtcaattaaataagagaaatggcatgagtcagttctggatagaggcttcaggactcccctttctcaggtcggctgtgattaaagaagccatgaaaagaagatgtctctgtcaacctgttaccctaacagaccacagtgagtacaatcaccttgtgtagcacacataatatgaacaagaaatacactgttgttttgttgagaccctgagatttggggaataattgtaaccacagcataatctagcttgtcctgagacaattatgctgctgccaaatatgtagtaagttgtgtcaatgatgtgtgtcaactctccaaggttgggggaagctcttatcagtaatgttgggggatttttgtatagcaaatactcccactgctatggcctgaatgtttgtgtt

SEQ ID NO: 393920 - DNA, 593 bp, Homo sapiens
accaggtaggaagtgaaactgtcacctgagcctgagtttatttaccaaggatatgctcttatttactgaatgctactccattgccattaatactgttgcttatcaaataattctagttcattcctatttaaggcacatggaaggatttcatttctttgccatyatcaggttagatgtggccaatgacttgctttggtcaattaaataagagaaatggcatgagtcagttctggatagaggcttcaggactcccctttctcaggtcggctgtgattaaagaagccatgaaaagaagatgtctctgtcaacctgttaccctaacagaccacagtgagtacaatcaccttgtgtagcacacataatatgaacaagaaatacactgttgttttgttgagaccctgagatttggggaataattgtaaccacagcataatctagcttgtcctgagacaattatgctgctgccaaatatgtagtaagttgtgtcaatgatgtgtgtcaactctccaaggttgggggaagctcttatcagtaatgttgggggatttttgtatagcaaatactcccactgctatggcctgaatgtttgtgtt

SEQ ID NO: 393921 - DNA, 566 bp, Homo sapiens
  misc_feature (1)...(566): n = A,T,C or G
ttaagggatggccagatagccggtaaacattattcctgggtgtgtatgtgaaggtgtttcccgaaaagactagcatttgaattggccaactgagtaaagcagatatccctcagcaatgtgagtgggcaccatccaattctttgagggcctaaatagaaagcaaaggtggaggaaggttgatatggtttggctgtatccccacccaaatctcattttgaattgtagtttccataatccccacgtatcctaggagggaacaggtggagataattgaatcatggaggcagtttccccatcctgttctcataatagtgagtgagttctcacgagatcagayggctttataaggggnttccntaccacccccacccccccaccttcactctgccctgctccttgctgccaccgtaagaagaaggatgtgatatcttcaccttctgccatgattgtaatttcctgaggcttccccagacctgctgacctgtgagtcaattaaacctctttctttgataaagtacccagtctcgggtacgtctttattagactaatacaaagggctaatttac

SEQ ID NO: 393922 - DNA, 571 bp, Homo sapiens
ccagcgctgttatttggtataggttcctatggagaaggcactcacctttacttaatatgtgcaaatagtagttctcagttttctcctattgcctcagtcttccctagctaagaactatctatgtacttcaactttccatcttcactcctaagaaactatttcccttgactaacaaaaagctaagagaaagtctaaggtgttttctttaccaaatgtgtaataacaaaactaataagagttagaactgaaaaataaagcccatcttcaacttttcatacaaccaaatccttctgctatattaaaggggggcaatgaataactcatgaaaagagtcagaaatttgttgatgcctgataatgaagactccactttttccttctcctctaaatccattragattaaacagttaatagaaccgatatcagccaagccagccgcaaacaaataaagcaatccatttatgttgtttttgtgcattcccttaagaagaggcaaggtgcattgcctttgaaaatgccttgttactgtcttttgacttcttctttatccaagttattatgcaagaatgtgc

SEQ ID NO: 393923 - DNA, 551 bp, Homo sapiens
aacagagcgagactccatctcaaaataaataaataaataaaaataataaaaataaataaaatttgtacgtttaaaatggtaaagctagttatcatagtgggtgatgtccattgcagtgataatcctcaattctcattggcttaccacaatgaaagtttctttctccctcacaccacaatcaaaaagktcagatgactttgctgggtggctaccttcctccccaggtctttcagatataaaagatcctttcattaaatggagagtcaatgtaagacaaaagcactattcaaagaataaattctgagaacttttcaatatttacaaaagacatcaaaccacaaattcacttggtcatggatttgattactgctgaatttaatttgttagtagattttaaaagaattttctatgtatatccatgaaggatattgctccatcattttcatttcttgtaattttatcatctaattttggtagaagatcttatgcttcctcctcctctactttctgaaatagtttgtgcaagatataatttgtttcttaaatgtttg

SEQ ID NO: 393924 - DNA, 551 bp, Homo sapiens
aacagagcgagactccatctcaaaataaataaataaataaaaataataaaaataaataaaatttgtacgtttaaaatggtaaagctagttatcatagtgggtgatgtccattgcagtgataatcctcaattctcattggcttaccacaatgaaagtttctttctccctcacaccacaatcaaaaagttcagatgactttgctgggtggctaccttcctccccaggtctttcagatataaaagatcctttcattaaatggagagtsaatgtaagacaaaagcactattcaaagaataaattctgagaacttttcaatatttacaaaagacatcaaaccacaaattcacttggtcatggatttgattactgctgaatttaatttgttagtagattttaaaagaattttctatgtatatccatgaaggatattgctccatcattttcatttcttgtaattttatcatctaattttggtagaagatcttatgcttcctcctcctctactttctgaaatagtttgtgcaagatataatttgtttcttaaatgtttg

SEQ ID NO: 393925 - DNA, 566 bp, Homo sapiens
acttagaaagtttcctgcctttgagataatttataaaaatatcaatgttgattctggcagaaaccccccatgtaggccctttatcccaattaatgtttttcaaacattagagtgcctgacattgtgatagatcattagccgtctctgctactttatatattttctgtatctttatccttatgcatacaaagaaacttagcaccatattccattcattctaagatgcacattagtttcacattttaacttttttatttaaaatygggcatgtcttacagttgaatagcatcttagatttgatgacatgtgaaactagaataaatgcttagaggattaacagtggaattggaattatcccttgagtgtatgttaaaaataacctgaaaagagtttgtatttaaaagtattttcagagtttcaattatgctgactccaatttttgtatcccattcttctgaattcagtttctccttccaggaggacacctgatagtaattactccaatgaagtagtgtcagtaatgacattgtctttgtttatctgaaaaacgtttttcttttaacttt

SEQ ID NO: 393926 - DNA, 540 bp, Homo sapiens
attctggcagaaaccccccatgtaggccctttatcccaattaatgtttttcaaacattagagtgcctgacattgtgatagatcattagccgtctctgctactttatatattttctgtatctttatccttatgcatacaaagaaacttagcaccatattccattcattctaagatgcacattagtttcacattttaacttttttatttaaaatcgggcatgtcttacarttgaatagcatcttagatttgatgacatgtgaaactagaataaatgcttagaggattaacagtggaattggaattatcccttgagtgtatgttaaaaataacctgaaaagagtttgtatttaaaagtattttcagagtttcaattatgctgactccaatttttgtatcccattcttctgaattcagtttctccttccaggaggacacctgatagtaattactccaatgaagtagtgtcagtaatgacattgtctttgtttatctgaaaaacgtttttcttttaactttactcttggacggcagtgtagctgg

SEQ ID NO: 393927 - DNA, 540 bp, Homo sapiens
attctggcagaaaccccccatgtaggccctttatcccaattaatgtttttcaaacattagagtgcctgacattgtgatagatcattagccgtctctgctactttatatattttctgtatctttatccttatgcatacaaagaaacttagcaccatattccattcattctaagatgcacattagtttcacattttaacttttttatttaaaatcgggcatgtcttacagttgaatascatcttagatttgatgacatgtgaaactagaataaatgcttagaggattaacagtggaattggaattatcccttgagtgtatgttaaaaataacctgaaaagagtttgtatttaaaagtattttcagagtttcaattatgctgactccaatttttgtatcccattcttctgaattcagtttctccttccaggaggacacctgatagtaattactccaatgaagtagtgtcagtaatgacattgtctttgtttatctgaaaaacgtttttcttttaactttactcttggacggcagtgtagctgg

SEQ ID NO: 393928 - DNA, 378 bp, Homo sapiens
gctttgaggaataggtttgtgaggggactcctgcatccttaaagagctccctgaccgctcttctctgcaggccggaccttacagtgggaaccatagttactcaactggaaagcttaaatgcagtgggaataaacggattacaggatgtcaggggccaagttgtggaactcaactgcagaaaacaaggtgggcatagttactgtaaygaatagcagagacaaagcaacagtgagaatagtctgactcatgtagactcatggcattgggtaattagtcatgcgttcctagaagtaaagtagataggaagcccactacattcttccttcatatatataaacaaaaaacttccaggttaaatgaatggaagtctaactcaaa

SEQ ID NO: 393929 - DNA, 636 bp, Homo sapiens
tggtgtcagtgatgaaggttttccaagggctcagccacatgaactactctcaccaaggctgacttggttacagcaccataataaagggatagcattttgtcctcaccgaaatgcatatttkctctggatataaatttgccttccctgtatgcaatgcttctgccaacactaccactcatggacttacggaatgtcttatccaccatcatggtaacactctgggtgaaaccattcagatccgcactgttttcactggaaggttaataaatctgcatgtaagtttttgttgtgtttcacatgtttatcttgtttcaagtatggtaggttgtatttttctagaaagttgtccattttatttaatttgcctttttagggtacagcaaattcttactttcttttttttagttctgttttttttcctactatttctttttttgcaatcagttttatcaaggacttattaattttattcattttctcaaagtacaagccaattgtgtttacatgtttagtttctatttggttaatttgttcttttacttacaatttcccttttttccatcgtatgtgaaaaaaatggaaagatataccatgctcatagattggagacaatattgcaataccatcccaatcaaa

SEQ ID NO: 393930 - DNA, 604 bp, Homo sapiens
ttctttatgtttatagatgtgtagagaaatatttaaatatttaaaagttaaaaggtataaacatgatgtatggtgccttaagcagtattaacaggcattgattttaaagtggtacacttaggcccattagtaaacaaatacagattttaaaatacatttatatgttttcttcattaactcttaccatcactgcatattcaatctatattccttttgtaatttaaaaaccattttaaaaatgtgtttaaatgatttatgatgatacttataagtaacacatagttgggtttttaaaaaaattgaatttgataatctttgtattttagttatccttcatgtggttactgatctatttggttttaaatctatccttcactgtttacttccacttacccttgtctcttctatgttctttttttcctcttttttcttacacttttctggattaattgctcattttatattwttctaattttctcttctattagtttgttagtcatatttctttctttttgtcttacagtggttgatctggagattacaataggaatccatgactaagtaaagtctagtgaaagtcgtcaacctttctgtacaatgtgag

SEQ ID NO: 393931 - DNA, 449 bp, Homo sapiens
gcaggcgccccatgctggacacacacagtaagtatacaacaatgagcatgcaatgccagacacacaaagccagacacaccatagtaggcgcagcctctgggacaccatgcagggcacacagtgctgggcaaacatgccaggcacaaaatgccagggagaaagcactaagcccgtatgccaggcacactctgggcccaccaagctggatgcacaaacctgagcacacagggccggacacacaacgcaggcacccaggccgggcagacactctgggatctcaatactgggcacacaggaccaggtacacaacaccaggcatgcaatactgggcatgcccactaggcacaaacaagcaggracacagcgccaggtacacacagtacctgcacacacagttggcaaacaacacagggcatacgctccaggattacactgcaaggctcacagac

SEQ ID NO: 393932 - DNA, 616 bp, Homo sapiens
tgcagggccaggcacatggcaagaacacaggctggacacagatgctggctacgcgacactgggcaaacaaagtcagacacaccatgcctggtgcataacaccatgcacataactcaatactggacacacagtgacaggcacacaacactgggcgcacaaaggaagtatgcatgctaggcactcagcaggaacacaggacactagaaggcacacccagtcagcacatacagttggctttgagcaacgaagtgtgcgcagacgcagtgtcacccaccagcttagggctgaccgtggccagccgtgctccagatggcggccgccccgcggcgcagatcttggatgaaggcgacatggagcggggctgtcgccagccactggggctcagggggctcaggggcacttgcggcagccacacagcctgagcgctgctggctgtaactctgtgggatgcacgaggtttgcttccatcagtgccctctctgatgcacatgtgaatcgctctgagtctcttacgataacaaaaaattccgtagggtgtggcacgtgtaaacccgactcgtatttcttgctagagtatctttggcamggtttcctgggttactgggtcagaagtcaa

SEQ ID NO: 393933 - DNA, 566 bp, Homo sapiens
attttcagatatctttatagcaatgccccacccctcagtaccarttttctgttaagctgttcttgcatcactacagaggaatacctgagactgggtaattgatatagtttggctctgtgtccccactcaaatcttatctcgaatcgtaatccccatgtgttgagggagggacctggtgagaggtgattgtatcatgggggtggtttcccccatgctgttcttgtgatactgagtgtgttctcatgagatctgatggtttaaaagtgtttggcagtaccccacctcttctgctgccatgtaagacatgctttgcttccccttccccttccaccatgattgtaagtttcctgaggcctcccagacatacagaactatgagttaattaaacctctttcctttataaattatccagtctcaggtcattatttacagcagtgtgaaaacaggctaatacagtaatttataagacaaaaagatttagttggatcacatgcaggctatataggaaacaaaatactagaacattcttctgaggagggaagcttttactcatggcagaaggcaaa

SEQ ID NO: 393934 - DNA, 566 bp, Homo sapiens
attttcagatatctttatagcaatgccccacccctcagtaccagttttctgttaagctgttcttgcatcactacagaggaatacctgagactgggtaattgatatagtttggctctgtgtccccactcaaatcttatctcgaatcgtaatccccatgtgttgagggagggacctggtgagaggtgattgtatcatgggggtggtttcccccatgctgttcttgtgataytgagtgtgttctcatgagatctgatggtttaaaagtgtttggcagtaccccacctcttctgctgccatgtaagacatgctttgcttccccttccccttccaccatgattgtaagtttcctgaggcctcccagacatacagaactatgagttaattaaacctctttcctttataaattatccagtctcaggtcattatttacagcagtgtgaaaacaggctaatacagtaatttataagacaaaaagatttagttggatcacatgcaggctatataggaaacaaaatactagaacattcttctgaggagggaagcttttactcatggcagaaggcaaa

SEQ ID NO: 393935 - DNA, 560 bp, Homo sapiens
aagaggtttaagttttacaaattatttattagaagtctttctaaattttgagagaaatcatagttcattaatatattagttaatatatcttattaaattcaggtttaattgtgttacagttcagatttctactgttaactctgtggtacatcatagatcattttatatccttaataatctagaataaattgagtgggtaatatatttatgrctacttgggatgggggattggagcctactttagccatttcaaatggtcagaaaaatttaaggttgagtggttagtgtatcattatgattgtgatttatttgatcctaaatgattacttgggtactcagcctcaattgtagcattctttctaggaataaaatatgatttaccatccaattttaacaatgcagtttctgaaagaaatgcacagtaaaaacaaaacaaaactggagtgcctttaattttttgataaactatatttattaatttttctccatattaaactggatatgcttattctacataacaaatataacataaacagagatggtggtttctcttaataccc

SEQ ID NO: 393936 - DNA, 587 bp, Homo sapiens
aaggagtggagaaaccctctcagggattttccaaagagggtgaattacactgtttatttgctttttcgttgttctggttaggtcaatttaatgatgcaagattgactgttatggataattacattttatattacagactacaatgtgctaattaaagtattaattgttaattaatcaaagcattatagagcctatgaaattatatagtgttctaaaatttgcagagtgcttatataggacagatatgagactagcatatgtaagtatggctggaacartatttaaaatactgaaatacgttctttctaaacatttcgcttcatttcacagaagggcacctaaggcaggtagaagaatgaggtagttcctgcatttttccaccttgctgctccctccaaaacccacatgcatgcacacacacgcacacacacatgcacacaattgctgcaaaccactgcatttacaggatttttttacacctcaggtgggcctgttagtttctaataaacctacttgccatctatttttggatctcatcaccctaatgaaaggatcacagaatgcttcacagccaattacctggtgca

SEQ ID NO: 393937 - DNA, 607 bp, Homo sapiens
ctgtggcacaattatggggaatattccatgtgaacttgagaagaatgtgtattctgctgttgttggataaaatagtctatagatgttgcttatatccaattgatggacaatgttttgagttcaatcatgtttatactggttttctgcttgctggttcttcaaatttctggtagaggggtgttaaagtttccaactgtgaaaatggatttacctatttatccttgtaggtctaatagtttttgcctcattagtttgatgctgtgtttttgggcatatacacattaaggactgttatgtctttttgtagaactggtctttttatcattaagtaatatccttttttatccctggaaactttccttgctttgaagtacgctctatctgaaatttacatagctattcctgctttcttggattagtgttagcatggtatatttttctccatccataagacactgttaatttatatgtgtctttatatttagagtgggttttttgtaggcacatacagttgggtcttgttttttgttctactcttacagtctctttaaattgatgcatttagaccactcagagtgattgtcratatagttggatcaataactat

SEQ ID NO: 393938 - DNA, 537 bp, Homo sapiens
tttctttttcttaaaagtttattcatatttgcattttttaaaaggctgggttcttataaatagactgataatacaaaaataccaatatattgtggtcaatcttagaaacccacaactccaataaaagtcttttagacttatcttcctctcccctgtgtccacaaagtagagaatgcaatccttcaattttcaggagctcatagcttatatctgtttttggcaccccttccccaattcttcccagtattatatttccctgtgtcttaatcacctacttgcactataaacctcttagagcagaggactgccgctttcttccatctctaagcttgccctgtmccctgcaccaagtctcacacatagtaggtactcagaaggtgttaagtgggattttagctggctgaaaaaggagcactcgctcttggcttcccattccttatatgggccacgaagcccctgtctccaaggccctttgtgtctgtgacattctcgggcttatgcttcttgtgaacatttgtgggatattagtcatcttat

SEQ ID NO: 393939 - DNA, 559 bp, Homo sapiens
tgtagtggtatctcattgttgttttactctgcatttccctgatgacatatgatgtggaacatattttcatatgttgatctgtatgtcttctttggtgaagtatcagttaagatctgtcttagttcatttagtgttcctataaaggaatacctgaggctgggtaatttataaagcaatgagttttatttggcttacagttctacaggctgtggaagtatggcaccatcatctgcttctgatgagggcttcagtctgcttctactcatagcagaaggtgaaggaggaggagcatgtgtagagatcacatgataagagaggaagcaagagagaaagagaaagaggtgacaggctctttttaacaactagcactcackgctcttatgggaactaaaacagtggtaactcattaccaggaggatagtaccaagccattcatgagggatttgccccgtgacccaaacacttccccttaggtgccacctccagtgttggggatcaattttccatatgagatttggagggatcagacaaactatagcaaggtctttggcctattttt

SEQ ID NO: 393940 - DNA, 584 bp, Homo sapiens
tccatttgatttattcatagtgtgtcccagtggaactctttgtgtatatataaattattccaatgagtaatactctattgtttgaatattagtcgtttttctaggtattatattatttatgaatagcttattcctgtctactaatgttattttaccagtttgcatgcagcatagaaactttacctccctttatcctctcctgtagttacctttactattttctccacatacattaaaaccatctcagacagttttatactttttccttcaaccaacaaacataayttagaatactcaacaagagaaaaaaagttccattatatttacccatatttttacttgccatatttttccctgctttctctccactcttccttcttttaatgtttcctttcaatctattgaactttagctattcttctgaaggtagatgtggtggcaacacaatcttttagttgcctcagtctgagaatttcttcatttttctttcatttttgaccaatatatttcactgtatataggattctgaggtgatctttttttcagcatttgaaaaggttgtttttcttcattctgaactctgt

SEQ ID NO: 393941 - DNA, 584 bp, Homo sapiens
tccatttgatttattcatagtgtgtcccagtggaactctttgtgtatatataaattattccaatgagtaatactctattgtttgaatattagtcgtttttctaggtattatattatttatgaatagcttattcctgtctactaatgttattttaccagtttgcatgcagcatagaaactttacctccctttatcctctcctgtagttacctttactattttctccacatacattaaaaccatctcagacagttttatactttttccttcaaccaacaaacataacttagaatactcaacaagagaaaaaaagttccattatatttacccatatttttacttgccatatttttccctsctttctctccactcttccttcttttaatgtttcctttcaatctattgaactttagctattcttctgaaggtagatgtggtggcaacacaatcttttagttgcctcagtctgagaatttcttcatttttctttcatttttgaccaatatatttcactgtatataggattctgaggtgatctttttttcagcatttgaaaaggttgtttttcttcattctgaactctgt

SEQ ID NO: 393942 - DNA, 607 bp, Homo sapiens
ttaaaaaatttcattttattcacattcactatttttgttttgtctgtttaatggatttcctctctaatctttattatttcttttctcctgcttgtttaagatttagtttactcttccttttctagtaaattaagatgaaaccttacttttttcttttctaaaaaagtcatttaaaaaccacgaaaatttccctaagcactgctgtatcccataaatattgatatactgtaatttcattttrtttgatactaatatagacactccagttttcttagggttactatttgtattgtttatctatttccattctattactttaaacctatttgtgttcttagatgttcttagaaaaggtgtctcttaagtcttattatttttacccaatttgacattctctaaaactattattgaaatgttcaatctatttacatttggtgtaattatttatgtgatttaatgtatatcttgttttgctatttaattttatatgttccatatctttttaattcatacattgcttttaactgtctttcgtgttagatacttctattgtactgtttaattcttttcttttttttttttactacattttaagggattttttatg

SEQ ID NO: 393943 - DNA, 576 bp, Homo sapiens
tgtattgtcaaatgctggaacttatttcatctatctaactgtatctttgtatccattaaraattttatatttagtcctctatagctgttcataaaattgttgtcaaaaatgtttaaatcaaattgtttttcaaatgtatataaaataaatacttcactctctaagaggagagtacttccaagccattaataatatcccatttttttcccagatactcttcaaatggaattcttaatctggtttacttgtgctcttgtggttgaaacatccaactgtcatcctagagttttctcttttcatcatctggggattcttctttgattgttttctgaaatttttttggtcccatacttacctctttcttctattactgccacattttagtatagcaaatacttttaaggaagcgtgcacaagaattggcaatcacacgctttgaggcctagctgaaagcatcttcactgtgtccccatatgagattgactgactgttatacagaagtctggattggatatatcttttctttagtaggaaggtcaaggcattgtttattgtctgaggtcatttccacgagtc

SEQ ID NO: 393944 - DNA, 582 bp, Homo sapiens
tgcccattacagggtttcccayggttgtgcccatatagacctttctaagaggacagccttaggtactcatgtcatgacccccactcccagttcatagctgatggactagagtctggtgatgggctgaaggtaaccacactaacaggggtctaaggtgtggtctggaatggaaagattttccctggcagggttagggatatcagttgagcaaggtaggttctacctgtctggaatttgaagtgagaagtttggtagcaatgagctccttggtaggcaaacagaaggtggctccgcacagggaggaatggacagacagcatagagctgagtgatctgccagcggaaccctggagtggaggtcctgggactcccactgctgaggatgtcagtctccagcattaacactcaggatgccatcccactcaagtctccctggtggccggcctggtcttcctgacctggaagtgaagcttggttgttcagttttctctgagttcttgtgaagacctaccccatggttaagattcctgttttccattttcttaaatgaatccttaaaatatattcccacttacgtgaggtg

SEQ ID NO: 393945 - DNA, 582 bp, Homo sapiens
tgcccattacagggtttcccatggttgtgcccatatagacctttctaagaggacagccttaggtactcatgtcatgacccccactcccagttcatagctgatggactagagtctggtgatgggctgaaggtaaccacactaacaggggtctaaggtgtggtctggaatggaaagattttccctggcagggttagggatatcagttgagcaaggtaggttctacctgtctggaatttgaagtgagaagtttggtagcaatgagctccttggtaggcaaacagaaggtggctccgcacagggaggartggacagacagcatagagctgagtgatctgccagcggaaccctggagtggaggtcctgggactcccactgctgaggatgtcagtctccagcattaacactcaggatgccatcccactcaagtctccctggtggccggcctggtcttcctgacctggaagtgaagcttggttgttcagttttctctgagttcttgtgaagacctaccccatggttaagattcctgttttccattttcttaaatgaatccttaaaatatattcccacttacgtgaggtg

SEQ ID NO: 393946 - DNA, 582 bp, Homo sapiens
tgcccattacagggtttcccatggttgtgcccatatagacctttctaagaggacagccttaggtactcatgtcatgacccccactcccagttcatagctgatggactagagtctggtgatgggctgaaggtaaccacactaacaggggtctaaggtgtggtctggaatggaaagattttccctggcagggttagggatatcagttgagcaaggtaggttctacctgtctggaatttgaagtgagaagtttggtagcaatgagctccttggtaggcaaacagaaggtggctccgcacagggaggaatggacagacagcatagagctgagtgatctgccagcggaaccctggagtggaggtcctgggactcccactgctgaggatgtcartctccagcattaacactcaggatgccatcccactcaagtctccctggtggccggcctggtcttcctgacctggaagtgaagcttggttgttcagttttctctgagttcttgtgaagacctaccccatggttaagattcctgttttccattttcttaaatgaatccttaaaatatattcccacttacgtgaggtg

SEQ ID NO: 393947 - DNA, 603 bp, Homo sapiens
ttctgtgggactctggcagcaataggtctgcaggtgccgtgtcttctcctataagaccttgaccggctggcaagaaaagccctccctccccagaggctgctccaaaagcaggttcagagtccatctgtcccctcccctttccccacagccttttccttcctcgatccttggcaagcacgtcccgaccctgctgcactaaagctgagctcagccccctgcttcctgacaggcttctgcacagaggacctgggggaggrcttcagctctgcactcaacttccttgcctcgggatttgtacttggccacacaggctgcaggtgaactgggagacctggggatggtggccacacctctgagtgtggaaagtccccagatggaattatagttcccacatggccctctggcccccggcagaaggacattcagggcaggtatgcaggggctccactcccactgcccagaatttacctagggacaaaatccagttcctcaccccaggagggaagtttccttctctttcacccaaatatccttcactgctgccagagcccccagcctgccatgcagcacttgagcctgaaaccatgaatcagcaggcagagc

SEQ ID NO: 393948 - DNA, 607 bp, Homo sapiens
gggtgggttaaacaatgaattggaaagaacagaaatgataattagtaagctgaagacagactcaacaaaatgacctaaaatgtaactcagaaagataaagagatggaaaatgcgaatgcttgaaagacttgaaggacacaatgaaaagattcaatrtgtgtataaaatagtttcataaaagaaaggttaaagaaataatggctgagaaatttccagaattggccaacttttcctcagattaaggaagtatgagttcctcaaaaatataagtataaatcaaagactaattcaaacctccatcattttttagctctggcatgtaaatagcttagaattaatcactctcataacaacagaaaaaaaaaaatgaatgaaatgaaaaatcaatgacatttattggactcaggagggactgctgctgcagggtaagtaccacactgaaatatggagagacatgaaattcagggcacagccaaaatctgctcactcaaagcagaagccactggagctatgaacttgtggtaatgcttaaatggtaatttcagtgaatctctggttgctgagtgtgaaccagcaatgaatgagagtgagaagcccccagacagcc

SEQ ID NO: 393949 - DNA, 369 bp, Homo sapiens
atgagccaaataaaccacttttctttatacattacccagcctcaggtgtttatagcaatgcaaatggaataatgcaggtgtatacacacaagaggcgattcattatagaaaytggctcacgtggttatggaggccaagaagtcccacaatctgttgtctgcaatctggagaacaaggaagctagtgctgcaattcagtctgagtccaagggcctgagaaccaggagagcagatgtccaaggacaggagaagatggagtcttagcttaagcagagagggcaaattttctcctccacctttttgttacatgcaggctctcagtggattagatgatgcccacccacattggagagggccttcttcttgactt

SEQ ID NO: 393950 - DNA, 591 bp, Homo sapiens
ttttttctaaaacttttatagtttatattttcccttgaaggctataaagcattttgagttcatttttatataagatakaaggtttatttttttcttacccaatggatggccaattgcttctacaccattttttgaaaagactatccttcctccatttagctgcttttatactgttgttaaaatcaattagacatatgtgtttgtgtccatttctgggttctctattctgtttcattgatctatgtttctctctcctcaataccacaatgtcttgattactacagctacacggcaaaacttaacaccaagtaccatgtttcctcccactttattattctttttcaagattgttttagctattctaggatctgtgcctttccatataaattttagaataatacaaattacaactatataaaatataataatataataaacattacactatgataataattttaaaataatacaaattttatctatgtctacaaaaagtccttgctgagattttaataggaattgcattaaacctataaatcaattttgggaaaattgacatttttgctatttctgagttttctaatccatgaa

SEQ ID NO: 393951 - DNA, 562 bp, Homo sapiens
ttttttagtataatttcttaaatgtgaaattagtagctcaggctgggcatgatggctcatgcctgtaataccaacactttgggaggccgagacaggtggatcactcgtggtcaggagttcaagaccagcctggccaacatgawgaaacactgtctcctactaaaaatacaaaaatcagcctcgtgtggtggtgcacacctgtagtcccagctacttgggagaatctttcatgataacctgactttctataaaatataaattaggacaaatgtattccttggtgctatggtttaaatgtgtcccccaaagttcatatgttgggatcttaattcctaatgcaacagtactgggaagtgggcctaataggaggtgattagctaataatgattaatattgttattgtaggagtgagtattgtgagagggggagataaattatctcaagagtggatgtgttaaaaaagtgagtttggtcccctcttgctctctctcgagtactctctagcccttctgtcttccatcatgggatgttgtagcaagaagccccattgccagatgccagc

SEQ ID NO: 393952 - DNA, 457 bp, Homo sapiens
aagggtgtatctctcaaagcctttaaccagtttaagaaatttgcccaaggtaaatctaggtctcaaacccagatctggctcaaaatcatctctttcctcatcacaatggtgatcagccgcatggaagcagraagggataagcctcatttaaggaacagtaaacctccctcccacctccctactaccatgcccaagatatttttcatcttcagcaacattcaaagatgctctttcttgatgcctataaaatgaagtcaagttcatgtgcctggcattaaaggtgactccagttcagctagaagctcctgattatatctactatcttactttaccctgtaccccatgactttattcttgagtctatggtttcacatctctcatccaataaaggaagcacatgcttttattggatatattcatttattcattcaacatttattgaatgcctattatgtgt

SEQ ID NO: 393953 - DNA, 592 bp, Homo sapiens
gtgcttgaacatcttcatgcgtgcatggcccggaggaaggggaccctcaggacgaaagtccaggggcttttgaagccatgtgagaagatcagccttggctttggggacttgactcattgtctggaatattatctcagagtgatatttccctgcgtatcatgacctagtcttagctccaaacgacttctttcgaaaaatgcaaccttcctcaaataacgaaaatctgacactgccaagaagatttttaaaaatatgccaaggtcttactccagaaagaaaaggcagcatccagggaggaaggttgaggtcaccgaggacccagagttggggtgcattccttaaagagctttggcagagcgccccctccttatcccctcacacctrcaccgccacctacaaaggtcacagccaccttccctaccacaaggttggctctgaactaaaataccgtaaatataaatccttttgtttttatgtttctttttcccaggaacaccagtggtcacctgaaatcaacattaaaagggcagaaggctccagaaacccaactctttctgcagtaaaagcctgaaaattacgttttgatgcaatt

SEQ ID NO: 393954 - DNA, 438 bp, Homo sapiens
gcaccgtcccatacgcagagccggacaccgccccaggcccttctcctttgccatctccctgccttcccacactgccaaggtggcaagggcgcctgtgtccccatcctacagaaggaaacatggaggaattagaagtggagccactccagccaggcagcattttgaatattccttgagcacctactgtgtgcttggttccatgctagaagcttgggccacaacggggaaataagaccacagtgtcactgctcatggggcactggcatgcagatggggagacaatcaataccaaaacaaagaaggagacascccagagtgttaatgctctggaaaaaaataacaaaacaagtcaatgtgatattaaaaatctctgggagggagcggggggtgcatgtcaaagacggtctgaggcccaagtccccagagtgagtgcctcac

SEQ ID NO: 393955 - DNA, 556 bp, Homo sapiens
gctgttttacagttaatgttttttttgttttgtttttcagataaatgtaagaagtgcactctaaattaataaaaagtataggaaatacataaaccaatacatagccatttgtcattatgaattatgtactgtacataattgtatgtgctatacttttatgcaactgatagcccattaggtttgtttataccagcatcaccacaaacacatgattaatgcattgagctgcaatgttatgacggcttcagtgtcactagatgataatttattttatttatttgctcaatgtttgcctaactactttacatgtattatcttatttaatgcttacaacaatctgataagtaatttaaattacattcactcctatttgaagatgagttcaaatcaagagaggttatttaacttgcacaaagtaatcttatagatgagaaaaatgtttatatggaaaagttaagtataattggtttatgtataaacrtatagatggatgctacattgtaaattcttagcactttgtatgcatacttaagtttgtgtataaagaaataaaacc

SEQ ID NO: 393956 - DNA, 606 bp, Homo sapiens
agtataccatattttctaaattttattattagttgttaatcttttattgtgcttaattcataaattaaaatttatcatagttttgggaaaacatatatataagatttggtagtattcatagtatcaggaatccacagggggttttggaacatctcaatcatgaatcagggggagctattctatagtgagtgtgagagagaatctcaaatcacattaaggattatatcatcataaaaaataaatatgagaaacatactgaaaaaaatactgaaaatctaccacatgcatgacatatatataggcttattgcttaccaagatgtataggatgaatatcttgccattaatggattccctgtctagttttatagactccaggagaacatacacacacacacacacacacacacwctctctctctctctctctctctcctattttgctgagtgaaaatatcttctcaaaagaagatattgatgtaaagcttaataagtcattctatcctaaggctaaatgaaaataaatgaataatttgacaacttcaaaaatgcaaagtcgataaaagattccaatctcaaccaatgttgaaatgaaagctattggagac

SEQ ID NO: 393957 - DNA, 606 bp, Homo sapiens
acaaattattttattattcatggcccaccaggaagcatgagcatcagcatatttttgatagttgccttcgttcttatgtttcacagaagcaatgtgaatacgcccagaggcagccagcatatgcagcaggttgcattacaacagaagagctctaagtttaggaaacccaaatttcttataatggacagtaagcatgctttttctttattgaagaagtattayattgaatagcatctatgccttacatttgctccagaggaagacaatatgtctatttcccaagctgttcactataataacgtatttgaaaagatagtccagattaaatggcatcctgtgtctccactcagaagacattcagaaatacaatagtctatggagaattgtctcctaacagtccttccatatgcttatttccattgtaaatctttaaggagtaagatgttctaaatctaatttgcatatcaaaagtgtgtgtgtgtgtgtgtgtgtttgtgtgtgatgtgtgaaatcttagtaagaggatgtagaaatcaagaaaaaattgaagtaaaatttttttcagtgctggatattttcaaacaacttaacattcctctactgttg

SEQ ID NO: 393958 - DNA, 592 bp, Homo sapiens
ccaaccttttcacctcttgaaaatggagtgacccagacaaagagaagaaaggcctgaaaagtcacatggacagcatggggagcagctgagccatcccagttaaacaggacttgcccttctttgtctttgcactaagagccagtacttatctccagcctgctgtagcctatgtccattatcctccccctggccagggccgagggatggtcagaccagcctgcattgtgctgaaagcccacaatcatcccagctttccaggccttaatcaactggtggtgggagtgaactctggattggctgattgctcccagactgccactgtttgtcctgacttcartgcatctctgatagacctttgacgccttgcaacaaagagtttataggagggagaactgtagaaatggagtgctcctcaagaaagctgggcaactcacaaaataccccttaatttctataacaggcaattcactccacaaaggaaggaaatcaatgagagtttacactttttctttgaggaaactttctttaaagaaaaaaatcatttacaggagctttgcatattttgggtacaagcaatggtagaaacataaga

SEQ ID NO: 393959 - DNA, 534 bp, Homo sapiens
agattttcaggtttattttcatttgtgaaatgattggggaagggatgatacttgcttttagaaagcagaagctagagctgctataaaaactgcaacaaacccaacagtcataccctcatgaaagtgttttcttgtataccttacaacttttaactgtcttgtcattgattcatgtatataaaaatctgttacctgtgtctagaatatagctctgattagaagatgaagataaggaaaattttacctgtctttattacacaatgaatttacaatttatttcattcaggttgtattcttgagataaaattgtacttagtttgttcagaaagttaccaatagttcttcactatttttgaaaaataaatcacccccagcatcacagcacattatatttgagataattgagtttaaatacaatgcaataggtgacagtgcatatctgtacctgttatgttagtatggattttccttctcagtacaaccatttaacaactrtatcaggttttctagcataatcatgttgtagaaattaaa

SEQ ID NO: 393960 - DNA, 609 bp, Homo sapiens
acattttgtcctagaaataaaaaatgattaatgtggaaaaatcaatactactctataaatcatgattctctgtgtaatgatcaaagattagtcctccaagcaggctactgctttttccactgtcagtgcccattgtagccagctttcaaaaatgtaagtaaatcrttaagcaaagtacttcactattattatttgagaagtcccatcccagaagatggggtctaatattcacactgtctgatatatgaaggctttaagaaatgaaggggccaggcctagatggaacctgacagtaaatactgttcctgtcagtcaggcccaagcagccagttgtacttgggtgattttttatataattaagcttcatgcttagcataggagatggatttaatcagcccatgattcacattatatgtcaaatgatcacaggttggcatactgcacacaaaatggctcttctcattcttaacatcaatgttgatatggcataaagtaatagataattcataacaaatatcctccattcatcctctcatatctttctagattctccttgttttcaaactaaatatctctacatattataagacaagtgacttctagctgtga

SEQ ID NO: 393961 - DNA, 563 bp, Homo sapiens
ttcctagaaataaaaccatataatttctatgggaccctattcatgatgaaattgagcagtcctttagtcttcctgtcctcatgttacaaaccacgagaaatctatgacttgattactgcaggtcttagctgtttatgtaaagaaccaactgagtaatttgtttctaatgaagaaaataaagaaagaggaaatgaagacattttcagggtataaagacaccttgctaatgagataacgccttggctaaattaaaaacctcaactagcctaatgacatttagatttgttctttgttcatttttctgtttgctcttccctcgtctctccaatctttcactgacttttacatgttcaaaccagtgtgatgaatggatattttattttgatataatgatgagatgtcatatgagatgtattggatgcaaagtactgagagtgattaagctacagagatttagggcttgtttgatataaaagaaaacttttatttatttatttatttttgacatggagtcttgctctctcrtcaggctggagtgcagtggcacaatctcgcctcgttgc

SEQ ID NO: 393962 - DNA, 602 bp, Homo sapiens
atcactaggtattaagcctagtacccattagttatttttcctgatcctctccctccttctaccttccaccctccgaaaggccccagtgtgttactcctctctatgtgtccatgtgttctcatcagttagccaccacttataagtgagaacatgtggcatttggttttctgtttctgttagtttgctaagaataatggctccatccatgtccctgcaagaaacatgatcttttttttaatgcacacttatgttcattgcagcactattcacaatagaaaaacatggaatcaacctaaatgtccatcaatgatagaccggatgaagaaaatgtcctacgtaaacaccatggaacactgttcaagtagttttcctgatagtaccacctcacttaaatccatacagcaactgtttaatatgtattgtgtgcaaggccctgagctagatgatgcaataactcaagatgataaaaggtaagaaaacatgtaatgctaagacatttccctaagsctaatctatcctatttattaatattatggcatatgaggccttcaattatctaattcttgcctaatttgggaactctttttttttccaccaaactc

SEQ ID NO: 393963 - DNA, 536 bp, Homo sapiens
ttccctaaggctaatctatcctatttattaatattatggcatatgaggccttcaattatctaattcttgcctaatttgggaactctttttttttccaccaaactctacactgcattataaccaaatacagtggaattattttagaaacgtgcctcctccttacctgtatgccatatcaactaaggttcttcattccctctataaatctttctaacggaatctacaatgtgaattattatttcacttacaaatcaatacttaggtccctttctggttagcttgatccttgtcaatagtatataatttttgttttcaaatttttatgcagctgtgtcttattgctatttcaatttaattaactattgagtaaattaatgaaacatgtgtgagaaaaggccttatttccatgaaaamtaaatgaaatgtttcagaaaaatgataaatgtgagttatttaagtgaaatggacaactataaaagacaggggaaatttcaagcttatgattatctttactctccagctccattcaaaacaaa

SEQ ID NO: 393964 - DNA, 536 bp, Homo sapiens
ttccctaaggctaatctatcctatttattaatattatggcatatgaggccttcaattatctaattcttgcctaatttgggaactctttttttttccaccaaactctacactgcattataaccaaatacagtggaattattttagaaacgtgcctcctccttacctgtatgccatatcaactaaggttcttcattccctctataaatctttctaacggaatctacaatgtgaattattatttcacttacaaatcaatacttaggtccctttctggttagcttgatccttgtcaatagtatataatttttgttttcaaatttttatgcagctgtgtcttattgctatttcaatttaattaactattgagtaaattaatgaaacatgtgtgagaaaaggccttatttccatgaaaacwaaatgaaatgtttcagaaaaatgataaatgtgagttatttaagtgaaatggacaactataaaagacaggggaaatttcaagcttatgattatctttactctccagctccattcaaaacaaa

SEQ ID NO: 393965 - DNA, 584 bp, Homo sapiens
cccaaagtttgttacttaaaaagaaaaaatgacaaatttttaactatagataaagaaaataaagaaaaaacacttgaattactaaaaccagaaatgaaaatgagaacatcactatttaatttatagaaataaaaagacatataagagagtactgtgaccaattgtatgccaacaaattgagtaacctacatgaaatggacaagtttctaggaaaaaaaaaatcaggactaaataataaagaaatattaaatctgaatgggcctgtaattagttaggagaggctatggagaggcaaaaggcactgaaaaaccaacacaatattgcaggagaaaaaaaggtggargactgtcactatttgacttcatgacttactataaagccagtaataaagacagtgtaatgttggcaaaataatagacaaatagattaatggaatagaagggcgaatccaaaaatagacccacaaagatatagtcaactgatctttgacaaaaaagtaaggcaatacagtaggaaaaaaatcttttctacaaatggtgctggaacaactggacactcacatgaaaaaaaatcaaaacttagac

SEQ ID NO: 393966 - DNA, 584 bp, Homo sapiens
cccaaagtttgttacttaaaaagaaaaaatgacaaatttttaactatagataaagaaaataaagaaaaaacacttgaattactaaaaccagaaatgaaaatgagaacatcactatttaatttatagaaataaaaagacatataagagagtactgtgaccaattgtatgccaacaaattgagtaacctacatgaaatggacaagtttctaggaaaaaaaaaatcaggactaaataataaagaaatattaaatctgaatgggcctgtaattagttaggagaggctatggagaggcaaaaggcactgaaaaaccaacacaatattgcaggagaaaaaaaggtggaggactgtcactatttgacttcatgacttactataaagccagtaataaagacagtgtaatgttggcaaaataatagacaaatagattaatggaatagaagggcgaatccaaaaatagacccacawagatatagtcaactgatctttgacaaaaaagtaaggcaatacagtaggaaaaaaatcttttctacaaatggtgctggaacaactggacactcacatgaaaaaaaatcaaaacttagac

SEQ ID NO: 393967 - DNA, 570 bp, Homo sapiens
gattattttgttagtcttagcacaattaaaaaggcttctggtaatttaataatgatttttccaaaaggaagttaaatattcaaatcagacccaaatcacggaaacagaccagggccacctagaagtaacaagattctcttcatcttgacaatgtgatttgttatagaccaacaagtttatactggttgcttgaaaaagatgagactatgtagaattattatatttcttatatygcaagacatatagaatttgtaaatgaaattcatgagcttgcaacttcttagcaagatactgtgacccataatacagaggttcaactggcaacaaatcagtgtgggaaaatatcaatgaatataggattattagtttttacttaggtcatgtgagaaaggaaagacaagttcagcgtatatcacaaccactcatacacatacacccacacactactgacaacaccaacactacagtttaagtcatgttggactccagagttagaataaccaaataatcataagggagatcattcggttagcatttttaagggtcatgcttaggatttataatgctttt

SEQ ID NO: 393968 - DNA, 570 bp, Homo sapiens
gattattttgttagtcttagcacaattaaaaaggcttctggtaatttaataatgatttttccaaaaggaagttaaatattcaaatcagacccaaatcacggaaacagaccagggccacctagaagtaacaagattctcttcatcttgacaatgtgatttgttatagaccaacaagtttatactggttgcttgaaaaagatgagactatgtagaattattatatttcttatattgcaagacatatagaatttgtaaatgaaattcatgagcttgcaacttyttagcaagatactgtgacccataatacagaggttcaactggcaacaaatcagtgtgggaaaatatcaatgaatataggattattagtttttacttaggtcatgtgagaaaggaaagacaagttcagcgtatatcacaaccactcatacacatacacccacacactactgacaacaccaacactacagtttaagtcatgttggactccagagttagaataaccaaataatcataagggagatcattcggttagcatttttaagggtcatgcttaggatttataatgctttt

SEQ ID NO: 393969 - DNA, 424 bp, Homo sapiens
ggagtagtttcccctatgttgttcttatgacagtgagtgagttctcacgagatctgatggtttaataaggggcttcccccttagctcggcactcattctctctcctgccatgctgtgaagaggtgccttctgccatgattgtaagtttcctgaggcctccacagccatgtggaattgtgaatcaattaaacatcttttctttataaatgacccagtctcagatatttcatcataatagcatgagaacaaatgaacacacttccttcttagtactgcttttcctgtatgtcatagattttggtaygttttactatcattttcatttgttttcagaaattttaaaaattgtcttcttaatttgtttattgaactattgtttgttcaggaaaatgtgtcattttcatgtgtttccatagattctgag

SEQ ID NO: 393970 - DNA, 541 bp, Homo sapiens
tttataattgttatgccctcctgctaaattgaaccttttatcattacatagtgaaattatttgtttctttacaattttagatttgttgtctattttatctaagtataactactcctgttccttttatgtttccatatgcatggagtatcttttttcatctctccacttgcagtctatttgtgtctctggaggtgaggtgggttccttgtaggcagtgtattgttgggtcttgtttatttattcagacactctatgaatttttaaagttttacattatttttctttctcagactgttttttataaaaatactctgtgacttttaataggagaatttagtccatttacattcaacattgttattgatcagtaaggactttctactgmtattttgttgcttatttcctgattgtttcataactcttctctttctttcttttttttttactgtctttctttttgattattttctctggtagcatgtatcaattagattctttttatttttagcgtatcaattatacagttttgcattgtgattac

SEQ ID NO: 393971 - DNA, 567 bp, Homo sapiens
tatttcctgattgtttcataactcttctctttctttcttttttttttactgtctttctttttgattattttctctggtagcatgtatcaattagattctttttatttttagcrtatcaattatacagttttgcattgtgattacaatgtagcttacaaatacatcttatacacataagttattttaaagagataacaatttatcttaaatatttaaaaaagaaacacacaaagaaaaaaacaaaaactaaaagaaaagtatgctaacctctttcagtttgacttcttattctatcaatgtacatatttttatattgctgatctctcaattgctatagctattactgtttttgacaggtttgtcttaaaacttcatatcagagttatgtgaaaactgcacatcccactattggaatattctggtgttatctttgtatttaatttctcagtgggttttataccttgaaatgtttggggttttctttgcatttcagtgtgttttttgttggtttgtttcagaattaaaatcattgtagtatctcttttaatgtggatcagatgataatga

SEQ ID NO: 393972 - DNA, 567 bp, Homo sapiens
tatttcctgattgtttcataactcttctctttctttcttttttttttactgtctttctttttgattattttctctggtagcatgtatcaattagattctttttatttttagcgtatcaattatacagttttgcattgtgattacaatgtagcttacaaatacatcttatacacataagttattttaaagagataacaatttatcttaaatatttaaaaaagaaacacacaaagaaaaaaacaaaaactaaaagaaaagtatgctaacctctttcagtttgacttcttattctatcaatgtacatatttttatattgctgatctctcaattgctatagctattactgtttttgacaggtttgtcttaaaacttcatatcagagttatgtgaaaactgcacatcmcactattggaatattctggtgttatctttgtatttaatttctcagtgggttttataccttgaaatgtttggggttttctttgcatttcagtgtgttttttgttggtttgtttcagaattaaaatcattgtagtatctcttttaatgtggatcagatgataatga

SEQ ID NO: 393973 - DNA, 593 bp, Homo sapiens
aacatgtggaagaagggaaatacccaacttcagcttgccctagctattctgtccaacaggaggggagaaaaactgagaagtacatttgaagtttacactccagagttaaaagttaataaaacaagtaagaccttctcacagaactatacaacactttccccctccacacatcttaccactgcatcagtaaaggattatttataacagttaattttacccagtgtgtcatgcctggctatgaagaaaaatatactagccacactaaaaagcaaaaacacagtttgaagagtcaggtcaagcaagcayatcaaccagactcagatatttcaagaatattaaaatcctcagaatgggaatttaaaataactatgagtaaaatgctaaacgaactaatgaataaagtaaaacacatgtaaaaacagatggctgatggaagcagagagatgtattagaacaaagaacaaaagagaaatgctagatatataaaaaaaatactgtaacagaaatgaagaaatgcctttgatggacttcatggtaagctggacatagctgaagaaagaattcctgagcttgaggatgtcttaatagaaact

SEQ ID NO: 393974 - DNA, 549 bp, Homo sapiens
aaggattatttataacagttaattttacccagtgtgtcatgcctggctatgaagaaaaatatactagccacactaaaaagcaaaaacacagtttgaagagtcaggtcaagcaagcatatcaaccagactcagatatttcaagaatattaaaatcctcagaatgggaatttaaaakaactatgagtaaaatgctaaacgaactaatgaataaagtaaaacacatgtaaaaacagatggctgatggaagcagagagatgtattagaacaaagaacaaaagagaaatgctagatatataaaaaaaatactgtaacagaaatgaagaaatgcctttgatggacttcatggtaagctggacatagctgaagaaagaattcctgagcttgaggatgtcttaatagaaactgccaaaacttaaaaacagagataaaaaagactgaagaaacataacagaatattcaggaatgatagaacaactccaaaaggtataacatatatgtaatgaaagttccagaggaagaagatagaaaagaagagaaaaatgtgagcta

SEQ ID NO: 393975 - DNA, 575 bp, Homo sapiens
aactgaaagcctttcttctaaaaactggaacaccacaaggatgttcacttttaccattgtgattcaacatggtactggaaatcctagccagagcaatcagagaagagaaagaaagaaagcacatccacataagaaagaaagacatcaaattagccttgttttcagggtaatatgagtctgtatttggaaaaacctaaaaacttcaccaaaaaaccagtagaacacataacaaaattcaataaatatcaatgacattcttcacagaaaaaaaaaatcctaaaatttatacagaaccacaaaagacccagaatagtrcaagctgtcctgagccaaaagaacaaaaatggaggaatcccattacttggcttcaattatactacagcgctgtagtaactcactacagagctgtagtaactcaaacagcctttgtcatttgaccttgggcaaattaaataacctgcaagagttctattcttttctatttgtaaaatagaaataaatatgtgtatcacacaaggctattaccaggattaaatggcatagcatatgtaatggtagtggcatgaaaacagaca

SEQ ID NO: 393976 - DNA, 578 bp, Homo sapiens
tagaaaaggcagaaaaagagggcaaaacaaaaataggagcaaagaacatggccaagaaatagaaaacagtaataaatatggtagatattcataaaagtatatccataatcactttgaatactgatggtctagacaaccattaatctactttctgtcacatttgcctattctgaacatttcatatgaatggaatcataacatatgtagccttttatgattagcttctttcatttagtatagtattttcaagattaatctatattgtaatatgtatcagggctttgtttatttttttcaatgtttttattgttgtaaaatatatacaacaaagtttactacattaatcactttaagtgtacagttcagtggtattaaatacattcttaatgttgtgcaaccatcaccaccatccatcttgaaatgtattttcttcttttaaatctttacacccattagacaacactttctcacttctcyctccttccagtacctggcaactaccattctactttctgtctctatgattataattactgtaagtacctcatgtaagtggaatcctacagtatttgcccttt

SEQ ID NO: 393977 - DNA, 597 bp, Homo sapiens
agaatggcatctgacacattataaatacggcatttatatttgttgagagaatgaatgaaaatatttagcaaagtctattaagaccttaaatattaaaattatacatgattaaacactagtgcgtcacatcttagtttattaatttttctactgcaaagatgcatattgtcactttgctgatcagtgtggaaactgtgtgtgtctaataagggggtcatactttatatagtagacttttctactcatcatratatttaactttcttttaccgtgaaagtttccaaataggatattagcttgtgaactccaatcatttcttttgtattgagagtgattatcatttagttatgcatgcaatttatttcattctgtgatgacagttgtctttcataggtgcatgtaaacatagaatctaaaatttgtactctaaatcagtaatgatgacaataatgtcaccataggcctccatgtatggtctccataaccacatgcctgaatttatttctttttcagtgaactacttgtttgaccttggacgagttactaaactctgtggctcagtttcacaatctataaagttagcttaatattatagct

SEQ ID NO: 393978 - DNA, 549 bp, Homo sapiens
aagcccatgtgacagtgaaagagatagcctggagaggtgaccatgctaaggagttttcattttaccctgaagtattttaaacaatggtatggtatgtagtgtatgctggtagtaccttttggaagtggcctaatctaagtcatgccctacttttcttatagcataaaawcttacatttctgatccaaaggtagatggattgtctttcagatggcctgactacccagtgctagtattaggaacctgtggccaaaaatgaaatacaataatccagttgattaacaacccatacttcccatttggaaaaaatattaccaggccaggcacagtggttcatgactgtaatcccagcactttgggaggccaaggagggaggatcacttaaggctgggagttcaagactagcctgggcaacatagcgagacctcatctctacataaacattgttttcattaaaaaaattacccaattgggggaaaccaggggagggcatgctcatggaagatgctgcaaactcacctcatagaggcatagtgctcaaaagatcaca

SEQ ID NO: 393979 - DNA, 602 bp, Homo sapiens
ccttgatcagaaaaaaagtgagtgattataaaggccattattggaataattagaaaaattttaaagatgaaatatattttaaataataaatgcagccataaaaaagaatgagttcatgtcctttgcagggacatggatgaagctggaagccatcattctcagcaaactaacacaggaacagaaaaccaatcaccgcatgttctcactgataagtgacagttgaacaatgagaacacatggacacagggaggggaacatcacacaccagggcctgttgggggatgaggggcaaggggtgggagagcattaggacagatacctaatgcatggggggcttaaaacctagatgatgggttgatrggtgcagcaaaccaccatggcacatgtatccctatgtaacaaacctgcacattctgcacatgtatcccagaacttaaagtaaaataaaaattaaaaaattttaaaaattaataataataataatattgtatcagtgttaaatttcctgagtttgataatcgtattacagttatataagggaacatccttgttaatataagctatgtgctgaagcatttatggatgacattatttaggtcata

SEQ ID NO: 393980 - DNA, 594 bp, Homo sapiens
acagtccacatgtaaaagaccaaaaatgagccaacaaacagtatgacctggcttctaaagcataaatgtgaacttgagctaaatcaatagaagtatagtgtctagaacaaaggtagtcatggtaccatgtctttctttatgttggtcaaacctcatctggagtaactgttcatctctaagcatgataattgaggagggacattgacaaagtacagctcattgaaaggagaacaattatagaaaagtgaggttttaaggaatggttgataatgtataagatatttaacttgacaaaagaaaatagggtaaacatgacaataacaataatagtcactaaaatgtattgcaccaggtactatgctrtatcttatatgatggttctttatgaatatctggaaggtcatcttgtagaataggaattgacattctgggtaacctcatagcatggaaatagggctaatgaatggaaggcatcagaggggtgttgcttaagttccacataaggtagaattgtattacattggttccatgtagcagtaaattagtctatattggaatgaagaaattatcccatcacaccagacaggtttaagc

SEQ ID NO: 393981 - DNA, 563 bp, Homo sapiens
tgctcagttcaaactatttcatggtgaattccaatggatctatggcattattttgagaactcagcctttaaaatcttttatattttatatttatagagatagtagccagactgttattagtaacaatattaataatattattactattaaaggaactcctctaaacctcggtgaaaccaagctgaagtgaatgtaacaattcttttgtgaaatattataattttttaaagggaaaggagaaacatacaactagtgccattcattgattcctactgccagctactggaggaaagagtgaatgctttcttttaagtctttaaaagctatgcaaacataagctatttgtttagcactggaaaacaagaacaaacagattagcttgctgtttacaaagtgttatttttcatttgaaygtcaagtttttcttttacacttatagataagtacatttctgagaacgtaccataaaaatagtaaaaactgattttgtccacaaggtacagacattttgctacaaaacccacaacttttgtttgactcccatcggtaaacctacactcaag

SEQ ID NO: 393982 - DNA, 596 bp, Homo sapiens
gttacctgactaattctgcgttgatctctctctctctctctggtggactctgacctcctgacctgggctatacccaagggtaggaagatgagatgccagacactttggtctttgatccagaatgttctccatatcattgtttttttttttctttaaacaatctttatccttttgcctccataaaagtaagccatttcccatcccagtgctgaagaaactggcaaaggtccctttcttatgtgcctccccagtgctacctccaaatgccaataccttttatttggaaaataytactatagagacttggtcataggacctgattcatttgtataatagaagaggtgtatccaattatccgtttccattatttgatataaagtcattgtagatgtactctgacagaagggaaattcttgccaaatatgataactttgcccttaaacacagcagtcacaaatgaataaatgccaaccatttatacatttccacacttacaactcaattttccaatggagctgttgatgaacctaatctaggttgcaaggcatgaaagatgcataattgtcaaagacttatatctttaattagacctattt

SEQ ID NO: 393983 - DNA, 596 bp, Homo sapiens
gttacctgactaattctgcgttgatctctctctctctctctggtggactctgacctcctgacctgggctatacccaagggtaggaagatgagatgccagacactttggtctttgatccagaatgttctccatatcattgtttttttttttctttaaacaatctttatccttttgcctccataaaagtaagccatttcccatcccagtgctgaagaaactggcaaaggtccctttcttatgtgcctccccagtgctacctccaaatgccaataccttttatttggaaaatactactatagagacttggtcataggacctgattcatttgtataatagaagaggtgtatccaattatccgtttccattatttgatataaagtcattgtagatgtactctgacagaagggaaattcttgccaaatatgataactttgcccttaaacacagcagtcacaaatgaataaatgccarccatttatacatttccacacttacaactcaattttccaatggagctgttgatgaacctaatctaggttgcaaggcatgaaagatgcataattgtcaaagacttatatctttaattagacctattt

SEQ ID NO: 393984 - DNA, 596 bp, Homo sapiens
gttacctgactaattctgcgttgatctctctctctctctctggtggactctgacctcctgacctgggctatacccaagggtaggaagatgagatgccagacactttggtctttgatccagaatgttctccatatcattgtttttttttttctttaaacaatctttatccttttgcctccataaaagtaagccatttcccatcccagtgctgaagaaactggcaaaggtccctttcttatgtgcctccccagtgctacctccaaatgccaataccttttatttggaaaatactactatagagacttggtcataggacctgattcatttgtataatagaagaggtgtatccaattatccgtttccattatttgatataaagtcattgtagatgtactctgacagaagggaaattcttgccaaatatgataactttgcccttaaacacagcagtcacaaatgaataaatgccaaccatttatacatttccacacttrcaactcaattttccaatggagctgttgatgaacctaatctaggttgcaaggcatgaaagatgcataattgtcaaagacttatatctttaattagacctattt

SEQ ID NO: 393985 - DNA, 596 bp, Homo sapiens
gttacctgactaattctgcgttgatctctctctctctctctggtggactctgacctcctgacctgggctatacccaagggtaggaagatgagatgccagacactttggtctttgatccagaatgttctccatatcattgtttttttttttctttaaacaatctttatccttttgcctccataaaagtaagccatttcccatcccagtgctgaagaaactggcaaaggtccctttcttatgtgcctccccagtgctacctccaaatgccaataccttttatttggaaaatactactatagagacttggtcataggacctgattcatttgtataatagaagaggtgtatccaattatccgtttccattatttgatataaagtcattgtagatgtactctgacagaagggaaattcttgccaaatatgataactttgcccttaaacacagcagtcacaaatgaataaatgccaaccatttatacatttccacacttacaactcaattttccartggagctgttgatgaacctaatctaggttgcaaggcatgaaagatgcataattgtcaaagacttatatctttaattagacctattt

SEQ ID NO: 393986 - DNA, 609 bp, Homo sapiens
ttccttctaatcgtcctccaaagcaaatgggaaagctgtttttatttataccatattgcagatgagaggattgaggttcaaaaagagcttataaagacctacctggagctactaagtgactaatttgaagctgggcttccaatagccaagtcatgtttctttatctacacctctgtgtttacactgaacccccagtgttttggaatgagaatctgstcaaatattgattcggatcttcttttaaatttctatgtgtgcaactcttttttagcagctagattgaatgatcgtctgccttggtgccttccccatgtgccctaccccacagtgcatatatgtatatttataataattaagtaataaaaacgttattttattttgaaattttttacagagtgcctacctacacttgagataataggatgtacctgaattgtcccacagcactttccaatgccagaatccatgtccccagtgtatctcatatattattttgcacatggtaacacctggatgctggctaaagccaacccagtaagaatcaggagaagactttgttgactatcaaaagttttgtggccttctggccctgcagtttcagccaaacct

SEQ ID NO: 393987 - DNA, 609 bp, Homo sapiens
ttccttctaatcgtcctccaaagcaaatgggaaagctgtttttatttataccatattgcagatgagaggattgaggttcaaaaagagcttataaagacctacctggagctactaagtgactaatttgaagctgggcttccaatagccaagtcatgtttctttatctacacctctgtgtttacactgaacccccagtgttttggaatgagaatctggtcaaatattgattcggatcttcttttaaatttctatgtgtgcaactcttttttagcagctagattgaatgatcgtctgccttggtgccttccccatgtgccctaccccacagtgcatatatgtatatttataataattaagtaataaaaacgttattttattttgaaattttttacagagtgcctacctacacttgagataataggatgtacctgaattgtcccacagcactttccaatgccagaatccatgtccccagtgtatctcatatatkattttgcacatggtaacacctggatgctggctaaagccaacccagtaagaatcaggagaagactttgttgactatcaaaagttttgtggccttctggccctgcagtttcagccaaacct

SEQ ID NO: 393988 - DNA, 600 bp, Homo sapiens
aagacaattttaggttaaattacaaggtgaggctgagaatatatatttcaagagattagtgtatttataaccaatacagagtcaacaayaacttccatctctgcaactaaaatacctagaaaatggaattagcaataattccagcacttcttcaactttaatattcatgtgaattacctgagggtcttgataaaatgcagactctgattcagcacatctgagatggggtctaagagtctacatttctaacaggctcccaggtgatgccaatactgtggtctggggaccactctttggaacatgcataatgggtatgggatccaagacacaggagtttacccatcttgagaaatcatttgattaagctcctatagaagatgtcaaatgatctagtactgtgaattttggcaaatcttatttagcttttctggacctcagtcccgacatccacaaaaaaggtgaggggggttttgaataagatactgtcgcttttatgagcaacaaaactgcctttttgatactaccaagggtagctgtatgcctgtttcccaggttgtatgtgtctgagcatttattcaacccttggaaagccaagacaga

SEQ ID NO: 393989 - DNA, 600 bp, Homo sapiens
aagacaattttaggttaaattacaaggtgaggctgagaatatatatttcaagagattagtgtatttataaccaatacagagtcaacaacaacttccatctctgcaactaaaatacctagaaaatggaattagcaataattccagcacttcttcaactttaatattcatgtgaattacctgagggtcttgataaaatgcagactctgattcagcacatctgagatggggtctaagagtctacatttctaacaggctcccaggtgatgccaatactgtggtctggggaccactctttggaacatgcataatgggtatgggatccaagacacaggagtttacccatcttgagaaatcatttgattaagctcctatagaagatgtcaaatgatctagtactgtgaattttggcaaatcttatttagcttttctggacctcagtcccgacatccacaaaaaaggtgaggggggttttgaataagatactgtcgcttttatgagcaacaaaactgcctttttgatactaccaagggtagctgtatkcctgtttcccaggttgtatgtgtctgagcatttattcaacccttggaaagccaagacaga

SEQ ID NO: 393990 - DNA, 581 bp, Homo sapiens
gggagggaggaagggagggaggaagggaggaaggaaagaggcaaggaaagaagaaaggtrtgagcaaggatatggagcaactggaactcatattttgctggttggagtatgaagtggtacaacaacattggaaatttgtttgcagaatctagtaaatctggatgtgcatctggtcataccctatgactcataaattttacgtatatatacacaacagggaaaccaaaagacctgtaaaagaatgttcatagcagaattattttaattagataaaaactagaaactgcctacatgcccatcaagaggataaaataataaacatgttgtggttgttgaaggctgaaaaatggtctcccgaatatgttcatgtcctaattcccagaacctgtgaataccttacgtggtaaaagagactttgcagattgtaattaaggatttcgagatggggcaactattctggattttgtgggggtgggcctgatgtaatcaaaatggcctttataaaagggagataaggtggtcagagattagagagctgtgaggatggaagcagaggttagagagtagaggtcctgcaacct

SEQ ID NO: 393991 - DNA, 642 bp, Homo sapiens
atgtttctgcatattggtgagaggaacatttcttcatattcttatcagctttccatagttgagtacaggattttcttaagatctggtgcctggagttaccaccaacacaagcatagaactttacacaaaggagaaatgtctccccccaagagagtggagacggtatggatacacggttttgttctcccaactatgttaatgctctgaactgagcaagtacatcaattttctacagatatgactgctctagggcttggagatttgcttgtgcaataaaatttcatggaaccaaaaccggtattgtgataaatgtgtcttttattaccttttgggactatttttaaagtgaaatgaatgagaattgaggttgaatggattcaagtttggcagacctaatggagccacatccagtccaggggaggcaactcaggctacgatgctcagaaagaaaaaagaaaatccttattctacccaagcaaagcagggttaaaattggataaagatgctttggcatcttatttagaatgcaattttaattctagtttattttaatgtgatttataagggcaaggggttttagatcagaactttacttttgtcttaraagtttgatgataggagaggtttatgttcaaatttgtg

SEQ ID NO: 393992 - DNA, 584 bp, Homo sapiens
cacttatgtttcatatacattttatacatataccccaaaggtaattttatataatattttaaagaattttgtgcatgaaacaatgtttgcgcacactgaaccatcagaaagcaaaggtgtcactatcttggccacccatgtggaccaaaatacgacaataygtggtatcacattggcaatcaaaaaggttcagatttgggggtgttttggatttttggattagggatgtttggatgctcaacctgtatgtagtttattgtacagtaaatattaggttcaattttagaacaggtaaggtaaaagaactgcatggtttgtataaatttgtgctaaaagttacactttcaaatattgtatccccaagattcttatgtttgcataagaagagtctgtattttctattacaagttgtttcatgccaaatcttattttgatttttcacatagataatacaatctaactctactgatcttacactataaagataggtcactttgagatcaaaatttcagaatctcttatatcagttggtgataaggctgagattccaagatctaaaattagtctagtaccttaatttgtag

SEQ ID NO: 393993 - DNA, 526 bp, Homo sapiens
gacatctaaacttatcatgttcaaattagaacttttaatttgcaagaccactcccctcctccctaaacaacaacaacaacaacaacaacaacaacaaaactctgctctattaccatattgtcagtatccttcaactcactaaaccacttaaccaactgcttargacaaaactttgaaatcaagggccgcgcacggtggctcacacctgtaattccagcagtttggaaggccgaggcgggcggatcacgaggtcaggagattgagaccatcctggctaacatggtgaaaccccgtctctactaaaaatacaaaaaaattagccgggcatgatggtgtgcgcctgtagtcccagctgctagggaggctgaggcaggagaatggcgtgaacccaggaggcagagcttgcaatgagctgagatcgagccactgcaccccagcctgggcaacagagcgagactccgtctcaaaaaacaacaacaacaaaactttgaaatcacgtttgatatctctctcccatgccccatag

SEQ ID NO: 393994 - DNA, 595 bp, Homo sapiens
ccaaacactcaatagtctacttcaatattatgtataacagacaaatagataaataatataatatacagcccaaagtccttttaaagtgtgataacatataaattaacaataaaaccaatcactactttccttgcttgtgaagagatttccagttgcaaatagctaacaacaaagtaaagctgatagataatakagaatggaaaatcagcaaataaagcataatgcaattattgacagtggaacaaatgtggtgaaggctatgattgatttaggaatcacaagtacacaatgttttgttcacaaccttccattgtatcttcagaaataataaaaaattttgatagctgggatttattgacaacagcagaaaaactgtcaatcatttcttcttctttaccaaaaataaaagtatatggcatacaagacatttagcaactcttttgttatatattaataacgtatgttcaaacaagattaagagaagcctttaaatggcaaaaaaaaaaaaagggctcataaatcaagggaagcattgaaatgatattttgcaagtaagggtaccagcataggagatattactaacaatcactggtta

SEQ ID NO: 393995 - DNA, 595 bp, Homo sapiens
ccaaacactcaatagtctacttcaatattatgtataacagacaaatagataaataatataatatacagcccaaagtccttttaaagtgtgataacatataaattaacaataaaaccaatcactactttccttgcttgtgaagagatttccagttgcaaatagctaacaacaaagtaaagctgatagataatagagaatggaaaatcagcaaataaagcatamtgcaattattgacagtggaacaaatgtggtgaaggctatgattgatttaggaatcacaagtacacaatgttttgttcacaaccttccattgtatcttcagaaataataaaaaattttgatagctgggatttattgacaacagcagaaaaactgtcaatcatttcttcttctttaccaaaaataaaagtatatggcatacaagacatttagcaactcttttgttatatattaataacgtatgttcaaacaagattaagagaagcctttaaatggcaaaaaaaaaaaaagggctcataaatcaagggaagcattgaaatgatattttgcaagtaagggtaccagcataggagatattactaacaatcactggtta

SEQ ID NO: 393996 - DNA, 595 bp, Homo sapiens
ccaaacactcaatagtctacttcaatattatgtataacagacaaatagataaataatataatatacagcccaaagtccttttaaagtgtgataacatataaattaacaataaaaccaatcactactttccttgcttgtgaagagatttccagttgcaaatagctaacaacaaagtaaagctgatagataatagagaatggaaaatcagcaaataaagcataatgcaattattgacagtggaacaaatgtggtgaaggctatgawtgatttaggaatcacaagtacacaatgttttgttcacaaccttccattgtatcttcagaaataataaaaaattttgatagctgggatttattgacaacagcagaaaaactgtcaatcatttcttcttctttaccaaaaataaaagtatatggcatacaagacatttagcaactcttttgttatatattaataacgtatgttcaaacaagattaagagaagcctttaaatggcaaaaaaaaaaaaagggctcataaatcaagggaagcattgaaatgatattttgcaagtaagggtaccagcataggagatattactaacaatcactggtta

SEQ ID NO: 393997 - DNA, 527 bp, Homo sapiens
actgcaaatcctttgacactttgcctcttgagacttgaggtctgtgctcctgtcttccaatacagagaaagtgatactatgccagtttccaagtctaggctataaaaaattggttgcttatatttcctgcctttcgagacttttaatcttagaagccagttaccatgctgtggagcccaaactgtctttggagaggcccatgtggagatgaacagagacccccagctctcagccggcaccaacttgctaaccatgagtgagctgtgtgaaggagacaagctttctctaccaagccctagtaaatttcacacttttaagctaaaaataaatgatttttaaaaaacattattttaagccagtaagttttggtgagatttgttctgcagcaagacaaccgataatgattttgatacaccagaggcagggtgctgccttaacaaaatcctcaatcatakggcattggacttgagactaggtgatgggctgaagctggagggatctttaggagaatgtaagtgaaaacttaa

SEQ ID NO: 393998 - DNA, 527 bp, Homo sapiens
actgcaaatcctttgacactttgcctcttgagacttgaggtctgtgctcctgtcttccaatacagagaaagtgatactatgccagtttccaagtctaggctataaaaaattggttgcttatatttcctgcctttcgagacttttaatcttagaagccagttaccatgctgtggagcccaaactgtctttggagaggcccatgtggagatgaacagagacccccagctctcagccggcaccaacttgctaaccatgagtgagctgtgtgaaggagacaagctttctctaccaagccctagtaaatttcacacttttaagctaaaaataaatgatttttaaaaaacattattttaagccagtaagttttggtgagatttgttctgcagcaagacaaccgataatgattttgatacaccagaggcagggtgctgccttaacaaaatcctcaatcatatggcwttggacttgagactaggtgatgggctgaagctggagggatctttaggagaatgtaagtgaaaacttaa

SEQ ID NO: 393999 - DNA, 548 bp, Homo sapiens
ttactatctacaatgtgcagatactattaacataaggtccttgctattatggagcttacattttatagcgagatagataatatttacctatataaaaaatatttcatagtgttaaatatgtagagaattaaaacataataggtgacataatagaaatgataatgatagtgatacatgagatgaataaaataaatatagtatttaaagaaatttaaaaaccaataaaggagatacaaagctgaagttccttgtggtgctttatgaataaattatatatcatgttattggagtttagagggaaaaaacaattcaatcaaggaagtctttaaaaaagaggtagctattaagctatgccttgaaagttgtcttagatttgcacaaaggtaaaaagagtygcaggaaatttttttaagctaatatttattgggtgcttactatgtgttagtaactatggtgagtgcttgatacacaccacctcatatagtcctcaaaataatcctcagaagtgtactattaggtaagtgcaaaagtaactgcagtttttacat

SEQ ID NO: 394000 - DNA, 548 bp, Homo sapiens
ttactatctacaatgtgcagatactattaacataaggtccttgctattatggagcttacattttatagcgagatagataatatttacctatataaaaaatatttcatagtgttaaatatgtagagaattaaaacataataggtgacataatagaaatgataatgatagtgatacatgagatgaataaaataaatatagtatttaaagaaatttaaaaaccaataaaggagatacaaagctgaagttccttgtggtgctttatgaataaattatatatcatgttattggagtttagagggaaaaaacaattcaatcaaggaagtctttaaaaaagaggtagctattaagctatgccttgaaagttgtcttagatttgcacaaaggtaaaaagagtcgcaggaaatttttttaagctaatatttattgggtgcttactatgtgttagtaactatggtgagtgcttgatacacaccacctcatatrgtcctcaaaataatcctcagaagtgtactattaggtaagtgcaaaagtaactgcagtttttacat

SEQ ID NO: 394001 - DNA, 604 bp, Homo sapiens
atgttcaaaaatcacagagctggcaaatggcagatccaggatgtaaacccccaggtaacttggytctagagtccatatcagcaccaatactgtctttaatagatctaatatttctataatgatttatacatattaaaccatttgagattcaatgtaagataattaggtattgggaattaaatttataatcatggagacattaaggcttacagtaagtttaatcttaaagttttttagttttttttttttttttttaaactaaatgatagagaagttgaatccaggtctaaccctaaatgtaacctcttttcaccatcccatgcatttcatgaaagatgtcacaaaagcagaaccggctgtaaccagggtgttcatttgttaactcactctctctcaaatctcaattaagtgattatgcagcaagtatgagtaaatagctgctatttgccaatcatttgttaactgctgaagataggaagtcataacacaattcttgtctacaaaagcttatgatagaaagggaaatcaacaataaaagagatggctatggacaataaattgagctccctaatagcgataagcactgtgattgtgaacacgaagg

SEQ ID NO: 394002 - DNA, 562 bp, Homo sapiens
gctccacaaccaccacagctgggaatgtgctgagtctcacctgaagccagtaagcctcagaacctcacccaaggccctcaatgtagtacacgtgggtattgctgctggttatgcagggcacaagggatcttcagttagcaggtgatgaatcttgccaggattgggtmcttcccttcaaggcagcaggttgctttctgatgcagtgagtgtctacgaatgttgcccgggagctagggcctagaaaaagggctcacaactttgactggttccctatcctgttgtggctgagcttgtatccaagatgcaagacaaaatcctccccactttttaccctcctctcctcaaacagaaggaaagagtctgttttggagatgtgagctgtgtatcctgaggttaggagaggggtgatgccagcattcccttagctgccccagcaggtgcctcagtaggtcacgtgtcccttccagttcactgtctctgggcctagttcagcagcattactcacataggaattgaaatccttgtggcctggactgcttttcaagattatttagagccccag

SEQ ID NO: 394003 - DNA, 562 bp, Homo sapiens
gctccacaaccaccacagctgggaatgtgctgagtctcacctgaagccagtaagcctcagaacctcacccaaggccctcaatgtagtacacgtgggtattgctgctggttatgcagggcacaagggatcttcagttagcaggtgatgaatcttgccaggattgggtccttcccttcaaggcagcaggttgctttctgatgcagtgagtgtctacgaatgttgcccgggagctagggcctagaaaaagggctcacaactttgactggttccctatcctgttgtggctgagctkgtatccaagatgcaagacaaaatcctccccactttttaccctcctctcctcaaacagaaggaaagagtctgttttggagatgtgagctgtgtatcctgaggttaggagaggggtgatgccagcattcccttagctgccccagcaggtgcctcagtaggtcacgtgtcccttccagttcactgtctctgggcctagttcagcagcattactcacataggaattgaaatccttgtggcctggactgcttttcaagattatttagagccccag

SEQ ID NO: 394004 - DNA, 523 bp, Homo sapiens
aatgagtagttaaaagagagtgcttacatatgccagacactattataaaagctttacatatattaatgcatttaatcctcatgaatactatcattgctggtgatgatagtaagtaatgatagtaagtactatcattatatccattttacagaaaagtcgagtaactttcctaagctatacaattagaaagttctagaactgaaatttgaaccccaccggtctggctctggaagtcccatttttatctctgttatataartgaagagaattcaaaatatttaactgcattattaattaattagcattcaaaatcataattttattttaggggaaattatgatttcccctaaaatagtaatttctcctaaaatgaaacctttgagcaacatattctataatttgtccttctggccacatacttcaatgttcctatgatattgtactctacccagattctacactgttacctttgtatgtaggaatcaggtaattagggggtgtgttgtggcagaaatccaacatc

SEQ ID NO: 394005 - DNA, 459 bp, Homo sapiens
gtcaagtaagtaattttaataaaaatttaaaatactgtgttcatgaaaaacccatatatcaaaatttatagaatagtgartgggcagttaatgagattctggaggaaaattatagtagcaaatcttatgttaaaaagcagcaatgctaaaaattgagtaaaacttataaattacacagttaagaatatagatgaaagttatatataacaataagaggaaacaaaatttaaatagaaaacagatacaaaagagatcagagtttttaaaaagccaaaagttggttcactggaaagactaataaaattaagagatttcttaccagattaaatggtagatagctaatggtaaaattaaaaatggaaaaattttattttaaaattctacttttaaaggaaattacagatacagaaaatactaaaagatgccatgagattattttaaactttataccatacaaag

SEQ ID NO: 394006 - DNA, 459 bp, Homo sapiens
gtcaagtaagtaattttaataaaaatttaaaatactgtgttcatgaaaaacccatatatcaaaatttatagaatagtgaatgggcagttaatgagattctggaggaaaattatagtagcaaatcttatgttaaaaagcagcaatgctaaaaattgagtaaaacttataaattacacagttaagaatatagatgaaagttatatataacaataagaggaaacaaaatttaaatagaaaacagatacaaaagagatcagagtttttaaaaagccaaaagttggttcactgraaagactaataaaattaagagatttcttaccagattaaatggtagatagctaatggtaaaattaaaaatggaaaaattttattttaaaattctacttttaaaggaaattacagatacagaaaatactaaaagatgccatgagattattttaaactttataccatacaaag

SEQ ID NO: 394007 - DNA, 459 bp, Homo sapiens
gtcaagtaagtaattttaataaaaatttaaaatactgtgttcatgaaaaacccatatatcaaaatttatagaatagtgaatgggcagttaatgagattctggaggaaaattatagtagcaaatcttatgttaaaaagcagcaatgctaaaaattgagtaaaacttataaattacacagttaagaatatagatgaaagttatatataacaataagaggaaacaaaatttaaatagaaaacagatacaaaagagatcagagtttttaaaaagccaaaagttggttcactggaaagactaataaaattaagagatttcttaccagattaaatggtagatagctaatggtaaaattaaaaatggaaaaattttattttaaaattctacttttaaaggaaattacagatacagaaaatactaaaagatgccatragattattttaaactttataccatacaaag

SEQ ID NO: 394008 - DNA, 613 bp, Homo sapiens
tctattttaatgatttgggggcctcaaaaatatacttaggcaatattctcatcaccccttaatagtttcatgctccctgtgcatgcttggccatgtacaatgatgatgttcaactgtgtcaccaaacacatcaagatgtatcaaaccatataaaatttccctgcatacataagaatscatatccccccaaaactacataccaacatgttaaaatgagacaggagaatatgcagtgggttatctttctaatgttaacatatgcaggataaagggggaggcgggaaaacttttctttgtatttctcatgtctctaaaatatatttatgccagtcacacacaagaccaaattgtaatttatgttggtgatttgtgagatgagatttcactcaagatcaaaagtgaaatgtacaggcacccctaccatgttaagaactcacatcatcatttttcaaggtaatatgacattaaaagcctggaaataaatctcagaggatctgctagttagtgcaattttaacataagcaaattgagaatgaacctgtcaccgaagtatatttattataaattcatactcacacagtgaatctatcagttttcaaatactgagctatat

SEQ ID NO: 394009 - DNA, 613 bp, Homo sapiens
tctattttaatgatttgggggcctcaaaaatatacttaggcaatattctcatcaccccttaatagtttcatgctccctgtgcatgcttggccatgtacaatgatgatgttcaactgtgtcaccaaacacatcaagatgtatcaaaccatataaaatttccctgcatacataagaatgcatatccccccaaaactacataccaacatgttaaaatgagacaggagaatatgcagtggkttatctttctaatgttaacatatgcaggataaagggggaggcgggaaaacttttctttgtatttctcatgtctctaaaatatatttatgccagtcacacacaagaccaaattgtaatttatgttggtgatttgtgagatgagatttcactcaagatcaaaagtgaaatgtacaggcacccctaccatgttaagaactcacatcatcatttttcaaggtaatatgacattaaaagcctggaaataaatctcagaggatctgctagttagtgcaattttaacataagcaaattgagaatgaacctgtcaccgaagtatatttattataaattcatactcacacagtgaatctatcagttttcaaatactgagctatat

SEQ ID NO: 394010 - DNA, 591 bp, Homo sapiens
acccaacattccccacctcatacatgggtaactactttcctgcactacgtgaactgttgtttttaatatttgacacagattttttttttggaggatataaactaatacttttttcagcttgcctaaaaacttggtaattttccaaaatgcttttgaatatttatttgacttttataataccactatgaggctattagtgttagtgccttttcacaaaagagaaaagcaaaacagaatttgaatgatgtatcattgtgtttcacgtttgtgatagaattaattaatagcattgtaagacatagatatataaataggtatcttacaccattatgttttgaataaaaggcagatgctctaaaatgatattgaatctgagtaaaaatctgttaaatcttgattacagaattttctgacatgaaggaacttccacatgtrtagaattaaatgccaaaaaagagaaaaaggtctaactcttgggaacaattggtattgagagtaatagccatgcgacctagagcaagtttcctaatctttaagcctgagtttcctgatctttaaattaggaatgatagtagacactatctcagttta

SEQ ID NO: 394011 - DNA, 566 bp, Homo sapiens
taactgccagttactagtcagcatatcactgtatagttctagatagacagaagactctagccagtctagacaagatttcatagctattttgaaataagcaaagtgtataactctacaaagagtaaatatttttaaatttataggatgacttatgacaatcactgtttagctttctaattgagttagatgaaagacactgaatgtttcccacgataatacatgcacacatatatgcaaacatacactcatgtacatgtacatatacatttatacgtatatattgtgattgaataccttgaggaagtttacaaatgctaagctaaaggattggaagaatttcaaagaacagcatgactttccaaaatgtgacatatttacaggccccggacttcctggagtccaactgtctccttggaaatacttcagggtcagctgcyaaggataagaacggatgaggggaagtcagaggccaagtctcccatgcctacttcagcaaacacggtttagatgcacgtgcagtacttgccttaaaataacttctcttcatgaaaacaaaacagtttcca

SEQ ID NO: 394012 - DNA, 613 bp, Homo sapiens
atgaatttgttaaaattctttcaaagtatgaaaaatgtgttttacaaagcatgtttaaattctgtcacaggtggtattcttagaaatcgtttaagctgtttgatgaaatgcaaatgagactagtctgactttcactaagatcagatcagtaaaacactttctgacatttactttctaatgagttttaacaaaaactgagaattcagtactaccccatttatttcaaaataaaagttaaatttttgttaaatttttgttacatttgaatgtgacaagttatgtatgatgccatacgatttaatgtgctttaggaaagagttcagtacttgacattttctttactatgtgtgacacgattggagtaggaaatttcctagagagaataatgacttttatttcyttgataacttatgatgatctgctaaaacttttttaaatacacaatatttataatttgctttttaaagaaaacaatattgtaaaatagttatcttctacatgttagaacatagactttaaaacataatttaaaatatacagcaaaaattacaaaggtgcaaatgccaaattgctttatcttactgaataatcactaagagaatgtaccatttta

SEQ ID NO: 394013 - DNA, 613 bp, Homo sapiens
atgaatttgttaaaattctttcaaagtatgaaaaatgtgttttacaaagcatgtttaaattctgtcacaggtggtattcttagaaatcgtttaagctgtttgatgaaatgcaaatgagactagtctgactttcactaagatcagatcagtaaaacactttctgacatttactttctaatgagttttaacaaaaactgagaattcagtactaccccatttatttcaaaataaaagttaaatttttgttaaatttttgttacatttgaatgtgacaagttatgtatgatgccatacgatttaatgtgctttaggaaagagttcagtacttgacattttctttactatgtgtgacacgattggagtaggaaatttcctagagagaataatgacttttatttctttgataacttatgatgatctgctaaaactttttwaaatacacaatatttataatttgctttttaaagaaaacaatattgtaaaatagttatcttctacatgttagaacatagactttaaaacataatttaaaatatacagcaaaaattacaaaggtgcaaatgccaaattgctttatcttactgaataatcactaagagaatgtaccatttta

SEQ ID NO: 394014 - DNA, 613 bp, Homo sapiens
atgaatttgttaaaattctttcaaagtatgaaaaatgtgttttacaaagcatgtttaaattctgtcacaggtggtattcttagaaatcgtttaagctgtttgatgaaatgcaaatgagactagtctgactttcactaagatcagatcagtaaaacactttctgacatttactttctaatgagttttaacaaaaactgagaattcagtactaccccatttatttcaaaataaaagttaaatttttgttaaatttttgttacatttgaatgtgacaagttatgtatgatgccatacgatttaatgtgctttaggaaagagttcagtacttgacattttctttactatgtgtgacacgattggagtaggaaatttcctagagagaataatgacttttatttctttgataacttatgatgatctgctaaaacttttttaaatacacaatatttataatttgctttttaaagaaaacaatattgtaaaatagttatcttctacatgttagaacatagactttaaaacataatttaaaatatacrgcaaaaattacaaaggtgcaaatgccaaattgctttatcttactgaataatcactaagagaatgtaccatttta

SEQ ID NO: 394015 - DNA, 622 bp, Homo sapiens
ggagaatgactgcatggatccagagtattttgggggattgataaaaatattctggaattagtggttatgcttgtacaaccttgtgaatatattaaaacccactaaatcatacactctagagaggtgactttgatggtatattaattatatatcagtaaaaacattttttaaatcacaatgagmtagccctgcacactagcttgattggtttatagcttaaattaaaaagccaaatggtaccaagtgttgatatggatcaggaacaacttgaattttcagatattgctgatagtttagctttttcttataaggttaaacatatacttaacatatttgcccactatatcactcgtgaatattgacccaagagaaacgaaagcatatgccatacaaatacttatttgtgaatgttcaaagcaacttaattttaagagtcaaaaactagaaacagctcaacattcaagaggtgaaatgataaatttttgttatatccataaaattggagtgctactcagaaattcaaacaatgactatttgatttatgcaactacatggatacacccagtgttctgctggcaaatgtttaaaaactggctctccaaaaaaaaaaaaaaagaggagg

SEQ ID NO: 394016 - DNA, 622 bp, Homo sapiens
ggagaatgactgcatggatccagagtattttgggggattgataaaaatattctggaattagtggttatgcttgtacaaccttgtgaatatattaaaacccactaaatcatacactctagagaggtgactttgatggtatattaattatatatcagtaaaaacattttttaaatcacaatgagatagccctgcacactagcttgattggtttatagcttaaattaaaaagccaaatggtaccaagtgttgatatggatcaggaacaacttgaattttcagatattgctgatagtttagctttttcttataaggttaaacatatacttaacatatttgcccactatatcactcgtgaatattgacccaagagaaacgaaagcatatgccatacaaatacttatttgtgaatgttcaaagcaacttaattttaagagtcaaaaactagaaacagctcaacattcaagaggtgaaatgataaatttttgttatatccataaaattggartgctactcagaaattcaaacaatgactatttgatttatgcaactacatggatacacccagtgttctgctggcaaatgtttaaaaactggctctccaaaaaaaaaaaaaaagaggagg

SEQ ID NO: 394017 - DNA, 536 bp, Homo sapiens
tattccataacctagctctttcctagtcatctaattcaatttccccacgcttccctgcctggcccgtctagtactatcaaggacatctcttcattccttgtactaggggtggacatccccaacactatctctacttgtgctgatggaattaaaatcatgatatcctktctttgcctatacttagcaaaatcctatttgactttcaaggaatatctcttcagaatcatctttaactacccaaaaccctactcatctttcttaaataagcactagaataaaatctaggtttgcatgtaaagcccatccagtgacttgtcctgtcttaagattatttttctcctgagtccatttgagataaacgaaacatttgcttcagtttattctctagcttccttagcacctaggaagttaggcagttccctctgacaccccactatgtctcttctcccaatacagatcaacagaataagagcaaaaaaagaaactcatggtataaatatgtcttctaagcttccctgtcaatcttcattaaaaat

SEQ ID NO: 394018 - DNA, 536 bp, Homo sapiens
tattccataacctagctctttcctagtcatctaattcaatttccccacgcttccctgcctggcccgtctagtactatcaaggacatctcttcattccttgtactaggggtggacatccccaacactatctctacttgtgctgatggaattaaaatcatgatatcctgtctttgcctatacttagcaaaatcctatttgactttcaaggaatatctcttcagaatcatctttaactacccaaraccctactcatctttcttaaataagcactagaataaaatctaggtttgcatgtaaagcccatccagtgacttgtcctgtcttaagattatttttctcctgagtccatttgagataaacgaaacatttgcttcagtttattctctagcttccttagcacctaggaagttaggcagttccctctgacaccccactatgtctcttctcccaatacagatcaacagaataagagcaaaaaaagaaactcatggtataaatatgtcttctaagcttccctgtcaatcttcattaaaaat

SEQ ID NO: 394019 - DNA, 543 bp, Homo sapiens
caagttgtatacttataactcttaaaggagttagactaccaaaatgcactttaaaaaattatttatttatttatttatttatttattgagatggaggcttgctctgtagcccaggctggagtgcagtgacacgatctcagctcacagcaacccttcgccttgtgggtcaagcaattgtcccacctcagcctcctgagtagctgggattacaggtgcctgccaccacacccagayaatttttgtatttttagtagtgacagggtttcaccatgttgtccaggctggtctcaaactcccgacctcaggtgatctgcccaccttggcctcccaaagtgctggaattataggcatgagccaccacgcccagctgcactttacaaattaataggtcagctatcaaactatcaataaatataaacattaaaacaggttatatgtagcctgattatcatgcatatctattattttgtaccagcatcccctccttcacttctggtaataaccactcccccatccatggctgcttttggagaaatgtaattc

SEQ ID NO: 394020 - DNA, 513 bp, Homo sapiens
ccgacaaaagtttcgttgaccctgcagccatgagcagagctctcaaagttaagtcgcccaagcgcaactcgaccatctatcctgtatatcctgacccttgcctcatgggtcctaacgcctgtcagacaaacttcctcccacctctcttctccaaggctagtctcgcttctaaaaaccactccctgtctctggtgcttttctagtttctcctataagaatgatttctagtataaatttcagractctgttcctttaggcacccaggcccaccaatcagaaagacataatttttgcccaaagccccatcgggggtggggagactatctggaattttaggatcccccctcaggcaagcaggcctaacaaaagctattcctgaagctaggatgtggggagcctcagaaattatatccttcctattcatatgacgagaagtgaggacaaaaggcgtcactcttccaaaaccacctctggacacaatgccactgcattcctgtctgggcaacagaacaa

SEQ ID NO: 394021 - DNA, 596 bp, Homo sapiens
cgtggaaagcaactttgaaactgggtaatgggcagaggttggaacagtttggaggactcagaagacaggaaggtgtgggaaagtttggaccttcttacagacttgttgaatggctttgaccaaaatgctgatagtgatatgggcaatgaagtccaggctgaggtggtctcagatggagatgaaaaacttgttgggaactgaagtaaaggtcactctgsctatgctttagtagagagctttttgaccctgccctagagaactgtggaactttgaacttgagagagatgatttagggtatctggcaggagaaatttctaaacagcaaagcattcaagaggaagcagagcataaaagtttggaacatttgcagtctgacgatgcagtagaaaacaaaaacccattttctgggagaaattcaaaccagctatagaaatttgtataatgaagagccaaacactaattgccaagacaatggggaaaatatctcgagggcatgtcagagagaccttcatggcagcccctcccttcacaggccaggggcctaggagagaaaaatggtttcttgggccaggtctaaggcccccttgctgtgtgca

SEQ ID NO: 394022 - DNA, 646 bp, Homo sapiens
attgtttttaatattaagaattgtacatctctatccccattttaccctactctctcccaaatcccttcctttcacacwgacaacagagtatatttatgagccttatttgttaatgtcatgctagaagtcactttgctctttcattttcttgtgataatttatcatatatattttaagttctctgctttaagttctaacattgtgggactggctgccttactttgctctgattaagaaaagagcccttaccatttttttaaagagaaatcaatacacttactcaaaatgagctaattagggtaagcctttgggatactgcaaatggagagtagattttcaggccactgtgatggctaggactgcttagatacttcaggtttttaatttcaggaggttaaaatcaaatatagtttagagattgcttataatgcttaaatttggatctcattgaaataaaaataatcagtggtgtctggctcaagagagtaacctctaattccaaggcaattccaaaatattatttaaaagtgtttctctttgtgcaataaacatttctgaggatttttacatctgaaaatatctttatttcatcttcacatttctctagtagactgatagtgtagctgcagatcaatttttagctttc

SEQ ID NO: 394023 - DNA, 357 bp, Homo sapiens
ctatattttttggtaaaatatatatttaagtatrtaacttttaacattactttgtgttaatggttaactcattattgtgtaaactgttcaaatacacattttaacatcttatttttgtgtaatttttcctggtattctgaaaaattcagtacgtttgaaaacaataatttgaaaagcaaattactgaaaagtataacacccaaagaatctaatcttctttagtattctacatgtatgcctctgaaaggtcagttcttgttttaaaatttttattacgtaccagctaccacccagcaatttttaatacctggttgatggtgataactattgagaattactgacattctaaccaattta

SEQ ID NO: 394024 - DNA, 633 bp, Homo sapiens
ccaggtgaaagatttccctttgaatttagttcttagtaaaactttatctatgcctctcctcctaaactgatatgtttcattccttttgataataaaaattatgtcatttacttayagcgtttcagtcagcaaagtagaacaaatactaggtatttcaatggataatttaatatagagaattggtaacacatgttggagagctcaaagagcaaaaagggaacagtggaataactgagatatttgcaggaagcagctacctcccctagagctagaggaacacagggaatcaaagagtctgagctaatctgaatgtagaattggagaaagacccctcggagccagacttagacctctgaggaaggagtgctgctcttcagaagtactgatgtgtttgagggggggattctttggctgaggctgagggtgccaaattaagctggatactggagccaactgctgttgttggaaggatactgaaaagaatctcaaatgaacaggaagaaggaagttccttttcctctattcctgcttcacgttcttgtatagaaattccactggcagaacctaataggacatcatctgtaaagaagaacttcagtttgcagagttagccccagcttcacaaacatacat

SEQ ID NO: 394025 - DNA, 430 bp, Homo sapiens
ctgaaggctatattactgagcaccattttaactataacccacagcttgataggcatgttttcattattgttcacttttaaatattttctaaatttcattgtaacttcatcttctatgctccatttttttactcattctttackgtcttgattacattttaggtatagatgtctattatgtatgactacattatgactagagaatatagtcttatgacagtaatcttttgaaatttgttgggatttgctttatggcccactatgcaataacattttgttatgtttgaaaagaatgaatattctgctattgttgactgctgtcctcccattttatcctttagtgtaaaatgttttaattcaaagcttatactactacacatacacaaaatggtattttgttcatttgttttatttatacaggttcagaatgt

SEQ ID NO: 394026 - DNA, 430 bp, Homo sapiens
ctgaaggctatattactgagcaccattttaactataacccacagcttgataggcatgttttcattattgttcacttttaaatattttctaaatttcattgtaacttcatcttctatgctccatttttttactcattctttacggtcttgattacmttttaggtatagatgtctattatgtatgactacattatgactagagaatatagtcttatgacagtaatcttttgaaatttgttgggatttgctttatggcccactatgcaataacattttgttatgtttgaaaagaatgaatattctgctattgttgactgctgtcctcccattttatcctttagtgtaaaatgttttaattcaaagcttatactactacacatacacaaaatggtattttgttcatttgttttatttatacaggttcagaatgt

SEQ ID NO: 394027 - DNA, 430 bp, Homo sapiens
ctgaaggctatattactgagcaccattttaactataacccacagcttgataggcatgttttcattattgttcacttttaaatattttctaaatttcattgtaacttcatcttctatgctccatttttttactcattctttacggtcttgattacattttaggtatagatgtctattatgtatgactacattatgactagagaatatrgtcttatgacagtaatcttttgaaatttgttgggatttgctttatggcccactatgcaataacattttgttatgtttgaaaagaatgaatattctgctattgttgactgctgtcctcccattttatcctttagtgtaaaatgttttaattcaaagcttatactactacacatacacaaaatggtattttgttcatttgttttatttatacaggttcagaatgt

SEQ ID NO: 394028 - DNA, 442 bp, Homo sapiens
cctaacttcaaaggacatatttcaggcttcatcatccttgactttccagcrgaaatattaagttccctttgcttccgtgatttaagtcctttctttctctggccacttctgtgtgtcctttccaggcatatattcttctatcctgccattaaatattgctgtccttcaagactcactccattctaaaggcaatgacaacaacaactaagactcattcttggctatccattcttcatagaccaaaccagggtgaattttttaaaatagctcaccatgtcatcatgtcagtcctctacttaaaactcttcaatgactttattttgttgcactgaggataaagaccataatctttaaggcagtgtatataatctggcccctgcttgccatgtatacctagagacagaagtttgaaaaagagaaaaaaaatttaaagatgtgccag

SEQ ID NO: 394029 - DNA, 619 bp, Homo sapiens
accctaactttctgtaagctgctagtgcattaattttcactgctggtactttcgtccaaccttatcctttatgcaaaatagactaacaaatattaaatcctgtggttacagtgatgggtttatagaagagaaagaaatagtccacatgaagagcaaattgtctttcaattttaagagaggatggatgaaataccaagcagttaatgctgctttagttctaggaaggcctggccttcataagacgttgtagggaaaaagaactcttagaaatatatctaaagtgtctcttgaatacgtttgtggcgagaaagagtaagtggcgcttmgtaaatatctgtcagggggaggtttatgtgagccctctcatctgtaaacgtttcaagtggcccttttaagtctttgtacaaaaccatatgagctgtagaaatcctgttctattggaagtgtgagtaaaaaagaaagtgtgcaagggagaaattgggtgtctgcgatttcagagctgtcttctgaaacctgcaattttctgcagttggtttcccccaacccccaaagagcccctgccatataaaagaaaatattattaaacgagctgtgaaaaggatattctgctaaattccca

SEQ ID NO: 394030 - DNA, 631 bp, Homo sapiens
gctattttgttggtctaccaagttatttattcatattttaaaaataattatggctgtcattattaccacatagttcataaagtattattatttctgtgttcacaattaaggcaatattagtttctaacaaaactcttacataatttttaccttgtagtttaaatttttaatgaatatgacctcatgtggccctattttcatttacttctcattgccagcttctattactactagagaaagagctcctgaacctgctaacgatactaaatatttaattatgtccttttctggtgtattttatgtcagaattgtagttcgcctaatcaagatggtaatctatggaaataaggatgtcaagtctcatwtgcattaaattaaacatatttgggcttcagaagatggctggtcattttgtagtggaaaagagaaaatgaaaatataccccagtctaaatctcttaaatcttcttgcaattgctaattatgaaacacacagaatattcttataaaggccctgaaaatggcatcctattcctttcctttcttcatcctttcaaaaatatctaagcttattaaatattagcaaggttagtagaaatatgatatgtaaatttagaaatatgactaattga

SEQ ID NO: 394031 - DNA, 528 bp, Homo sapiens
gtgacaagcaattagtgatactactctctgaatgctttttgttttagaagtgtaaatttacataaaaaataaagcaaaaaaaacccaaaaaacaaaaaacaaatgtttgcttataaagcgtgtagtattttttgcatgatattaattttacaaccacccagtgggagaagaggaaagagagttcaycttaagcgttttcagagggttttgtaatgttgttataaatttctctaaacaaagttaatattaattctttctaatatataataaattttgactagaatttgtagaactctaaatcctttagtcctaaattatatactatggacttaatgaagttgttttatagcaatgttctatagagatgatctctaaatttattacttgctgagaacagtgatatgagtgactacatttatctttatgagaaggaaagaaaaaaggagaaaagacattttgagaagaaatgaaagaggacaggcattgtgacccatagaagttaacctcctcctcattgaatattgggga

SEQ ID NO: 394032 - DNA, 528 bp, Homo sapiens
gtgacaagcaattagtgatactactctctgaatgctttttgttttagaagtgtaaatttacataaaaaataaagcaaaaaaaacccaaaaaacaaaaaacaaatgtttgcttataaagcgtgtagtattttttgcatgatattaattttacaaccacccagtgggagaagaggaaagagagttcaccttaagcgttttcagagggttttgtaatgttgttataaatttctctaaacaaagttaatattaattctttctaatatataataaattttgactagaatttgtagaactctaaatcctttagtcctaaattatatactatggacttaatkaagttgttttatagcaatgttctatagagatgatctctaaatttattacttgctgagaacagtgatatgagtgactacatttatctttatgagaaggaaagaaaaaaggagaaaagacattttgagaagaaatgaaagaggacaggcattgtgacccatagaagttaacctcctcctcattgaatattgggga

SEQ ID NO: 394033 - DNA, 575 bp, Homo sapiens
aaaaaaaaaaaaaaaaaaaaaaaaaggacgttaagtcctaaatggaaaataggtgttcaacatatgcaccaagggaaaatgacattccaagcaaagaaactgaataaaagcaaagaggtacgacataacatgctactttcaagatcctcaagtagttccgtgtgactacaccatagaatacaaagaaggtaaagcatgagatgatatgagagagggaagatgcagctcatggaggaccacaatgataagtgtttaccatatcacataattagaagccattgaaaggcgacaataaacatgatcacatcttaraaagatttatctggtagtggtactgaggagtcactgaagcaatacaatataagataaaatggttaaaagagtccaggccaagtgttgatgggctgaactatacacccagcgtagaggggatggagaagagggggacttatcagtgatcttcacaaaggaggatcacttggtcctgttactatgtatgaccttggttcagacatggctttcccacctaccaactgcatgaccttaaataatatacataactctcaactggaaag

SEQ ID NO: 394034 - DNA, 546 bp, Homo sapiens
ttataaaggtcctatctttgcatgggagagcccacagaccaagctgacttctatttcatttcatagatatggcagtatatctactctttaagcaatcatgtgtagtactgaattcaggcaaaatacatgtgcttttcccctaatatataaaacttaaattgagcatagccagatgctatttatactaagagtcttctcagcytaagctaaattaattctcttccaagttctttttattcagtgctctcagcctgggtaccatggctctaaattcttaattgccataaaataattgtatttcccttagctacgtctggaatatggctctcaaagatgacctccagaatgtaatttgctatgtaagggcccagtctgagaatgattttacatactataactgaacctaatagaattcacaatagcatttctcctttgtcaggaaagtaaaaaggcaaagataggcagaggttaaaataatatttctaaaataaacctttcctcctagttatttatccttacttcttcacatattcccaggaaatatca

SEQ ID NO: 394035 - DNA, 622 bp, Homo sapiens
ctctgttcatttttagtctattttttttctgttgtttagattgagtatattctatttagatctgtcctcaaaatcactgattttattctctgtcatctccactctgctatagagcctatccagtgaaggatttttggttattatttttttcagctctagaattcccatttggttctttaaaaaaaaacamaaaacttctatctctttgctgagatttttctatttttcatttattttgagagatttcataatcgcttgttgaagcatttaaaaaaaaatgatggtggctttaaaatccatctcagataattacgatttctgaattatctcagtttcggtgtcagttgattgtcttttgttattcaagttgtgattttcttggtttgcaatgatgaatgatttttcattgtatactagacattctggctattatgttaagagattcctgatctgatttaaatcttctcttttagcaggtagttaccctgtttaggtttagcatgtagcttctggtttacttttgtggattgttgttcaaatgcaattagttttcagaggacttttaatactattttgttttgctttgctcttcctgttctatttgggttcctatttggggcct

SEQ ID NO: 394036 - DNA, 654 bp, Homo sapiens
agaaggaataagcaggacactattcacaagaaaagaaggatttctatatactactgttttatgagcaaggactgatttttaggttactaatttggagagctaggctgattttccttttcttcatttcttgtttgaaggtcctgatgtttatagacttagaattcattcacttatttattgattgttttctgtcctcagaaaatactatgtctaagaatacattatctattctactttaggaaagaatataataacttaaaaataatgtacctaaaaacactatgatatgaaaattacatgaagtcaataatcttcatggttttgaatatgttgaactgtcataatctgagatttctaaaggaaagactatctttttaaacattcatagtgttcatttctttacatttgtatttttatttagtaatttcttataatctggagacaaactttacttatatcacacaggtaactttataatgaatgaaaagtcacaaatatgacacaaagctttaaagtataccattttatttctgcagacataaactttaccttaaatcaatatccctattgctccatgatacctggatacaaaatgttctaattttatrtaattaaaaatgcatcaccattttgattatctggagatgcaactac

SEQ ID NO: 394037 - DNA, 604 bp, Homo sapiens
atgtcttttgaaaatcttgatctgccaattccataatattgagctgtgttaaaacagataaaagaaggtggaaggttagaaaattatctgtaaatgagaactgagtgttcaaactatttgagttaataaaattcaaatattagaacaatcacctttttttccttcctgaataagtagcaggttttattattattcctcttgctcaaattatctaggctatttttatcttccacttcaatcttctagggtagacatcattatgcagaaggtacacatacacaccaccaatggtatattcagactttattctattgtcaagatgtggtttgtaacaaacttgttgatacgattttatattttcttcagacatcactctgtggtaaaccaggtttttttggccacagcagtatcccctgctaagagttaaakaagccatagtattgagaagtctgcctggaatttggctgtttaattgttttcatgtgtttgcattagaatgggtatgaacccctaactagtcagctgtacaaaggtcagggttggaatccaggtcctgttctcatagagctaaaacagtcccttagcagcctgattccgaggagtc

SEQ ID NO: 394038 - DNA, 606 bp, Homo sapiens
aatccaagtaaataaagctaaaccttcactactgaaaaccagcttctaggtaactcatgtatcatacaccttatatccttgcatggattccccaaatctagtctctgaggtaggtatattataccatatactattatacaagcaaggaaaggggctcagagagaagtaattttctaaagatcccagggaaaatatgtgatctggtaggaatgtgaacactggtgtttctgactccaaaatctatggtcttcctactttgaggttgctgagttaaatgttcaccwggacctatggttgtgtgttgtcataggacttgctggagatgttagcatggaagacctgtagtatgggaattattttccccaatgcaaattaagacatataaacatacttatgagacacaatgattagaattgaactgttccaagaaattcagagtatgttccattccagaaaagatcactttattcagaggcagagacgagatatttgtattatgtgatcatgtctgttcggcagtggtaaatgcaaatgtggttttgtttggatagtggaagtaggttatgaaggcctgcttccccaaactgccacagaatcatgaattac

SEQ ID NO: 394039 - DNA, 606 bp, Homo sapiens
aatccaagtaaataaagctaaaccttcactactgaaaaccagcttctaggtaactcatgtatcatacaccttatatccttgcatggattccccaaatctagtctctgaggtaggtatattataccatatactattatacaagcaaggaaaggggctcagagagaagtaattttctaaagatcccagggaaaatatgtgatctggtaggaatgtgaacactggtgtttctgactccaaaatctatggtcttcctactttgaggttgctgagttaaatgttcacctggacctatggttgtgtgttgtcataggacttgctggagatgttagcatggaagacctgtagtatgggaattattttccccaatgcaaattaagacatataaacatacttatgagacacaatgattagaattgaactgttccaagaaattcagagtatgttccattccagaaaagatcactttattcagaggcagaracgagatatttgtattatgtgatcatgtctgttcggcagtggtaaatgcaaatgtggttttgtttggatagtggaagtaggttatgaaggcctgcttccccaaactgccacagaatcatgaattac

SEQ ID NO: 394040 - DNA, 568 bp, Homo sapiens
attcttctaattacctattactaaaaattctcttcctgtgctgttctgtgctgtgagaatacayggtccaccaactgtctcttgattttgattcattctcagatctctgtcctttctacattctttcttgtcttccttaattattaattgagcacatactgtggcatagcaatctaagatgttttgagcacacaaccagaaacatatattttgtttgcattatagacaaatagaggttaaaaaggaaaagatataactaaatagaaatagaagtttcagtaacttcttttatatataaacaactcaaagcacaagagtaatgcagtgcaaggaatagtcttttgtctcactcagtttcaaaaacagcctgggttatgttgcatactataactaatgaaaatattacccatggtaggtcctgcaacttactgatataatttccatcaaggctcatggcagttttatgtatgcatttataaggggagactcttaaatactactactgttctatatctaaggggctaaagtactttcaggaaagactttttaatgttcttgtgtttgaaaa

SEQ ID NO: 394041 - DNA, 615 bp, Homo sapiens
gttcatctgggctatgtgtgtacttgctgccttgggtagaacattttccaggactgtaagaaagcagagtgaaagctcaggtaagggaattgaagcagaatttgcagttacagcttgggrgaaggggtcatctggtgacttacccaagcaatcaaaccaacagcacgggctacccacagttcatgtggcttcaatggcaattattgccaaactatttttcatggagcttttcaattcaaacttggtcctagtttttgtttttaaatatttgtgggtgtgtatatatgctttttgttgagattgctacatcaagggtgtatttctttttgaatgatagaaattgcctttcatttttatttacctgtcctgttttagatcagtggctagccctgttttctactgggataaaccttgtggaagatctcttcatgcacaaagtgacacgggtgtatcattcatctaggtctgtgccctagaaaagatagactctgagtgttgtgcagctccctgtgagttaggtaacttcatctcttcctttacagtcaatttgagactcacgaaggttactataccacaaaaattgctgctataaaaatatgccaagtggcttcagaa

SEQ ID NO: 394042 - DNA, 535 bp, Homo sapiens
agaacttttttcttcccctttaattttgctaatatgctgagcaactcctagttctgataactaccagagaaagtgaggaatttagggtaacagcattcacygacaggggagcttctgtcacagaatcctgagagtctctgggaccttgaaagagtgaaagaaactttcatgtcaccatactcctcgcaatcctacagtccatatctaattgcttccactgacatttgactgctccaatattttgtcttccccttaagctattgacattatctggaacctgcctcaccctcagcctgcctgcctgactcttcactgtcaagaggccttgctacacacagtttctttagctttctccttttttccctcaaaacattctgtcttgtaatcccctgatcaacatcttcagagacccacttgcatatttcaaactgagtatgtatccttcagcctggtatttaggaccctctataattggctgtctctgtataacctctcatgacttattttattctctacactcaagtcaaactcatca

SEQ ID NO: 394043 - DNA, 535 bp, Homo sapiens
agaacttttttcttcccctttaattttgctaatatgctgagcaactcctagttctgataactaccagagaaagtgaggaatttagggtaacagcattcactgacaggggagcttctgtcacagaatcctgagagtctctgggaccttgaaagagtgaaagaaactttcatgtcaccatactcctcgcaatcctacagtccatatctaattgcttccactgacatttgactgctccaatattttgtcttccccttaagctattgacattatctggaacctgcctcaccctcagcctgcctgcctgactcttcactgtcaagaggccttgctacacacagtttctttagctttctccttttttccctcaaaacattctrtcttgtaatcccctgatcaacatcttcagagacccacttgcatatttcaaactgagtatgtatccttcagcctggtatttaggaccctctataattggctgtctctgtataacctctcatgacttattttattctctacactcaagtcaaactcatca

SEQ ID NO: 394044 - DNA, 597 bp, Homo sapiens
ttgtagtaaagttagagtagctctgttccaatgtttgaccattcagagaggagtcatacccttcttcacttcacaaggtatctctcaccttcattaaaaaaattgaaatataatccatgtcctgcagaatttaccattttaatatatacaattccgtcrttttttagtttttttcataaagttgtgcaaatatcgccactatctaattccagactattttaatcatccttccaaaagagacttaatactcattaagcagtcattctctattcctccattctctagctcctagcaaccaccaatctgctttctgtctctgtggttctgtattctggacattacctataaatgggatcacacaatatgtggccttttgtatctgccttctttcatgtaacatgatgttttcaaggttgctccgtgttgtagcatttatcagtacttcattcctttttattgctaaatagtgttccattgtgtggaatatcatatttacttcattcactcatcagttgatgaacatttgattgtttccactttttggctactatgaataatgctgctatgaatatttatgtacaagtttttatgtgaaca

SEQ ID NO: 394045 - DNA, 597 bp, Homo sapiens
ttgtagtaaagttagagtagctctgttccaatgtttgaccattcagagaggagtcatacccttcttcacttcacaaggtatctctcaccttcattaaaaaaattgaaatataatccatgtcctgcagaatttaccattttaatatatacaattccgtcattttttagtttttttcataaagttgtgcaaatatcgccactatctaattccagactattttaatcatccttccaaaagagacttaatactcattaagcagtcattctctattcctccattctctagctcctagcaaccaccaatctgctttctgtctctgtggttctgtattctggacattacctataaatgggatcacacaatatgtggccttttgtatctgccttctttcatgtaacatgatgttttcaaggttgctccgtgttgtagcatttatcagtacttcwttcctttttattgctaaatagtgttccattgtgtggaatatcatatttacttcattcactcatcagttgatgaacatttgattgtttccactttttggctactatgaataatgctgctatgaatatttatgtacaagtttttatgtgaaca

SEQ ID NO: 394046 - DNA, 597 bp, Homo sapiens
ttgtagtaaagttagagtagctctgttccaatgtttgaccattcagagaggagtcatacccttcttcacttcacaaggtatctctcaccttcattaaaaaaattgaaatataatccatgtcctgcagaatttaccattttaatatatacaattccgtcattttttagtttttttcataaagttgtgcaaatatcgccactatctaattccagactattttaatcatccttccaaaagagacttaatactcattaagcagtcattctctattcctccattctctagctcctagcaaccaccaatctgctttctgtctctgtggttctgtattctggacattacctataaatgggatcacacaatatgtggccttttgtatctgccttctttcatgtaacatgatgttttcaaggttgctccgtgttgtagcatttatcagtacttcattcctttttattgctaaatagtgttccattgkgtggaatatcatatttacttcattcactcatcagttgatgaacatttgattgtttccactttttggctactatgaataatgctgctatgaatatttatgtacaagtttttatgtgaaca

SEQ ID NO: 394047 - DNA, 597 bp, Homo sapiens
ttgtagtaaagttagagtagctctgttccaatgtttgaccattcagagaggagtcatacccttcttcacttcacaaggtatctctcaccttcattaaaaaaattgaaatataatccatgtcctgcagaatttaccattttaatatatacaattccgtcattttttagtttttttcataaagttgtgcaaatatcgccactatctaattccagactattttaatcatccttccaaaagagacttaatactcattaagcagtcattctctattcctccattctctagctcctagcaaccaccaatctgctttctgtctctgtggttctgtattctggacattacctataaatgggatcacacaatatgtggccttttgtatctgccttctttcatgtaacatgatgttttcaaggttgctccgtgttgtagcatttatcagtacttcattcctttttattgctaaatagtgttccattgtgtggartatcatatttacttcattcactcatcagttgatgaacatttgattgtttccactttttggctactatgaataatgctgctatgaatatttatgtacaagtttttatgtgaaca

SEQ ID NO: 394048 - DNA, 609 bp, Homo sapiens
taaataacttatccaaactcacataggaaatgagttattcaagtcaagaatcaagccaagccaggccatttccaagctcatgcatgtgttttctgtctctcaagtccgtgagaagagtatccagggaataatgggagctgagtagatggagcagctaattctgtctgccatggggttcaaaggtttcacagaagaaaatgtgcagcttggccttgaggggtctggaccaggtctgggagaagggcaggtattccagatagaaaggaacatggatagractgaacaatcaatagtgtagggaaaattcagaggtttgaaatgtcactttataattctgtaaagctgtcttattcatgtgaacatagggtcatactgcagcaatatttcaatatgtattcagtgagtagctaactctattattgctagatgtgggaatacaatgttttcactgtgcatttattattatgcatataagcatgcgcaaagatggggtctgcattgcccctctgttgagaaggaggcactgccaggtgctgcggacattgcaccagagtgatgcaatgaggctggtacagggacagtagaaagaagctggaagatggaatgggc

SEQ ID NO: 394049 - DNA, 525 bp, Homo sapiens
agctatttggaaatatttaataaattattgctgactataattttcttcctgtactattgaatactagaacttatttcttttatctaactgtatttttataccccttaaccaacctctctttattccctcctccccttcccagcctctggtcaccacsattctactttctacctccaggaaatccactcttttagctcctccttatgagtaagaacatgcagtatttgtctttctgtgcctggcttatttccattaacataatgacttccagttccagccatgttgctacaaataacagggtttctttttcttatgtctgaataatattccattgtgtgtgtgtgtgtgtgtgtgtgtgtgtgtgtcacacacaacattttctttatctatttatccattgatggacatttgggttggttccattcttggctattacaaataatgcttcaataaacatgtgagtgcagatatttctttaatgtacttatatcctttctttcagatatatacccagaaataggattg

SEQ ID NO: 394050 - DNA, 498 bp, Homo sapiens
agcatcactttttttccataaggttactgtggtggtcacatgatttaatacatgcagaaggcttagaatgttcctgacacatagtaagtgctctaccatcgtgttactgttgttaaagttattggcgtgagtaaagggtgactgtgagayctgaagtgagtcacagagctgtagagagagaactggaacgatttgaaagtcaaagtatgtctttctctttctaaaagtgtttctctctctacacatggatacctgtctttctatctatagaagtgagcatatatctctatctatccatctatgttgatgtatctgtttgtctgtctctctgtctactgagagatgttacttctttagtggtaacgttgccacctaaggacaaacaggggagcacctacaggaaggaggaagaagaggaggaggtagaggggaataagaaattggatttatttttcttgctgcagtaagggaaaatacatgccaaaggaccaacggagt

SEQ ID NO: 394051 - DNA, 495 bp, Homo sapiens
atagcttaagcccctgcacctggaactttttattttcctgtaacagtttctgtaaccatttatcttttactttttgcctgttctgcttttgtaaaaattgcttcagctagactccccctcccctatttagaccaaggtataaaaagaaatctagccccttcttcggggctgagagaatttttgagctctagtcgtctctcggtcsccggcaataaaggactcctgaattagtctcaaagtgtggtgtttctctataactcgctcggttacaacacaggtagtgctgacctttgttgcgggggtggggaaggtttgaaagagcaggtagggagttgccaggtacaggtaattgtctattgcttaatcaggtgatgggtcagttgattaaaatttgttgagtggtatgcaacgaatatgtgcaactttctgcacttcaataaaaaaaaattcttaaatgaaaaaaaaaggacacctcaactgaagatgagaatgtct

SEQ ID NO: 394052 - DNA, 623 bp, Homo sapiens
atctgcctgaagctttatatttactatctcaagtctttgtattgattgaagacctttcagttatttggcctacaaagtgactcaccaagacagccaagtataaaggggtccccggagaaattccaactggcctgtgcactgtgaggagtgtgcactggggcggagcctcaggaagtttgcgccatttgcaggggaggaagagcctggctggcctctcctgatccagtgtgataacctggggactcagtctgtgagatggggagcctctctcactttgctgagtttttttccttttcacccaataaaacmctaccctcctcacccttcaaactgtctgtgagattaatttttcttggtcatgtggcaaggacgctgtctttagctcaactaaggaaaaagtcctacaacagctttggtgcccagaacatagggcttgagaaggggtgagtgaaatggggactcaaaacctctcacattcgcttctgagccttttggtcctatggcattcctcttctttttttcaggacattaatgacatgaaaactttttttttttttacaatactggaggtggttcacacacaccccaatggccacaggcatgtgtatgggacagttgggtgg

SEQ ID NO: 394053 - DNA, 623 bp, Homo sapiens
atctgcctgaagctttatatttactatctcaagtctttgtattgattgaagacctttcagttatttggcctacaaagtgactcaccaagacagccaagtataaaggggtccccggagaaattccaactggcctgtgcactgtgaggagtgtgcactggggcggagcctcaggaagtttgcgccatttgcaggggaggaagagcctggctggcctctcctgatccagtgtgataacctggggactcagtctgtgagatggggagcctctctcactttgctgagtttttttccttttcacccaataaaacactaccctcctcacccttcaaactgtctgtgagattaatttttcttggtcatgtggcaaggacgctgtctttagctsaactaaggaaaaagtcctacaacagctttggtgcccagaacatagggcttgagaaggggtgagtgaaatggggactcaaaacctctcacattcgcttctgagccttttggtcctatggcattcctcttctttttttcaggacattaatgacatgaaaactttttttttttttacaatactggaggtggttcacacacaccccaatggccacaggcatgtgtatgggacagttgggtgg

SEQ ID NO: 394054 - DNA, 543 bp, Homo sapiens
agttgggtggggcagctccctgctccccattctctactgtctggggtgcatggctgagtctgccgcatgtatgcacagtgtccaacagccattaacaatggaatgagccaagggtgggaatgagccacagcagctgcctgagccccaagggatcccatgcagctggcggtattccctgccaggcacccatggagtctccccctcccccagccagggagtccaaccccatcagacagcaattaagcttctctctagggtggaggaactatttgcrtaagaataagaggtttttcccccaggcatccctttttcttctccactccatcagcagttaacttttaaatgagtttatttttccttttagaagacattttcttaggctaggaatgataaggatcattatcataatttagtccacctatttatgtggactaattatgtttatattctctgtaaagttttaattgtgaaaaaggatttgtgaggttggtcttaagctgtagccaatgtggtatgctttgcatgtctgtgtggtcagtagca

SEQ ID NO: 394055 - DNA, 583 bp, Homo sapiens
ggtaaacatgtttaggtacatgggactgccaaaatgatgttcaatatactttaggtaatatttttgtgagtaatgctagcatatgctcaaaattatatgggatttctacaattctaatgtctgagtatatgctatcaatcataattaaggttggtatgttaggttattgtaaatcacagagataaccaaacttctttgtcaattgtgtttctaactgtaactaccctggacattttgttattcacagacaatggttgtcttgttttaatgcttttcaaaagatggtttatactgagctatagaactttgacaggtcctctcaaatacaggtttctgataactttggagattgtaacattggaataaaggaaaaatgtacatgactcatgaagagctgaagtgttcaygaatatcaagcaaaactagaactaatggactgaactcaaaactgaaacaatctttttaacttttgttggaatattgctgatccccgttttgtttttcagggttaagaaaacttattttgaagtatttacagcctttaataactgagtaagctatactcctgtgaacaaaatttgga

SEQ ID NO: 394056 - DNA, 609 bp, Homo sapiens
ggtatcagtggcttttaaatgcaaactaaaattgggagttaaaagggctcttactgacttacccaaatgagatacattaatagttaacactgattgaacatttaatatgatatgtattacctcatttaatccccacaatgaccctgtgaatgagtactggtattgttattattatctgttttagcagttaggatatcaactatcctatgaaaggattatcaaagaactatcaaaatcacagagctgggaagttaccgarttggggctggaatcccaggctttctatcccagggctgagctcatccccatagtgttattctgtctcataacataggagacatatttagggaaagcagccacccaaaagtaagatagaacacaagggacctgtaagcaactccttcactgaaatgagcctgggagtgtgaagagcagaggatggagagccttgcttctgaaggccttggtcacaccctcacactgttcaaagtggaagagactcattaactttttatcattatataagatactacttatttctttaaatctcacctcaacccccaaaactgaaagttagcaggagaacacttttggccaataagaaaacag

SEQ ID NO: 394057 - DNA, 609 bp, Homo sapiens
ggtatcagtggcttttaaatgcaaactaaaattgggagttaaaagggctcttactgacttacccaaatgagatacattaatagttaacactgattgaacatttaatatgatatgtattacctcatttaatccccacaatgaccctgtgaatgagtactggtattgttattattatctgttttagcagttaggatatcaactatcctatgaaaggattatcaaagaactatcaaaatcacagagctgggaagttaccgagttggggctggaatcccaggcttyctatcccagggctgagctcatccccatagtgttattctgtctcataacataggagacatatttagggaaagcagccacccaaaagtaagatagaacacaagggacctgtaagcaactccttcactgaaatgagcctgggagtgtgaagagcagaggatggagagccttgcttctgaaggccttggtcacaccctcacactgttcaaagtggaagagactcattaactttttatcattatataagatactacttatttctttaaatctcacctcaacccccaaaactgaaagttagcaggagaacacttttggccaataagaaaacag

SEQ ID NO: 394058 - DNA, 609 bp, Homo sapiens
ggtatcagtggcttttaaatgcaaactaaaattgggagttaaaagggctcttactgacttacccaaatgagatacattaatagttaacactgattgaacatttaatatgatatgtattacctcatttaatccccacaatgaccctgtgaatgagtactggtattgttattattatctgttttagcagttaggatatcaactatcctatgaaaggattatcaaagaactatcaaaatcacagagctgggaagttaccgagttggggctggaatcccaggctttctatcccagggctgagctcatccccatagtgttattctgtctcataacataggagacatatttagggaaagcagccacccaaaagtaagatagaacacaagggacctgtaagcaactccttcactgaaatgagcctgggagtgtgaagagcagaggatggagagccttgcttctgaaggccttggtcacaccctcacactgttcaaagtggaagagaytcattaactttttatcattatataagatactacttatttctttaaatctcacctcaacccccaaaactgaaagttagcaggagaacacttttggccaataagaaaacag

SEQ ID NO: 394059 - DNA, 460 bp, Homo sapiens
aaccctgcatgacagctcatttaaaagtgagttagtaatcgcttgagcagacatatggcaacttaagcaayttttatcccattgatgagatttgtaggttgtttctaatttttcccctttgtaaagagttcagtgaactttttggctcaaatatttttgattatatatcagcttgtttggatagatgttatttcaaatgatataatgatttgatgcatttgccaaatatcctttctaaaataattaataatttggaagctcagagcactatgctctcccaataattctataataaatttatcaaagccacaattttcatcaagatagctctgcatgtagattgactaattactgttgtttccttatcagtggttctacagttcagctctttatgaagatgtgacggttaacgagaaactgattaagtttgtatctgtggattagatagcagcaagactct

SEQ ID NO: 394060 - DNA, 460 bp, Homo sapiens
aaccctgcatgacagctcatttaaaagtgagttagtaatcgcttgagcagacatatggcaacttaagcaacttttatcccattgatgagatttgtaggttgtttctaatttttcccctttgtaaagagttcagtgaactttttggctcaaatatttttgattatatatcagcttgtttggatagatgttatttcaaatgatayaatgatttgatgcatttgccaaatatcctttctaaaataattaataatttggaagctcagagcactatgctctcccaataattctataataaatttatcaaagccacaattttcatcaagatagctctgcatgtagattgactaattactgttgtttccttatcagtggttctacagttcagctctttatgaagatgtgacggttaacgagaaactgattaagtttgtatctgtggattagatagcagcaagactct

SEQ ID NO: 394061 - DNA, 460 bp, Homo sapiens
aaccctgcatgacagctcatttaaaagtgagttagtaatcgcttgagcagacatatggcaacttaagcaacttttatcccattgatgagatttgtaggttgtttctaatttttcccctttgtaaagagttcagtgaactttttggctcaaatatttttgattatatatcagcttgtttggatagatgttatttcaaatgatataatkatttgatgcatttgccaaatatcctttctaaaataattaataatttggaagctcagagcactatgctctcccaataattctataataaatttatcaaagccacaattttcatcaagatagctctgcatgtagattgactaattactgttgtttccttatcagtggttctacagttcagctctttatgaagatgtgacggttaacgagaaactgattaagtttgtatctgtggattagatagcagcaagactct

SEQ ID NO: 394062 - DNA, 460 bp, Homo sapiens
aaccctgcatgacagctcatttaaaagtgagttagtaatcgcttgagcagacatatggcaacttaagcaacttttatcccattgatgagatttgtaggttgtttctaatttttcccctttgtaaagagttcagtgaactttttggctcaaatatttttgattatatatcagcttgtttggatagatgttatttcaaatgatataatgatttgatgcatttgccaaatatcctttctaaaataattaataatttggaagctcagagcactatgctctcccaataattctataataaatttatcaaagccacaattttcatcaagatagctctgcatgtagattgactaattactgttgtttccttatcagtggttctacagttcagctctttatgaagatgtgacggttaaygagaaactgattaagtttgtatctgtggattagatagcagcaagactct

SEQ ID NO: 394063 - DNA, 574 bp, Homo sapiens
tactcagagcaagagagaaaagaaacaaagatcatcacacagttgaaaagcttgagaaaagaaggccaaggatgaaaaagccrattctctgatttcatttttctcccatgttggcaaaatgggaaaaaaaacagatccactgtagtcaaacatggaaaaatggttaacctcatactctaatgagtgtgtgtacagtcatatatcccttaatgatggggatatgtgttgagaaatgcatcattaggtgatttcgtcatgtgaacatcatagagtgtattacacaaacatagaaggaatagcttactacacacctaggctgtatggaatagcctattttcctaggctacaaacctgtacagcatgttactgtaatgttggcaactgtagcacaatggtaagtatttgtatatctaaacatagaaaagatacagaaaaaaacacatattaaaatcttaggaccactatatgtagcctgtcattgattgaaacatcattatgcagctaatgcatgtacactggtatagtcctcataaaataaaattagcagttatctatcaaaatttaaaatatgtgt

SEQ ID NO: 394064 - DNA, 580 bp, Homo sapiens
acatgataaacaacgtaagaattatcaagttagcttataatacatgtgctactgataactttacccctagttgagacatttttgaacccagagaactcattcaaataatcttgacttctccatgtgagatctcaagattctgtgacaagagaattaagaaaaagtttccagttaaatctaggatctctcagtatcatagcactattgttatttccagactattgcaaaataataatgaygataatgcatagccagtgtttaatatatttcacaatgtagaatcctctttaaaatcatgtaataaaatataattggttatcatgtattattctaatttagtgtttcaatgcaagtaattttatctatagtttgtgtatttactttcataaattaaacgggtctgtggttcttacctttgggttatctttgtcagatttctctatgacactagtgctagctgcacaaaatgatgacgcttactttcctattctctgcaagagtttagatattagaaaaatcattcattctttgaagagttgaaacattgcacctatgagactgtctggctgttttttttcct

SEQ ID NO: 394065 - DNA, 580 bp, Homo sapiens
acatgataaacaacgtaagaattatcaagttagcttataatacatgtgctactgataactttacccctagttgagacatttttgaacccagagaactcattcaaataatcttgacttctccatgtgagatctcaagattctgtgacaagagaattaagaaaaagtttccagttaaatctaggatctctcagtatcatagcactattgttatttccagactattgcaaaataataatgacgataatgcatagccagtgtttaatatatttcacaatgtagaatcctctttaaaatcatgtaataaaatataattggttatcatgtattattctaatttagtgtttcaatgcaagtaattttatctatagtttgtrtatttactttcataaattaaacgggtctgtggttcttacctttgggttatctttgtcagatttctctatgacactagtgctagctgcacaaaatgatgacgcttactttcctattctctgcaagagtttagatattagaaaaatcattcattctttgaagagttgaaacattgcacctatgagactgtctggctgttttttttcct

SEQ ID NO: 394066 - DNA, 616 bp, Homo sapiens
tctgttttcccataagaatgtttcaccttgagataatcatatttctttcaggtagtcgaggatctctgtgctttaaaagtgaggcaagaaaatagcagagttcaccaccctacccttttaattagcatccctgcatttcagaaattcagcgtttcagcactggattttaygattttaaagacggagctagctctcctttgcttaaaccataatccttcccagatgatagaggtgaagtcttgtccaaaagatattatttatcacgatggatttaactacttttctcacattattccatttagagagacaagtttatacttctgtgtctaatacctcacttttcacttgtgtgactagtttacaagagtaactgactaccatcagaaaagtgaaaatatactagccccgtttaaccaaatgcgtgtttaattgatgaatggtattgaaaaagagtaacttagtttggtaagtttagtaaaaacacactacttttggatctatgaatcttgtgaagtatcatttgtcacagaacatcaaatttcccttattatgctgtaaagaaaatgaatattattgaaagaccctacatcatatttgatagtagtaaattacccta

SEQ ID NO: 394067 - DNA, 563 bp, Homo sapiens
tacccaaccaaaattgcggatccacagaactataagcaaataaaatgtttattgtattaagtcagtctaagtttargttggtttgttaggcaagaatagataactgagaatggttgactagagtttattacctaggaaaactctgtgcatagttgttgaaaacacatgccttagcatgataccacccaaggatgagggagctgggtattcattcaccaactcctgagagccattgttggagatctgctcatgggtggaggatgttagtttcccagcacagctggcctcctagagttgtgggcaaaggagacttccaaggttccagaaaatgtttgcaggcacaggatgcaggtgcagcagttgtaagtcaaccaaagcatgccaaaatgcttcaagagatatgggagaacattgagaaccacagttactgcatatttattaaatcactctttacaaaagtgtggtcacagtataggaaaaccatgaggaatagtattagtatcaagagtatcactatccactcttatacccaaagaggcaagaggagaggatggtcaccagaa

SEQ ID NO: 394068 - DNA, 563 bp, Homo sapiens
tacccaaccaaaattgcggatccacagaactataagcaaataaaatgtttattgtattaagtcagtctaagtttaggttggtttgttaggcaagaatagataactgagaatggttgactagagtttattacctaggaaaactctgtgcatagttgttgaaaacacatgccttagcatgataccacccaaggatgagggagctgggtattcattcaccaactcctgagagccattgttggagatctgctcatgggtggaggatgttagtttcccagcacagctggcctcctagagttgtgggcaaaggagacttccaaggttccagaaaatgtttgcaggcacaggatgcaggtgcagcagttgtaagtcaaccaaagcatgccaaaatgcttcaagagatatgggagaacattgagaaccacagttactgcatatttattaaatcactctttacaaaagtgtggtcacagtataggaaaaccatgaggaatagtattaktatcaagagtatcactatccactcttatacccaaagaggcaagaggagaggatggtcaccagaa

SEQ ID NO: 394069 - DNA, 563 bp, Homo sapiens
tacccaaccaaaattgcggatccacagaactataagcaaataaaatgtttattgtattaagtcagtctaagtttaggttggtttgttaggcaagaatagataactgagaatggttgactagagtttattacctaggaaaactctgtgcatagttgttgaaaacacatgccttagcatgataccacccaaggatgagggagctgggtattcattcaccaactcctgagagccattgttggagatctgctcatgggtggaggatgttagtttcccagcacagctggcctcctagagttgtgggcaaaggagacttccaaggttccagaaaatgtttgcaggcacaggatgcaggtgcagcagttgtaagtcaaccaaagcatgccaaaatgcttcaagagatatgggagaacattgagaaccacagttactgcatatttattaaatcactctttacaaaagtgtggtcacagtataggaaaaccatgaggaatagtattagtatcaagagtatcactatccactsttatacccaaagaggcaagaggagaggatggtcaccagaa

SEQ ID NO: 394070 - DNA, 593 bp, Homo sapiens
agcagtgttagttacaggcaaaattggaaatgaacatcaaaactgggataagagcaccatggtaaatctggactatgtagtacttgcaaaagatgcagataagcctacgtgtaccaatgtggaaaggtctgtgaaacatattgttcactgcaaaaaataacaattccaaaaaaagaagtatagataaaaaaatttgggtataaaatcaacccacatacaaaatatagatctttgtatagttgcatacctctctacatgtttgtatatgttttacatacgtatctatctctatctatcatctatctctctctctctctmtctatctatctctctatcatctatctatctatctatctatcaagagattgatttcaattcaaagtaaagtaacagtatatttggatgcagagcaaacataagagtggcctcctctacaaaagggactcaagatagaaatctgaaaagcacagaaaactacaaaggtaaaaataaacaactatattcctatggtaccttcttttagcatttttctctatatccttccagccatttttctatataggtatagggcaagttggaagtcttgatctgca

SEQ ID NO: 394071 - DNA, 633 bp, Homo sapiens
cccttcctccctgagaagcctctgtttttgagcgtgtgtgctgcacagctccgttagctgtctgtcactttggatcagccgtctgcaggacgcagcagttctctgcctctgcatgacgttagctcaccatggcaggtgttgtccctgagaaaaggtgatggaaggaaaccctgaagctgtgggacagcatctttaagctcaattgcaaggcaaatacaagacccagttctccartctttccccacactcataaaaccggtaattttacctctaacttcctgactcctgtatcctgtttctcaatggtaaccaaattgcagaaaagagaaaagaatataattattccccctaaaccccaggaaccacttcttatactcagcaggggaactagcttttgttcaacccatttagtttcatcttccctctaaaagatttctctgtgatcatcggcaccctcagtttcaacaaatatccactttacacattgatcaaaatgtagtggcaaactgagatgagctttaaagaaaaagtggaaccactagcctaatatttaacacggaacttgccagccccgggatcatgacacccaggtgtgttgcgttatcaccagctgtgtgttcattccaatttttc

SEQ ID NO: 394072 - DNA, 550 bp, Homo sapiens
aatttccctcttaacactgccttagctgtgtcccagagattctggtatgctgtatctttgttctcatcagtttcaaagaacttcttgatytctgccttcaattcattatttaccccaaagtcatgcaaaagtgaatttcttagtcttgagttctaattttattgtgctgcggtctgagagactgtttgttatgattttagttcttttacatatgctgaggagggttttacttctgattatgtgatcagttttagattgtcatgtggcaatcagaagaacatatagtctgttgatttttggtgaggagttctgtagatatctaccaggttccgtttgatccagtgctgagttcagggcctgaatatctttattaagtttctgtcttgatgatctgtctaatgtcagtttgttgttaaaatctcccattattatattgtgggagtctatgtgtctttgagggtctctaagaacttgctttataaatctgggtgcatatgcacccaacacaggagcacccagattcataaagcaagttcatttaggaaagtta

SEQ ID NO: 394073 - DNA, 607 bp, Homo sapiens
actaattatttctcatttttgagggcttatctaccttcagtctttgaggtttctgacctttggatattttttatttttttattttttattttttgctttttaatagtctggccatgggctgggcayggtggctcatgcctgtaatcccaacactttgggaggccaaggcaagtggatcccatgaggtgaggagttcaagaccagcctgaccaacatggtgaaaccccttttctactaagaatacaaaaattaactgggcatggtggcgggtgcctgtaatcccagctactcaggaggctgaggcaggaaaaacacttgaacttgggaagcagatgttgcagtgagctgagactgcatcattgcactccagcctgggagacgagtgaaactccaactcaaaaaaaaaaattgtctggccacttttctataggggtcttttgctttgctggtggtccactccagtccctactcgcctaaaattttctagtagctggaggtatcaccagtgaagactgcaaaacagcaaagatggcagcctgctccttcctctgggagctctactcaggacctgttcctggcctgaacacacctgtaagagatggttgga

SEQ ID NO: 394074 - DNA, 600 bp, Homo sapiens
aaaaaaaaaaaaaaaaaatcaccaaggttatagtttctctccatatttttactctgacatcctcattatattaacatatatgctatatatatatatatattaacatataacatatgtgttaatatatgctatatatatatatatagcatatattagtctattagcattttactcactagttcacagtcataacattactctgcaaaaataacatgtcttggaaggaggattattttttctcacagtcccgttttaaaacagggaacttcatctaraaaacgtttgtctcgttatccacaatttcgtcataatctcagtcttggacaaatcactggtaatgagagtgaaattaccattatttaccgagaggaaacatatggaagagcatgggttactcaaataaaatcagagttttaataaaaggaaataaagatgtcagttagggagccagtagtgtctgttaaagatctctaccagaagcctgaaataaaaattatatttaaaacacaactaaatggtgggaaattagaagcatccctcctaaagttaagaacaagataagactgcgaatatcattagtatttaacattgtattaaaga

SEQ ID NO: 394075 - DNA, 608 bp, Homo sapiens
accacaccttattctgggtcaactaatagagaagctaaatatccttggaatcattacaaacatttatcaaacgcttagtttctggtcagcaaaatttcccacatatgtttccattttctatttagactcaagttactctatagccattttgttcccagatttcattgcagaagaaagcagtcccaaacagcacgtgaaattcctctacacgtagccttctgtaaagatttggtatgtgctgtggttcatgagctagtcaacatttgtaaaacccttygagacttctcttgtggtatttcttgccaggaaattgcttgatcgatagatacctaatgtttgtgattagcaagaataagctttcttaaagttgtgtgtttgtgtgtgtgtgtgtgtgtgttttttcagttggggttaggttttttcagtttcaagatatttacaaagcattctttacgttgcccataaaaatgcaaaataaagtttccctgacattctgtacaagcttgtaaaagaaatgttgcagccacatgaacagcctgcaactccattctgcaattacagtttgcaataactctggaagtcctgggccaagaaaggattatgagctg

SEQ ID NO: 394076 - DNA, 624 bp, Homo sapiens
aataaaaatgtgtatgcatctttcattttgaaaactcttcaaatatattgctgcaaggcaatcaagtaacctttttgtggttacaaaacacatgggatacacataacgcaagcatattcaagcctttgtatatacatatacttaatcatatccataaacattttcttagaaaacatccgttaatcacatatgcaaaacatctatctatatagacacatatgttttgtgagtacttatataaacacatgatatcatatatatacacagaaaaacataactctatacagatttattatcctattgtaatcagaattgcatatgtacttatgccttttacaaaaattttgaacataattttatacatctaaatatccttaatactttatgtacgcatatttatctatatagacatatataatcctttacataatattatgcatatgcatatacatttggataatcctatacawaatataatggtgctaagtttataataaataatcttagctttaatctgtgcatatgtgtgtatatgcactacttaagatactataatccataaacttacttagcagtggcacacataaagtgcatgctgaatgcccacagatacgcaagggcact

SEQ ID NO: 394077 - DNA, 624 bp, Homo sapiens
aataaaaatgtgtatgcatctttcattttgaaaactcttcaaatatattgctgcaaggcaatcaagtaacctttttgtggttacaaaacacatgggatacacataacgcaagcatattcaagcctttgtatatacatatacttaatcatatccataaacattttcttagaaaacatccgttaatcacatatgcaaaacatctatctatatagacacatatgttttgtgagtacttatataaacacatgatatcatatatatacacagaaaaacataactctatacagatttattatcctattgtaatcagaattgcatatgtacttatgccttttacaaaaattttgaacataattttatacatctaaatatccttaatactttatgtacgcatatttatctatatagacatatataatcctttacataatattatgcatatgcatatacatttggataatcctatacaaaatataatggtgctaagtttataataaataatcttagctttaatctgtgcrtatgtgtgtatatgcactacttaagatactataatccataaacttacttagcagtggcacacataaagtgcatgctgaatgcccacagatacgcaagggcact

SEQ ID NO: 394078 - DNA, 573 bp, Homo sapiens
aaccaaagccactggctctcaaagggagctgggcctgcccatccgcaccaggcatggctagttgaagttctaagtgcccaagtgatggctgcttctctgaactgagagctacagggagagtttattatccaccttttgactttattgttatttcactgaaatatatttttcatcctaagctgcattgagtcttttgtgtaatgaagcaaagatggatggatagatagatgtatgcatagataagtgsatggaaggatgaaagaatgggtgagtggatggatggatgggtggacagatgggtgggtggatggatggatggatggatgggtgaaaggaagaaagagagaagttaaagaggtagagggagatggaggcaggcaaaatgaacatgaaaattataatcaaagccttttctagaattttgatcactagcttttctattctttgaaaaccagtgcatggaaccatcacacacccactttggtgagcagaacacgttctacttctaagatccaactaaagctccctgcaggtgttctctgcctgttgccgaagttcctttcacagagagct

SEQ ID NO: 394079 - DNA, 573 bp, Homo sapiens
cgccagctctcaggacagaaatccaagttgtgggctcacccttccatccatttcatatctgggttcatcartggtgactgagctcccactattatcaggagcctatgccaggctcagaagctagagggctggataaggcacaggctctgccctcaagtggctcacagtgccatggggaggctgattttatagaaataattgtaacagtccagcacaggggagtggggttataggatgatagcctgaatgcccctgtcctcacggttcagtttcaaattttcctgaaccaaacacacatgacaaaaatggtagagaataatcaagatgtgaccttaagaacctcaccttccagttttccaatctccctcacaaacatgcccaagtcagcctttccaaggccaggagatacaaagcaagtcggtggcccagcaggctggctgggtggcactgccacaggcaagccagttgttgtacagaccaaaggacagaggcggtcagaccacacacatgttggtgcagcggctggcactggggacttcaggagcaggagggccaagctgaggccaggcagag

SEQ ID NO: 394080 - DNA, 604 bp, Homo sapiens
ggagttttcaccagcacaacccttttattaggttggtgcaaaagtattttcagttttagccattactttcaatggcaatttcaattactttgaaaactgcaattacttttgcaccaacgtaatacattgagattgcaacagatggtgaattttggayatttagttttttttaaaaaaaattttgttttacgaagagaagctcctttgggggtcagcaggagcaaaagcaaacaggggcttgaatgacagctctgggctcacccctagctctgacatggtgtgaccctgagagctcctttacccccaagctgctaactgggaagcaacaaggagcagtggtggggtcggggagctaatgtttgcaaagggcttggcacatggccgaactcagcacatgccttccctctctctctttaccagtaagggaaaaaactcaagtacaaaccgatcaaccagattctgcagcttgctgagcaagcctcaaagggaaaagcattttagtttatgcaatgtatcatttgggaaccagacccaagctcggaagatgattacagttactgtcaggaaatggcccatggcctctgtgggtttacaaacaactgcc

SEQ ID NO: 394081 - DNA, 566 bp, Homo sapiens
aggctggtttgcctgagagatgggtgatcttcagctgggacagcttgtctctgcttcaggtggcctctcatcctccagtagactagtctgagcttcttcactttgcaggctaagggttcccaaaagcagcaagaaagggcaagccccagtgcatgagtgcttttcaagctctgcttcaagatgcttgctaatttccctttaaccaaagcaaattacttaatttgttcagttcaaaggatggggaaactccagctctagtcacatgaggacaacatgagcaaagctcaaaggtaagagagaacatggcatgttggaagacagcaagtagtttggagtggctggagtcaggcatatgtgaagtctcatgaagaaraagccagatcataaagtgtcttttcagtaagttctgctgaggagtttagagtttatcttgaagacaggggagtggtcattgaaagagtttaagcaggatgttgacatgatcaatgagatgtgtagagacatggttaggtggtagaagcctaaaaacactcgttagcctagacaattcaggaagtttccaaaga

SEQ ID NO: 394082 - DNA, 590 bp, Homo sapiens
agtccagcctggtggcagggccatgctgggaacttgatttctaatgtcaatcactggaatgcccttctagtaaggaagaggtgcccaagcttctgtttgagttaacacagacctttccaggtcaggtgtagaatctggagtgatgaatggaagkgctggaaaggaaatgaagaccagtgtagatgtctctttgcagaagttgaacattagaggaaaaaacagaataagatgaaaatggaatcacaaagggtaaaatgactggtttaaggctatatgtgcaggattagagaagagatggggtcaaaggggtattttttaatgaagataaaattcacataaaacaaaattcagcattttaactgtttttaaagtgtgtaagtcagtggcttttactccatccacatgttgaacaaccatcatcactatctaattccagaagattgtcatcatcccccttatccatgaaacagtcactccctgtcccccactcctctcagcccctggcaaagactaatctactttctgtctctaaggagttgtctattctggatgttgtgtataaactgaatcatacaatatgtggccttttg

SEQ ID NO: 394083 - DNA, 559 bp, Homo sapiens
catcaattcagccaatgcaaggagtgaagacttttaaatccccctaaagcatcagttctccaacttggctacacattgtgaccacccagagagatttagaaagtactaatgtctgggttccacccacagagatccttacttaactggtctggggtatggctcaggcaatagaattttggaaagctccccaagtgattctactatgcagccaaggtggagagtcactgtcctgaagtcatcagaggttgccacctactcctcccacaaaggtggctcctcttgtcaccttgcaccacttgcaagcaattagggatgtacatttacatgattttaaaagtcttatgatgtccgattaaaactaacaaaacttgaatttcttgtatcagttatcattcactcttctcaacaaccgtgtgaaartaagtttattgttcccatatgacacacgaggaaacaaactctgagagattaattaagcgacagccctagatcacagaacttggaagtggcagaaaattgattttaatacaattgtttcaaccccacagtctgtatcatt

SEQ ID NO: 394084 - DNA, 506 bp, Homo sapiens
cattagttgtatttcttattcatatgagagaactatctttatkacctgtgcactataaagaatgatgagtatttaaacactaagtgttgaattaacagttatataataatccaaaaaaaaaaacaaaaaacaaaaactgtacttctccactgtatcaaaatgtacttaataggtatttattgtttcaggaatatacaatgtcttctatcatttaaatcattttgtcaatttaaaataatgacctggctgggcacactacaccctgtcaaacaaaactgatttactttatctcatacaaaacatcctgaaaatatgggatgctctgaaagtgccaacagctacccttggagtttttctttttccaaaaattatttctttcaattccagtcccagatcttcactaccagcccttatttcagctatggtagaaggagtgaatataccttctgttgagtatacaaaacgtgctagaaatggtcagttacaccctaaatgtctttcccatc

SEQ ID NO: 394085 - DNA, 506 bp, Homo sapiens
cattagttgtatttcttattcatatgagagaactatctttatgacctgtgcactataaagaatgatgagtatttaaacactaagtgttgaattaacagttatataataatccaaaaaaaaaaacaaaaaacaaaaactgtacttctccactgtatcaaaatgtacttaataggtatttattgtttcaggaatatacaatgtcttctatcatttaaatcattttgtcaatttaaaataatgacctggctgggcacactacaccctgtcaaacaaaactgatttactttatctcatacaaaacatcctgaaaatatgggatgctctgaaagtgccaacagctacccttggagtttttctttttccaaaaattatttctttcaattccagtcccagatcttcactaccagcccttatttcagctatggtagaaggagtgaatataccttctgttgagtatacaaaacrtgctagaaatggtcagttacaccctaaatgtctttcccatc

SEQ ID NO: 394086 - DNA, 610 bp, Homo sapiens
tcatcaataagtaaaaaaataacaaatgctggcaaggatgtgggaaatgcaaattagtacagccattatgaaaaccattatggaggcttctcaaaaactaaaaatagaatcaccacatgatccggcattccactactaagtatttaaccaaaggaaaggaaatcagtatactgaaaagatatctgcatctctgtatttattgcagcatattcacagtagccaagatatgaaatcaacctgaatgtccatcagcagatgaataaaatgtggtgtacatacacagctggatactattcagccataaaaaaagaataaaatcctattattcacagcaacatggatgagcctggaggacattatgctaagggaaataagtcatgcacasaaagataaatatcacatgttctcattcatacataggagttaaaaaaatgagctcatagaagtagagagtggaattgtggtgactagaggctgggaaggctggtggggatggggggaaataaggaggggctgcttaagggataccaaattatagctacataggaggaatatgttccactgcactgcagggtgaattcacaataatttattttatatttacaaaagg

SEQ ID NO: 394087 - DNA, 570 bp, Homo sapiens
cataagtagatctcaagctcaattgtgtctataactgtattaactcacacaatctttgctattcactcaacatgatatgtttttggtaaggcttagtgtgtctcaaagctattaatatagtgatatagccaattccattgagcaagcattgccttgcagtgcctaaaaatatactcagaattggtagtgagaggacattctgatactgaatcttgccaaacacactatattgcagaaaatgttactatattatccaaaaggtaaatgatcccttgccaatttattgtttccattataattttatattttaattacttaatattatatattgctttgttaagcatgcattctaaatattgcttctgttgttaatagactgctttaacaattatcatggtattaaataaaaagcarataattcatttgaaaagtatatatctgtaattgttcagaatttttttttttttagtttggcttatagagagacccatttactttcatggtcttactaagatgtgcatttctaaaatattttagaaatcatgcatctatacaactgggttaagcatt

SEQ ID NO: 394088 - DNA, 494 bp, Homo sapiens
aatttttgtctttttagtagagatggggtttcacaatgttggccgggatgctcttgatctcctgacctcatgatctgcctgcctcggcttcccaaagtgctgggattacaggcatgagccactgcacccggcccacacattatattcttataaatacatgtgtagtaaaatccaaaacaaacaaacaaamaaaaaaaaaacaaaattggattggaaagctaccattggggataagctcaaaggatatttcgacttcatataaaattttatgtatataaaatgtttaaagaagtatggcaaaatatcaacatttatgcctattgttccaatgtaagcctttaggcttatttgtgtgttcacattatgatttttacaacttcactgaagtataaatgaaatacggtaaatcacactaattcaaggtgtacaatctgctaaatgttggcctctgtatacacccatgaaccatctcaggaagcacgataatcaacatc

SEQ ID NO: 394089 - DNA, 438 bp, Homo sapiens
ctaaaaacctctaaacctaaaagtctcagcgctaaaaatccagcaaggtcaaacaaagatttcaggggcccaagctcatctattagcataatatgaacccagcccgtgtaacgtactgaaattgtgccatgccacttacacttaaacagacagaagttctctgctctgggtctctcaatatacattttttcagcaccctgcttcactttagaggtgaagttgtgggctcaatgttacccacrtcacttgcccattaaaaaagccaccatcgtcataataccataattttctgcatgaaattttggtctccttacccttgtagaggttcctctatgtacaagtttgcacaaaacactgcagggattataaaccatgaagaaaacatggtttcctttcaatgctctgcagagtttggccttttgagtaaccttttttttt

SEQ ID NO: 394090 - DNA, 538 bp, Homo sapiens
atactgaggacatacaatattatcagagcattcacacacttttggagctaagaggaactgcaaagaacacatcaactccttgttttcctcttggtgaactgaaattcaaacaggctatggaaacatatcccagtcgacatttcaaagcatattttcttcagctctattacttaacatctatctccatttcatagataccagattctttcaggtccacttgattttaaaaatgcttctgtaataactgtatgacataaggargtcccaaagattgctaagtaaattgtgagtatgtcattcaaaatttatagataaactgtggcacatttggaagcaatatttcatttcaaaaatgtctctatagtctacaattgtcctgaaagcaatggttaaacaacaaaatttgttttaaattatttttgtttaaaataataggcagcagtgatctttaaaattctccattgtaggagaaaaagaaaaggttaatagcctttcttaacaaaatgagatgcaacaatcaaatgattaaaaaaattct

SEQ ID NO: 394091 - DNA, 557 bp, Homo sapiens
ataaacaactatacaactacaaattagaaacctagaaaaaaatgataagcttctggacacataaaatctactaagattaaaccatgaagaaatggaaaatttcaagaaaccaatagtaagtaacaaaattgaagctataatgaaaagtctcctatcaaggaaaagcccaggacccagttgcttcactgctaaattctaccaaatgtttaaagaactaaaaccaattatactcaaactcttcaaaaaaaaattgtgtgtttttagaagctttattgaagtaaaattaatattgaaaaatgtactattaaagtrtacaatttgataagttttgacagatgtgtacacccatgaaacactatcacttcagtgaagaacatacccatcaaccccaaaagttttctcatgcttctttacgattcctctcttacctctcccaccccatgctttctgtcactataaatgtaataaacgtatattttctagagttttatataaatggaaacataaagtacgtactcctttttgtttggtttcttttattcaacattacttttttt

SEQ ID NO: 394092 - DNA, 557 bp, Homo sapiens
ataaacaactatacaactacaaattagaaacctagaaaaaaatgataagcttctggacacataaaatctactaagattaaaccatgaagaaatggaaaatttcaagaaaccaatagtaagtaacaaaattgaagctataatgaaaagtctcctatcaaggaaaagcccaggacccagttgcttcactgctaaattctaccaaatgtttaaagaactaaaaccaattatactcaaactcttcaaaaaaaaattgtgtgtttttagaagctttattgaagtaaaattaatattgaaaaatgtactattaaagtatacaatttrataagttttgacagatgtgtacacccatgaaacactatcacttcagtgaagaacatacccatcaaccccaaaagttttctcatgcttctttacgattcctctcttacctctcccaccccatgctttctgtcactataaatgtaataaacgtatattttctagagttttatataaatggaaacataaagtacgtactcctttttgtttggtttcttttattcaacattacttttttt

SEQ ID NO: 394093 - DNA, 630 bp, Homo sapiens
atagccatatacaatatgatagaagaataaggcctggagtttgatagatctgtagggtgactatagcatacaacgatctattgcatatttcaaaatagctaagaagagaataattcaaatctttctagcataaagaaaagacaaatctttaaggtgatggatatcacagtcacactgattagatctttacaaattayatgaatgtattgaattatcacatgtacccagaaaatatgcaaatctattatgtatcaatacaaaaaatttaaaaatagtttctttggagaatattttaaaattatgaaaaaaaccattagctagactagaaaaaaatagagaagacccacatacatttaaatcagaaatgaaaaaggagacataacaactgagaccacagaaatacaaaggatcattagggactattatgaacaactatatgccaacaaattggaacacctagagaaaatggatgaatttctcggcacatataacctaccaaaattgagccaagaagagctagaaaaccttaacagaccaatgatgaacaaagaggttgaagccataataaaaagtctcccctcaaaaaaagcccaaatggatttactgacaaattctaccgaacttttaaaa

SEQ ID NO: 394094 - DNA, 630 bp, Homo sapiens
atagccatatacaatatgatagaagaataaggcctggagtttgatagatctgtagggtgactatagcatacaacgatctattgcatatttcaaaatagctaagaagagaataattcaaatctttctagcataaagaaaagacaaatctttaaggtgatggatatcacagtcacactgattagatctttacaaattacatgaatgtattgaattatcacatgtacccagaaaatatgcaaatctattatgtatcaatacaaaaaatttaaaaatagtttctttggagaatattttaaaattatgaaaaaaaccattagctagactagaaraaaatagagaagacccacatacatttaaatcagaaatgaaaaaggagacataacaactgagaccacagaaatacaaaggatcattagggactattatgaacaactatatgccaacaaattggaacacctagagaaaatggatgaatttctcggcacatataacctaccaaaattgagccaagaagagctagaaaaccttaacagaccaatgatgaacaaagaggttgaagccataataaaaagtctcccctcaaaaaaagcccaaatggatttactgacaaattctaccgaacttttaaaa

SEQ ID NO: 394095 - DNA, 582 bp, Homo sapiens
acatgaacctacagattcacaaagttgaacaaacttcaaacaggataaaaagcaaagaaatgcatgcaaaggcacatcgtaattaaacttctgaaaattaaagacagagaaaaatcgtggcataactaaaaaaaagtggcaccttataaataagggaaagcaatgtgaatgagagtggatttatcatccaaagccttgaagggtagatggaagtggcacactatttttcaagtgctaaaagatagaaccatgaaccttaaatcctacatccagttaaaatgtagttttggaaatgcagaagaaatcaataaaattggccaacttctagtaagacagacaaaggagaaaccgaagacacaaattaccaaatatcagaaatgaagaayggatatcttgagagaccctccagacatcagaaggataatacagaaaaaacacaagcaattctacacttgtaagtttaactacttaaataaaacgggccaattcctcagaaaatacatgttactgcaagtcatccaataggaagcagattctttgagtagctctataactttaaaggctattacatttgtaatagaa

SEQ ID NO: 394096 - DNA, 634 bp, Homo sapiens
cagtacaattaggtaagagaaaaaaaatgaggttaaaacattggggaatgatgagataaaacagtaagtctttgaagattacatgatcatttactcagagaaaaccacctgaaaattggtaagtaacatagaaacttagtaaggtactagcatgcaaaattaacatgcaaaaatctatagttttcatatacaaaagtgctgatcaattaggagatattgataagagactcaattatagtaacaaaaaataaagtacatgggaaaaatgtaataaatgtacaagatctatttgaagaagttttgaaatatgatttaaagtataaacaagacttaaaaattagaaaacacaytattttgtgatagaaggattgcacatcattacacatcacaaaatggttaattttgcaaaattaatttataaacataatactatcgcaataaaaatacaactaggtttttctttttagaaattgagaagatgattctgtagtttacactgaattattttaaaaaattagtcaggaaatctccaaaaaaaaaatcagtgtgtacaggtataacataaggtcactggagcagggatctagttatagttcaaataattttgcatattcaataaatcacaaagttagac

SEQ ID NO: 394097 - DNA, 634 bp, Homo sapiens
cagtacaattaggtaagagaaaaaaaatgaggttaaaacattggggaatgatgagataaaacagtaagtctttgaagattacatgatcatttactcagagaaaaccacctgaaaattggtaagtaacatagaaacttagtaaggtactagcatgcaaaattaacatgcaaaaatctatagttttcatatacaaaagtgctgatcaattaggagatattgataagagactcaattatagtaacaaaaaataaagtacatgggaaaaatgtaataaatgtacaagatctatttgaagaagttttgaaatatgatttaaagtataaacaagacttaaaaattagaaaacacactattttgtgatagaaggattgcacatcattacacatcacaaaatggttaattttgcaaaattaatttataaacrtaatactatcgcaataaaaatacaactaggtttttctttttagaaattgagaagatgattctgtagtttacactgaattattttaaaaaattagtcaggaaatctccaaaaaaaaaatcagtgtgtacaggtataacataaggtcactggagcagggatctagttatagttcaaataattttgcatattcaataaatcacaaagttagac

SEQ ID NO: 394098 - DNA, 634 bp, Homo sapiens
cagtacaattaggtaagagaaaaaaaatgaggttaaaacattggggaatgatgagataaaacagtaagtctttgaagattacatgatcatttactcagagaaaaccacctgaaaattggtaagtaacatagaaacttagtaaggtactagcatgcaaaattaacatgcaaaaatctatagttttcatatacaaaagtgctgatcaattaggagatattgataagagactcaattatagtaacaaaaaataaagtacatgggaaaaatgtaataaatgtacaagatctatttgaagaagttttgaaatatgatttaaagtataaacaagacttaaaaattagaaaacacactattttgtgatagaaggattgcacatcattacacatcacaaaatggttaattttgcaaaattaatttataaacataatactatcgcaataaaaatrcaactaggtttttctttttagaaattgagaagatgattctgtagtttacactgaattattttaaaaaattagtcaggaaatctccaaaaaaaaaatcagtgtgtacaggtataacataaggtcactggagcagggatctagttatagttcaaataattttgcatattcaataaatcacaaagttagac

SEQ ID NO: 394099 - DNA, 483 bp, Homo sapiens
tcattcctgctagtttgagtgtaaatggatacactttggaaaccatttaccattgcctagtaaagctgcatatataaaaatgcatactttttaaatttaacttttattttaagttcaagggtacatgtgcaggtttgttacataggtaaacttgtgtcatgggagtctgttgtatagattctttcatcacccaggtattaagcccagtatccattagttatttttcctgatcctttccctcctcagagtcagaacacaagaattgttaagagtgtgctggagttggggaatgacccttctctgcgtaatcagacatgtaaaataaatttctaggaagaagtcttgtatttggacctgtaagatttgctaaagagtccaaattgtacatttttgactaattattaaattccatagcctgacacattgscacccaaatgatggttcaattaatatttgtcaaacagctttatactaatgatgcct

SEQ ID NO: 394100 - DNA, 583 bp, Homo sapiens
actcctaaattccagacttcatatatcccactctaagattaccatttcttatctttctagctcaatccctctgcaaccctaaccctgaaactttcgctataaaatcctgaaaatccaattatttcccttctcttccctgccccttactcctatttctgccctcctgcctgacccagtttaaagtcatggtcagtcggtacaatctctcccttgcactcaccctgaactcccttaacccacccttagtttgctgtgctttgcagatgctgcctagatcaagctctctgtcaaccgtatgctgaggcctcagcagcccaatgtagctggtgcagaacaagcgatttcaccacacttctctactccattcaattggccatgcacacagatggctattttatatatttcattytctcctcaaacctccaacacctcttctccagcctcattcacagctaatgttcttgctcctagtcattgaatagaaataacataaaggggacttcggaaggctgctaccaccacatctacacacccgtcagcatgtgaaacatcacacaggagcctcctgcaggagaggatgtac

SEQ ID NO: 394101 - DNA, 554 bp, Homo sapiens
tcttcaaactcaaaataagaaaatgaacaaccttattttgaaatggtcaaaagacctgaaaagagacctcccaaagatataaagatggcaggtaaacatacaaaaagatgctccgcattatatgccataaagaaatgccaatttaaaaaatgaggtatcatgacacatctattaaaatagccaaaattcagaacactaacaaccacaaatgctggagaagatatggagcaacaggaactctcatacactgctggtaagaatgacaaatggtgccatcactttggaagacagtttgcaagtttcttacaaaactaaacatactgttccctatcatccagcaatcacactccttggaatttgcccaaatgaattaaaaacttatgtccacatgaaaatctgcacacagatgtttacawcttcattcataattcccaaaacttggaaggaaccaagatgtccttcagtgggtgaatggataaataaactgtggtatatccaaataatggaatattattcagcactaaaaaacaaatgagctatcaagccatgaaaag

SEQ ID NO: 394102 - DNA, 536 bp, Homo sapiens
catttaacattttaagcttcccaaaagttctgtgcagctcacccttgatgaacatacccagatggaaccaggaagaattaatttgtgaaactgtgaccatctcatcagagactgcagccacccatgagtgttcaagtaaagcaaaatacatctgccaaagaagtgtaattaaaatattcacagcataactcctgagatcttatctttgatataagttagctccatttacacttagcagataataccaaattaaaacagagactgaattcagtgagcagagaaaacagcctagcccatggatttgttctcaatgcaytgcctcctggctttggtgattttgcaaagaactgaaagaaaaagcacaacattcagaatagaaagggaatttctgaagggagtttcataactgaaatttcagtttgaactggatgagggacgctgtttagttcagtgaccactgaggacctccggcaggcttcggggtgtacaaagacagccaggattcagcccgcctcagtggagggccccacagcaca

SEQ ID NO: 394103 - DNA, 536 bp, Homo sapiens
catttaacattttaagcttcccaaaagttctgtgcagctcacccttgatgaacatacccagatggaaccaggaagaattaatttgtgaaactgtgaccatctcatcagagactgcagccacccatgagtgttcaagtaaagcaaaatacatctgccaaagaagtgtaattaaaatattcacagcataactcctgagatcttatctttgatataagttagctccatttacacttagcagataataccaaattaaaacagagactgaattcagtgagcagagaaaacagcctagcccatggatttgttctcaatgcactgcctcctggctttggtgattttgcaaagaaytgaaagaaaaagcacaacattcagaatagaaagggaatttctgaagggagtttcataactgaaatttcagtttgaactggatgagggacgctgtttagttcagtgaccactgaggacctccggcaggcttcggggtgtacaaagacagccaggattcagcccgcctcagtggagggccccacagcaca

SEQ ID NO: 394104 - DNA, 615 bp, Homo sapiens
aatgaactggtttcctattagtttctgcttgtcaacaagttgtgtcatttactgataaatatccagccttttactaaggaataccgattttctcaagtctcagtgtgtggagggggtgggagtttggtggggaagcttttcaatttgagaacctttgccgttttttgtttcaatcgtgactaagatataaaagtccttggtcaccactgccagctgctacctgttcactgcctccctgacgggtaatgaggccatccrgagttttagtgattaaaatgttttattacttgtattcacatcatcattaagaaaaataacttctagtggatcaatatggcaaatgagtaaaccagaagatggcgttgaagattagcaattacatttaaaaacaaggtagtggtgtgaaggctcagagtttcacacaacgactgttgttctgaactaaaagcagaggatgtggatgagtgaggggagggtatgttgaaaatgactaaacccggtgcagaggacacgtatacgaaagtgcaaaaagctctcatttgccattttttgtcctcagcaaactcctctctggtatgtttgtgaacgtttgagggaaaggtaacactgattaaa

SEQ ID NO: 394105 - DNA, 534 bp, Homo sapiens
ctcaacaaattaaatatagaaagagtgtacctcaacacaataaaggccatatatgacaagcctacagctaacatcatactcaatggtgaaaatttgaaaagtcttcccctaagatcaataacaagacaaggatgcccactctcaccacttctattcaacatagtactgagagttcctgccagarcaattatgcaagaaaaaaaataaaggcatgcaaattgaaaaagaagaagttaaattgcccgtgtttgctgatgacatgatcttacacatagatcatgtaagtatagactccacacaaaaaactattagaactaataaacaaattcagtaaagtttcagaagagaaaatcaacatacagaaatcagtagtgtttctatacactaacagcaaactatccaaaaaaagaaatcaagaagaaatttcatttataatagctataaaaataaaacaaaatatttgggaataaatttaaccaaggaagtgaaagaattgtatgctaaaagctatagacatcaataaaagaaactgaa

SEQ ID NO: 394106 - DNA, 599 bp, Homo sapiens
ggctgatgagtgaatgtgaaggcctagggcattattgtatgctactgtaaactttataaacactgtgcacttaggatacactaaatttattaaaaatttttctttcttcaatcaataataagtgaacattagcttactgtatttttttttttactttataaactttaatttttttttagagatagggtcttgctctgttggccaggctggagtgcagtggcacaatcatagttcactacaacattgaactcctaggcttaagcaatcctcacacctcagcctcctgggtagctggtactgcagacrtacactactgcacccagctaatttttaaattttttgtagcgactgggttctgctatgttgaccaggctggtcttgaactcctgactcaagcaatcctcctgcctcagcctcccagcatgctgggattataggtgtgagctactgcacttggcctaaactctaatttttaaaatcttcttgactgttttataataacacttagtttgaaacacaaacacattgtacagctgtacaaaaatgttttctttctttacatccttattctataagcttttttctgtttaagtttttaa

SEQ ID NO: 394107 - DNA, 461 bp, Homo sapiens
tcactcaaaactaaaagccttaactaatatgtgaaataatttttctaagactaaacagataaatcgtaactatttttctatggtgacataataatttgtataaaaatttgatctataatttgtaaagcaagttctcatgtaataaccatttttattagctacatgttacaaattgtgataaaatatgatctggattaaaaattcaaaaatacattgaaggtaaagaataggcatgctatcttgcatacaagacatgaaaaaaataagggaaagaaaggaaaaaggaaaagttawtgaacatgaagtcctgtttttctgacccttccatatctactgccatattggcaggtacaaagcagatagctgcacagtgactactcctgtagtttttcttagaagaatgctactgtaaccttacccatagccttttaataacagttcaccccacttaactggtaact

SEQ ID NO: 394108 - DNA, 620 bp, Homo sapiens
ttgcagtgagcagagatcacaccattgcactccagcctgggtggcagagttagactctggcaaaaaaaaaagagagacagaaaacataaattaccaatatcataaatgaaagagaagtcaccacgactggtctcttggagattaaaaggataataaaggaatattatgaacaactctatgctcacgaatttgataatttggatgaaatggaccaattccttgaaatacacaaactaccaaaactcacacatggagaaataaatagcctaaatatctctatatatattaaatatattgattcaataactaattaccttctaaagaaatcatctggctcaggtggtggcaagattacttctaacaaatcttcaagaaagaaattgtgccaattctctacaatctstgttagtaaacaggcagagaaaacacatcctaactcattctgagtctagaattatcctaatacccaaatcagataaagatattataagaaagtaaaactagagaccaatatctctcctgagcactggcacaaaatctcaacaaaatgttagcaagacagaacaaacgatgcataaaataaattatacatcatgaacaaatgggatttattccatgtc

SEQ ID NO: 394109 - DNA, 606 bp, Homo sapiens
tgtgaacttgcctaaaatagagctaagtatgaaatggggaataaaataattaactgttgtgaaatttatcagcaagatacaataatgataatrcacacaggtattaaaagatagccagtcaatctcactcctcaaagacagaaataaacatttaaaaaaaagaatttccgtgaagaaagatttctaaaaatgaaagaaatgaaggagaaatgttatcctactaaacctatataagaatatcaaagttttttattttattcataaacgattcatgtacattgttaaaaacataaggggaaaggaagaaaaaaagaaggaaataaaagtcatacataatccccttacccagggctaaccattgttaaccttttgttacatacccttccagaatcacatattcattcatttattcaccctctttgttattgctcagtataagcctatataacttaaaatgcttaaataccatttgtaatcactttcttcatgatctatttcatgtcaataaacacatttctatatatcacagtttgtgatgcttgcagagtaatctttttatatgatgtaccatgatttctgaacaaatcaccattggttccattttga

SEQ ID NO: 394110 - DNA, 644 bp, Homo sapiens
ccaatctgcggaacagaaaagtactctgattcctgattcatgctacctgaattgtcctcattgcttacaaatgagaacagggaagaggaactgtattttatttaacagaatatatttcaagaagcattcaatttgatataattacctttttgcaatctattctccttctactgattaataatttggtgccattccaaactccattttcaggtagcaattataaaggttattatgaaatttagctttttaaaatttactacaaaatgcttggcttgtttggaagcagggccccattcttcgggagtgttctcatggaaagagacatagcaggctgaatggamaatgcagacttacccagccatgagagaaaggatattttaataatttatacatccaaccaaatttaatttaaagttgtttacctttaattccatactgtgcaaactaaataccacctttgttattttttaaagtatattttaagtcagggaaggccagttaaaaacacaaaaaagggcaatgtagcaatcaaagattgctaagaaactgtatatttgagcccaaggatacatgacctccgctatctaaagcttcgtgttcatgaggtttaaaaaaacaagaacaaagcttaggtaagaggtaga

SEQ ID NO: 394111 - DNA, 512 bp, Homo sapiens
tagtaccaactactcaggaagctgaggtggaaggatcgcttgagcccaggagccgaggagtttgatgttgcagtgagccattgcaccattgtactccagtctgagtgagacagtgataaactgtccaaaaaaaaaaaaaaaaactctaaatyctttggaaattttttttttagaaaaaattctaaatattatttgctcaaccaacttcatccattattctactttttatgtgcatgtaataacatttatggctattatcataaaatggaaatgccggaaatgcatcaaattatattgcttccctattcaaaatttgtactattttctcatcacatcagggtaaaattcatagtctcccccatggtttacaatgaactatgtgattaagctcctggcctcttctctttcttaacctcctgattttcttcaagttcattgcacttcagctacgtagagtgcttctgccttttcccttgatgttatcagtacctgacatacatttttctcagata

SEQ ID NO: 394112 - DNA, 544 bp, Homo sapiens
catatacataagcacacacatataggaggaattttaagatatgtgtatgtaagatacatgtctatctatatataaatatatatatacatataatttatatataaatattttatatatatatatatatatatttagtagaaacagggttttgctatgttggccaggctggtctcaaacttctgacctcaggtgacccacctcctcaacctcccaaagtgctgggattacaagcgtgagcaccaggcccagccatatgtgtgtgtgtgtgtgtgtatgtttaattttctttttttattctctaccttagcctctgtgtttgcaatcccagagttagttacactgagcctgagcttcccctcagatactctccacttttacaggttgctcacatttgtaacagttaactcttcaagcaaacttcatgtctagatctctcaattatctggtatctttttcagcatttctctccagcaatgtcctraaagtatcttcctttgctctctgctgaaatttattttccaggatctggcattccttagctctt

SEQ ID NO: 394113 - DNA, 622 bp, Homo sapiens
tatgtttcaggatcaatgccataaaagccacttttctctactgaaattgataaatacgagatgtatacttaatacaaatttatttttcactattgtagaaggaaacgaaaggagttayattataataatgtaaagaatctgtataaaatgtgcaaacttttagcttttcaagccgcaaatatactgctatactaatatcagggtttattgtggttccttagcagagggcaaattgtttctttgccttaaaatgcacagctataacaggtacaataaccatcggtggagtaaaattttacttatacaattaaaacaccaataaaagatatctttgggtggacttaggtagaattatgccaatgattatataattttatataaataaatcaaaacatgaatatagatacatatccacaaaattttcgctctaaaattatatttttacagtaaaggtttttttggactaaaacttggctgacaagctttcaatccatatgagaaaggaattttaaaattaggtataaaaataaaacattgtttagaaaagcatttaaaataaaagagctttgtaattttagaatgctttcttctattgtttttgaagaaaattctaccccataaa

SEQ ID NO: 394114 - DNA, 622 bp, Homo sapiens
tatgtttcaggatcaatgccataaaagccacttttctctactgaaattgataaatacgagatgtatacttaatacaaatttatttttcactattgtagaaggaaacgaaaggagttatattataataatgtaaagaatctgtataaaatgtgcaaacttttagcttttcaagccgcaaatatactgctatactaatatcagggtttattgtggttccttagcagagggcaaattgtttctttgccttaaaatgcacagctataacaggtacaataaccatcggtggagtaaaattttacttatacaattaaaacaccaataaaagatatctttgggtggacttagktagaattatgccaatgattatataattttatataaataaatcaaaacatgaatatagatacatatccacaaaattttcgctctaaaattatatttttacagtaaaggtttttttggactaaaacttggctgacaagctttcaatccatatgagaaaggaattttaaaattaggtataaaaataaaacattgtttagaaaagcatttaaaataaaagagctttgtaattttagaatgctttcttctattgtttttgaagaaaattctaccccataaa

SEQ ID NO: 394115 - DNA, 566 bp, Homo sapiens
gcaaattgtttctttgccttaaaatgcacagctataacaggtacaataaccatcggtggagtaaaattttacttatacaattaaaacaccaataaaagatatctttgggtggacttaggtagaattatgccaatgattatataattttatataaataaatcaaaacatgaatatagatacatatccacaaaattttcgctctaaaattatatttttacagtaaaggtttttttggactaaaacttggctgacaagctttcaatccatatgagaaaggaattttaaaattaggtataaaaataaaacattgtttagaaaagcatttaaaataaaagagctttgtaattttagaatgctttcttctattgtttttgaagaaaattctaccccataaaatcatggttcttaattcaaaatgcggtttctctgtaagcaaatttgaakaggtggtaaggactattatttaggtaatcaaaataaataaacttgttcaaaataaaagtggttttattggttcaaattttttagagtgaatacataaattaattaaattagttacaaatttg

SEQ ID NO: 394116 - DNA, 583 bp, Homo sapiens
tacacttaagctaggagagaaaggaagaggggactgaatatgttattctatgagaaaccccctccagtgataacaaaccctctcttacaatggtggtattaatccactcaagaagccagtgccctcgtgactcaaccaccttccattaggctatacctcccaacactaccacattgggggtcaagtttccaacatatgaactttggggacacattcaaaccatagcattttataaggtttatagccaaatatctgcaatacttgtgtcttaccaagacttctagtgtgctagtcttttttgctctgcattatgtctttaatatagcagaccacttgatgttctgtgggatgtttcaagtatccagatatgataagattctattacaaaagaaggaaagaaggttaaaatagcctaaagaaaaattttggaatacacacagtccttcatttcaagggaaggtgaaggattgctgatcctcttctaacagcatagaaaaatgcattcatcatatcagtagccacataccatgtacttgagaaggtattaatcggytgtagcaaggataccatatttagcacagag

SEQ ID NO: 394117 - DNA, 597 bp, Homo sapiens
aacttgggcaaggtagttttcttctgtggaggaaatcctcaaagaagtttaatatctgaaagccttcagggtctgtctgaaggctttttcgtcaacactaccaagaggtgggagagtaactcccctttctcttgtgattgtggatctgattggtacattagagcatctactacagttggtactttctttgttttctatcgaacttcaggaatctggtgtctgtttctctactatactttactaaaagtacaattgcagtaattttttgcagtaaatgcattaaataattttccttccaaatcttagttgattacattattttcttttcttgagacatactctcactctgtgttgtggccttgsgtcactgcaacctccacctcccaggttcaagcgattctcctggctcagcctcccgagtagctgggattacaggcacgtgccatcacacccagctactatttgtatttttagtagagacagggttttgttatgttggccaggctggtcttgaactcctgacctcaagtgattcactggcctcggctcccagagtgctaggattacaggcatgagccactgcgcctggcctgatta

SEQ ID NO: 394118 - DNA, 597 bp, Homo sapiens
aacttgggcaaggtagttttcttctgtggaggaaatcctcaaagaagtttaatatctgaaagccttcagggtctgtctgaaggctttttcgtcaacactaccaagaggtgggagagtaactcccctttctcttgtgattgtggatctgattggtacattagagcatctactacagttggtactttctttgttttctatcgaacttcaggaatctggtgtctgtttctctactatactttactaaaagtacaattgcagtaattttttgcagtaaatgcattaaataattttccttccaaatcttagttgattacattattttcttttcttgagacatactctcactctgtgttgtggccttgcstcactgcaacctccacctcccaggttcaagcgattctcctggctcagcctcccgagtagctgggattacaggcacgtgccatcacacccagctactatttgtatttttagtagagacagggttttgttatgttggccaggctggtcttgaactcctgacctcaagtgattcactggcctcggctcccagagtgctaggattacaggcatgagccactgcgcctggcctgatta

SEQ ID NO: 394119 - DNA, 502 bp, Homo sapiens
tatttgtatttttagtagagacagggttttgttatgttggccaggctggtcttgaactcctgacctcaagtgattcactggcctcggctcccagagtgctaggattacaggcatgagccactgcgcctggcctgattacattattatcatttattgagtttgctggttaatacactattctctgacttttgttatatttcatagtattatatatttgtttgggggtttttcttcctatacccattatttttatttctgaatattatttccattgtatgtatggaccatggtttgtccatttacctaattaaatggagtcttgtttgcttctaagtyttggtaattatctgccataaacaatcacatgttgttcttttctttgtttctgttaacataagattttagtcagttctacatctacctagtgtgcaattcttatttcacagggtaagaatgtgtttagttttgttagaaattatcagtcttctaaaagtgtctgaat

SEQ ID NO: 394120 - DNA, 559 bp, Homo sapiens
gagtgtattagaaaggttactttcaaaaattttaaatctcaattgtttccatatgtttaatctaacagttactgataggaggatgttgaagagtgcacctaaaataatggatttatgtatttcttctaatagttttactaggctttgcttcmttgtattttgattttccactattagatttttaaatatttaggattgttaggatttcttgaagaactgacttctttattatcgggtaacacctctcttttttataattttcattttttttcctgaaatctgcttaatttgagtaatatatctactctacctttctcttgattagtgtttgcatagtaggtatttcatctctgtacttttaacctatcagagtctttatatttaaagtggatttcttgtagaaaacacatagttggttactttgtttaaaccactctgaaaacctctgtcttttaattgggatatttagacaatttgaaattaaagtaattattgatgcaattattaattcatttgggataatatctaccatggtatgtaattgttttatatatgttcc

SEQ ID NO: 394121 - DNA, 499 bp, Homo sapiens
attcagtataatactaactgagggtctgtcatatatggcttttattatgttgaggtgtgttccttctatatccagttttttgygcttgtattatgaacagatgttgaattttatcaaatgcttttccagcatcagttgaaatgattgtatagtttttgttcttcattctcttgatatgatgtgtcacgtcagttgacttgcatatattgaacaatccttctcgctgtattaaatcccatgttgtcacaatgaataatctttttaatgtattgtcgaaatgtttaattagttttctagtattttgttgaagatatttgcattaatattcatcagatatattggccagtaattttctttctttgatacgtttttgtctgtgttttttgttgttgttgttgtttgttgttattttaaatcagggtaatactggcctagtagaataagtctgaatgtattcgcttcttctctatttttccaagcagtttgagtgggattgata

SEQ ID NO: 394122 - DNA, 499 bp, Homo sapiens
attcagtataatactaactgagggtctgtcatatatggcttttattatgttgaggtgtgttccttctatatccagttttttgtgcttgtattatgaacagatgttgaattttatcaaatgcttttccagcatcagttgaaatgattgtatagtttttgttcttcattctcttgatatgatgtgtcacgtcagttgacttgcatataktgaacaatccttctcgctgtattaaatcccatgttgtcacaatgaataatctttttaatgtattgtcgaaatgtttaattagttttctagtattttgttgaagatatttgcattaatattcatcagatatattggccagtaattttctttctttgatacgtttttgtctgtgttttttgttgttgttgttgtttgttgttattttaaatcagggtaatactggcctagtagaataagtctgaatgtattcgcttcttctctatttttccaagcagtttgagtgggattgata

SEQ ID NO: 394123 - DNA, 499 bp, Homo sapiens
attcagtataatactaactgagggtctgtcatatatggcttttattatgttgaggtgtgttccttctatatccagttttttgtgcttgtattatgaacagatgttgaattttatcaaatgcttttccagcatcagttgaaatgattgtatagtttttgttcttcattctcttgatatgatgtgtcacgtcagttgacttgcatatattgaacaatccttctcrctgtattaaatcccatgttgtcacaatgaataatctttttaatgtattgtcgaaatgtttaattagttttctagtattttgttgaagatatttgcattaatattcatcagatatattggccagtaattttctttctttgatacgtttttgtctgtgttttttgttgttgttgttgtttgttgttattttaaatcagggtaatactggcctagtagaataagtctgaatgtattcgcttcttctctatttttccaagcagtttgagtgggattgata

SEQ ID NO: 394124 - DNA, 596 bp, Homo sapiens
tgatagtgatccataaaactttgggtaaaattgcaaatgaatcttcaagtgaaataagatacaaatatttgagtgtgaaattgaaacctrtagtgaaaaggactttgacgtaaaggaattttttttgttgttggtacgagaacaccaaaccaaaccaaacctgaacaaacaacaaaaaacgagactatacaacactggatctatattcaaacatgttaccccattattctgttatattaatgctctttaatacagtcccagaacattgaggccagtaagtgtagaactcaagtagactgaaaaaaaaaaatgtctgtaccctttactagtccttttctaaaattaactctgaatactcagatttaactcatatataatacttctggaaacatttgttttttttttttttgagactatttgttaggcaaaggattaggtatgttagatttcatagaataatatcaaaataataaaacagcacaaggaaaatcacataatttaaatatgttaacatgaaattaaaactttttattagttgctatctcatttacaactaaagatgcttttattagttgctatctcatttacagttaaag

SEQ ID NO: 394125 - DNA, 596 bp, Homo sapiens
tgatagtgatccataaaactttgggtaaaattgcaaatgaatcttcaagtgaaataagatacaaatatttgagtgtgaaattgaaacctgtagtgaaaaggactttgacgtaaaggaattttttttgttgttggtacgagaacaccaaaccaaaccaaacctgaacaaacaacaaaaaacgagactatacaacactggatctatattcaaacatgttaccccattattctgttatattaatgctctttaatayagtcccagaacattgaggccagtaagtgtagaactcaagtagactgaaaaaaaaaaatgtctgtaccctttactagtccttttctaaaattaactctgaatactcagatttaactcatatataatacttctggaaacatttgttttttttttttttgagactatttgttaggcaaaggattaggtatgttagatttcatagaataatatcaaaataataaaacagcacaaggaaaatcacataatttaaatatgttaacatgaaattaaaactttttattagttgctatctcatttacaactaaagatgcttttattagttgctatctcatttacagttaaag

SEQ ID NO: 394126 - DNA, 569 bp, Homo sapiens
tttgtggttttcctgttgtcctagactttctggctccaggagaccttctgtgggtcacaggggtcacgatggcttgaccatggtgcagcctgctcagaggaccttagamtgtctttcgtttatagtgccctcagccacaaaactacccatgggtgaagaaactataccacttcatttcttccacaattggaagttttccctcatctgttgtctgatattattttctaaaagctcagtttatagatctctgtatttcatttacttttcatcccacacattggcagaataatattcaatccaagattccaagaaaagtgcataaaaatttctgaagttttttcaaaacctccttctattccagttctagactacatctgttcccaatgtttctatctccctgaaatctgatctctgtctccttgactccacgaaactgtcgtcttctgcttgggcatcctctttttgcactttagtctggaaactgactatatagaagactagaagactatggccttcagttaatatatttcctatctctcaggaatcaacattcactactgtctgttttc

SEQ ID NO: 394127 - DNA, 570 bp, Homo sapiens
atttgcattactgtaagtgaagctgaatttccttttttatggtaaagaawatttgcattttttcccctatagaccctcttcacattatctacctgttttcctatcatgttttaggcttttcattttccatttttagaagttctttatatattaacaacatttacagttaatcttcactgagaattggaaataaaatttgcttacggtgtcctcagatctccataagttttttaggttaaagtcaaatttatccatctttctgttgttgagtctagattttaaattattagaaaaaatttacctcattcccaagttttaattttatccgtgttttatttcttgaatattttagatttttagatgtaaatctttgatcaatttgaataatttttgtgtagattctgagaaaagggtccaattacatattttttctgttaaaattacttgtattgaattttctttaataagaaatttagtaagttaatttatcctacaaattaaagaggctaattacattgcatattatatttccacatatgacttggtttgtatgttattttatttgtactg

SEQ ID NO: 394128 - DNA, 595 bp, Homo sapiens
taaaacctcctgcaatatgaagtatgcatttatgaatgktgaatgacattttatttaatgcaacccacaaaactaaatgcaactatatcttgagcttttatacaacttggcacaacttcaagccagggagagcactagtcgttgatgatgctcattcttctacagtttagaaaagatgcaaaaaataaactcaaacgattttaaagagggctagacttgtaaaaacacttttattacgagagaaaaggtcactgattttctaaacagagactttgcactacataaaagagaattcattttattaaatgaatgatgagccaagaaggtcacagtagcttgaaaagaacaatagcaggtcatgagcttataaatctttgaagaactttctttcatttaagaggctcaggattattattcgatttggtaaagtgcaagaaacaataggaggtcattcacactgttgcaaggtatcaattaacactttacaaatattgagtgtaaattttacctagatttgacagtgtgtaaaaaaaaaggacaaagtatataatttacatggttttgcaaaacacagcacagaagcaggggattgatg

SEQ ID NO: 394129 - DNA, 618 bp, Homo sapiens
agcttaaagaagtttttaaaactaaaataaaaacatgttatgcagcaacatgaaagcataaatcccactggtaaaggtaaatgtatagaaaaatacacattgatgttaaaattctaatggtggagcataaattattttaaatctattatgaaagttaaaaagtaataatttgttaatgaatacacaatataataaggaasaaattctgactgtaagaacacattgggtgtgaaggggagtaaaactatagagtttctataagagattaaagttaaattgttttaaaattaaaatagaaggctatagctacaagatgctttcacaggcataaagctcaccagaaagaaaaagcattaatatacaaacaacagataaatagaaatgaatcaaagcaaaataattacaaaattatcaaatacaaaaacagagaggaagaaacaaatgactgcacaacagacaaaaattcccaaaatggtaatagtaacccctcacttaccaataattactttacatatagatagaaaaaattaccaataaaaagatacagagtgcataaaacaataatatccaactatggttatatacacgagacttgctttatatttaaagaaatgtata

SEQ ID NO: 394130 - DNA, 573 bp, Homo sapiens
ggctctcactgtttgccatccatttaggtcattgtttattttcagtatatatgtataattgtaccagaatagttcatcgttaccttcatgggaaacaagttattcagctccatcacatcacatcagaggtgcatgttatcaacagtacttacatttgtgtaacaagaaccttccttgtgtgctgttcattttttctttcttcttgtagactactcatttcaaaaattacttaagtcagcrttttttattcttgaccttacacaaaaattatttcatacatttgtaatagttattttttcttgtcacagtcttcattccttcctgggagtcctcaaacctccccaatattttttttgtaatttgcatatattaagtttccatctttatgctttctactagttttgaaaaatgcataagatcatgtattcaacaaaatatcacacagaataactttgctaccctaaaaatactctgtgctttactatttaattctcatgctgtgtacctaccagagcttctgggaatcaatgactttttattgtctctatagttttgtcttttcccaaacatcat

SEQ ID NO: 394131 - DNA, 468 bp, Homo sapiens
tactttagcattcttttattctctgtcaatcactatcttccataactgccaaactcatttatttcatccacagtgctttgaaaatttaatgtgcttataatcaaatttgggatcaygtggaatcatgttaaaattcacagtgattcacaaggtgtgatatggagcctgaatttcacatttatagtaagttccaagtgtgtcttctacacttgtgactacaaaactgggccttgaatgaactgcatcagaatcacctgagagctggttagaaatatggaatctcaggttctacctgagatgtactggaatagaattgcatttaagaagattcactaaagcttgagaataggcttaaaaacaagaacaaggtgatgttgatcttgtgggggccataggtttttggccccatatgggtttcctaaaaattattgacataaggcagattgattaataggagaaaagacatac

SEQ ID NO: 394132 - DNA, 468 bp, Homo sapiens
tactttagcattcttttattctctgtcaatcactatcttccataactgccaaactcatttatttcatccacagtgctttgaaaatttaatgtgcttataatcaaatttgggatcacgtggaatcatgttaaaattcacagtgattcacaaggtgtgatatggagcctgaatttcacatttatagtaagttccaagtgtgtcttctacayttgtgactacaaaactgggccttgaatgaactgcatcagaatcacctgagagctggttagaaatatggaatctcaggttctacctgagatgtactggaatagaattgcatttaagaagattcactaaagcttgagaataggcttaaaaacaagaacaaggtgatgttgatcttgtgggggccataggtttttggccccatatgggtttcctaaaaattattgacataaggcagattgattaataggagaaaagacatac

SEQ ID NO: 394133 - DNA, 591 bp, Homo sapiens
taattgtacaaatttcatcagattttagacgagaaatttgtaatattaggggatgttttaattagctccagatggttaaattcaactgttcctaatatggaaagccagaatgaaatcttctaactcacaattctataaacaaacaaagtagttgaaaaaaaaacaaaacaacaatgtaagttgaaaaaaatcacttaatattttaaaattacttaaaaataattgtgtctcaataattcggatcagttatctctactattaaggatgattcgttcctgattgttagtaaagatttacgctaaatagcctgttaataaaaactcagtttagtgaattcatgagttactctaaatcaatttctatgtccacctttgaaattccaaattttcccccataactgttatgaatccagctgttagctggatcatkctgaggattcatttgtgaaatcttctatgctattataagattaaaattgggttcaaaaactacctaccaggtatgatgcttattacctgggtggcaaaatcatctgtaaaccaaacccccataacacacaatttacctatataacaaacatgcacgtgtacc

SEQ ID NO: 394134 - DNA, 524 bp, Homo sapiens
gtttcttagcaatgaattccttcactttaatgtttttcttaaaaatttattgctcttcattcaagtttgaagattaattyactgggtaaagattaattttgtggttttcttctttccacactttaaatacttaagttcattttttttttttctggcatggtttctgatgagagtccactataatatcatttctctatagaaaatatggagttttttatctattttatttctggattttctctatgtctttgtagtttctttttgaagtttgcgttagcagcagcgaatttgtagggttctgcagcaacacaattcttgcctcctcagaggaaaaaactattcctaggagcataaggcagagtgagagacacaggtttttgagcaggagtgagagtttattaaaaaattttagagcaggaacgaaaggaagtaaagtgcacttggaagagggccaagtgagcaacttgagaaaaccaagtgtgctgttcagcctttgacttggcggtttttatacattgcaatgg

SEQ ID NO: 394135 - DNA, 524 bp, Homo sapiens
gtttcttagcaatgaattccttcactttaatgtttttcttaaaaatttattgctcttcattcaagtttgaagattaattcactgggtaaagattaattttgtggttttcttctttccacactttaaatacttaagttcattttttttttttctggcatggtttctgatgagagtccactataatatcatttctctatagaaaatatggagttttttatctattttatttctggattttctctatgtctttgtagtttctttttraagtttgcgttagcagcagcgaatttgtagggttctgcagcaacacaattcttgcctcctcagaggaaaaaactattcctaggagcataaggcagagtgagagacacaggtttttgagcaggagtgagagtttattaaaaaattttagagcaggaacgaaaggaagtaaagtgcacttggaagagggccaagtgagcaacttgagaaaaccaagtgtgctgttcagcctttgacttggcggtttttatacattgcaatgg

SEQ ID NO: 394136 - DNA, 524 bp, Homo sapiens
gtttcttagcaatgaattccttcactttaatgtttttcttaaaaatttattgctcttcattcaagtttgaagattaattcactgggtaaagattaattttgtggttttcttctttccacactttaaatacttaagttcattttttttttttctggcatggtttctgatgagagtccactataatatcatttctctatagaaaatatggagttttttatctattttatttctggattttctctatgtctttgtagtttctttttgaagtttgcgttagcagcagcgaatttgtagggttctgcagcaacacaattcttgcctcctcagaggaaaaaaytattcctaggagcataaggcagagtgagagacacaggtttttgagcaggagtgagagtttattaaaaaattttagagcaggaacgaaaggaagtaaagtgcacttggaagagggccaagtgagcaacttgagaaaaccaagtgtgctgttcagcctttgacttggcggtttttatacattgcaatgg

SEQ ID NO: 394137 - DNA, 524 bp, Homo sapiens
gtttcttagcaatgaattccttcactttaatgtttttcttaaaaatttattgctcttcattcaagtttgaagattaattcactgggtaaagattaattttgtggttttcttctttccacactttaaatacttaagttcattttttttttttctggcatggtttctgatgagagtccactataatatcatttctctatagaaaatatggagttttttatctattttatttctggattttctctatgtctttgtagtttctttttgaagtttgcgttagcagcagcgaatttgtagggttctgcagcaacacaattcttgcctcctcagaggaaaaaactattcctaggagcataaggcagagtgagagacacaggtttttgagcaggagtgagagtttattaaaaaattttagagcaggaacgaaaggaagtaaagtgcacttggaagagggccaagtgagcaacttgagaaaaycaagtgtgctgttcagcctttgacttggcggtttttatacattgcaatgg

SEQ ID NO: 394138 - DNA, 586 bp, Homo sapiens
ctaaactcatttaattctctccttttgtccacctctgctcccaaagttactttgtgtctataaataatatagtcacaactcaaacattagaaaagtaacccaacattagctacgcaaatctatctaaattaaatcttatagaagacaaaaatatggcatttaacaaggttttttggggaaacgtcagtctaaagtactaaataataaaagtcttcatctttgataactttgcatatgtaattttttattaaaatttcattatttttaactcatatttatcgatagacttgctgtgctattactagttttactcagaaggtggactcaatatgttgtttggctcttactaaagcatacttcttcttcactcctttttaatggctcctccctactttatagttgatttattttgctcatgtggtagattaagaatttcataaagaaggaagtcatttctagttaattgaaatcattccaagtacatctgttttcaaagaaattttaccaaacaggcccttttccacacaggaacaatggaggaaaartaacaactgctgcctctaaagaacaagaaaattgcaaggtt

SEQ ID NO: 394139 - DNA, 561 bp, Homo sapiens
aacctgaatttctcattccaataactgtaagaagtaaatttattttctttacaaattatgcagtttcaggtattctgctataagcaaagaaaatggactaaaacagatggcataataaggtaggctagtttctgtgagacacagaacccctctgatggacaactttggcttaaagacttggcattgcagaaaatttcttagaaatgcactgcagtctgagtcttccatgcaaccttttttcttcttcttttctcttgtcaatgaacagacctgtaacaggatctaatggctctcacagcattcattaygtacctccctattttccctcactagcatttcatccaaaaaaatcttgtacatataatcctgtcttgtcatctacttttgggaggacccagaaaaacacaagtggatatgtgaaaacagatattaagattggaatttgggaccagctcacttattagacacaggcaaaaagaacaccatttaagttgttaggtgatgcaggggagtctcttgcctaaagtagggccccagttgctaaaaattttaccaaaggtg

SEQ ID NO: 394140 - DNA, 590 bp, Homo sapiens
gtgcatatcatccagtagcgtcctgagaaagcatgcacaggagatcattattttgagaatgagcatatgtgaaaaagcctttattctccccctagtactttatggcctgttaagcggaggtgtgtcaaccattgggcttttctatggggtgttctggctgagttcattaggcaacctccaaatgttaatattaatattatcatggtattcttctttctccacttcttcctcctcccttctccctttcctttccttctccctctcctctcctttcccctcctccccagcacccctcctcatcattctcctcctcctattttccctcccctcctccttctcattgcttagtccattgtctagagcaagaaccctcccagcatagtgactcatgcctataatcccagcacattgggaggccaaggtgggaaaatcacttgaggccaggagttagagaccagcctgggccacatggcaagaccccatctctacaaaaaataaaataaatacccatgtggtggcatgtacctataatcccagctacttggkaggcttaggtgggaagattgcttgagccccaggagatagaagtt

SEQ ID NO: 394141 - DNA, 575 bp, Homo sapiens
tgttctctgatcacaatagaatcaaactagtaatcaataacagaaagataacaggaaaatctttgaatacttgcaaactaagtaccatacttctaaataatccataaatcaaaagaatatctcaaagaaaacrtaaaaatacattcagctgactgtaaacaaacatacaagatgtcaaaagttgtggaacacagctaaactggtgccaagaaggaaattttcagcaataaatgcacacattagaaaagaggagaagattcaaatcagtaatctaagatcccacctcgaaaacagcaaattaaaactcaaagcaaggagaaaagaaatcataaagataaaagttaaaaatcaatgagtgaaaacagaaaaacaacacagaaaaatcaatgaaaaaaagaagctggttctttgaaaacatcaatgaaattgacaaacctgtagcaagactgaaaaaaataagatacaaattaccaatattaggaatggaacaggggctatcactacaggtcctgcagatgccaaaggatagtacagaactactatgaacaactatacatgtataaatttgcaaactt

SEQ ID NO: 394142 - DNA, 615 bp, Homo sapiens
tgtgttctctgatcacaatagaatcaaactagtaatcaataacagaaagataacaggaaaatctttgaatacttgcaaactaagtaccatacttctaaataatccataaatcaaaagaatatctcaaagaaaacgtaaaaatacattcagctgamtgtaaacaaacatacaagatgtcaaaagttgtggaacacagctaaactggtgccaagaaggaaattttcagcaataaatgcacacattagaaaagaggagaagattcaaatcagtaatctaagatcccacctcgaaaacagcaaattaaaactcaaagcaaggagaaaagaaatcataaagataaaagttaaaaatcaatgagtgaaaacagaaaaacaacacagaaaaatcaatgaaaaaaagaagctggttctttgaaaacatcaatgaaattgacaaacctgtagcaagactgaaaaaaataagatacaaattaccaatattaggaatggaacaggggctatcactacaggtcctgcagatgccaaaggatagtacagaactactatgaacaactatacatgtataaatttgcaaacttagataaaatggaacaattcctcaaaaacataaattgtc

SEQ ID NO: 394143 - DNA, 575 bp, Homo sapiens
accctgctatcaaaaccaaaggcagtatacacacacacacacacacacacacacacacacgcatgcatgcacacacacacaccactacagatcaatatccttcatgaacatagatgtaaaaattcttaataaaatattagcacatataattcagcaatatataaaaataactacacaccatgaccaaacaaggtttattcccggtatgcaaggctggttctgcattaaaaaaccaatcaatgtaatccatcctgtaagcaggctaaagaagaagatcacatgatcatataaattgattacagaaaaagcatttgaaaaaattcaactgccatttatggtgaaaactctcagaaaaaaataggaatagagaataggaatagagagtttcctgttcacattggggaactgggtaaggatttccactctcactacttctattcaacatgatatggaagttgaagccagtgcaataaggaaataaaaggcattcatacagatcagaaggaaagaaataaaactgccccattcgaagatgacawgactgtttatgtagaatatctcaaggaatataacaa

SEQ ID NO: 394144 - DNA, 548 bp, Homo sapiens
aatctattcgggccttcaatgaattggatgaggcccacccacattggggatggccatctgctttactcagtctacctattcaagtgttaatctcatccagaaacaccctcacagacacactcagcagtaatattyagccaaatatctggctatttcatgacccatacaagttgatatatgcagataaccatcacagtatccaccttgaaaatgcacatcccttattattgaaggggagtgggaggcagaggaaatcctaaacaccattgcaaatctatatattctagagagactatgaaagcaatgtagcttggcatggtggaaggagcatggtctttgggatcagaagatttggttataatttggctttgccatttattggctgtgttatcttgaaaattgcttagccttactgagttttagtgatacagaacatctccagtgacatgcaaatttataaaacatcccattctattttgggggtctccattggaaagctctttcttaaataatggcatttccctatattaggtttggggtgcatacat

SEQ ID NO: 394145 - DNA, 548 bp, Homo sapiens
aatctattcgggccttcaatgaattggatgaggcccacccacattggggatggccatctgctttactcagtctacctattcaagtgttaatctcatccagaaacaccctcacagacacactcagcagtaatattcagccaaatatctggctatttcatgacccatacaagttgatatatgcagataaccatcacmgtatccaccttgaaaatgcacatcccttattattgaaggggagtgggaggcagaggaaatcctaaacaccattgcaaatctatatattctagagagactatgaaagcaatgtagcttggcatggtggaaggagcatggtctttgggatcagaagatttggttataatttggctttgccatttattggctgtgttatcttgaaaattgcttagccttactgagttttagtgatacagaacatctccagtgacatgcaaatttataaaacatcccattctattttgggggtctccattggaaagctctttcttaaataatggcatttccctatattaggtttggggtgcatacat

SEQ ID NO: 394146 - DNA, 548 bp, Homo sapiens
aatctattcgggccttcaatgaattggatgaggcccacccacattggggatggccatctgctttactcagtctacctattcaagtgttaatctcatccagaaacaccctcacagacacactcagcagtaatattcagccaaatatctggctatttcatgacccatacaagttgatatatgcagataaccatcacagtatccaccttgaaaatgcacatcycttattattgaaggggagtgggaggcagaggaaatcctaaacaccattgcaaatctatatattctagagagactatgaaagcaatgtagcttggcatggtggaaggagcatggtctttgggatcagaagatttggttataatttggctttgccatttattggctgtgttatcttgaaaattgcttagccttactgagttttagtgatacagaacatctccagtgacatgcaaatttataaaacatcccattctattttgggggtctccattggaaagctctttcttaaataatggcatttccctatattaggtttggggtgcatacat

SEQ ID NO: 394147 - DNA, 548 bp, Homo sapiens
aatctattcgggccttcaatgaattggatgaggcccacccacattggggatggccatctgctttactcagtctacctattcaagtgttaatctcatccagaaacaccctcacagacacactcagcagtaatattcagccaaatatctggctatttcatgacccatacaagttgatatatgcagataaccatcacagtatccaccttgaaaatgcacatcccttattattgaaggggagtgggaggcagaggaaatcctaaacaccattgcaaatctatatattctagagagactaygaaagcaatgtagcttggcatggtggaaggagcatggtctttgggatcagaagatttggttataatttggctttgccatttattggctgtgttatcttgaaaattgcttagccttactgagttttagtgatacagaacatctccagtgacatgcaaatttataaaacatcccattctattttgggggtctccattggaaagctctttcttaaataatggcatttccctatattaggtttggggtgcatacat

SEQ ID NO: 394148 - DNA, 516 bp, Homo sapiens
ttgattgactactggcaatagtttttggcacaaccctgggatttgctgcccaartgttgtttcagtcttgtcccaggagagctcagttctcaggctggctccacagcctaccatgttagcaagcccaaaagtgaatatgtcttttgtaatttttccagcaaaaattccagggctgactctcattgatccaaatttggtcacaggcccatccatgaatcaattgctgtgaccaatttactaggcctgagtcactggtctgtccaccccaggtgtcttgtggtcagctcacctgaacagcacggactgagacccaagaaaaactgatgcactgttactaaaaaagtgaggaagtgaggctgagtaggcaaaacagcagatgtccattacaggaaagatctccaaaatgtaacctcactcattttttctgtatgtgtaactctgtgtgaacttagcgcctgccccaagggtggcatttacttagactgtgatgaaaatagagaccctggatttgtgcag

SEQ ID NO: 394149 - DNA, 516 bp, Homo sapiens
ttgattgactactggcaatagtttttggcacaaccctgggatttgctgcccaaatgttgtttcagtcttgtcccaggagagctcagttctcaggctggctccacagcctaccatgttagcaagcccaaaagtgaatatgtcttttgtaatttttccagcaaaamttccagggctgactctcattgatccaaatttggtcacaggcccatccatgaatcaattgctgtgaccaatttactaggcctgagtcactggtctgtccaccccaggtgtcttgtggtcagctcacctgaacagcacggactgagacccaagaaaaactgatgcactgttactaaaaaagtgaggaagtgaggctgagtaggcaaaacagcagatgtccattacaggaaagatctccaaaatgtaacctcactcattttttctgtatgtgtaactctgtgtgaacttagcgcctgccccaagggtggcatttacttagactgtgatgaaaatagagaccctggatttgtgcag

SEQ ID NO: 394150 - DNA, 516 bp, Homo sapiens
ttgattgactactggcaatagtttttggcacaaccctgggatttgctgcccaaatgttgtttcagtcttgtcccaggagagctcagttctcaggctggctccacagcctaccatgttagcaagcccaaaagtgaatatgtcttttgtaatttttccagcaaaaattccagggctgactctcattgatccaaatttggtcacaggcccatccatgaatcaattgctgtgaccaatttactaggcctgagtcactggtctgtccrccccaggtgtcttgtggtcagctcacctgaacagcacggactgagacccaagaaaaactgatgcactgttactaaaaaagtgaggaagtgaggctgagtaggcaaaacagcagatgtccattacaggaaagatctccaaaatgtaacctcactcattttttctgtatgtgtaactctgtgtgaacttagcgcctgccccaagggtggcatttacttagactgtgatgaaaatagagaccctggatttgtgcag

SEQ ID NO: 394151 - DNA, 527 bp, Homo sapiens
cctagccttagcccaaatccttaaacctttatataaactccatgccctgacctcctcacwgcagacataactagatagaacaccgttgtctcttgctgtttgttgcaaagattgctacagccttctctgtgcctaagtttttctaatcaatgctttggatggatcaaaaagaaaaaaaagaatttataactaaaaggaaaatattgtgtactatatattatatatagcatatataatatataatctgtataaaatacatgtaacatataatccattgtatgttatatgtaatttttatggaaatacaacaaattataagtataataattatgtatgttacatatatatatattttttcacgtttttaacttgaggtttaagtacctgtgatcttttttttttttttttttttttgagacagaatctagctctgtcatccaggctgcagggcagtggcttgatctcggctcactgcaagctccaccccctgggttcacgccattctcctgcctcagcctccagaatag

SEQ ID NO: 394152 - DNA, 527 bp, Homo sapiens
cctagccttagcccaaatccttaaacctttatataaactccatgccctgacctcctcacagcagacataactagatagaacaccgttgtctcttgctgtttgttgcaaagattgctacagccttctctgtgcctaagtttttctaatcaatgctttggatggatcaaaaagaaaaaaaagaatttataactaaaaggaaaatattgtgtactatatattatatatagcatatataatatataatctgtataaaatacatgtaacatataatccattgtatgttatatgtaatttttatggaaatacaacaaattataagtataataattatgtatgttacatatatatatatwttttcacgtttttaacttgaggtttaagtacctgtgatcttttttttttttttttttttttgagacagaatctagctctgtcatccaggctgcagggcagtggcttgatctcggctcactgcaagctccaccccctgggttcacgccattctcctgcctcagcctccagaatag

SEQ ID NO: 394153 - DNA, 612 bp, Homo sapiens
tatgcagacaagtggagggtgaacaagataaagaggagctttattgagtgtgagaatagctcagaggagacctgcagtgggtagcacctctctgtaggcaggctgtcccaccgagtaatcggctctcagcagaaaggaggccctggagagggtggcctctctctgccagcwggtcatcctgtcacctctgcagctcttagcagagagggtagctcctcggtgcatctggtcacctcatatcccgctatcagcagagacagtagctcatctctacagaatggtcatgccatcatctctctattctctgccctgctctggctgagcctggggtttttatggacctcagaggggaggaagtgcacagcaactggtccatgggcaaccatggatgggccagaaaaggcaccacaggtccccactctggtacgtgggtctggaagccctgccctcagcctttgggacctccctggtctgaaggtggagccttatggaggacccatctccttctgcccaggaatctgtctgcctcctgctgctgttcatggctgcctagactcagccccaacgttgttccaagattggagccagcaccaacagcagggaaaaactagg

SEQ ID NO: 394154 - DNA, 444 bp, Homo sapiens
ttttaaatttccatatagaacccaatagccaacaaatatgtcttgggatgtcacatttcagtaaaatattgcttccaccttmcttatttttttgagtcacagcttaaccgtcaagtttagaggaaaactcaaaatgttctttactcaacttttccttttctttcagagacagcttcgcctaaagaaaaaagcacccatttagtacaatgggcttgtgtctgatgctatttaatagcaaatcactttctgtctcctaaccatagtaaccacgtctgcaaaagttgaagaataattcctgctatgtcaatattgcagtgttgttatgaaaataacaacaataacaataggatgaaaaagtgcctgcaatgcagtgatactttatgaagtagcgcactgccaagaatgttggtgaataagagtgactgtaacacagagtctgaggct

SEQ ID NO: 394155 - DNA, 610 bp, Homo sapiens
gacttcactttgaaagactttagactgtgtctaaaatcacagccaccatccaagcaaggttggcatcagtcaagttgtttacatacaagtgcacagacatagsgtttctggagttaaaaaaaaaaaccaaccaaccaaccaaatcatccccctcttccaccaaattccaggacacccagttaaatttgaatttcagataaacagtgaataatttttcattataatttatgtcccatgcttataacaaattcaaattaactgggcacttgtattttgtctggcagcccgacccagggctgaaaataattctagaagaagagtttctgaaactgctttgttaatggcagcattatgagactagaatatagtctctcaaggcaacagccctcatttacacatctaaattatgagatccttttttaagaaaggggatcacctgatctttctgtaagacttcattacattgtagtcaagaaaaggacacattagcaggtagcaagcaaaaaagtatgtgaatttcattagtgttcattgtttgttacaccttgaccaggctcttaaattagcaaataagcagttccttataacctttccaaaatctacctatgtt

SEQ ID NO: 394156 - DNA, 587 bp, Homo sapiens
atggaactgcaaagtcctatgaccttccatttactgaagaggaaacagaagcacagcaagagtgctcaagagacttacctaatgccactccacacagtaagtactggaatccgggacttggactgccaattccatgtgctttcatttgtgacattacttttttttttttaaaaaaaaagaacaatgtaatgtttcaataaaatttaaaattttggttaaaaatcacctataatcataaccttctgataactattatcattcttgtatgtttccttccaacattattttcatacatttaacataatcatagccattaaccatatgtgtttctgttttttttgtttgtttgtttgtttgtttttgagacagagtctcgctctgttgcccaggctggagtgcggtggcgtgattttggcttactgcaacctcggactctcaggttcaacgggttcaagcaattctcctgtctcagcctcccgagtagtcgggactacaggygcctaccaccatgcctggctaatttttgtatttttagcagagacgagatttcaccatattgctcagaccggtctcaaactcctgaccaa

SEQ ID NO: 394157 - DNA, 592 bp, Homo sapiens
aatgatcattaaccaacactcaaatcaagaaataaacattgctagcttccctaaagccccccatatgtccccacctgattacaactagttctctccctttagatgtgacaccatcctaccttttatgattactgcttccttcttttcctttacagttttaccacctatgtatccattgtgaaacaactgagtttagctttgcctgcttttgaattttatgtaaatagagacatatggtgcatattcttttgtgtttggtttcttttactcagctctgtaaaattcaaccacatcatcattacatatatccactttggttatacacggataccacagactatccatgttactgtggatgtacttctgagttgtttctagtttggagtaaatcttaatgctatgaatattcttgtacacactmtttgtgcacatatacacacgtttcatttggtatgccacaagaagtggaaattctgtggcacagtgcataaacatcttcatccttctagatattatccgttgttttccacagtgcttgtaccagcagtctatgcaagttcccagtgctccacgtttgtgccaacattggtat

SEQ ID NO: 394158 - DNA, 612 bp, Homo sapiens
ttgcttatgcaaacttgctagcatctaatgtcaattagagttgcttatatattttttgagattttctaccatatatacataattgtatcatccacatataatgataactttacattttcctttttagtcattwtatatatatatatatatatatatatatatatatatatatatatatatctttttgttcttgcctaaatgcactaagaccttttatataatgctggataaaattgatgatactggacatcattgtttctgacctgagggtgaaagtgttcaatatgttaccattaagtgtggtgctagctgtattgttttgtacatactttttattatttccttaaagaagttttcatatatccctaggttgctgagagttattatcatgactagtattacattatatcatgtcatttttctgaatctattgaaatgattatgtgattttttaaaaaattttactaatgtggtggatttcattgattattttttgttgttaaaaagttgttaaactaacctagcaaacttggaaaaaatgcccacttgggtcaccatgcatttttttaattactaagttcaatttgctgatattttgcttatgatatttat

SEQ ID NO: 394159 - DNA, 496 bp, Homo sapiens
gatgaagaaaaacaaagcaaaggaaaggagtagaaaatgatagacacaaattgtgaattgagtggtcagagagggcctcttggaggagggtgacatctgagcagatccctgaatgaaatgacagtgggagttctggtgatatctggaagaagagcattcaaagcagcgagaacaacaygtgcaaaggccctgagacagaaacaggcttggcagattccagaaatggtaaggaagacgatgtgcttagagaagagtaagtggatgaaaagaagtggtaagaagagatgtcagagcttgtcaggggacagacagtgtaggataaattgacaggagataagttgattaaaaatcatactttgtgtccactctgaaaagaaaatgttgtgaaatgatgggaagacctcttgtccctccattacaatctacaatgggttcagaatcataacacctactctcatgagagagatggagtattagtccattttcatgctgctga

SEQ ID NO: 394160 - DNA, 566 bp, Homo sapiens
agctgtagctcccacaacatgatttagccccaaaggggtgatcataattgggaatattttccagaaagacgtaatatctctgtccttctacctagacatatctgtgcttagaagtgctaacttttgtttggaataaatgagctagaaattatttctctgaaacccagaagaaagtccactggttcagtctggctataagatgtagttcaggaaaaactgataatgtatgtgcagtcgcttcagatatagaatagccatagaactctgacttcacatttggaattctattttccttataaggcattaggaattggtaaggcagatattaataaggactattgtggttattatttattatcctcaatgaaatgtcatatgaaaagctgcttttgtaggaattaatcacaatgraagagatttgtttgtgtccacctcagaatgttgaagcttggattagattctttgcatgatgaaatgcattagtttgttaagtattagaaaaatgtatttaaaaatcaacttttgatatttggcatttgttgccagcgtgtatttcctccggaaga

SEQ ID NO: 394161 - DNA, 543 bp, Homo sapiens
gctcccacaacatgatttagccccaaaggggtgatcataattgggaatattttccagaaagacgtaatatctctgtccttctacctagacatatctgtgcttagaagtgctaacttttgtttggaataaatgagctagaaattatttctctgaaacccagaagaaagtccactggttcagtctggctataagatgtagttcaggaaaaactgataatgtatgtgcagtcgcttcagatatagaatagccatagaactctgacttcacatttggaattctattttccttataaggcattaggaattggtaaggcagatattaataaggactattgtggttattatttattatcctcaatgaaatgtcatatgaaaagctgcttttgtaggaattaatcacaatggaagagatttgtttgtgtccacctcagaatgttgaagcttggattagattctttgcrtgatgaaatgcattagtttgttaagtattagaaaaatgtatttaaaaatcaacttttgatatttggcatttgttgccagcgtg

SEQ ID NO: 394162 - DNA, 561 bp, Homo sapiens
ccatgtgaattttacagacactgggctaaaaagggtattcagacacatggacacacattcctagaatgtcatcatatggtcctaattccatgtcaccaasaacacagacaagaccctgtttacaactttttctttccttttttttaattttagacctttctgagaagattattatatatgacatatctatagctatgtgtatggccatagatgtatttctgtgtgtacatatgtatagtcatgtattcctgcatatgtacatacaaatacagagatatataaagtacatagaaattccttacttgtaaatagccaaaaagtactgacatgagtgaattttcacatttaaatagtcatcaatatgaagccatgattaatgcttgtataatgtgatgcaataaaatttaaaataaatttctgcacatggaatattttcagctggctcttctgacattctgttgtatttttgtctcatagaataagagaaatcacagaataagtaagtggaatctttaatgtgaggagaatatctgagggactgtgcaagaaatcagatgtttg

SEQ ID NO: 394163 - DNA, 469 bp, Homo sapiens
gcaatcaatttaaactcactttcctgtaactatatatttcaacgtgaaagaattaagggtaggacctcaacttcatacaatcctgtactctagagaaggagttaacgctactcagatcacatgtgatatrtaagtgccagttactgttttcccaaaacagacattgagtaatttcccaagttgcccattgactgtcagcatttagacaccaattttataatattttcaacaaaaaaaaaaattaaagaagacttgcttaacaacccttttagtggttaaaaccacatgagtggttttaaatacctaactgttcaatttagattccactaatcccctggcagggaagagtaaatagtaaagctgttaccagtgggtcgcagcttgcatacacattagcccccaaggaggcaatcttgaaccttcattaattcagaccttcctaattaggaagttgtgatcatttggatag

SEQ ID NO: 394164 - DNA, 469 bp, Homo sapiens
gcaatcaatttaaactcactttcctgtaactatatatttcaacgtgaaagaattaagggtaggacctcaacttcatacaatcctgtactctagagaaggagttaacgctactcagatcacatgtgatatgtaagtgccagttactgttttcccaaaacagacattgagtaatttcccaagttgcccattgactgtcagcatttagacaccaattttataatattttcaacaaaaaaaaaaawtaaagaagacttgcttaacaacccttttagtggttaaaaccacatgagtggttttaaatacctaactgttcaatttagattccactaatcccctggcagggaagagtaaatagtaaagctgttaccagtgggtcgcagcttgcatacacattagcccccaaggaggcaatcttgaaccttcattaattcagaccttcctaattaggaagttgtgatcatttggatag

SEQ ID NO: 394165 - DNA, 469 bp, Homo sapiens
gcaatcaatttaaactcactttcctgtaactatatatttcaacgtgaaagaattaagggtaggacctcaacttcatacaatcctgtactctagagaaggagttaacgctactcagatcacatgtgatatgtaagtgccagttactgttttcccaaaacagacattgagtaatttcccaagttgcccattgactgtcagcatttagacaccaattttataatattttcaacaaaaaaaaaaattaaagaagacttgcttaacaacccttttagtggttaaaaccacatgagtggttttaaatacctaactgttcaatttagattccactaatcccctggyagggaagagtaaatagtaaagctgttaccagtgggtcgcagcttgcatacacattagcccccaaggaggcaatcttgaaccttcattaattcagaccttcctaattaggaagttgtgatcatttggatag

SEQ ID NO: 394166 - DNA, 542 bp, Homo sapiens
tactgtgttgacttatttttgtagatgagtacagtcagctctccccacttgtgggttctgcatctgtggattcaaccaactggagatcaaaaatatttaggaaaaaaaggatggtggtgactgtactgagcatgtacacttttttcttgtcattattccctaaaccatagagtctaagaactatttatgtatcatttacgttgtattaggtattataagtaacctagagattatttaaactatataggaggatgtgcataggttatgtgcaatactacaacattttatatcagggactctagcacctgcagattttggtatatgcaggggtcctggaaccaatccctcagggatactgaggggactgtacttgaaagctacttgcaagtcagttgagtggagatactgttatatggtatctcttaataacttcacttatagcaaaaaccattaaatgtccctgttaatgtttactttgcaattactaaaaragcttaaattaacctttgggaaaatgtgttaatagcatggtttcatggacc

SEQ ID NO: 394167 - DNA, 614 bp, Homo sapiens
aactccccactgcctgtaaatgtgatctaatttgaaatagggtcttgccgatgattaagatgaggtcactaaagggggtcctaatctaatatgactagtgccctcataaaggggggaaattcagatactgrgacagataagacagtcaagatagagggaagatgctacgaagccacagggaaaaggaatgtcatctacaaagagtgtctgaggttaccagaaactgggagaaaggcctggaacagattctccttcacagtcttcagaaggaaccaaccctgctaacaccttgattttgaactttttagcctccagaactgagacgatgcatttctgttgtttaagccacccagttggttgtcctttgtcatagcagtcctagcaaacgaatataggatctaagcagtgtcaaaaggtgagggtttcaaggaagcagcttttagtttaataaaggctaggagtggggtgggcacaagaggataggggaggaatccacagcagctggctgttacagtgtgctcatgctttcatcctcagcaagggccccacagacggggatactgacacctccatttcactcattaggaaaggaagtctcagagagaaagcagctt

SEQ ID NO: 394168 - DNA, 614 bp, Homo sapiens
aactccccactgcctgtaaatgtgatctaatttgaaatagggtcttgccgatgattaagatgaggtcactaaagggggtcctaatctaatatgactagtgccctcataaaggggggaaattcagatactgagacagataagacagtcaagatagagggaagatgctacgaagccacagggaaaaggaatgtcatctacaaagagtgtctgaggttaccagaaactgggagaaaggcctggaacagattctccttcacagtcttcagaaggaaccaaccctgctaacaccttgattttgaactttttagcctccagaactgagacgatgcatttstgttgtttaagccacccagttggttgtcctttgtcatagcagtcctagcaaacgaatataggatctaagcagtgtcaaaaggtgagggtttcaaggaagcagcttttagtttaataaaggctaggagtggggtgggcacaagaggataggggaggaatccacagcagctggctgttacagtgtgctcatgctttcatcctcagcaagggccccacagacggggatactgacacctccatttcactcattaggaaaggaagtctcagagagaaagcagctt

SEQ ID NO: 394169 - DNA, 614 bp, Homo sapiens
aactccccactgcctgtaaatgtgatctaatttgaaatagggtcttgccgatgattaagatgaggtcactaaagggggtcctaatctaatatgactagtgccctcataaaggggggaaattcagatactgagacagataagacagtcaagatagagggaagatgctacgaagccacagggaaaaggaatgtcatctacaaagagtgtctgaggttaccagaaactgggagaaaggcctggaacagattctccttcacagtcttcagaaggaaccaaccctgctaacaccttgattttgaactttttagcctccagaactgagacgatgcatttctgttgtttaagccacccagttggttgtcctttgtcatagcagtcctagcaaacgaatataggatctaagcagtgtcaaaaggtgagggtttcaaggaagcagcttttagtttaataaaggctaggagtggggtgggcacaagaggatargggaggaatccacagcagctggctgttacagtgtgctcatgctttcatcctcagcaagggccccacagacggggatactgacacctccatttcactcattaggaaaggaagtctcagagagaaagcagctt

SEQ ID NO: 394170 - DNA, 482 bp, Homo sapiens
gaggccaccatctcattagaaagaattataaaaattctattctaaaggtcctgattttgaaaaaataatagctaatacacacacactcacaaacacagacatacacaaacacacacacacacaaatagtgccaggtactgttccaagtattagaaatacactgagcttatcataaccatactgggtaggcattaacattgccctattttacagatgaggaatggggactttcaaaaatttgcatgagttcacactgctagtgaggcagaggtaggatttcaacccaggcagcagaatcaatgtggtgcccacaacatacacggcgacaatgtagcccacagcacttagtgcactgagagatagttgggaggggagtgccctcctaacctcaacccagtgagagaaccttcacctgaccttgcacagagctcarggcacctgtagctgggcctccatggaccagcctcgctccctatggctga

SEQ ID NO: 394171 - DNA, 545 bp, Homo sapiens
cctttcataagggctgtaatccccttaggagggacctgccttcatgacctaatcacctcccaaaggccctacctccaaatgctgccgtgttgtgggttaggattttaacatctgaattttggggaaacatgttcagaccatagcaggcaggaagmaaatatctccaccaccattgtctgagtcaatgcaaaagagcatggaatttcaatgccctcatttcatgacctttctcccctagcccaataaccatccctgtataggaagaaagctggcaggtcactgccccttctctgttgtggtggtgagtgggcaagggatgggatgaagagaggaaccaccaaaccttactcctctctcttccatctcccttgtccctaaaccaggtctgtcttgggaatctttctaatcaaatcttccatatctcattcattttcaacttttactaaagtgataaatgaggtcagctggctacttcagcctaggccaccagagagctctatttatgtgagtttcataggtctaagatttagtctgaatgacctgca

SEQ ID NO: 394172 - DNA, 545 bp, Homo sapiens
cctttcataagggctgtaatccccttaggagggacctgccttcatgacctaatcacctcccaaaggccctacctccaaatgctgccgtgttgtgggttaggattttaacatctgaattttggggaaacatgttcagaccatagcaggcaggaagaaaatatctccaccmccattgtctgagtcaatgcaaaagagcatggaatttcaatgccctcatttcatgacctttctcccctagcccaataaccatccctgtataggaagaaagctggcaggtcactgccccttctctgttgtggtggtgagtgggcaagggatgggatgaagagaggaaccaccaaaccttactcctctctcttccatctcccttgtccctaaaccaggtctgtcttgggaatctttctaatcaaatcttccatatctcattcattttcaacttttactaaagtgataaatgaggtcagctggctacttcagcctaggccaccagagagctctatttatgtgagtttcataggtctaagatttagtctgaatgacctgca

SEQ ID NO: 394173 - DNA, 545 bp, Homo sapiens
cctttcataagggctgtaatccccttaggagggacctgccttcatgacctaatcacctcccaaaggccctacctccaaatgctgccgtgttgtgggttaggattttaacatctgaattttggggaaacatgttcagaccatagcaggcaggaagaaaatatctccaccaccattgtctgagtcaatgsaaaagagcatggaatttcaatgccctcatttcatgacctttctcccctagcccaataaccatccctgtataggaagaaagctggcaggtcactgccccttctctgttgtggtggtgagtgggcaagggatgggatgaagagaggaaccaccaaaccttactcctctctcttccatctcccttgtccctaaaccaggtctgtcttgggaatctttctaatcaaatcttccatatctcattcattttcaacttttactaaagtgataaatgaggtcagctggctacttcagcctaggccaccagagagctctatttatgtgagtttcataggtctaagatttagtctgaatgacctgca

SEQ ID NO: 394174 - DNA, 560 bp, Homo sapiens
aattttgttgttgctgtggttactagagaacctttttttatagctcaaatataattgggtcagaacattttctctaaagccttagatatttttccttttcagggacattaaaaatggatttgattgttcccatatttgaagagtatttgtatttatcagtaatggtacaaaataactaagtattgaaagtattaraaaacagtttctggactttatttggtttaagtttttcttttttattttacagagtcaagtaaagaacagtttgccagtacaaacattgctgaagagctagtaaaactcttcaagaaacaaatagaacatgataagagagaaatgatttttgaagttcttgctccattggcagaaaatggtgagaaacttaaatgcacctttggatttttgatcatgtatgctttaaacttttttcctaatattatttaattgccagccatttgactcaaaaccattctttattagtgatatgttttattttgcatatctctaactttagctatgttatctactccatagctatatctacattggccaaagcaact

SEQ ID NO: 394175 - DNA, 570 bp, Homo sapiens
ttaataacatgtataagtaaaaacaaatttaggagaagagtcaagatatttcatgtattccaaagaactgatactagyattgaggaagctaatagcctaaaattatatccaaggcatggccacatctttttccctgaaaaatataatagaaaagcattttaatatcattggactgctttgcataaaacatcctagatatcttacaaattgcttattaaagaaatagaaagcttttctttcactggcattcatacatacagaaaaaaggtcataaaaatactgaaatctctttagtatttcttactgaataacttgatttgccttgtacaatatagtacattagtaaggaggctttcctaaagaggtattattactgttcacttggttgtgtttttataaacttttttcatctgaagaatgctgcgtgctcatttttatggaaggagagatcaaaagaggctcacaggcagcagggaggagatttcaaaaactttgtcttttagtttgcccttcaagttaaattgtttgcttttcagtgtgtgtttttactttttggtgctgttcccagac

SEQ ID NO: 394176 - DNA, 570 bp, Homo sapiens
ttaataacatgtataagtaaaaacaaatttaggagaagagtcaagatatttcatgtattccaaagaactgatactagtattgaggaagctaatagcctaaaattatatccaaggcatggccacatctttttccctgaaaaatataatagaaaagcattttaatatcattggactgctttgcataaaacatcctagatatcttacaaattgcttattaaagaaatagaaagcttttctttcactggcattcatacatacagaaaaaaggtcataaaaatactgaaatctctttagtatttcttactgaataacttgatttgccttgtacaatatagtacattagtaaggaggctttcctaaagaggtattattactgttcactyggttgtgtttttataaacttttttcatctgaagaatgctgcgtgctcatttttatggaaggagagatcaaaagaggctcacaggcagcagggaggagatttcaaaaactttgtcttttagtttgcccttcaagttaaattgtttgcttttcagtgtgtgtttttactttttggtgctgttcccagac

SEQ ID NO: 394177 - DNA, 561 bp, Homo sapiens
gtctatcagcaccatttttccaacagcacatgctcactgcatgtctctgtgtcatattttggtaatcctagcaatattttaaagttttcagtattataagatattttgatatctataagacattataaagatgtaataatattttattatatcttttatggtgatctgtgatcagtggtctttggtggtgttactttgatctaattatttgggggtgttatgggaaaaataagtggcaaacttatttgataaatcttgtgaatgtttcgattgctccactcactggccatgcccccagttatctcttcctctcctcaggcttttctatttcctgagacatgataatattaaatctgggcyagttaataaccctacaatgccttctaagtgttctagtgaaaggaagagtcgcatgtctcctactttacatcaaaaggtaaaaacgatttagtgaagaaggaatgtcaaaagccaagataagctgaaagctaggatcttgcaacaactagttagccaagttgtgaatgcgaaggaaaagttttgaagggaattaaaagtgct

SEQ ID NO: 394178 - DNA, 546 bp, Homo sapiens
aaatgtttcctgatcctattttggaaatctcagtttttaacattatgaatttgtctcatatgttctagtggccatttgcttgaagattaaagtaaaaactgtaatttgaacaacacttatttattgagaacttggtatatgccaggcactaattctcacaactatgagatagttaaaagtaattattttacaaaaagtcatgcccagttaaccagtaacagcaggttggyaggtttagggttaaggtaggggaaaatacagacggtttaaaaccagtgtggcatatgcagatgttgggctcttttatcaaccttatcctgccccatatttctcatggccatcgggaatttagcatttgcttcgtattatttgcttggttcaaaatgaatcaagatgctgtccttttttatgttgcaacattggaactatagaaattgtttgtattttgcctctttcttgctcaggactaatttttaaattctttttggcatgaagggaacatgctttctttcctttgtgtctttttagggcccacttaattcatgg

SEQ ID NO: 394179 - DNA, 546 bp, Homo sapiens
aaatgtttcctgatcctattttggaaatctcagtttttaacattatgaatttgtctcatatgttctagtggccatttgcttgaagattaaagtaaaaactgtaatttgaacaacacttatttattgagaacttggtatatgccaggcactaattctcacaactatgagatagttaaaagtaattattttacaaaaagtcatgcccagttaaccagtaacagcaggttggcrggtttagggttaaggtaggggaaaatacagacggtttaaaaccagtgtggcatatgcagatgttgggctcttttatcaaccttatcctgccccatatttctcatggccatcgggaatttagcatttgcttcgtattatttgcttggttcaaaatgaatcaagatgctgtccttttttatgttgcaacattggaactatagaaattgtttgtattttgcctctttcttgctcaggactaatttttaaattctttttggcatgaagggaacatgctttctttcctttgtgtctttttagggcccacttaattcatgg

SEQ ID NO: 394180 - DNA, 546 bp, Homo sapiens
aaatgtttcctgatcctattttggaaatctcagtttttaacattatgaatttgtctcatatgttctagtggccatttgcttgaagattaaagtaaaaactgtaatttgaacaacacttatttattgagaacttggtatatgccaggcactaattctcacaactatgagatagttaaaagtaattattttacaaaaagtcatgcccagttaaccagtaacagcaggttggcaggtttagggttaaggyaggggaaaatacagacggtttaaaaccagtgtggcatatgcagatgttgggctcttttatcaaccttatcctgccccatatttctcatggccatcgggaatttagcatttgcttcgtattatttgcttggttcaaaatgaatcaagatgctgtccttttttatgttgcaacattggaactatagaaattgtttgtattttgcctctttcttgctcaggactaatttttaaattctttttggcatgaagggaacatgctttctttcctttgtgtctttttagggcccacttaattcatgg

SEQ ID NO: 394181 - DNA, 546 bp, Homo sapiens
aaatgtttcctgatcctattttggaaatctcagtttttaacattatgaatttgtctcatatgttctagtggccatttgcttgaagattaaagtaaaaactgtaatttgaacaacacttatttattgagaacttggtatatgccaggcactaattctcacaactatgagatagttaaaagtaattattttacaaaaagtcatgcccagttaaccagtaacagcaggttggcaggtttagggttaaggtaggggaaaatacagrcggtttaaaaccagtgtggcatatgcagatgttgggctcttttatcaaccttatcctgccccatatttctcatggccatcgggaatttagcatttgcttcgtattatttgcttggttcaaaatgaatcaagatgctgtccttttttatgttgcaacattggaactatagaaattgtttgtattttgcctctttcttgctcaggactaatttttaaattctttttggcatgaagggaacatgctttctttcctttgtgtctttttagggcccacttaattcatgg

SEQ ID NO: 394182 - DNA, 559 bp, Homo sapiens
actggtagtttgtgcctcagaacctttcaaactattaactcatgtcttgygtaaggaactcaggctacttttgaacaaatagcgagttcctccttaaattgatccaaattgattatgacttgaagattttaaattaacagtagttaatataggtaaaaacctttaacgtgggaaaagagggttggactatacatagaaagaggcattgtttaagttcttacagattattctgtatgctatcccttcagccaccatcctaccccatattaagaactactgttttagaaaacaaacaatttagacctgaagtctccctgtccctacattgtaccacccaaaggcacaaacaaacagctcaactggactcactgtgtcttagtcatctgatcaggggataagcaagaaacttggccatcttaatttcaggttcttctccttcatcccttctcaaagatgttccaattttaatgtttaccagacaggtaaatgacaaggctttgactgtcagccaaatcaaagttatttctgaggtgacatcactagctaaagtagaattgaa

SEQ ID NO: 394183 - DNA, 544 bp, Homo sapiens
  misc_feature (1)...(544): n = A,T,C or G
agcagccatcaacatcaaggcaagaccctacaccagcaaaaagattatgactcagtgaagactgagataattgttagcatttttgagcaataaagtatgttttaattaagatatgtatgttgtttttctagacatactgctgttacacttaacatacaatgctgtagtgtaatcataacttttatgtacactgggaatccaagaaattcatttgacctgcctaacttkgatactcattctatggtggtggtcaagaactgaacctgcagtatctctgaagtttgcctgtaatatcagtttggaaagtccctgatttatggatcttttaagctcactgttacattgttataagtaaatacattacaaagctttttaaagactatttaatttaatattttacattggggaaaatgtcaatttttaatatcattatcattttgaagtacctttgagatagtggagattctagggaaattttatcaccttttgatgtttcctatatatctatgagacaaaagaacgcagtgnaaaaaatgtagcaaag

SEQ ID NO: 394184 - DNA, 544 bp, Homo sapiens
  misc_feature (1)...(544): n = A,T,C or G
agcagccatcaacatcaaggcaagaccctacaccagcaaaaagattatgactcagtgaagactgagataattgttagcatttttgagcaataaagtatgttttaattaagatatgtatgttgtttttctagacatactgctgttacacttaacatacaatgctgtagtgtaatcataacttttatgtacactgggaatccaagaaattcatttgacctgcctaactttgatactcattctatggtggtggtcaagaactgaacctgcagtatctctgaagtttgcctgtaatatcagtttggaaagtccctgatttatggatcttttaagctcactgttacattgttataagtaaatacattacaaagctttttaaagactatttaatttaatattttacattggggaaartgtcaatttttaatatcattatcattttgaagtacctttgagatagtggagattctagggaaattttatcaccttttgatgtttcctatatatctatgagacaaaagaacgcagtgnaaaaaatgtagcaaag

SEQ ID NO: 394185 - DNA, 497 bp, Homo sapiens
attcagcagccatcaacatcaaggcaagaccctacaccagcaaaaagattatgactcagtgaagactgagataattgttagcatttttgagcaataaagtatgttttaattaagatatgtatgttgtttttctagacatactgctgttacacttaacatacaatgctgtagtgtaatcataacttttatgtacactgggaatccaagaaattcatttgacctgcctaactttgatactcattctatggtggtggtcaagaactgaacctgcagtatctctgaagtttgcctgtaatatcagtttggaaagtccctgatttatggatcttttaagctcactgttacattgttataagtaaatacattacaaagctttttaaagactatttaatttaatattttacattggggaaaatgtcaatttttaatatcattatcattttgaagtacctttgagatagtggakattctagggaaattttatcaccttttgatgt

SEQ ID NO: 394186 - DNA, 577 bp, Homo sapiens
cagagaaggtactcattttatacttttaaaaataaatcacagaacttccatcaagaaaaaccttaaaatatctcaaagaccctgatggacaatctacatttattgagaaacttctcagtattgtatattattatatataataataatattatatacaataacattaacatctacatccagtctgctcacygtcttgtttatttatttttatttatatatattttttgagacagagtctcactctgttgccaggctggagtgcagtggcctgatctcagctcactgcaacctctgccttccaggttcaagcaattctcctgcttctgcctcccaagtagctgggactacaggcgcccgccaccacgcccagccaatttttttgtatttttagcagagttggagtttcaccatgttggccaggacggtctcgatctcttgacctcgtgatccgccctcttcggcctcccaatctgctcaccctcttaatgaaaatttgagatgcacagtgttaaaggaagggaagcattgataaagagaggtaggaagttgagaaagataagtctggaatatgggacac

SEQ ID NO: 394187 - DNA, 629 bp, Homo sapiens
catgttgttgctccattgtctactctcacaattttttcctttacttcccacaatttaaaatacctctaagcattttactggtattgattataacctattgcaaagcatatttgatagtgctggaatcttaagaaaataaaaaatctaaaaattgtttaagatgggattaaaatcttttgcatgattcttctttcaacttcttcattttattatcaggattagagcttcgtagatgagtgaattgtatttttggagcaccacagcatcttgtttaccttatggaacactatactctatttctcaactaaaaattcacttacagcagaaaaggtatcattattaagtgcgggaacagaaactagggcccacaaaacattcaagaattaccttaaatatgcgtgcatattgtatatgcctttttcaagagtcataaaatttgagctttaactaattcgagagcttttaagaatattctgttattgagttcratttctacttcaaaagaggttatatagtccagattgtagtagtagtgcatcaaagtcccttttcttctttttattttttctagaattcagttctcaaggcaactcagaaaaataatagcaggtaagtttttttgaggactt

SEQ ID NO: 394188 - DNA, 614 bp, Homo sapiens
ctgacactgaaattttgtgttaaagtatgttgaaatccccttgaactattttcttttaaattttatttatgtatttattttagagactaggtcttgctctgttgtccaggctgagtgcagtagaatgatcatagctcamtacaacctcaaactcctggactcaagccatcctcccgcctctgtctccctagtagctatgtctacaggcatgtgctaccatgccttgctattttttttttaatttttatagagacagagtctcactattttgcccaggctagtcttgaactcctggcctcaagggaccctcccaccttggccttccaaagagctgggattataggcatgaaccactgcacgtggttcccccaaactttttcatagcactatgttttaggagtattttttaagcacctgttttatcttaattttgaatttttaaatttacttattttctgcttaatgccatcttcatgtaatttcagtgggagtaggctccttgctattgtctgtgcttaagttcccagtatgtagaaaagctcttggcacaggggaaatgaaaaagctctttgctgaaagaatatctttggagcagagctcaaggaatagcacgg

SEQ ID NO: 394189 - DNA, 360 bp, Homo sapiens
ttctcccttgcactatattttccctggctcagttcaaagttctgctttacactgttcctwctcagggatcccaattgtagaaactcaagttgatggaaaagctaccacctggaacattgctagtggccacagctagtggcacagcaaacagagacagtgctgaataatcttaaaatttccagccagaagtgacatgtgctatttcttgttcatacttaatttgtcaaagtaagttactaaattcaagggctggaaactggtacattacatgtccccagaaggaggaatggaaatatttgttaggcattactaatgagtaacagcaaagattcccttgcttaattgatgtcagctgctgac

SEQ ID NO: 394190 - DNA, 445 bp, Homo sapiens
tatagtagacagccacaatctctgtttgtagagattatctaaggagatagtgctttctcctgaacacttacagaaagactattttcagattgtgaggagacatttgatgtcatctggagcctagagtgagtgtcattgtgactttagcattagcacacacattaatttattcctcagtaagttttagggtccaaagatttctgaagccattaaaatatacagatttaaacatacaagggataatcaatttatgtaaagtgttatttctccaacaygaacccaagaccccctataatcctgtcctatgtttacttcattcttgtcattcttgttaccattcaaaataaacagccagatcaacgatgatctctgtgtagccaaatccagtggtagctgttagatattcttcccactcaatgttgtagcagctcttggcttggtgatt

SEQ ID NO: 394191 - DNA, 469 bp, Homo sapiens
agattttaaaatcaatgtacccatgataaataattgatatgtatcatgagtacatattatattttcataatctagattcatattataagcctaaaccaaactagtagacaaagtttctcttctttgtatagccattgaagatacttaactgcagatgagaaatatgataagaatctgctaagcacaggcataaattttcatctgctctgtagtgtcacacgttaatgtctaataattttctgctaactgctctggtttttcttatacatttaaacatttatacacctaaaatattgaccarggctcttattttgttaaaaaaaagtaatttcaggtaattgggtatattcatttaacatgttcacttaaaaatatattttgaacatctactaatagcaagtccctctgctaagtgctatgagacagtacaaaaagacccagacaattattgtggactaatggacttcac

SEQ ID NO: 394192 - DNA, 472 bp, Homo sapiens
ccattcactgcagagtagcttctcataaatttaggcatttaagcttgtaatccttgctataaacaatgaaataacttaagacttgtgtaaaagaaggtaaattcttttagctaatgtaagatgaaggtgagagttagtaaargcctaatggtgaaattgaggggacaattttgagatatattagggaataaatatcagtaaaaattgagaatttgtatattggataagatggtgttaaagaagaagctattttctgaattggataactggttacaagataatatctccacaagaaaactattagaactgataagcaaattcagcaaagttgcaggatacaaaatcaatatacaaaactaagtagcatttctatatgccaacagtgaacaatctgaaaaagaaaaaaaagtaattctatttactatagccacacataaaattaaatacctgggaattaactgaagaagtgaaa

SEQ ID NO: 394193 - DNA, 445 bp, Homo sapiens
tatagtagacagccacaatctctgtttgtagagattatctaaggagatagtgctttctcctgaacacttacagaaagactattttcagattgtgaggagacatttgatgtcatctggagcctagagtgagtgtcattgtgactttagcattagcacacacattaatttattcctcagtaagttttagggtccaaagatttctgaagccattaaaatatacagatttaaacatacaagggataatcaatttatgtaaagtgttatttctccaacatgaacccaagaccccctataatcctgtcctatgtttacttcattcttgtcattcttgttaccattcaaaataaacagccagatcaacgatgatctctgtgtagccaaatccagtggtagctgttagatattcttcccactcaatrttgtagcagctcttggcttggtgatt

SEQ ID NO: 394194 - DNA, 608 bp, Homo sapiens
atgaccagaggctgaattatagcagaggggatttttgtgtagtcattggaatttattaaatgaactctctgtgatttgcctttcaaccataatattctcagactgggtgttacagggatgagaattatctactggaagaggttaagcaacttactaaatacaaaggcgccattatcattaaaggattagacattagtattagggaaatgcccactatgggaagccttcgcagtggacttcctcaccattacatcaataagagagcagaaatattttatttcacgtcttttggcctatacagtttgcaaaaattaaaaatatgcataccttttaggcaatcctccttctctgctgtgaattggaaatcctgataaatgatctgaactttatcaggtttgcatatatctcaatactaaggagcaatttttaattttaagaagtttatgacagactttstaagagaataaatacaaattaatccatgaattctcattaaagcctctcctaacattatgtgttcaactaaaagtcaacttagtgtctgtgaattcctgcaaaataattagaaccctgtgtgtcaatgttgtagaatctgaagaggtgtcaat

SEQ ID NO: 394195 - DNA, 555 bp, Homo sapiens
aaatcccctctgctataattcagcctctggtcatctatccactccttgaatatctgcatagatggtgtttttgttctttcaaaagttttttcttataatttaataccttgataaattagtttttacttcttctgtctgaataccccaaataracctatgacttttttcatatggcatgtccgacctctttcctatgaaaccactcacaacttttctttccagtaaaacatcctggttgctgttccttcaattgcccttgcttttaaggacaatcatgtgctgaagaatttgcagaggggatttttgtagctgtaacttttacattgttagtcttttctatattttgcattcttgccaattgaattaagattcacacaagaaagcaaccccagcttctactgcataaattaagccaagattacagcttgttagacaatacttggaggttgtgtggaggtcacataaccatatggccaactagaaagaataattactcctacctgatactgcttggtttcagaatttgcctacttatattcagatttaattaacata

SEQ ID NO: 394196 - DNA, 555 bp, Homo sapiens
aaatcccctctgctataattcagcctctggtcatctatccactccttgaatatctgcatagatggtgtttttgttctttcaaaagttttttcttataatttaataccttgataaattagtttttacttcttctgtctgaataccccaaataaacctatgacttttttcatatggcatgtccgacctctttcctatgaarccactcacaacttttctttccagtaaaacatcctggttgctgttccttcaattgcccttgcttttaaggacaatcatgtgctgaagaatttgcagaggggatttttgtagctgtaacttttacattgttagtcttttctatattttgcattcttgccaattgaattaagattcacacaagaaagcaaccccagcttctactgcataaattaagccaagattacagcttgttagacaatacttggaggttgtgtggaggtcacataaccatatggccaactagaaagaataattactcctacctgatactgcttggtttcagaatttgcctacttatattcagatttaattaacata

SEQ ID NO: 394197 - DNA, 518 bp, Homo sapiens
cttgccccaatatgtaaaagctgtttatcaatatcacaaaattatgaaaccatggaaaaacatgaagacaaatgcttaccaagttatccccactytggtgagtgctctctttttatttgcaacttaaaaatagttatcttttgtgctaaaagtaagctagggggatgaaactgacataatcccaataaactcaagtagaagctgaaacaaataaaaatgcctaagctaaaaattaaataataaatcatatgcaaatacagcataataaataaaaataataatgttacaaaagtagatgaaattgtaaaaagtagctggaccaagttctagttaacatttatcctttatcttatttaaaaaaaaaaaaaagagatttgacctagggaacatttcttctaacatgaagaatgaatgagagaacaggacattgaacccacagaactaaaatgtattataaacaacatgggttttggaatcagaagacctaatataaataggcttttgaacataggcaagtc

SEQ ID NO: 394198 - DNA, 532 bp, Homo sapiens
gcttttcaacaaaggacatgctggtacaattggctggccacatgtaggagaatgaaattggatcctcatctctcaccctacacaaaamtcaaatcaagatggggacttaaaccaaagacctgaaactataaaaattctggaagattggaaaaacccttctagacattggcttagccaaggatttcacgacaaaaaacccaaaagcaaatgcaataaaaacaaagataagtagctgggacctaattaaactaaagagcttttgcatggcaataggaacagtcagcggagtaaacagacaacccacagagtgggagaaaatcttcacaatctatacatccaacaaaagactaatatccagaacctacgacgaagtcaaacaaaccagtaagaacaaaacaaacaatcccatcaaaaagtgggctaaggccatgaatagacaattctcaaaagaagataaacaaatggtcaacaaacatatgaaaaaatgctcaacatcactaatgatcaaggaaatgcaaatcaaaatcacaat

SEQ ID NO: 394199 - DNA, 488 bp, Homo sapiens
actacataactaagctagacagtatagtctcttactcctagactacaaaactgtatggcatattactatcctgaatactgtaagcagttgtaacacagtggtaagtatttgtatatctaaacatatctaagacatagctaaacatagaaaaggtacagtaaaaaatacagtataaaagatggaaaatggtaycctttatacctatacacttgtataggttatgtaccataaataaagctttcaggactggaagttgctctgtgtgagttagtaagtgagttattgtatatgaaggcctaggacattactgtttactcctgtggactttgtaaacactgtacacttacactacactaaccttataaaaacatctttttcttcccttgataataaattaaccttagcttactataactattttactttaactcttttgtaataacacttagcttaaaacaaacacattttacagctgtacaaaaatactt

SEQ ID NO: 394200 - DNA, 591 bp, Homo sapiens
ctacataactaagctagacagtatagtctcttactcctagactacaaaactgtatggcatattactatcctgaatactgtaagcagttgtaacacagtggtaagtatttgtatatctaaacatatctaagacatagctaaacatagaaaaggtacagtaaaaaatacagtataaaagatggaaaatggtatcctttatacctatacacttgtataggttatgtaccataaataaagctttcaggactggaagttgctctgtgtgagttagtaagtgagttattgyatatgaaggcctaggacattactgtttactcctgtggactttgtaaacactgtacacttacactacactaaccttataaaaacatctttttcttcccttgataataaattaaccttagcttactataactattttactttaactcttttgtaataacacttagcttaaaacaaacacattttacagctgtacaaaaatactttcactctttgtatccttattctatatgctttttcttttttacttttaaactattttgtttaaaactgagacataaacatatacattagcttaggcttccagagg

SEQ ID NO: 394201 - DNA, 591 bp, Homo sapiens
ctacataactaagctagacagtatagtctcttactcctagactacaaaactgtatggcatattactatcctgaatactgtaagcagttgtaacacagtggtaagtatttgtatatctaaacatatctaagacatagctaaacatagaaaaggtacagtaaaaaatacagtataaaagatggaaaatggtatcctttatacctatacacttgtataggttatgtaccataaataaagctttcaggactggaagttgctctgtgtgagttagtaagtgagttattgtatatgaaggcctaggacattactgtttactcctgtggactttgtaaacactgtacacttacactacactaaccttataaaaacatctttttcttcccttgataataaattaaccttagcttactataactattttactttaactcttttgtaataacacttagcttaaaacaaacacatyttacagctgtacaaaaatactttcactctttgtatccttattctatatgctttttcttttttacttttaaactattttgtttaaaactgagacataaacatatacattagcttaggcttccagagg

SEQ ID NO: 394202 - DNA, 594 bp, Homo sapiens
atacttctgcctttaatatttgaatcattaacttttgttatattcttccccattatgtcaattgactgacccctttccagggatcaatggttataaacagcttgaaggcttgcaggcattatcttgaattatatgcaatgttttaaggctactggacttagaaaaaggttctgtttttttcttttaattttttgacttgtttttattgttgttttggctattgcctctttttatttwcttgttcatctgggtattctaggcactgacaaaggaggcaagcataaataatggtatatgtcctcctcctagattgtaaaattttgaggaacactagtcctcgttctgtgaatctctgtaatatttatttattattaagtttagagttgcttttaagttaacatctattaattaattctattacctgcatgttgtgcttgtgtataacatgtccattaattctattaggtcaattcttggagtcaaaattaccttttaaaactttgagttctacaactcaatactttgtggtcacctgaacatttggaacttaggttgtctctttgagtaatagggcttaaagtttaaatcatgaaa

SEQ ID NO: 394203 - DNA, 594 bp, Homo sapiens
atacttctgcctttaatatttgaatcattaacttttgttatattcttccccattatgtcaattgactgacccctttccagggatcaatggttataaacagcttgaaggcttgcaggcattatcttgaattatatgcaatgttttaaggctactggacttagaaaaaggttctgtttttttcttttaattttttgacttgtttttattgttgttttggctattgcctctttttattttcttgttcatctgggtattctaggcactgacaaaggaggcaagcataaataatggtatatgtcctcctcctagattgtaaaattttgaggaacactagtcctcgttctgtgaatctctgtaatatttatttattattaagtttagagttgcttttaagttaacatctattaattaattctattacctgcatgttgtgcttgtgtataacatgtcyattaattctattaggtcaattcttggagtcaaaattaccttttaaaactttgagttctacaactcaatactttgtggtcacctgaacatttggaacttaggttgtctctttgagtaatagggcttaaagtttaaatcatgaaa

SEQ ID NO: 394204 - DNA, 575 bp, Homo sapiens
taatcttttgggaccacccttgtgtatgtggttcctggttgacataaatatgccatacatggccatacataaatattttggaatgtatacrtggatacttactgggaaaccaacagccactgccaagatggctgtgatcaggaggagaactttcttcatctgcaaaatggagtaaataaaaaataagaagaactttcattttattcataaatatcctagaagtcagctaaaagaccatgaatttaaaagatccagttaaagtacgaattatttgacaaatagctctttgagtttgagcaagtcacttacaatcttagggaatcaatctatttgttaataaagaactttttaaaggtcaaagcaaaggagctttgtaatttcataactatattacaccaattgctttaaaaataaacattaacatattatttaagaatactaattcctatgtaacaaacctacacatgtatccctgaacttaaaataaaaaataaaagaataacacttctacatacttgataatcacagaaaagtttctggaagaaataatgcattggtttatacagagaatgtta

SEQ ID NO: 394205 - DNA, 625 bp, Homo sapiens
  misc_feature (1)...(625): n = A,T,C or G
gtgacactgtttttgataccatattccccaaatttaaccctcaaatccaaaatagtaaaactactgagatgttayttatgaatacagtatctctgggtttctcagatggctgctgggaaactccagagatcctcctcctagctcttaacatgaagatatattangaaataaaggtaatgttttgcattctccagatatttaatttgctcaaaactatgctcaatatagtggaagctgctgtgtttttcaaggccatattctgagaaaatagcaataaaatcatcttaaattaattaaatgcaataattatgtatgattactgtggctatgttacaataattgtgcacttctcaggttggattcaggcatatttatgttcatgtacaaagactggtgcaataaatgtcaaccaactgattaaaaaaagtaaacttatcagttggtgacaaataataatatctactttgtggggaaaattaaaggccctggagaggtatcgggatgcactaattgttcttcatgtgttctgtcttttacggtaatcactgattaaaatttcattagatgagtatgtattacacctcaacagagaatgccactgtcccccattgtgatgttgtttgct

SEQ ID NO: 394206 - DNA, 401 bp, Homo sapiens
aggcacccaccatcatgctaggctactatttgtatttttatagagacggggtttcaccatgttggcctggctggtcttaaactcctgacctcaggtgatctgccggcctcagcctttcaaaatgctgggattacaggcatsagccaccttgcccagccaggaagaatcaattttttaataaaaaatttatagctgtgctacaaattcaatttaattagacaagacaaatccagtaataagaataatttctatgtttttcacgcagaagcgatgcctataacatccttctaggaaaccaatctggtgcttgctctatggactatgcaatctcaggcttggaggtaagaaagaatgtcctttcttggcagagcagggacaccgagacattggatatcttttat

SEQ ID NO: 394207 - DNA, 425 bp, Homo sapiens
taatttcagcgtctaaaatcctcgctaccgtgaacaatctgagtatttgatgagacagggctgaatagtgcagtttttctcctagcaaccatttgggggyatttgctttaaatcgattggaaaaatatggcataaccatttgcacaaacttgggacaaatgatattgggataacgatctaccagaatagggaattttacccacagtttctgggacaaaaaccaaggaatctctatcgtgatcagccttcaggcctcctgaagactatctctcacagtgtcctattctcatgctgaggagcctgaagtccctgtgtgaggattagacagtggattgttatgtgtgtaggagaaccagcttaatatgtctgtccatgtctgaacttattgcagaaattgaaaagtaccaagaagtggaagaagacca

SEQ ID NO: 394208 - DNA, 590 bp, Homo sapiens
catttgctttaaatcgattggaaaaatatggcataaccatttgcacaaacttgggacaaatgatattgggataacgatctaccagaatagggaattttacccacagtttctgggacaaaaaccaaggaatctctatsgtgatcagccttcaggcctcctgaagactatctctcacagtgtcctattctcatgctgaggagcctgaagtccctgtgtgaggattagacagtggattgttatgtgtgtaggagaaccagcttaatatgtctgtccatgtctgaacttattgcagaaattgaaaagtaccaagaagtggaagaagaccaagacccatcatgccccaggtaactttgagcaattatggatgcttaattctgtgtcgacacctggagatgccaggtccagggaaaacaagagtgtgttcaatttcatgttttcaacgaaggttgaattactcctcctgacattgctgttggttttcattgcagtagatgtttaggtttccatttcttcctccccttatcatttactaacttactataggttgaccatacctcaaaggctgtatggcaactgcatggaatcttgag

SEQ ID NO: 394209 - DNA, 425 bp, Homo sapiens
taatttcagcgtctaaaatcctcgctaccgtgaacaatctgagtatttgatgagacagggctgaatagtgcagtttttctcctagcaaccatttgggggcatttgctttaaatcgattggaaaaatatggcataaccatttgcacaaacttgggacaaatgatattgggataacgatctaccagaatagggaattttacccacagtttctgggacaaaaaccaaggaatctctatcgtgatcagccttcaggcctcctgaagamtatctctcacagtgtcctattctcatgctgaggagcctgaagtccctgtgtgaggattagacagtggattgttatgtgtgtaggagaaccagcttaatatgtctgtccatgtctgaacttattgcagaaattgaaaagtaccaagaagtggaagaagacca

SEQ ID NO: 394210 - DNA, 590 bp, Homo sapiens
catttgctttaaatcgattggaaaaatatggcataaccatttgcacaaacttgggacaaatgatattgggataacgatctaccagaatagggaattttacccacagtttctgggacaaaaaccaaggaatctctatcgtgatcagccttcaggcctcctgaagactatctctcacagtgtcctattctcatgctgaggagcctgaagtccctgtgtgaggattagacagtggattgttatgtgtgtaggagaaccagcttaatatgtctgtccatgtctgaacttattgcagaaattgaaaagtaccaagaagtggaagaagaccaagacccatcatgccccaggtaactttgagcaattatggatgcttaattctgtgtygacacctggagatgccaggtccagggaaaacaagagtgtgttcaatttcatgttttcaacgaaggttgaattactcctcctgacattgctgttggttttcattgcagtagatgtttaggtttccatttcttcctccccttatcatttactaacttactataggttgaccatacctcaaaggctgtatggcaactgcatggaatcttgag

SEQ ID NO: 394211 - DNA, 386 bp, Homo sapiens
tccatgtctgaacttattgcagaaattgaaaagtaccaagaagtggaagaagaccaagacccatcatgccccaggtaactttgagcaattatggatgcttaattctgtgtcgacacctggagatgccaggtccagggaaaacaagagtgtgttcaatttcatgttttcaacgaaggttgaattactcctmctgacattgctgttggttttcattgcagtagatgtttaggtttccatttcttcctccccttatcatttactaacttactataggttgaccatacctcaaaggctgtatggcaactgcatggaatcttgagcaagtttatggaaaattattgagcccactcttttcatgatcactgttcgctgtgtgtcccgagggc

SEQ ID NO: 394212 - DNA, 590 bp, Homo sapiens
catttgctttaaatcgattggaaaaatatggcataaccatttgcacaaacttgggacaaatgatattgggataacgatctaccagaatagggaattttacccacagtttctgggacaaaaaccaaggaatctctatcgtgatcagccttcaggcctcctgaagactatctctcacagtgtcctattctcatgctgaggagcctgaagtccctgtgtgaggattagacagtggattgttatgtgtgtaggagaaccagcttaatatgtctgtccatgtctgaacttattgcagaaattgaaaagtaccaagaagtggaagaagaccaagacccatcatgccccaggtaactttgagcaattatggatgcttaattctgtgtcgacacctggagatgccaggtccagggaaaacaagagtgtgttcaatttcatgttttcaacgaaggttgaattactcctcctgayattgctgttggttttcattgcagtagatgtttaggtttccatttcttcctccccttatcatttactaacttactataggttgaccatacctcaaaggctgtatggcaactgcatggaatcttgag

SEQ ID NO: 394213 - DNA, 600 bp, Homo sapiens
tgtgtgtcccgagggcactaactcagagtgtcctttaaccccttcatcagtgtgtcacccggccaactcgctgagctyactttctcctctctctctctctctctctctctccctccctctccctgtctttctctttcattcttttctacctggccctggtctatcccaacataaaggcaataattcattacctcattaatggatctgtcctttttctttttaaacagttccttatgttagccatgaaatctagctggggctgtgtggtttctgattccccctggcttattctttactttttcctacttttccaggctcagcagggagctgctggatgagaaagagcctgaagtcttgcaggactcactggatagatgttattcgactccttcaggttatcttgaactgcctgacttaggccagccctacagcagtgctgtttactcattggaggaacagtaccttggcttggctcttgacgtggacagtgagtaccttactgtgaaggtgataagcctccacctggtcttccagataggggtgatattcctgttccaagtggcccttactgacccgagagatgtcattgccgcaggcagg

SEQ ID NO: 394214 - DNA, 476 bp, Homo sapiens
gtgtcacccggccaactcgctgagctcactttctcctctctctctctctctctctctctccctccctctccctgtctttctctttcattcttttctacctggccctggtctatcccaacataaaggcaataattcattacctcattaatggatctgtcctttttctktttaaacagttccttatgttagccatgaaatctagctggggctgtgtggtttctgattccccctggcttattctttactttttcctacttttccaggctcagcagggagctgctggatgagaaagagcctgaagtcttgcaggactcactggatagatgttattcgactccttcaggttatcttgaactgcctgacttaggccagccctacagcagtgctgtttactcattggaggaacagtaccttggcttggctcttgacgtggacagtgagtaccttactgtgaaggtgataagcctccacctggt

SEQ ID NO: 394215 - DNA, 476 bp, Homo sapiens
gtgtcacccggccaactcgctgagctcactttctcctctctctctctctctctctctctccctccctctccctgtctttctctttcattcttttctacctggccctggtctatcccaacataaaggcaataattcattacctcattaatggatctgtcctttttctttttaaacagttccttatgttagccatgaaatstagctggggctgtgtggtttctgattccccctggcttattctttactttttcctacttttccaggctcagcagggagctgctggatgagaaagagcctgaagtcttgcaggactcactggatagatgttattcgactccttcaggttatcttgaactgcctgacttaggccagccctacagcagtgctgtttactcattggaggaacagtaccttggcttggctcttgacgtggacagtgagtaccttactgtgaaggtgataagcctccacctggt

SEQ ID NO: 394216 - DNA, 476 bp, Homo sapiens
gtgtcacccggccaactcgctgagctcactttctcctctctctctctctctctctctctccctccctctccctgtctttctctttcattcttttctacctggccctggtctatcccaacataaaggcaataattcattacctcattaatggatctgtcctttttctttttaaacagttccttatgttagccatgaaatctagctggggctgtgtggtttctgattccccctggcttattctttactttttcctacttttccaggctcagcagggagctgctggatgagaaagagcctgaagtcttgcaggactcactggatagatgttattcgactccttcaggttatcttgaactgcctgacttaggccagccctacagmagtgctgtttactcattggaggaacagtaccttggcttggctcttgacgtggacagtgagtaccttactgtgaaggtgataagcctccacctggt

SEQ ID NO: 394217 - DNA, 476 bp, Homo sapiens
gtgtcacccggccaactcgctgagctcactttctcctctctctctctctctctctctctccctccctctccctgtctttctctttcattcttttctacctggccctggtctatcccaacataaaggcaataattcattacctcattaatggatctgtcctttttctttttaaacagttccttatgttagccatgaaatctagctggggctgtgtggtttctgattccccctggcttattctttactttttcctacttttccaggctcagcagggagctgctggatgagaaagagcctgaagtcttgcaggactcactggatagatgttattcgactccttcaggttatcttgaactgcctgacttaggccagccctacagcagtgctgttyactcattggaggaacagtaccttggcttggctcttgacgtggacagtgagtaccttactgtgaaggtgataagcctccacctggt

SEQ ID NO: 394218 - DNA, 544 bp, Homo sapiens
cacccttggttctgagatgcaaaccaaagaatatcatgaccagctttcaggcctcctgaagtatctctctcacattgtcctgttctcwtgctgaggagcctgagatccctgtgtggggattagacagtggactgttatgggtgtaggtgaattggcttattttgtctgtccctgtctgaatgtattgcaggaactaaaaaggaccaagaagaggaagaagaccaaggcccaccatgccccaggtaactgagcaattgtgaacagctacttctgtgttgacatctggagactcctggttcagggaaaacagagcgggctgacattatcgattacatcttttccagcaagcctgaattattcctactaacattgctgttggttttcattgcagtagatatttaggtttccatttcttcctccccttatcatttactaacctactgtaggtggaccagacttcaaaaactgtattctcatggcgactgcatggaaacttgagcacattttatggaaaattattgagcacagtcttttcatgatccct

SEQ ID NO: 394219 - DNA, 544 bp, Homo sapiens
cacccttggttctgagatgcaaaccaaagaatatcatgaccagctttcaggcctcctgaagtatctctctcacattgtcctgttctcatgctgaggagcctgagatccctgtgtggggattagacagtggactgttaygggtgtaggtgaattggcttattttgtctgtccctgtctgaatgtattgcaggaactaaaaaggaccaagaagaggaagaagaccaaggcccaccatgccccaggtaactgagcaattgtgaacagctacttctgtgttgacatctggagactcctggttcagggaaaacagagcgggctgacattatcgattacatcttttccagcaagcctgaattattcctactaacattgctgttggttttcattgcagtagatatttaggtttccatttcttcctccccttatcatttactaacctactgtaggtggaccagacttcaaaaactgtattctcatggcgactgcatggaaacttgagcacattttatggaaaattattgagcacagtcttttcatgatccct

SEQ ID NO: 394220 - DNA, 544 bp, Homo sapiens
cacccttggttctgagatgcaaaccaaagaatatcatgaccagctttcaggcctcctgaagtatctctctcacattgtcctgttctcatgctgaggagcctgagatccctgtgtggggattagacagtggactgttatgggtgtaggtgaattggcttattttgtctgtccctgtctgaatgtattgcaggaactaaaaaggaccaagaagaggaagaagaccaaggcccaccatgccccaggtaactgagcaattgtgaacagctwcttctgtgttgacatctggagactcctggttcagggaaaacagagcgggctgacattatcgattacatcttttccagcaagcctgaattattcctactaacattgctgttggttttcattgcagtagatatttaggtttccatttcttcctccccttatcatttactaacctactgtaggtggaccagacttcaaaaactgtattctcatggcgactgcatggaaacttgagcacattttatggaaaattattgagcacagtcttttcatgatccct

SEQ ID NO: 394221 - DNA, 544 bp, Homo sapiens
cacccttggttctgagatgcaaaccaaagaatatcatgaccagctttcaggcctcctgaagtatctctctcacattgtcctgttctcatgctgaggagcctgagatccctgtgtggggattagacagtggactgttatgggtgtaggtgaattggcttattttgtctgtccctgtctgaatgtattgcaggaactaaaaaggaccaagaagaggaagaagaccaaggcccaccatgccccaggtaactgagcaattgtgaacagctacttctgtgttgacatctggagactcctggttcagggaaaacagrgcgggctgacattatcgattacatcttttccagcaagcctgaattattcctactaacattgctgttggttttcattgcagtagatatttaggtttccatttcttcctccccttatcatttactaacctactgtaggtggaccagacttcaaaaactgtattctcatggcgactgcatggaaacttgagcacattttatggaaaattattgagcacagtcttttcatgatccct

SEQ ID NO: 394222 - DNA, 619 bp, Homo sapiens
gctgacattatcgattacatcttttccagcaagcctgaattattcctactaacattgctgttggttttcattgcagtagatatttaggtttccatttcttcctccccttatcatttactaacctactgtaggtggaccagacttcaaaaactgtattctcatggygactgcatggaaacttgagcacattttatggaaaattattgagcacagtcttttcatgatccctgtatgctgtgtgtcctgagggcactaactcagagtgtcctgttactccctcatcagtgtgtcacctggacaattcactgagctcgttctctctgtgtgtgtgtgtgtgtctgtgtgtgtgtctgtgtgtgtgtgtgtgtgtgtgtgtgtgtgtgtctatctgtctttctctttcattcttttccatttggccctgttctgtcccaacatgaaggcaataatttgttacctcattaatggatctatccttttagttttttaaccacttccctatgctacccatgaaacctagttggggctctgttgtgtctgatttcccctggcttattctttactttttcctccttttccaggctcagcagggagctgctggaggtagtagagcctgaag

SEQ ID NO: 394223 - DNA, 517 bp, Homo sapiens
caaggcccaccatgccccaggtaactgagcaattgtgaacagctacttctgtgttgacatctggagactcctggttcagggaaaacagagcgggctgacattatcgattacatcttttccagcaagcctgaattattcctactaacattgctgttggttttcattgcagtagatatttaggtttccatttcttcctccccttatcatttactaacctactgtaggtggaccagacttcaaaaactgtattctcatggcgactgcatggaaacttgagcacattttatggaaaattattgagcacagtcttttcatgatccctgtatgctgtgtgtcctgagggcactaactcagagtgtcctgttactccctcatcagtgtgtcacctggacaattcactgagctcgttctctctstgtgtgtgtgtgtgtctgtgtgtgtgtctgtgtgtgtgtgtgtgtgtgtgtgtgtgtgtgtctatctgtctttctctttcattcttttccatttggccctg

SEQ ID NO: 394224 - DNA, 472 bp, Homo sapiens
tcctgttactccctcatcagtgtgtcacctggacaattcactgagctcgttctctctgtgtgtgtgtgtgtgtctgtgtgtgtgtctgtgtgtgtgtgtgtgtgtgtgtgtgtgtgtgtctatctgtctttctctttcattcttttccatttggccctgttctgtcccaacatgaaggcaataatttgttacctcattaatggatctatccttttagtttyttaaccacttccctatgctacccatgaaacctagttggggctctgttgtgtctgatttcccctggcttattctttactttttcctccttttccaggctcagcagggagctgctggaggtagtagagcctgaagtcttgcaggactcactggatagatgttattcaactccttccagttgtcttgaacagcctgactcctgccagccctatggaagttccttttatgcattggaggaaaaacatgttggctt

SEQ ID NO: 394225 - DNA, 555 bp, Homo sapiens
tttgctttaagttgattggaaaaatatggcataactgtttgcacaaacttgggacaaatgatattgggataacgatctactagaatagggacattttacccacagtttctgggagaaaaaccgaggaatttctatcatgaccagccttcaggcctcctgaaatatatctctcacggtgtcctattcttatgctgaggagcctgaggtccctgtgtgaggattagacagtggattgttatgtgtgtaggggaatcagcttaatgtgtctgtccatgtctgaatttattgcagaaattgaaaagaaggggaaggggaagaaaagaaggggaagaagatcaaagaaggaaagaagaaggggaagaaaagaaggggaagaagatcaaamcccaccatgccccaggtgactttcagcaattgtggatgcttaattctgtgttaacacctggaggcaacagattcagggaaaccagagtgtgtttgatgtcatgttttcaacgaaggctgaattactcctactgtcattgctgttggttttcattgcagtagatgtttagg

SEQ ID NO: 394226 - DNA, 518 bp, Homo sapiens
ggagcctgaggtccctgtgtgaggattagacagtggattgttatgtgtgtaggggaatcagcttaatgtgtctgtccatgtctgaatttattgcagaaattgaaaagaaggggaaggggaagaaaagaaggggaagaagatcaaagaaggaaagaagaaggggaagaaaagaaggggaagaagatcaaaccccaccatgccccaggtgactttcagcaattgtggatgcttaattctgtgttaacacctggaggcaacagattcagggaaaccagagtgtgtttgatgtcatgttttcaacgaaggctgaattactcctactgtcattgctgttggttttcattgcagtagatgtttaggtttccatttcttcctccccttatcatttmctaacgtaccataggttgaccatacttcaaaagctgtactctcatggccactgcatcgaattttgagcatattttatggaaaactattgagctcactcttttcatgatcacagtttgctgtgtgtcatg

SEQ ID NO: 394227 - DNA, 428 bp, Homo sapiens
tctagctggggctgtgtggtttctgattccccctggcttattctttactttttcccacttttccaggctcagcagggagctgctggatgagaaagggcctgaagtcttgcaggactcactggatagaagttattcaactccttcaggttgtcttgaactgactgactcatgccagccctacagaagtgccttttacgtattggagcaacagcrtgttggcttggctgttgacatggatggtgagtacctttctatgaaggtgataaggatccactgagtcttctggttagggtcatattcctactgcaagtggcccttactgagctgagagatgtcattgccacagggaggtcctataggcacatgtaggttgaatgaaactctagttccacttggaagcccagacaagggatgggtcagtgagcaag

SEQ ID NO: 394228 - DNA, 428 bp, Homo sapiens
tctagctggggctgtgtggtttctgattccccctggcttattctttactttttcccacttttccaggctcagcagggagctgctggatgagaaagggcctgaagtcttgcaggactcactggatagaagttattcaactccttcaggttgtcttgaactgactgactcatgccagccctacagaagtgccttttacgtattggagcaacagcgtgttggcttggctgttgacatggatggtgagtacctttctatgaaggtgataaggatccactgagtcttctggttagggtcatattcctactgcaagtggcccttactgagctgagagatgtcattgccacagggaggtcctataggcacatgtaggttgartgaaactctagttccacttggaagcccagacaagggatgggtcagtgagcaag

SEQ ID NO: 394229 - DNA, 391 bp, Homo sapiens
tccatgtctgaacttattgcagaaattgaaaagtaccaagaagtggaagaagaccaagacccatcatgccccaggtaactttgagcaattatggatgcttaattctgtgttgacacctggagatgccaggtccagggaaaacaagagtgtgttcaatttcatgttttcaacgaaggttgaattactcctcctgayattgctgttggttttcattgcagtagatgtttaggtttccatttcttcctccccttatcatttactaacttactataggttgaccatacctcaaaggctgtatggcaactgcatggaatcttgagcaagtttatggaaaattattgagcccactcttttcatgatcactgttcgctgtgtgtcccgagggcactaa

SEQ ID NO: 394230 - DNA, 460 bp, Homo sapiens
ggagtttgagactagcctgggcaacatggagaaaccccatctccactaaaaatacaaaaagtagatgggcgtcgtggtgggcaactgtaatcaccactaatcgggtggctgaggcagaagaatcctttgaacccagcaggcagatgttgcagtgagccaagattgcactattgcactccagcatgggtgacagggcaagactcgtcaaaaaacaaacaaaaagataaataaawcaaaaataaaaataaaaagcagagagtagcttggtgagagcgaagtcctgtttcctggtgcacaggctcttgttcctaaagaggaagaaagatcacacccgagaatgtgtggaagcagcagtgcagtgtgcaaagcagggaccctcagcctgtctcctgggctccatccatgttgcttgtcttgtctgtccctcagtttcctcatctgttcagagggtactacaata

SEQ ID NO: 394231 - DNA, 460 bp, Homo sapiens
ggagtttgagactagcctgggcaacatggagaaaccccatctccactaaaaatacaaaaagtagatgggcgtcgtggtgggcaactgtaatcaccactaatcgggtggctgaggcagaagaatcctttgaacccagcaggcagatgttgcagtgagccaagattgcactattgcactccagcatgggtgacagggcaagactcgtcaaaaaacaaacaaaaagataaataaatcaaaaataaaaataaaaagcagagagtagcttggtgagagygaagtcctgtttcctggtgcacaggctcttgttcctaaagaggaagaaagatcacacccgagaatgtgtggaagcagcagtgcagtgtgcaaagcagggaccctcagcctgtctcctgggctccatccatgttgcttgtcttgtctgtccctcagtttcctcatctgttcagagggtactacaata

SEQ ID NO: 394232 - DNA, 460 bp, Homo sapiens
ggagtttgagactagcctgggcaacatggagaaaccccatctccactaaaaatacaaaaagtagatgggcgtcgtggtgggcaactgtaatcaccactaatcgggtggctgaggcagaagaatcctttgaacccagcaggcagatgttgcagtgagccaagattgcactattgcactccagcatgggtgacagggcaagactcgtcaaaaaacaaacaaaaagataaataaatcaaaaataaaaataaaaagcagagagtagcttggtgagagcgaagtcctgtttcctggtgcacaggctcttgttcctaaagaggaagaaagatcacacccgagaatgtgtggaagcagcagtgcagtgtgcaaagcagggaccctcagcctgtctcctgggctccatccawgttgcttgtcttgtctgtccctcagtttcctcatctgttcagagggtactacaata

SEQ ID NO: 394233 - DNA, 538 bp, Homo sapiens
ccaccatcaagatgtggccaaatattgaaaagaccttttgcttcccatatcactggaggcttgtgcagcctctctctggacgttggcagctgtctcccccatcctgccagatctgattcccaggcacaggcttggtgtcctgtcacggtttgcatttcaaacctcattctttctcttagaagcagacaaacttgtcccacagtcctctatgcatcagaagatttcaagcctccaagtggcttctgctgtgttcttcagggacattctatccatggggagtgctccagtctgaagcacttcctaccacaaaacgcccccacataaagtgccttctccaacatcacacggcragggccttcatctcattttggaaagcagttgtaagtgttcccacatttgaatgcttcagacccttgcaagagacaatttgtctgccacggagagagagaaactcaggaaggacaagtcattcactctctgacagttactaagaacattgccgaaaagacagcctgggaaccttcattcttagtgcaga

SEQ ID NO: 394234 - DNA, 503 bp, Homo sapiens
ggttacttggttaaggaggggtctaggagatctgtcccttttagagacaccttacttataatgaagaagtacttgggaaagyggttttcaagagtataaatatcctgtattctaatgatcatcctctaaacattttatcatttattaatcctccctgcctgtgtctattattatattcatatctctacactgcaaattttgggtctcaatttttactgtgcctttgtttttactagtgtctgctgttgcaaaaagaagaagacattctctgcctgagttttaatttttgtccaaagttaattttaatctatacaattaaaaccttttgcctatcactctggacttctggattgttttttacattcagtgttataatatttgattatgctgattggttttggtgggtactgatgcgaattaataaaaacatttcatttccatgtttattttctaatctcttccacattgtaggctatgtttaccatacgtagcagaatgtattt

SEQ ID NO: 394235 - DNA, 594 bp, Homo sapiens
aaacaaattcaaaagctagcagaagacaagaagtaactaagatcagagcagaactaaaggagatagagacacaaaaaacccttcaaaaratcaatgaatccagggctggttttttgaaaagatcaacaagaaaaccctgtttggctagttcacctggctcatctgatggcaagttcctatcttgagaggactatgaaattaaaaccaatacaagtgctacaaataacatacaacattgtaaatcagcacaatttgtagctgggtgaatggaagaaatagttctattcatcacttcctcattttccctaaatctacaatctccagatgtcactactgaattaacagccaacaattccacaacattacctgggagacactggccctttttcttcctcttcctcatcatcactttcattttctgtaaataaattcagagaagcaggtcacattaagcaattcatacttcacatatgaacaaatcactgtccagtcatagcacaaggacataactattctcagtgcaagaataaggattctgacaggaatattctagggtgtcctagattaactttggtgagaattagataaccctgc

SEQ ID NO: 394236 - DNA, 594 bp, Homo sapiens
aaacaaattcaaaagctagcagaagacaagaagtaactaagatcagagcagaactaaaggagatagagacacaaaaaacccttcaaaagatcaatgaatccagggctggttttttgaaaagatcaacaagaaaaccctgtttggctagttcacctggctcatctgatggcaagttcctrtcttgagaggactatgaaattaaaaccaatacaagtgctacaaataacatacaacattgtaaatcagcacaatttgtagctgggtgaatggaagaaatagttctattcatcacttcctcattttccctaaatctacaatctccagatgtcactactgaattaacagccaacaattccacaacattacctgggagacactggccctttttcttcctcttcctcatcatcactttcattttctgtaaataaattcagagaagcaggtcacattaagcaattcatacttcacatatgaacaaatcactgtccagtcatagcacaaggacataactattctcagtgcaagaataaggattctgacaggaatattctagggtgtcctagattaactttggtgagaattagataaccctgc

SEQ ID NO: 394237 - DNA, 594 bp, Homo sapiens
aaacaaattcaaaagctagcagaagacaagaagtaactaagatcagagcagaactaaaggagatagagacacaaaaaacccttcaaaagatcaatgaatccagggctggttttttgaaaagatcaacaagaaaaccctgtttggctagttcacctggctcatctgatggcaagttcctatcttgagaggactatgaaattaaaaccaatacaagtgcyacaaataacatacaacattgtaaatcagcacaatttgtagctgggtgaatggaagaaatagttctattcatcacttcctcattttccctaaatctacaatctccagatgtcactactgaattaacagccaacaattccacaacattacctgggagacactggccctttttcttcctcttcctcatcatcactttcattttctgtaaataaattcagagaagcaggtcacattaagcaattcatacttcacatatgaacaaatcactgtccagtcatagcacaaggacataactattctcagtgcaagaataaggattctgacaggaatattctagggtgtcctagattaactttggtgagaattagataaccctgc

SEQ ID NO: 394238 - DNA, 594 bp, Homo sapiens
aaacaaattcaaaagctagcagaagacaagaagtaactaagatcagagcagaactaaaggagatagagacacaaaaaacccttcaaaagatcaatgaatccagggctggttttttgaaaagatcaacaagaaaaccctgtttggctagttcacctggctcatctgatggcaagttcctatcttgagaggactatgaaattaaaaccaatacaagtgctacaaataacatacaacattgtaaatcagcacaatttgtagctgggtgaatggaagaaatagttctattcatcacttcctcattttccctaaatctacaatctccagatgtcactactgaattaacagccaacaattccacaacattacctgggagacactggccctttttcttcctcttcytcatcatcactttcattttctgtaaataaattcagagaagcaggtcacattaagcaattcatacttcacatatgaacaaatcactgtccagtcatagcacaaggacataactattctcagtgcaagaataaggattctgacaggaatattctagggtgtcctagattaactttggtgagaattagataaccctgc

SEQ ID NO: 394239 - DNA, 487 bp, Homo sapiens
tttctgtaaataaattcagagaagcaggtcacattaagcaattcatacttcacatatgamcaaatcactgtccagtcatagcacaaggacataactattctcagtgcaagaataaggattctgacaggaatattctagggtgtcctagattaactttggtgagaattagataaccctgctttccagacccacaggccaaaatctccctctacgtgtagaccataatgccatattccctgcctgagtcaaagttaaacaaaattttttccccaaaaaaatctccaaaaattggtcaaacaattttctaagagtgctgctgcgatacggacttatatcaccaggtaacatggacattaaatgtttagaggcatctatacatgaaacacgactgatagataaatttgaacaactcttgctttaaaaagaatctgtgatttgggaggccaagacaggtgaatcatttgaggtcatgagttcaggactaccc

SEQ ID NO: 394240 - DNA, 487 bp, Homo sapiens
tttctgtaaataaattcagagaagcaggtcacattaagcaattcatacttcacatatgaacaaatcactgtccagtcatagcacaaggacataactattctcagtgcaagaataaggattctgacaggaatattctagggtgtcctagattaactttggtgagaattagatraccctgctttccagacccacaggccaaaatctccctctacgtgtagaccataatgccatattccctgcctgagtcaaagttaaacaaaattttttccccaaaaaaatctccaaaaattggtcaaacaattttctaagagtgctgctgcgatacggacttatatcaccaggtaacatggacattaaatgtttagaggcatctatacatgaaacacgactgatagataaatttgaacaactcttgctttaaaaagaatctgtgatttgggaggccaagacaggtgaatcatttgaggtcatgagttcaggactaccc

SEQ ID NO: 394241 - DNA, 487 bp, Homo sapiens
tttctgtaaataaattcagagaagcaggtcacattaagcaattcatacttcacatatgaacaaatcactgtccagtcatagcacaaggacataactattctcagtgcaagaataaggattctgacaggaatattctagggtgtcctagattaactttggtgagaattagataaccctgctttccagacccacaggccaaaatctccctctacgtgtagaccataatgccatattccctgcctgagtcaaagttaaacaaaattttttccccaaaaaaatctccaaaaattggtcaaacaattttctaagagtgctgctgcratacggacttatatcaccaggtaacatggacattaaatgtttagaggcatctatacatgaaacacgactgatagataaatttgaacaactcttgctttaaaaagaatctgtgatttgggaggccaagacaggtgaatcatttgaggtcatgagttcaggactaccc

SEQ ID NO: 394242 - DNA, 303 bp, Homo sapiens
aattccatggacattgttcagggacagaggacttaatcacagatgacaagagatactgaatcgaagctagtaggcctgacagatactgcctgtgcacctcctgcactcaggtgactatgagattgtcacacttgcctggggtygagtaacttgatactggggactggcagacaaagtcatgacattagctgagaaggacaaaaaaagtccctgatatctgtttagaaacccatcacagttttttattcaaatgaatttgtgtttatagagcctgtcttcagagtttatcttcctcagcctaga

SEQ ID NO: 394243 - DNA, 303 bp, Homo sapiens
aattccatggacattgttcagggacagaggacttaatcacagatgacaagagatactgaatcgaagctagtaggcctgacagatactgcctgtgcacctcctgcactcaggtgactatgagattgtcacacttgcctggggttgagtaacttgatactggggactggcagacaaagkcatgacattagctgagaaggacaaaaaaagtccctgatatctgtttagaaacccatcacagttttttattcaaatgaatttgtgtttatagagcctgtcttcagagtttatcttcctcagcctaga

SEQ ID NO: 394244 - DNA, 303 bp, Homo sapiens
aattccatggacattgttcagggacagaggacttaatcacagatgacaagagatactgaatcgaagctagtaggcctgacagatactgcctgtgcacctcctgcactcaggtgactatgagattgtcacacttgcctggggttgagtaacttgatactggggactggcagacaaagtcatgacattagctgagaaggacaaaaaaastccctgatatctgtttagaaacccatcacagttttttattcaaatgaatttgtgtttatagagcctgtcttcagagtttatcttcctcagcctaga

SEQ ID NO: 394245 - DNA, 585 bp, Homo sapiens
tactgttcctccaatgagtaaacagcactgctgtagggctggcctaagtcaggcagttcaagataacctgaaggagtcgaataacatctatccagtgagtcctgcaagacttcaggctctttctcatccagcagctccctgctgagcctggaaaagtaggaaaaagtaaagaataagccagggggaatcagaaaccacacagccccagctagatttcatggctaacataaggaactgtttaaaaagaaaaaggacagatccattaatgaggtaatgaattattgcctttatgttgggatagaccagggccaggtagaaaagaatgaaagagaaagacagggagagggagggagagagagagagagagagagaggagaaagtragctcagcgagttggccgggtgacacactgatgaaggggtcaaaggacactctgagttagtgccctcgggacacacagcgaacagtgatcatgaaaagagtgggctcaataattttccataaacttgctcaagattccatgcagttgccatacagcctttgaggtatggtcaacctatagtaagttagtaaatgataagggga

SEQ ID NO: 394246 - DNA, 585 bp, Homo sapiens
tactgttcctccaatgagtaaacagcactgctgtagggctggcctaagtcaggcagttcaagataacctgaaggagtcgaataacatctatccagtgagtcctgcaagacttcaggctctttctcatccagcagctccctgctgagcctggaaaagtaggaaaaagtaaagaataagccagggggaatcagaaaccacacagccccagctagatttcatggctaacataaggaactgtttaaaaagaaaaaggacagatccattaatgaggtaatgaattattgcctttatgttgggatagaccagggccaggtagaaaagaatgaaagagaaagacagggagagggagggagagagagagagagagagagaggagaaagtaagctcagcgarttggccgggtgacacactgatgaaggggtcaaaggacactctgagttagtgccctcgggacacacagcgaacagtgatcatgaaaagagtgggctcaataattttccataaacttgctcaagattccatgcagttgccatacagcctttgaggtatggtcaacctatagtaagttagtaaatgataagggga

SEQ ID NO: 394247 - DNA, 585 bp, Homo sapiens
tactgttcctccaatgagtaaacagcactgctgtagggctggcctaagtcaggcagttcaagataacctgaaggagtcgaataacatctatccagtgagtcctgcaagacttcaggctctttctcatccagcagctccctgctgagcctggaaaagtaggaaaaagtaaagaataagccagggggaatcagaaaccacacagccccagctagatttcatggctaacataaggaactgtttaaaaagaaaaaggacagatccattaatgaggtaatgaattattgcctttatgttgggatagaccagggccaggtagaaaagaatgaaagagaaagacagggagagggagggagagagagagagagagagagaggagaaagtaagctcagcgagttggccgggtgacacactgatgaaggggtcaaaggacactctgagttagtgccctcgggacacacagcgaacagtgatcaygaaaagagtgggctcaataattttccataaacttgctcaagattccatgcagttgccatacagcctttgaggtatggtcaacctatagtaagttagtaaatgataagggga

SEQ ID NO: 394248 - DNA, 573 bp, Homo sapiens
gaacacactcttgttttccctggacctggcatctccaggtgtcracacagaattaagcatccataattgctcaaagttacctggggcatgatgggtcttggtcttcttccacttcttggtacttttcaatttctgcaataagttcagacatggacagacatattaagctggttctcctacacacataacaatccactgtctaatcctcacacagggacttcaggctcctcagcatgagaataggacactgtgagagatagtcttcaggaggcctgaaggctgatcaccatagagattccttggtttttgtcccagaaactgtgggtaaaattccctattctggtagatcgttatcccaatatcatttgtcccaagtttgtgcaaatggttatgccatatttttccaatcgatttaaagcaaatgcccccaaatggttgctaggagaaaaactgcactattcagccctgtctcatcaaatactcagattgttcacggtagcgaggattttagacgctgaaattagagtgaaggatgaaatctacaagatctacaaaattgagacaaaatcagag

SEQ ID NO: 394249 - DNA, 599 bp, Homo sapiens
atctgggtgcaaagtctccataggtccggaattttgaatagttttctggagtcatctggttattgttaaagccaagagaaytggtgagatcacagaatacaataatgatcaataagagggaagggaagagagccaagaatgggagactgggaagcatacacatttaattaaggtttggtaaggtgaaaggtgtcagcagagaatgtaaaggtgaaataatgagagaaaaaggaggacatcaaggagaaagtcgtgttttgaaaaaaacagaaaggacacattttcaagaaagacattgtcaatagtttaaatgtcacaaaatagtagagtataatgcaattaaaaaaacaaaatctgttgcttttgttaattaaataactagtaacctcggctgcagcagtttcagtagagtgaggagagttgacaccaaactgcaccagtggagtgaaaataagtgggaagaaagagtgaggaagtggaggacagtcttttttttttttttaataaaatattttcccaaactgtcttttctggaacttccaacatgtctgcttaagagcttgtctaagttgaattcattcgaacttcttgaacctaat

SEQ ID NO: 394250 - DNA, 599 bp, Homo sapiens
atctgggtgcaaagtctccataggtccggaattttgaatagttttctggagtcatctggttattgttaaagccaagagaattggtgagatcacagaatacaataatgatcaataagagggaagggaagagagccaagaatgggagactgggaagcatacacatttaattaaggtttggtaaggtgaaaggtgtcagcagagaatgtaaaggtgaaataatgagagaaaaaggaggacatcaaggagaaagtcgtgttttgaaaaaaacaraaaggacacattttcaagaaagacattgtcaatagtttaaatgtcacaaaatagtagagtataatgcaattaaaaaaacaaaatctgttgcttttgttaattaaataactagtaacctcggctgcagcagtttcagtagagtgaggagagttgacaccaaactgcaccagtggagtgaaaataagtgggaagaaagagtgaggaagtggaggacagtcttttttttttttttaataaaatattttcccaaactgtcttttctggaacttccaacatgtctgcttaagagcttgtctaagttgaattcattcgaacttcttgaacctaat

SEQ ID NO: 394251 - DNA, 599 bp, Homo sapiens
atctgggtgcaaagtctccataggtccggaattttgaatagttttctggagtcatctggttattgttaaagccaagagaattggtgagatcacagaatacaataatgatcaataagagggaagggaagagagccaagaatgggagactgggaagcatacacatttaattaaggtttggtaaggtgaaaggtgtcagcagagaatgtaaaggtgaaataatgagagaaaaaggaggacatcaaggagaaagtcgtgttttgaaaaaaacagaaaggacacattttcaagaaagacattgtcaatagtttaaatgtcacaaaatagtagagtataatgcaattaaaaaaacaaaatctrttgcttttgttaattaaataactagtaacctcggctgcagcagtttcagtagagtgaggagagttgacaccaaactgcaccagtggagtgaaaataagtgggaagaaagagtgaggaagtggaggacagtcttttttttttttttaataaaatattttcccaaactgtcttttctggaacttccaacatgtctgcttaagagcttgtctaagttgaattcattcgaacttcttgaacctaat

SEQ ID NO: 394252 - DNA, 456 bp, Homo sapiens
attaaaaaaacaaaatctgttgcttttgttaattaaataactagtaacctcggctgcagcagtttcagtagagtgaggagagttgacaccaaactgcaccagtggagtgaaaataagtgggaagaaagagtgaggaagtggaggacagtcttttttttttttttaataaaatattttcccaarctgtcttttctggaacttccaacatgtctgcttaagagcttgtctaagttgaattcattcgaacttcttgaacctaattagtttctttttgctgtttttttttttttttttttttttttttggagagggagccttgctctatcacccaggctggagttcaagggggcaatttcggctcactgaaacctcctcctcctgggttcaagcagttctcctgcctcagcccaattagttttaaagaccctgcatatattggcagggaaaacctaaaac

SEQ ID NO: 394253 - DNA, 456 bp, Homo sapiens
attaaaaaaacaaaatctgttgcttttgttaattaaataactagtaacctcggctgcagcagtttcagtagagtgaggagagttgacaccaaactgcaccagtggagtgaaaataagtgggaagaaagagtgaggaagtggaggacagtcttttttttttttttaataaaatattttcccaaactgtcttttctggaacttccaacatgtctgcttaagagcttgtctaagttgaattcattcgaacttcttgaacctaatwagtttctttttgctgtttttttttttttttttttttttttttggagagggagccttgctctatcacccaggctggagttcaagggggcaatttcggctcactgaaacctcctcctcctgggttcaagcagttctcctgcctcagcccaattagttttaaagaccctgcatatattggcagggaaaacctaaaac

SEQ ID NO: 394254 - DNA, 503 bp, Homo sapiens
ggttacttggttaaggaggggtctaggagatctgtcccttttagagacaccttacttataatgaagaagtacttgggaaagcggttttcaagagtataaatatcctgtattctaatgatcatcctctaaacattttatcatttattaatcctccctgcctgtgtctattattatattcatatctctacactgcaaatttkgggtctcaatttttactgtgcctttgtttttactagtgtctgctgttgcaaaaagaagaagacattctctgcctgagttttaatttttgtccaaagttaattttaatctatacaattaaaaccttttgcctatcactctggacttctggattgttttttacattcagtgttataatatttgattatgctgattggttttggtgggtactgatgcgaattaataaaaacatttcatttccatgtttattttctaatctcttccacattgtaggctatgtttaccatacgtagcagaatgtattt

SEQ ID NO: 394255 - DNA, 471 bp, Homo sapiens
aaagatcaatttctgacttgtcttgttctagaaaacctcaatggaaattacagcaagctgaataggatattaattaaaaacataaacctggtgaaacccgaacatagaggctcyagttcaaagatgcttccaatagttgacatggcccttcattccttaaaaccagctatttttcttttgaattacattacctttaattctgtaaattggatgttatatagtaccatgaaaactgctgtgagtaattataatactcattgctgagtgatgtgacttctttctcaaggctatttctgagggaaattgtacaattagatctttaggtattgtgacttgttttggaaatcatggtggccctccagggagctaatgaatctttaattatttagaggttcacatgagaccccttacagatataagcacattagctctgtagctaagggaacatttaaaaacagtaacatgaaatgt

SEQ ID NO: 394256 - DNA, 471 bp, Homo sapiens
aaagatcaatttctgacttgtcttgttctagaaaacctcaatggaaattacagcaagctgaataggatattaattaaaaacataaacctggtgaaacccgaacatagaggctccagttcaaagatgcttccaatagttgacatggccmttcattccttaaaaccagctatttttcttttgaattacattacctttaattctgtaaattggatgttatatagtaccatgaaaactgctgtgagtaattataatactcattgctgagtgatgtgacttctttctcaaggctatttctgagggaaattgtacaattagatctttaggtattgtgacttgttttggaaatcatggtggccctccagggagctaatgaatctttaattatttagaggttcacatgagaccccttacagatataagcacattagctctgtagctaagggaacatttaaaaacagtaacatgaaatgt

SEQ ID NO: 394257 - DNA, 471 bp, Homo sapiens
aaagatcaatttctgacttgtcttgttctagaaaacctcaatggaaattacagcaagctgaataggatattaattaaaaacataaacctggtgaaacccgaacatagaggctccagttcaaagatgcttccaatagttgacatggcccttcattccttaaaaccagctatttttctttygaattacattacctttaattctgtaaattggatgttatatagtaccatgaaaactgctgtgagtaattataatactcattgctgagtgatgtgacttctttctcaaggctatttctgagggaaattgtacaattagatctttaggtattgtgacttgttttggaaatcatggtggccctccagggagctaatgaatctttaattatttagaggttcacatgagaccccttacagatataagcacattagctctgtagctaagggaacatttaaaaacagtaacatgaaatgt

SEQ ID NO: 394258 - DNA, 578 bp, Homo sapiens
cctaagatttttctgtatattttcatatttcaattttcctgtgaggttagaatgaacacttttagctaagacatttgggcctccaaatcctaaacctttcagaatgttagtttattatttggtttttacctaaattattttctgcttattcaagatccttaggtctatccagttacrtttttatttttttatttttatttttttattttgaaacaaagtctcactctgttgccaaagctggagtgcattggcatgatctgggctcactgcaacctctgcctcccaggttcaagtgattctcctgcctcaacctcccgagtagctgggattacaggggcataccaccacacccagctaatttttgcatttttagtagagatggggtttcaccatgctggccaggctggtctcaaactcctgacttcaggtgatctgcccacctcaggatcccaaagtgctgggattataggcgtgagccaccatgcctggctgtatccagttacatttttaagaccagccaggcttaatatatatttggtctttagctcaattcaatttgttgcattttgtccattgta

SEQ ID NO: 394259 - DNA, 556 bp, Homo sapiens
ggcttaatatatatttggtctttagctcaattcaatttgttgcattttgtccattgtacttcatgtgacacagaatatatcttaatttaaaaagacatatgtttgttgagctatctgttacrttggtatatcttggaattttaaaaaatataaaccacagaagccaattatggctgacattaacaataaataggtttatcacagaaatagtggggaacttgtagaactgttgagaaggctagagagccagatcaaagctaggcagccaggaaatgtaccccaaaccatgctgtagaactcatccagggaggaaaccactgtcaccaccagtaagaagtaacaccgaagatgcagagagcaacaattgcagcaattgctcaatcctaggctaactgcaaagccaccagcaccactcccacttgttcgctttgcaacagatagctgcaaaggaggctgagaaagcaagcatttgacattttagcttctaaagcaggaggtggtttcttgttttcgtcaaaactgagaggctgaggaattcctcaaacacaggaacaaa

SEQ ID NO: 394260 - DNA, 440 bp, Homo sapiens
cattcctgacagagaaatgtccttgataatctttttgtgtgagcgtgccatggtcattgttaatttctttcatttaacaaaataatagactttattttttgagcagttttagctttatggaaagatcgagcagaaagtacagagttctcacatactgtcacctttatcccacccccagtttacattagrgttcactctttgtgtggtacaggtctaggagttttgcaaaacgcataatgtcatgtacccatcattacattattaccaacgtattttcaatcccctaaaaatcgcctgtttcagaactatttatctccctacccatccccaaactcctggcaaccactgagcttttttgttgttgttgttgttacttagtttttatttcataatcataaacttaactcaactctgcaatccagctaggcatggaagggaac

SEQ ID NO: 394261 - DNA, 551 bp, Homo sapiens
gtacaggtctaggagttttgcaaaacgcataatgtcatgtacccatcattacattattaccaacgtattttcaatcccctaaaaatcgcctgtttcagaactatttatctccctacccatccccaaactcctggcaaccactgagcttttttgttgttgttgttgttacttagtttttatttcataatcataaacttaactcaactctgcaatccagctaggcatggaagggaacaaggaaaacatggaacccaaagggaactgcagcaagagcacmaagattctaggatattgcaagcaaatgtggtggaggggtgctctcctgagctacagaaggaatgggtctggtggtgaaaataaaacacaagtcaaactcattagaattgtccacagtcagcaatggtgatcttcttgctggtcttgctattcctgtacccaaagtgctccgtggcttccacaatattcacacgttctttcaccttgccaaacgccacatgcttgccatccaaccactcagtcttggcagcgcagatgaaaaactgggaaccatt

SEQ ID NO: 394262 - DNA, 557 bp, Homo sapiens
tacccatcattacattattaccaacgtattttcaatcccctaaaaatcgcctgtttcagaactatttatctccctacccatccccaaactcctggcaaccactgagcttttttgttgttgttgttgttacttagtttttatttcataatcataaacttaactcaactctgcaatccagctaggcatggaagggaacaaggaaaacatggaacccaaagggaactgcagcaagagcacaaagattctaggatattgcaagcaaatgtggtggaggggtgctctcctgagctacagaaggaatgggtctggtggtgaaaataaaacacaagtcaaactcattagaattgtccacagtcagcaatggtgatcttcttgctggtcttgctattcctgtacccaaagtgctccrtggcttccacaatattcacacgttctttcaccttgccaaacgccacatgcttgccatccaaccactcagtcttggcagcgcagatgaaaaactgggaaccatttgtgttgggtccagcatttgccatggacaagatgccagaacctgt

SEQ ID NO: 394263 - DNA, 517 bp, Homo sapiens
ctctacactgcaaattttgggtctcaatttttactgtgcctttgtttttactagtgtctgctgttgcaaaaagaagaaracattctctgcctgagttttaatttttgtccaaagttaattttaatctatacaattaaaaccttttgcctatcactctggacttctggattgttttttacattcagtgttataatatttgattatgctgattggttttggtgggtactgatgcgaattaataaaaacatttcatttccatgtttattttctaatctcttccacattgtaggctatgtttaccatacgtagcagaatgtatttacatttcttggttctagtcatttgtattcttcgtgagtgtgagtgtgtgtgtgtctgtgtgtctgcgtgtgtgtctgtgtgtgcctttggcatttaggaagggttgtatagctcatgttaaatattgcactaaaaatgtttttgatggttttcctcccttttaactagacacacttctaatatttggtttatagtt

SEQ ID NO: 394264 - DNA, 551 bp, Homo sapiens
gtacaggtctaggagttttgcaaaacgcataatgtcatgtacccatcattacattattaccaacgtattttcaatcccctaaaaatcgcctgtttcagaactatttatctccctacccatccccaaactcctggcaaccactgagcttttttgttgttgttgttgttacttagtttttatttcataatcataaacttaactcaactctgcaatccagctaggcatggaagggaacaaggaaaacatggaacccaaagggaactgcagcaagagcacaaagattctaggatattgcaagcaaatgtggtggaggggtgctctcctgagctacagaaggaatgggtctggtggtgaaaataaaacacaagtcaaactcattagaattgtccacagtcagcaatggtgatcttcttgctggtcttgctattcctgtacccaaagtgctccgtggcttccacaatattcacacgttctttcaccttgccaaasgccacatgcttgccatccaaccactcagtcttggcagcgcagatgaaaaactgggaaccatt

SEQ ID NO: 394265 - DNA, 551 bp, Homo sapiens
gtacaggtctaggagttttgcaaaacgcataatgtcatgtacccatcattacattattaccaacgtattttcaatcccctaaaaatcgcctgtttcagaactatttatctccctacccatccccaaactcctggcaaccactgagcttttttgttgttgttgttgttacttagtttttatttcataatcataaacttaactcaactctgcaatccagctaggcatggaagggaacaaggaaaacatggaacccaaagggaactgcagcaagagcacaaagattctaggatattgcaagcaaatgtggtggaggggtgctctcctgagctacagaaggaatgggtctggtggtgaaaataaaacacaagtcaaactcattagaattgtccacagtcagcaatggtgatcttcttgctggtcttgctattcctgtacccaaagtgctccgtggcttccacaatattcacacgttctttcaccttgccaaacgccacatgcttgccatccaaccactcagtcttggcagcrcagatgaaaaactgggaaccatt

SEQ ID NO: 394266 - DNA, 551 bp, Homo sapiens
accacattttgcttatgcagtcacctattgaaggacatcttggttgcttccaagttgtggcagtcttcatttctttctttctttctttctttctttctttctttctttctttctttctttctttctttcttcttctttttttttttttttttttgagacagagtcttgctctgtcacccaggctggagtgaagtggcacaatctcagctcattgcaacctccgcctcccaggttcaagtgattctcttcctcagcctctggagtagctgggattacaggtgtgcaccaccaygcctggttagtcttcaggaatatttacaggactgtatagaattaggagccatcaaaggggatccctgaattctttctgtttttcttacaaataccagttttaaggtcaagatttactaccccatgccacagtgtagccgcattttaaattttaaatttttgactgtttgtttaaaggtctcaggcaacctaaaaggctagatagaagtctctcatcctctaacgaaggatggattgtaaaatggaatactgctaagact

SEQ ID NO: 394267 - DNA, 501 bp, Homo sapiens
tgatgtcaggtaaagcaaatgtaattcaaggwtaaaggtagattccatttacaaaattccttgttgcctttatcatagaggagttccaataaaatcaacaagtctgacaaaaggtgactggtttattcacccaggatatgttattgtgtgcttagccttggactttgttgcttgtgtgttggacacctaatagtcttgacagctaaataggcttttgtaagcgagagtggtaaagtccaacatgttgctgaacctatgtgtattctctactgctaccaccaatgttgctgtttattagccttctaagcaagcaatgtagtgcctggtgaaagagattgtttcataccttcatatctatttgataaccttcctgatgatagtttggtgagcattcgtattaagcacaaatattcttacactctggctcattttctgtggttcatctacatattttttccccaaaactcattgccaccaatccttcagtctttgtctttccga

SEQ ID NO: 394268 - DNA, 501 bp, Homo sapiens
tgatgtcaggtaaagcaaatgtaattcaaggttaaaggtagattccatttacaaaattccttgttgcctttatcatagaggagytccaataaaatcaacaagtctgacaaaaggtgactggtttattcacccaggatatgttattgtgtgcttagccttggactttgttgcttgtgtgttggacacctaatagtcttgacagctaaataggcttttgtaagcgagagtggtaaagtccaacatgttgctgaacctatgtgtattctctactgctaccaccaatgttgctgtttattagccttctaagcaagcaatgtagtgcctggtgaaagagattgtttcataccttcatatctatttgataaccttcctgatgatagtttggtgagcattcgtattaagcacaaatattcttacactctggctcattttctgtggttcatctacatattttttccccaaaactcattgccaccaatccttcagtctttgtctttccga

SEQ ID NO: 394269 - DNA, 501 bp, Homo sapiens
tgatgtcaggtaaagcaaatgtaattcaaggttaaaggtagattccatttacaaaattccttgttgcctttatcatagaggagttccaataaaatcaacaagtctgacaaaaggtgactggtttattcacccaggatatgttattgtgtgcttagccttggactttgttgcttgtgtgttggacacctaatagtcttgacagctaaataggcttttgtaagcgagagtggtaaagtccaacatgttgctraacctatgtgtattctctactgctaccaccaatgttgctgtttattagccttctaagcaagcaatgtagtgcctggtgaaagagattgtttcataccttcatatctatttgataaccttcctgatgatagtttggtgagcattcgtattaagcacaaatattcttacactctggctcattttctgtggttcatctacatattttttccccaaaactcattgccaccaatccttcagtctttgtctttccga

SEQ ID NO: 394270 - DNA, 501 bp, Homo sapiens
tgatgtcaggtaaagcaaatgtaattcaaggttaaaggtagattccatttacaaaattccttgttgcctttatcatagaggagttccaataaaatcaacaagtctgacaaaaggtgactggtttattcacccaggatatgttattgtgtgcttagccttggactttgttgcttgtgtgttggacacctaatagtcttgacagctaaataggcttttgtaagcgagagtggtaaagtccaacatgttgctgaacctatgtgtattctctactgctaccaccaatgttgctgtttattagccttctragcaagcaatgtagtgcctggtgaaagagattgtttcataccttcatatctatttgataaccttcctgatgatagtttggtgagcattcgtattaagcacaaatattcttacactctggctcattttctgtggttcatctacatattttttccccaaaactcattgccaccaatccttcagtctttgtctttccga

SEQ ID NO: 394271 - DNA, 525 bp, Homo sapiens
acataggctgaatttcttttaaaattgcattcacgtaggttataatgcctaagcaatctacttttggctgctgctgtgatgttgtacagtgacttctgtaaatcaggctcaatttttccctcactaatcaactggccatagagaacttcccatgaagacataggtatagattctattattcctacctgctgatgaagcaggatagttaattggaaaacacttatttcatgataagcagctcatgttgtcatatttttttgcattgataggacttcagtttctacaatggtccaggatcaatcaagagttctttaaagaaaacatttattttgtcaaagaaatgcattttgttccaaatcctaagaacaatagtagtggtgtgtcagaggctctattgcatctggatataaaaacaaaggggcacaatattcctgaccagttgggaattattatcttsatctcaatcccatcaaaatgtggcagcatgacaagtcatgaagtaaaaggaccaggtgataaaatgag

SEQ ID NO: 394272 - DNA, 645 bp, Homo sapiens
acccatgtgtgtgcatatattgattaaatattatatttctttttacttttattattattattgagaaaagatctcactctgtcgcccaggctggagtgcagcggcacaatctcggctgcctgcagccttgtcctcccaaagccctagaccctgtaacataatggaatatgtatgtttctaatttgtgcaatatggaagcaggaatactacatagaactktcatcttttcctattgcatttattttggtgtggaaaaatataataattggcttcagtcagtaagtctatttcattcaagaatatttaaatataatccaaaccatcttaggtacattttgtgatacaagaggatggtatcttctatttggaaatataaaatcccagggtctcacagtttaagtatactttccatgggtatgtataaaacaagaatcccactttacaaagttaatagaaaaaatatatgctaattggaaggagaggcttctgattgaggataaagtggaaattttcacatactgctaattacactttaatggagtaagaaaaaaagaattggaaatagtaccctataaaacttctgaaatgaaattacagtttctctctctctcttttttttttttttttcttgagacggagtttcgc

SEQ ID NO: 394273 - DNA, 645 bp, Homo sapiens
acccatgtgtgtgcatatattgattaaatattatatttctttttacttttattattattattgagaaaagatctcactctgtcgcccaggctggagtgcagcggcacaatctcggctgcctgcagccttgtcctcccaaagccctagaccctgtaacataatggaatatgtatgtttctaatttgtgcaatatggaagcaggaatactacatagaactgtcatcttttcctattgcatttattttggtgtggaaaaatataataattggcttcagtcagtaagtctatttcattcaagaatatttaaatataatccaaaccatcttaggtacattttgtgatacaagaggatggtatcttctatttggaaatataaaatcccagggtctcacagtttaagtatactttccakgggtatgtataaaacaagaatcccactttacaaagttaatagaaaaaatatatgctaattggaaggagaggcttctgattgaggataaagtggaaattttcacatactgctaattacactttaatggagtaagaaaaaaagaattggaaatagtaccctataaaacttctgaaatgaaattacagtttctctctctctcttttttttttttttttcttgagacggagtttcgc

SEQ ID NO: 394274 - DNA, 387 bp, Homo sapiens
ttttgttagctggcgtctagttctttaagttccatgagtctattgtgtcttctttacatctcaaaaagaagagagaagaaacctgcatctaattactgaagcagtttcattcagcaaatgtaattgcatcgcaggcacatctcaaattaaaaatcttcatcttggtctctgtcatttccattttaaactgggactgaataacctgttttrccactcaaaataatagccagtgtctctttcttattaaaatatgtgatcttttgcttgattacctaattatgtcacctgcaccttacatgaggcagatagaagagtcttccagtctgccagagcagatctaccaaactagactgcacatacaaattacctggggatcctgataaatta

SEQ ID NO: 394275 - DNA, 517 bp, Homo sapiens
ctctacactgcaaattttgggtctcaatttttactgtgcctttgtttttactagtgtctgctgttgcaaaaagaagaagacattctctgcctgagttttaatttttgtccaaagttaattttaatctatacaattaaaaccttttgcctatcactctggacttytggattgttttttacattcagtgttataatatttgattatgctgattggttttggtgggtactgatgcgaattaataaaaacatttcatttccatgtttattttctaatctcttccacattgtaggctatgtttaccatacgtagcagaatgtatttacatttcttggttctagtcatttgtattcttcgtgagtgtgagtgtgtgtgtgtctgtgtgtctgcgtgtgtgtctgtgtgtgcctttggcatttaggaagggttgtatagctcatgttaaatattgcactaaaaatgtttttgatggttttcctcccttttaactagacacacttctaatatttggtttatagtt

SEQ ID NO: 394276 - DNA, 574 bp, Homo sapiens
acaaatcttgtttagcaaacaagaaatagaagagctttcagtgtttgcttataaatcagaaactattcttcgtctttcaagcagaggtgatttaatacaggtgattgattacacaagtgatggaagccaaaccaggcttggtgagtcagcagcccatatttaatatatttatatattaaatatttaattatacttcaaaacttttatgtacactataatctcattattgttttctatactattatatgcaatatacaaatacagaaatacagaaatgtacctcagtttgaaagagaayttgaatatgaggcaaaaagatacccccaaattatagttacattacaagaattgaatttaagaaggaagaagcaaattgcaagagataaggccaagcctctttagtaatgatcattctaaatccaattggtataaatttaggaacgcacaactggattgcagtgtaactaagaaagtttgtgtgtcaataaccatatttatcctatgtgaagaaataatagtttcataggagaaggttaattggcatggagtctgtaaaagagaagtttggatagat

SEQ ID NO: 394277 - DNA, 574 bp, Homo sapiens
acaaatcttgtttagcaaacaagaaatagaagagctttcagtgtttgcttataaatcagaaactattcttcgtctttcaagcagaggtgatttaatacaggtgattgattacacaagtgatggaagccaaaccaggcttggtgagtcagcagcccatatttaatatatttatatattaaatatttaattatacttcaaaacttttatgtacactataatctcattattgttttctatactattatatgcaatatacaaatacagaaatacagaaatgtacctcagtttgaaagagaatttgaatatgaggcaaaaagatacccccaaattatagttacattacaagaattgaatttaagaaggaagaagcaaattgcaagagataaggccaagcctctttagtaatgatcattctaaatccaattggtataaatttaggracgcacaactggattgcagtgtaactaagaaagtttgtgtgtcaataaccatatttatcctatgtgaagaaataatagtttcataggagaaggttaattggcatggagtctgtaaaagagaagtttggatagat

SEQ ID NO: 394278 - DNA, 617 bp, Homo sapiens
tttcgttcttttccttctttctctctctctttctttctttccttttcttctttcttctttctctctttttctttctttcttcctttcyttccttcctttttcttttctttctttctctctttctttcttcctctctctctttttctcttctttctttctttctttgttcctttcttctttctttcttcttttccttccttccttccttccttccttcctcttcttcctttctttctcctttcttttttttttttttttgacatgatctcactttgtcacccaggctagagtgcagtgatgtgatcatagcttaatgcagcctctctctcctgggctcaagcaaacctcccacctcagcttccagagtacctggggctacagctgcgtgccaccatgcccagctaaaggacttgaattttcttacatatcttggccctatagagtggttctcaacctcggctgcacatgtctattacctgagaaaagttttaaataacctaatactcaggtcacaccctagactttaggggtgagacaagcattaatatttttttaacactcttagaattaagagccactaatattgtagcactgcaattcctataaagagaacagat

SEQ ID NO: 394279 - DNA, 617 bp, Homo sapiens
tttcgttcttttccttctttctctctctctttctttctttccttttcttctttcttctttctctctttttctttctttcttcctttctttccttcctttttcttttctttctttctctctttctttcttcctctctctctttttctcttctttctttctttctttgttcctttcttctttctttcttcttttccttccttccttccttccttccttcctcttcttcctttctttctcctttcttttttttttttttttgacatgatctcactttgtcacccaggctagagtgcagtgatgtgatcatagcttaatgcagcctctctctcctgggctcaagcaawcctcccacctcagcttccagagtacctggggctacagctgcgtgccaccatgcccagctaaaggacttgaattttcttacatatcttggccctatagagtggttctcaacctcggctgcacatgtctattacctgagaaaagttttaaataacctaatactcaggtcacaccctagactttaggggtgagacaagcattaatatttttttaacactcttagaattaagagccactaatattgtagcactgcaattcctataaagagaacagat

SEQ ID NO: 394280 - DNA, 617 bp, Homo sapiens
tttcgttcttttccttctttctctctctctttctttctttccttttcttctttcttctttctctctttttctttctttcttcctttctttccttcctttttcttttctttctttctctctttctttcttcctctctctctttttctcttctttctttctttctttgttcctttcttctttctttcttcttttccttccttccttccttccttccttcctcttcttcctttctttctcctttcttttttttttttttttgacatgatctcactttgtcacccaggctagagtgcagtgatgtgatcatagcttaatgcagcctctctctcctgggctcaagcaaacctcccacctcagcttccagagtacctggggctacagctgygtgccaccatgcccagctaaaggacttgaattttcttacatatcttggccctatagagtggttctcaacctcggctgcacatgtctattacctgagaaaagttttaaataacctaatactcaggtcacaccctagactttaggggtgagacaagcattaatatttttttaacactcttagaattaagagccactaatattgtagcactgcaattcctataaagagaacagat

SEQ ID NO: 394281 - DNA, 617 bp, Homo sapiens
tttcgttcttttccttctttctctctctctttctttctttccttttcttctttcttctttctctctttttctttctttcttcctttctttccttcctttttcttttctttctttctctctttctttcttcctctctctctttttctcttctttctttctttctttgttcctttcttctttctttcttcttttccttccttccttccttccttccttcctcttcttcctttctttctcctttcttttttttttttttttgacatgatctcactttgtcacccaggctagagtgcagtgatgtgatcatagcttaatgcagcctctctctcctgggctcaagcaaacctcccacctcagcttccagagtacctggggctacagctgcgtgccaccaygcccagctaaaggacttgaattttcttacatatcttggccctatagagtggttctcaacctcggctgcacatgtctattacctgagaaaagttttaaataacctaatactcaggtcacaccctagactttaggggtgagacaagcattaatatttttttaacactcttagaattaagagccactaatattgtagcactgcaattcctataaagagaacagat

SEQ ID NO: 394282 - DNA, 472 bp, Homo sapiens
ttctcaacctcggctgcacatgtctattacctgagaaaagttttaaataacctaatactcaggtcacaccctagactttaggggtgagacaagcattaatatttttttaacactcttagaattaagagccactaatattgtagcactgcaattcctataaagagaacagatgtgagtcgatttgttacagtattgttgtattcatctgttttcatgctgctgataaagacatacctgagaccrggcaatttacaaaagaaagaggtttaatggacttacagttccacatgggtggggaggcctcacaatcatggtggaggacaaagaggagcaagtcacatcttacatggatggcagcaggcaaagagacagcttgtgcagggaaactcccattttaaaaatgatcagatctcatgagacttactcactaacacaagaacagcacaggaaagacccatcctcatgattcagt

SEQ ID NO: 394283 - DNA, 503 bp, Homo sapiens
ggttacttggttaaggaggggtctaggagatctgtcccttttagagacaccttacttataatgaagaagtacttgggaaagcggttttcaagagtataaatatcctgtattctaatgatcatcctctaaacattttatcatttattaatcctccctgcctgtgtctattattatattcatatctctacactgcaaattttgggtctcaatttttactgtgcctttgtttttactagtgtctgctgttgcaaaaagaagaagacattctctgcctgagttttaatttttgtccaaagttaattttaatctatacaattaaaaccttttgcctatcactctggacttctggattgttttttacattcagtgttataatatttgattatgstgattggttttggtgggtactgatgcgaattaataaaaacatttcatttccatgtttattttctaatctcttccacattgtaggctatgtttaccatacgtagcagaatgtattt

SEQ ID NO: 394284 - DNA, 609 bp, Homo sapiens
aaccatgggtagaaaaataggccaagtggaaaaacttattcatataattgcttcattttgctgactgcaaaaggatttgttttggaagtgatttctgctctttaacctagtggattgatagatcacagaaaggtcttagaaatgacattacgtaattttgttcataacatgaaattagcttgaatcaaaaaatgtatacctttttttgtatctaccttctaagacatttgtcttgagaaattaatgattctacaacataaatagtcattgtgaaaggaaggaaaaagataacagagggctttcataataatcatggactcaagattatctaatttaaaaagacatatctcattttcctttatttaaacataaaacaaatgagagaaaacagaaatagctcataattttatttrtctgataaaacatgctgacataaaaatataattcatgcacccagtaagaaaatcaaaaaattaaataaaggtaaaaatgaaatataaaattctctttcctctagtctcttacccccagacatctagaatctctccttaagataatcactgttgacaatttcttgagtatctttttaaaaatgaccttaatacacat

SEQ ID NO: 394285 - DNA, 442 bp, Homo sapiens
aattccaacctgagaagttgctatasaacatatgaatttaacattttttaattgctgtgatctaatatgatcctaaaacatggccctagtttatattcctatgagaatgtctaatacctacactcttgctaacattgactgctattgcattttaaagactcaataatttggttggattgatgttgaacatcttctgttattcctggccattgcatttctttttctacctattaatctcccttgtataatattgcattatttgtcttttttgtctcatttatcgacaaagattaaagttattggcagtagtgaaaatggagaaaaaaatcaaaattcaaatactgtagagtacaatattttggagaataatttgattctatatattgaaatttaaattgtctttaatctttgacccagttattctatttctagtaatttttct

SEQ ID NO: 394286 - DNA, 442 bp, Homo sapiens
aattccaacctgagaagttgctatagaacatatgaatttaacattttttaattgctgygatctaatatgatcctaaaacatggccctagtttatattcctatgagaatgtctaatacctacactcttgctaacattgactgctattgcattttaaagactcaataatttggttggattgatgttgaacatcttctgttattcctggccattgcatttctttttctacctattaatctcccttgtataatattgcattatttgtcttttttgtctcatttatcgacaaagattaaagttattggcagtagtgaaaatggagaaaaaaatcaaaattcaaatactgtagagtacaatattttggagaataatttgattctatatattgaaatttaaattgtctttaatctttgacccagttattctatttctagtaatttttct

SEQ ID NO: 394287 - DNA, 442 bp, Homo sapiens
aattccaacctgagaagttgctatagaacatatgaatttaacattttttaattgctgtgatctaatatgatcctaaaacatggccctagtttatattcctatgagaatgtctaatacctacactcttgctaacattgactgctattgcattttaaagactcaataatttggttggattgatgttgaacatcttctgttaytcctggccattgcatttctttttctacctattaatctcccttgtataatattgcattatttgtcttttttgtctcatttatcgacaaagattaaagttattggcagtagtgaaaatggagaaaaaaatcaaaattcaaatactgtagagtacaatattttggagaataatttgattctatatattgaaatttaaattgtctttaatctttgacccagttattctatttctagtaatttttct

SEQ ID NO: 394288 - DNA, 517 bp, Homo sapiens
ctctacactgcaaattttgggtctcaatttttactgtgcctttgtttttactagtgtctgctgttgcaaaaagaagaagacattctctgcctgagttttaatttttgtccaaagttaattttaatctatacaattaaaaccttttgcctatcactctggacttctggattgttttttacattcagtgttataatatttgattatgctgattggttttggtgggtactgatgygaattaataaaaacatttcatttccatgtttattttctaatctcttccacattgtaggctatgtttaccatacgtagcagaatgtatttacatttcttggttctagtcatttgtattcttcgtgagtgtgagtgtgtgtgtgtctgtgtgtctgcgtgtgtgtctgtgtgtgcctttggcatttaggaagggttgtatagctcatgttaaatattgcactaaaaatgtttttgatggttttcctcccttttaactagacacacttctaatatttggtttatagtt

SEQ ID NO: 394289 - DNA, 608 bp, Homo sapiens
ctggaatgtggaactgctggtaatttttccctttttcttttagagatttttgtacttatttttaataataaacatatactaattttataataaaaataacaatgaagtcctttccattttgaaaaattaattccaatagaaaaatactgtactcgagccactttccagggttttcttattcttagtgctggtataaggtaccagtgatattatattttcagatatgtttggcttttctgccttatggttgaagatgagcttaggaagtattgctgcctaattttcaggcttttgagccaatgcttggtgcacaaaaagcaccacatcaactttaaacagaatattctgcttctttagactgtatttcctactttttatagtatttattagcgccagaactctgtgactgtttgtttcccaaagaacaagagagaaagatcaaggaaaktgagaagcaatgaaactagatttaattaatactctggcttgtcagcagctttcatgaaagatttgtttgttgaagaagttgaacctattagcttaaacagggattaactctgccaactctgacagagcatggacaattaagagtttattggaaattaatt

SEQ ID NO: 394290 - DNA, 535 bp, Homo sapiens
ctgctgtaacaaaataccacaagctgagtaacttataaacaacagaaatttcttacagttgtgcaggctgggaagtccaatatyaaggcagattcagcatctggggtgaggttcacccttctggctcatagatggcaacttcctgctgtatccccatactttggaaggggccaatgagctctctgggatctcttttataagggcacaaatcccattcatgagaatcttgtcctcatgacctaatcacctccccaaggctctatctcctaacacgagtagcttgggggttaggatttcaatatacaaatttggggggacataaacagtcagtctgtgacattgccatttcatcagtaagaattttcatgaactcactattaagatttatgtttaggttttttatgcggatgttctcactttataatattgtttgtctgcatagtttaaagaaaaggacaatgcccaattagaacaggaggtgtcttttgttggccagcaaaatattttaagatgccttgagtgtgaccctacatag

SEQ ID NO: 394291 - DNA, 481 bp, Homo sapiens
gtgaggttcacccttctggctcatagatggcaacttcctgctgtatccccatactttggaaggggccaatgagctctctgggatctcttttataagggcacaaatcccattcatgagaatcttgtcctcatgrcctaatcacctccccaaggctctatctcctaacacgagtagcttgggggttaggatttcaatatacaaatttggggggacataaacagtcagtctgtgacattgccatttcatcagtaagaattttcatgaactcactattaagatttatgtttaggttttttatgcggatgttctcactttataatattgtttgtctgcatagtttaaagaaaaggacaatgcccaattagaacaggaggtgtcttttgttggccagcaaaatattttaagatgccttgagtgtgaccctacatagagatcatcaaggtaacatcattttgttcttgttctagatccacatgtttca

SEQ ID NO: 394292 - DNA, 535 bp, Homo sapiens
ctgctgtaacaaaataccacaagctgagtaacttataaacaacagaaatttcttacagttgtgcaggctgggaagtccaatattaaggcagattcagcatctggggtgaggttcacccttctggctcatagatggcaacttcctgctgtatccccatactttggaaggggccaatgagctctctgggatctcttttataagggcacaaatcccattcatgagaatcttgtcctcatgacctaatcacytccccaaggctctatctcctaacacgagtagcttgggggttaggatttcaatatacaaatttggggggacataaacagtcagtctgtgacattgccatttcatcagtaagaattttcatgaactcactattaagatttatgtttaggttttttatgcggatgttctcactttataatattgtttgtctgcatagtttaaagaaaaggacaatgcccaattagaacaggaggtgtcttttgttggccagcaaaatattttaagatgccttgagtgtgaccctacatag

SEQ ID NO: 394293 - DNA, 535 bp, Homo sapiens
ctgctgtaacaaaataccacaagctgagtaacttataaacaacagaaatttcttacagttgtgcaggctgggaagtccaatattaaggcagattcagcatctggggtgaggttcacccttctggctcatagatggcaacttcctgctgtatccccatactttggaaggggccaatgagctctctgggatctcttttataagggcacaaatcccattcatgagaatcttgtcctcatgacctaatcacctccccaaggctctrtctcctaacacgagtagcttgggggttaggatttcaatatacaaatttggggggacataaacagtcagtctgtgacattgccatttcatcagtaagaattttcatgaactcactattaagatttatgtttaggttttttatgcggatgttctcactttataatattgtttgtctgcatagtttaaagaaaaggacaatgcccaattagaacaggaggtgtcttttgttggccagcaaaatattttaagatgccttgagtgtgaccctacatag

SEQ ID NO: 394294 - DNA, 558 bp, Homo sapiens
cttgacatgctttaccctcaaattaacaagtttggcttattcaattrtggacctttaacccttaggccagatagtatatgaggcctagagtagtggaaaaaggtaactggatttacaaaatatgactcttcaaattctgtaagaattcaatatattgaggaacgtttaggtgcatagtaaaattataatttcatattgttgcacagactcaggcagatgaaagagactccaatagtggtcaggtagtacccagacagtcagttgattgtctctgtgctgaaaggatttaaagatgaagaagagtttgctccaatgtatgtttcaatatctcattgttttacaataatatttgaaataatacctaggaacccaacttacaagggatgtgaaggacctattcaaggagaactacaaaccactgctcaaggaaataaaagaggacacaaacaaatggaagaacattccatgctcatggataggaagaatcaatatcgtgaaaatggccatactgcccaaggtaatttatagattcaatgccatccacatcaagctaccaat

SEQ ID NO: 394295 - DNA, 558 bp, Homo sapiens
cttgacatgctttaccctcaaattaacaagtttggcttattcaattatggacctttaacccttaggccagatagtatatgaggcctagagtagtggaaaaaggtaactggatttacaaaatatgactcttcaaattctgtaagaattcaatatattgaggaacgtttasgtgcatagtaaaattataatttcatattgttgcacagactcaggcagatgaaagagactccaatagtggtcaggtagtacccagacagtcagttgattgtctctgtgctgaaaggatttaaagatgaagaagagtttgctccaatgtatgtttcaatatctcattgttttacaataatatttgaaataatacctaggaacccaacttacaagggatgtgaaggacctattcaaggagaactacaaaccactgctcaaggaaataaaagaggacacaaacaaatggaagaacattccatgctcatggataggaagaatcaatatcgtgaaaatggccatactgcccaaggtaatttatagattcaatgccatccacatcaagctaccaat

SEQ ID NO: 394296 - DNA, 558 bp, Homo sapiens
cttgacatgctttaccctcaaattaacaagtttggcttattcaattatggacctttaacccttaggccagatagtatatgaggcctagagtagtggaaaaaggtaactggatttacaaaatatgactcttcaaattctgtaagaattcaatatattgaggaacgtttaggtgcatagtaaaattataatttcatattgttgcacagactcaggcagatgaaagagactccaatagtggtcaggtagtacccagacagtcagttgattgtctctgtgctgaaaggatttaaagatgaagaagagtttgctccaatgtatgtttcaatatcwcattgttttacaataatatttgaaataatacctaggaacccaacttacaagggatgtgaaggacctattcaaggagaactacaaaccactgctcaaggaaataaaagaggacacaaacaaatggaagaacattccatgctcatggataggaagaatcaatatcgtgaaaatggccatactgcccaaggtaatttatagattcaatgccatccacatcaagctaccaat

SEQ ID NO: 394297 - DNA, 611 bp, Homo sapiens
aaaaatctgcatacaacttttgattccccccaaactactaataacctattgttgaccagaaggcttactgataacatgcgttacatttaagacatattttgcatgctatgtgtattatatactgtattcttacaataaactaagctacagaaaagaaattataatcaagaaaattgtaaggaagagaaaatatatgacccattcattaagtggaagtrgatcatcttaaaggtcttcatcattgttgtgttcatgttgagtaggcagaggaggaggaggaggagctggtctttgtgtcttagggtagcagaggtggaagagggtgaagggatggaaggggaagcaaaagaggcaagcacacttggtgaaactttacaaaaatacatcattatttctgtctattttgctttttcatttctctaaaaacatttcagtgtagtacctatccgtcttccaccatttgctttagtttcagttcctgtatcatggaacggtctatgtcataaaagaagtcaaaagtagtcttgaataatcaaagcttttttgccagattgttgaatgccaatttgttttctggcactgcttttcctatgtcttcttcctcattatct

SEQ ID NO: 394298 - DNA, 611 bp, Homo sapiens
aaaaatctgcatacaacttttgattccccccaaactactaataacctattgttgaccagaaggcttactgataacatgcgttacatttaagacatattttgcatgctatgtgtattatatactgtattcttacaataaactaagctacagaaaagaaattataatcaagaaaattgtaaggaagagaaaatatatgacccattcattaagtggaagtagatcaycttaaaggtcttcatcattgttgtgttcatgttgagtaggcagaggaggaggaggaggagctggtctttgtgtcttagggtagcagaggtggaagagggtgaagggatggaaggggaagcaaaagaggcaagcacacttggtgaaactttacaaaaatacatcattatttctgtctattttgctttttcatttctctaaaaacatttcagtgtagtacctatccgtcttccaccatttgctttagtttcagttcctgtatcatggaacggtctatgtcataaaagaagtcaaaagtagtcttgaataatcaaagcttttttgccagattgttgaatgccaatttgttttctggcactgcttttcctatgtcttcttcctcattatct

SEQ ID NO: 394299 - DNA, 611 bp, Homo sapiens
aaaaatctgcatacaacttttgattccccccaaactactaataacctattgttgaccagaaggcttactgataacatgcgttacatttaagacatattttgcatgctatgtgtattatatactgtattcttacaataaactaagctacagaaaagaaattataatcaagaaaattgtaaggaagagaaaatatatgacccattcattaagtggaagtagatcatcytaaaggtcttcatcattgttgtgttcatgttgagtaggcagaggaggaggaggaggagctggtctttgtgtcttagggtagcagaggtggaagagggtgaagggatggaaggggaagcaaaagaggcaagcacacttggtgaaactttacaaaaatacatcattatttctgtctattttgctttttcatttctctaaaaacatttcagtgtagtacctatccgtcttccaccatttgctttagtttcagttcctgtatcatggaacggtctatgtcataaaagaagtcaaaagtagtcttgaataatcaaagcttttttgccagattgttgaatgccaatttgttttctggcactgcttttcctatgtcttcttcctcattatct

SEQ ID NO: 394300 - DNA, 405 bp, Homo sapiens
tctattttgctttttcatttctctaaaaacatttcagtgtagtacctatccgtcttccaccatttgctttagtttcagttcctgtatcatggaacggtctatgtcataaaagaagtcaaaagtagtcttgaataatcaaagctyttttgccagattgttgaatgccaatttgttttctggcactgcttttcctatgtcttcttcctcattatctggcactggttaggaagcactcatctccatgaagtcatcttttgttaattcctctggtgtggtgtgtattagctcttaaattcctccaagatccatatcttacaacccttcactccacacctttttttcccttcatatccatacttctttccatggttttctctaaattgggtttgtcgtaattctgtagct

SEQ ID NO: 394301 - DNA, 348 bp, Homo sapiens
actattggggtgatgagtacagtaaaacctcagacttcaccactagcaatatatccaaataacaaaacaatcatataataaaastatgcttgtacctagcacatttataaaaataaaataaaagtaattatttgggtagtacagtatgtgctatagttaattgtatgcagttgtggtttaatacagcatctttatgtttgtttatgtttctcttgactgcaaatagtgacttgtacggtttgtgtgcatacattttgataagttttaactttttataatagatttgtgtatattttatggtagtaaatgataaaatagattaatatatacatatactttatgcattca

SEQ ID NO: 394302 - DNA, 580 bp, Homo sapiens
ttgtgtatattttatggtagtaaatgataaaatagattaatatatacatatactttatgcattcaggatgtacatagctttttcttaattttttttttatattctaggctatgcagttagtctgytagttttttcaattgcaattctccaaaactttttctgatatatttttttttttttaaataccagtgtaggcggacctgcacagttgaaacccatgttgttccaaggtcaactaaaaaatctgaaatctgaaatgcttcaaaattggaaacattttgagcactgatatgatgccacaggtgaaaaatttcacatatgacattatatgactggtcacagccaaaagacagtcaaaattttgtttcttgcacaaaattttacaaatacataaaattaccttcaggctacatgtatactatatgtagggaatgtaaataaatttagattgggtctcattcctaacatatcatgttatgatatgaaaatatttcaaaatttgaaaaaatccaaaatctacaatatttttggtcccaagcatttcatataagggataccatactccagaatgttagaatgt

SEQ ID NO: 394303 - DNA, 528 bp, Homo sapiens
aatgagaatagctttgtgtttctttgaagttctgggtgcttctgaaaactctaaaggttttcaagcatttaaatttctctagcccttttctcaaacaaacaaaaaaccccaaacaaggaaaatctcatagaaatataaaaatgagttaaaataagttgtgaggaatattctatacatcaacagtaaagtattactcaacctcaaaaattacgtctctaccataatctataatctgactggataaggactataaataaatagcatatgaaagtctacaataaagcagggagaaaatcatcactggctccgaatttsataatgacttcttgttgtatgtatgtaaatatcttctgaacaaattattgtacattttcctatctctggagaaaattaatgaattaggttaaacaatttcttaagtttaatggagcttctgttttccttggcttatgtatactagcacaggtaacttgctgaactgcagctcagaagaaaaaatctatagagaggtttagttctgaggtgaat

SEQ ID NO: 394304 - DNA, 321 bp, Homo sapiens
ccaaagaacccctcattctcaatatctgatcaggttcttcattcttcaccattctgcaggtgatgtctgatcaccctggccagtcttcagcaagaattcttttaggkcggtttagccagaatctcccttactcctgatgtttcctcttagtgattttccattcactgacccctgcattgctcctgggctataaattcccacttccgcatgctgtattcagagttaagcccatctctctccccagctccaagactgtgttgcagtggttcctatatctatggtgatggtcctgaataaagtcttctttactgtgcatttgaa

SEQ ID NO: 394305 - DNA, 580 bp, Homo sapiens
cagggaaaggaaaaggatttgggcccagaatgtggggaattttagatgctgcagaaagccttctggtgtctttctagaatggctggattttggttaaggcaaagaagaagtaacttttcatggagaacagtagcatacaggagtgcggatggtttgatcatttaaggcagggatgtgaggtttgatggaatatgttgataacaaagattctttgcttggccaactttagtcaggcttctaaatcttcagctaggctaaactgtgcacttcctcgcaaaatccagcattagcaaagaacactgccaagtttaccaaagaacccctcattctcaatatctgatcaggttcttcattcttcaccattctgcaggtgatgtctgatcaccctggccagtcttcagcaagaattcttttagggcggtttagccagamtctcccttactcctgatgtttcctcttagtgattttccattcactgacccctgcattgctcctgggctataaattcccacttccgcatgctgtattcagagttaagcccatctctctccccagctccaagactgtgttgcagtggttc

SEQ ID NO: 394306 - DNA, 618 bp, Homo sapiens
ccctacaaaggacatgaactcatcattttttatggctgcatagtattccatggtgtatatgtgccacattttcttaatccagtctatcattgttggacatttgggttggttccaagtctttgctattgtgaatagtgccgcaatagacatacgtgtgcatgtgtctttatagcagcatgatttatagtcctttgggtacatacccagtaatgggatggctgggtcaaatggtatttctaattctagatagaatgtttcctcttataactcatagtgaatatgactggacaatgaaactattttgtaatttctttcctgaaagrtaaaggcgttagaacatagaatctttcactgattctacagaatcttaagactccttcagagatggcagtcattcctaccgtgctgaacatcatgttgtcacggtgagaatcagaactaaattgattaagggtctgaaacagtttggcactcttgggcacttattctgataagaaagctgatgagacagggtaatgaaaagaggctgcaagaaatgaccattcatgcattcagccaacatttaggccaccctcctgtattccaggcactgtacgtggcactgagaatgcaaagcaa

SEQ ID NO: 394307 - DNA, 593 bp, Homo sapiens
atggctgggtcaaatggtatttctaattctagatagaatgtttcctcttataactcatagtgaatatgactggacaatgaaactattttgtaatttctttcctgaaaggtaaaggckttagaacatagaatctttcactgattctacagaatcttaagactccttcagagatggcagtcattcctaccgtgctgaacatcatgttgtcacggtgagaatcagaactaaattgattaagggtctgaaacagtttggcactcttgggcacttattctgataagaaagctgatgagacagggtaatgaaaagaggctgcaagaaatgaccattcatgcattcagccaacatttaggccaccctcctgtattccaggcactgtacgtggcactgagaatgcaaagcaaaacgagtcatggtctactggcgggagccttctcagcggagaaaagatcaacaagaaaagtgcctgctggagacctctcctagggcataaaccaatatagaggtggggcagctacgtcagcctgaggtgtccttaggcagaacagaaagtgagaatcagagcagtatctcatttctgaacacctggattg

SEQ ID NO: 394308 - DNA, 593 bp, Homo sapiens
atggctgggtcaaatggtatttctaattctagatagaatgtttcctcttataactcatagtgaatatgactggacaatgaaactattttgtaatttctttcctgaaaggtaaaggcgttagaacatagaatctttcaytgattctacagaatcttaagactccttcagagatggcagtcattcctaccgtgctgaacatcatgttgtcacggtgagaatcagaactaaattgattaagggtctgaaacagtttggcactcttgggcacttattctgataagaaagctgatgagacagggtaatgaaaagaggctgcaagaaatgaccattcatgcattcagccaacatttaggccaccctcctgtattccaggcactgtacgtggcactgagaatgcaaagcaaaacgagtcatggtctactggcgggagccttctcagcggagaaaagatcaacaagaaaagtgcctgctggagacctctcctagggcataaaccaatatagaggtggggcagctacgtcagcctgaggtgtccttaggcagaacagaaagtgagaatcagagcagtatctcatttctgaacacctggattg

SEQ ID NO: 394309 - DNA, 618 bp, Homo sapiens
ccctacaaaggacatgaactcatcattttttatggctgcatagtattccatggtgtatatgtgccacattttcttaatccagtctatcattgttggacatttgggttggttccaagtctttgctattgtgaatagtgccgcaatagacatacgtgtgcatgtgtctttatagcagcatgatttatagtcctttgggtacatacccagtaatgggatggctgggtcaaatggtatttctaattctagatagaatgtttcctcttataactcatagtgaatatgactggacaatgaaactattttgtaatttctttcctgaaaggtaaaggcgttagaacatagaatctttcactgattctacagaatcttaagactccttcagagatggcagtcattcctaccgtgctgaacatcatgttgtcacggtsagaatcagaactaaattgattaagggtctgaaacagtttggcactcttgggcacttattctgataagaaagctgatgagacagggtaatgaaaagaggctgcaagaaatgaccattcatgcattcagccaacatttaggccaccctcctgtattccaggcactgtacgtggcactgagaatgcaaagcaa

SEQ ID NO: 394310 - DNA, 618 bp, Homo sapiens
ccctacaaaggacatgaactcatcattttttatggctgcatagtattccatggtgtatatgtgccacattttcttaatccagtctatcattgttggacatttgggttggttccaagtctttgctattgtgaatagtgccgcaatagacatacgtgtgcatgtgtctttatagcagcatgatttatagtcctttgggtacatacccagtaatgggatggctgggtcaaatggtatttctaattctagatagaatgtttcctcttataactcatagtgaatatgactggacaatgaaactattttgtaatttctttcctgaaaggtaaaggcgttagaacatagaatctttcactgattctacagaatcttaagactccttcagagatggcagtcattcctaccgtgctgaacatcatgttgtcacggtgagaatcagaactaaattgattaagggtctgaaacmgtttggcactcttgggcacttattctgataagaaagctgatgagacagggtaatgaaaagaggctgcaagaaatgaccattcatgcattcagccaacatttaggccaccctcctgtattccaggcactgtacgtggcactgagaatgcaaagcaa

SEQ ID NO: 394311 - DNA, 593 bp, Homo sapiens
atggctgggtcaaatggtatttctaattctagatagaatgtttcctcttataactcatagtgaatatgactggacaatgaaactattttgtaatttctttcctgaaaggtaaaggcgttagaacatagaatctttcactgattctacagaatcttaagactccttcagagatggcagtcattcctaccgtgctgaacatcatgttgtcacggtgagaatcagaactaaattgattaagggtctgaaacagtttggcactcttgggcacttattctgataagaaagctgatgagacagggtaatgaaaagaggctgcaagaaatgaccattcatgcattcagccaacatttaggccaccctcctgtattccaggcactgtacgtggcactgagaatgcaaagcaaaacsagtcatggtctactggcgggagccttctcagcggagaaaagatcaacaagaaaagtgcctgctggagacctctcctagggcataaaccaatatagaggtggggcagctacgtcagcctgaggtgtccttaggcagaacagaaagtgagaatcagagcagtatctcatttctgaacacctggattg

SEQ ID NO: 394312 - DNA, 628 bp, Homo sapiens
ttggcactcttgggcacttattctgataagaaagctgatgagacagggtaatgaaaagaggctgcaagaaatgaccattcatgcattcagccaacatttaggccaccctcctgtattccaggcactgtacgtggcactgagaatgcaaagcaaaacgagtcatggtctactggcrggagccttctcagcggagaaaagatcaacaagaaaagtgcctgctggagacctctcctagggcataaaccaatatagaggtggggcagctacgtcagcctgaggtgtccttaggcagaacagaaagtgagaatcagagcagtatctcatttctgaacacctggattgtagctttccctggactgactgtcaaaggaggtggttttaaaaagcaagccaaacaggtttccatcctttaggaagaccctggaacgtgccagttgattctgacaatttctcatgaacagaaacacctaggaagggagaactggtgagtcttttcaagaggaggaagtccctcaaaaggggctgtgtttcgcaaacggcgccccaaaagggctgaaatacttcgatctggaggaaaaagactcaggcactgagggaaggggagggtgcacatctggagtaatttcaa

SEQ ID NO: 394313 - DNA, 406 bp, Homo sapiens
aacatgtttttcctccaatgcataaaaggaacttccatagggctggcaggagtcaggctgttcaagacaactggaaggagttgaataacatctatccagtgagtcctgcaagacttcaggctctactacctccagcagctccctgctgagcctggaaaaggaggaaaaagtaaagaataagccaggggaaatcagacacaacagagccccaactaggtttcatgggtagcatarggaagtggttaaaaaactaaaaggatagatccattaatgaggtaacaaattattgccttcatgttgggacagaacagggccaaatggaaaagaatgaaagagaaagacagatagacacacacacacacacacacacacacacacacacacacacagacacacacacacacac

SEQ ID NO: 394314 - DNA, 406 bp, Homo sapiens
aacatgtttttcctccaatgcataaaaggaacttccatagggctggcaggagtcaggctgttcaagacaactggaaggagttgaataacatctatccagtgagtcctgcaagacttcaggctctactacctccagcagctccctgctgagcctggaaaaggaggaaaaagtaaagaataagccaggggaaatcagacacaacagagccccaactaggtttcatgggtagcatagggaagtggttaaaaaastaaaaggatagatccattaatgaggtaacaaattattgccttcatgttgggacagaacagggccaaatggaaaagaatgaaagagaaagacagatagacacacacacacacacacacacacacacacacacacacacagacacacacacacacac

SEQ ID NO: 394315 - DNA, 568 bp, Homo sapiens
cacctggggcatggtgggttttgatcttcttccccttcttttcttccccttcttctttccttctttgatcttcttccccttcttttcttccccttccccttcttttcaatttctgcaataaattcagacatggacagacacattaagctgattcccctacacacataacaatccactgtctaatcctcacacagggacctcaggctcctcagcataagaataggacacygtgagagatatatttcaggaggcctgaaggctggtcatgatagaaattcctcggtttttctcccagaaactgtgggtaaaatgtccctattctagtagatcgttatcccaatatcatttgtcccaagtttgtgcaaacagttatgccatatttttccaatcaacttaaagcaaataccctcaaatgatttctaggagaaaaactgcaatatttagccctgtctcatcaaatactcagattgttcatggttgtgaggactttagacactgaaattagagtgaaaaaggaaatctacaaacccttgagtcaaaatcatagttctctgaatttgtcacatct

SEQ ID NO: 394316 - DNA, 616 bp, Homo sapiens
gagtaattcagccttcgttgaaaacatgacatcaaacacactctggtttccctgaatctgttgcctccaggtgttaacacagaattaagcatccacaattgctgaaagtcacctggggcatggtgggttttgatcttcttccccttcttttcttccccttcttctttccttctttgatcttcttccccttcttttcttccccttccccttcttttcaatttctgcaataaattcagacatggacagacacattaagctgattcccctacacacataacaatccactgtctaatcctcacacagggacctcaggctcctcagcataagaataggacaccgtgagagatatatttcaggaggcctgaaggctggtcrtgatagaaattcctcggtttttctcccagaaactgtgggtaaaatgtccctattctagtagatcgttatcccaatatcatttgtcccaagtttgtgcaaacagttatgccatatttttccaatcaacttaaagcaaataccctcaaatgatttctaggagaaaaactgcaatatttagccctgtctcatcaaatactcagattgttcatggttgtgaggactttagacactgaaattagag

SEQ ID NO: 394317 - DNA, 616 bp, Homo sapiens
gagtaattcagccttcgttgaaaacatgacatcaaacacactctggtttccctgaatctgttgcctccaggtgttaacacagaattaagcatccacaattgctgaaagtcacctggggcatggtgggttttgatcttcttccccttcttttcttccccttcttctttccttctttgatcttcttccccttcttttcttccccttccccttcttttcaatttctgcaataaattcagacatggacagacacattaagctgattcccctacacacataacaatccactgtctaatcctcacacagggacctcaggctcctcagcataagaataggacaccgtgagagatatatttcaggaggcctgaaggctggtcatgatagaaattcctcggtttttctcccagaaactgtgggtaaaatgtccctattctagtagatcgttatcccaatatcatttgtcccaagtttgtgcaaacagttatgccatatttttmcaatcaacttaaagcaaataccctcaaatgatttctaggagaaaaactgcaatatttagccctgtctcatcaaatactcagattgttcatggttgtgaggactttagacactgaaattagag

SEQ ID NO: 394318 - DNA, 568 bp, Homo sapiens
cacctggggcatggtgggttttgatcttcttccccttcttttcttccccttcttctttccttctttgatcttcttccccttcttttcttccccttccccttcttttcaatttctgcaataaattcagacatggacagacacattaagctgattcccctacacacataacaatccactgtctaatcctcacacagggacctcaggctcctcagcataagaataggacaccgtgagagatatatttcaggaggcctgaaggctggtcatgatagaaattcctcggtttttctcccagaaactgtgggtaaaatgtccctattctagtagatcgttatcccaatatcatttgtcccaagtttgtgcaaacagttatgccatatttttccaatcaayttaaagcaaataccctcaaatgatttctaggagaaaaactgcaatatttagccctgtctcatcaaatactcagattgttcatggttgtgaggactttagacactgaaattagagtgaaaaaggaaatctacaaacccttgagtcaaaatcatagttctctgaatttgtcacatct

SEQ ID NO: 394319 - DNA, 562 bp, Homo sapiens
aattagaataataaatgtaggtattgacaaaacctaaagaaagacttttcaaaacatattcaggaacatgtttataaagctgaggtaagggggtgctactcaaaagctcaatctctaaataaaaaatattcgatagggtgatgtttttttataaatcgtaagctagtttagttaaactttaggaactgctawcatgttccatggttacatattatttacagagatataagttccaaatatatgcagtttaacatttataattactactttctgatgctgtcagtaatgcacattcattatttctgaataatcagaatgttctgaaaaatcagaacacctcaatttgtaaagaaagtgattgccaagtcatgctggggccgtgtttgggttgtccaagtccagaatttgaatttgaactgccatataaagcttccttctgtgatccaaatgttcgtgtctcttcaaaattcatatgttaaaatctaatcaataacgtgacaacatgttgaaagtgggcttttggttgttggttagatcatgagggtggagccctcatgaatgg

SEQ ID NO: 394320 - DNA, 544 bp, Homo sapiens
attcaggaacatgtttataaagctgaggtaagggggtgctactcaaaagctcaatctctaaataaaaaatattcgatagggtgatgtttttttataaatcgtaagctagtttagttaaactttaggaactgctatcatgttccatggttacatattatttacagagatataagttccaaatataygcagtttaacatttataattactactttctgatgctgtcagtaatgcacattcattatttctgaataatcagaatgttctgaaaaatcagaacacctcaatttgtaaagaaagtgattgccaagtcatgctggggccgtgtttgggttgtccaagtccagaatttgaatttgaactgccatataaagcttccttctgtgatccaaatgttcgtgtctcttcaaaattcatatgttaaaatctaatcaataacgtgacaacatgttgaaagtgggcttttggttgttggttagatcatgagggtggagccctcatgaatggaattagtgaccttataaaaagaggtctcagagagctgcc

SEQ ID NO: 394321 - DNA, 565 bp, Homo sapiens
aatagaaacttttacttatattttatagtgttttgtaatttgtgagatgttttctcatgactttttatttttaatgattataagaagcttattcagagaaataagtctgctctatttattgttaaagagacttaatcagacgtggcaagagacttaatcaaggtgagaaaactggtgaagatcataggcaaagtttgcaacgagtcttgactttaagtcctgattagtgcctacttcagtcatttccttaataattacacttgctaattttctattgcctttattaaggacattttttgcaggtatttttaggttcaattatattgactgaagtaagaaaagtaataggtcttatttcacttaaacttgagaagtttctttatcaatgattttctccttaacaccttcctccaaatcccagcattaacagaaatgtctatggatgggtcacaacacaaagatacactaatattgrccctggatgtcacaaaaacccatcaaaaaatacacttttactgtattcttctgtcttcccattgaaaaattaataccgacattcatctca

SEQ ID NO: 394322 - DNA, 600 bp, Homo sapiens
ctaatagaagaaaaaaggcagtggagtcttaataatagaaaattagaagatagaaaaaaatctagttacctggattgtggaggtaattcactgtaaaccaggaaaacaagatttagacaggtgagtgaaaaatacatttttttcgtgtttgaacattataggtggttggatctattttgtctagcagttcacattacccaaaccaacgccataaggaaatagtgatatgaagtccagaaaacgtacacaacgtattacttactgtagcccttttaaaaccagtttctctgcagcttcacatttctatgttcctgcttttcactgtctttactaagtaaagtgtttattggctggaaaataatctagtattattatttgtttctctgaccttcactaagctaaaagaaggaacgtttgcttatttgacttcaactagtaagagttttatcaagaggggagatgaaacgtttttgtccagctgattatctatatatatatatagcaggcatgtaatttcacataaatacttttattcctaaataaacaatacrgatattaaagactgcatactgctaaagtgttgctatattttacacaaat

SEQ ID NO: 394323 - DNA, 602 bp, Homo sapiens
gaatgcaatttttttgtgggaaaagaagctgtttattccacctctgcctcaccccatcccaatgccattttcttcctctattattttttaaatttcagtttaaatcatatattgctaaaaaatgtatacaytcaaggtgtacaatgtaattttttgatatatgtatacattgtgtagtgattaccactgtcaaattaattaacatatccatcactacctgtaattaccactggtgcatatatgtgtgtgggggggatggtaagagcacttaagatttactctgttagcaaattttaagtaaacaatgcaggattattaactgtagtcatcatgttgtacatgtcagaacttgaacccaaaggtgggagatagaagctctgatgtctaagggcaggaaaagatagatgttctatctcaagaagtgagaaataacctgtccttttttgcctttttattctatttctccttcaacagattggatgatgcctgcccacactgatgagggtggatattttttaactcagtctattattttaaatgctaatcttttttggaaacacacccacagacatacacagaaataatattttgtcatctatctg

SEQ ID NO: 394324 - DNA, 448 bp, Homo sapiens
ggtgcaatcaaatcttataagtttattacctagtcaaccttctctttatcaatttatcagaaactactcgtgaccactggcttatttgtggtgtcttgttcattaaaaacagatttactaattaattcagtatagaggtattaaccccctactgcctactacatggtagatatagtgccagsttttagagataacttaatcatatgtgttctttcagttgagagacatataaattcatcaaatgattaaattagaacaattcaatatcagatatggcaactgctacaatgatgagtgttctacaaaccatggttaaaataaaggtatttaacttaaagatactttgcaattattaatcattaaacacttatataaggaaagcataggcattaattagatgaaatggcaaagacataagaacaacaggcatgtgggaaggctctataaa

SEQ ID NO: 394325 - DNA, 559 bp, Homo sapiens
ttaaaaacagtgacagaggcacccaccaccttatgaagaagaggtgactcggaggactgattagtgttgaaaggaaagctaaatcaggcactcctgtcaaactcccttttgttttaaatgactatgcagtaatttacaattacaaatctctgttaggaaaaatcacttgttgcatggatatctctttctcattgtaaaaatatgcagaggaggtgatttgtgtttgcttccttttttttctaaattacttttctgatatcttatayaggattgtttttccgttatttatctaccctaaagactgtcagaaattctgaagttttctcccttcctgcagatgggaacctgttatctctttagttattcatagtgcagaaagcggagtagtggttgcatcaaatggatgggaatcaaatgaaagtggtatgaagaaacttcctgaagcaaagcaaatactctacttcttgttttagttgacagttacttgatgcacgccagtcaaaattcatcaaattgaatacttaacatttgggcagtttttgtatgttatatttgattc

SEQ ID NO: 394326 - DNA, 559 bp, Homo sapiens
ttaaaaacagtgacagaggcacccaccaccttatgaagaagaggtgactcggaggactgattagtgttgaaaggaaagctaaatcaggcactcctgtcaaactcccttttgttttaaatgactatgcagtaatttacaattacaaatctctgttaggaaaaatcacttgttgcatggatatctctttctcattgtaaaaatatgcagaggaggtgatttgtgtttgcttccttttttttctaaattacttttctgatatcttatataggattgtttttccgttatttatctaccctaaagactgtcagaaattctgaagttttctcccttcctgcagatgggaacctgttatctctttagttattcatagtgcagaaagcggagtagtggttgcatcaaatggatgggaatcaaatgaaagtggtatgaagaaacttcctgaagcaaagcaaatactctacttcttgttttagttgacagttacttgatgcacgccagtcaaaattcatcaaaytgaatacttaacatttgggcagtttttgtatgttatatttgattc

SEQ ID NO: 394327 - DNA, 586 bp, Homo sapiens
ggtgatttgccaattcagttctttccccaaaagtgggtagatacattctttaagtatatatgtcttttatgtctcaatttctttgtggaacataatcatgacaggtctagtttgtaattcaatatcttgttcacgaagcactttaaaaccttgtagacggcaagctataataattcgaacttgtgtaaataatacttaggactttaggctctcttgaaaaaaagaaattttctccttactgaccagcaaaattcaaatctagtttctcccctcagacataatgcagagtgagtgccctgaggaaggaaggagagagtaacactgttcaatgcgtggtatgtaaggaagcagctcatgggctactcttcatgaaatttcagaagaactgtacttaccataggctctattgcagaaaaacatcattrcgggatttaataacatcagaagttagtaacagaagaaacaatatgagaaaataaaaaataaataaattcttccacttcataaagtgtaacctgccaactgaaatcactagcatattctacatgaaatttcagtatagggagaaaaaggcacataaaattat

SEQ ID NO: 394328 - DNA, 547 bp, Homo sapiens
catgagggcagatttcccccttgctgttcttctggtagtgagtgagttcttaggagatatggttgtttaaacgtgtgtaatacctccctctttgctgtcttcctcctactctggccatgtaagatgtgcctgcttcgtgcctgcttcctctgcaccttctaccatgattaaaagtttcttgaagactcctcagccatgctacctgtacagcctgtagaaccatgactcaataaaacctctgttctttataaattacctattctaaagtagttctttaggctggrtgtggtggctcatgcctgtaatcccagctctttgggaggctgaggcaggcagatcatgaggtcaggagttcaagaccagcctggccaacatggtgaaaccctgtcactactaaaaatacaaaaaaaaaaaaaaaagaattagccaggcatggtgatgcattcctgtaatcccagctactctggaggctgaggcaggagaactgcttgaacccgggaggcggaggttgcagtgagcccagatgtcaccactgcactccagcgtg

SEQ ID NO: 394329 - DNA, 609 bp, Homo sapiens
gtctttggtttgaatatgcactttcttggatcattaatcttctcatttatgcaggtagtagatatctcttttcccataaaaaagtcagttcattttgtccaattaaaaaagtgctgatactattataattaaatttaattttaaaaattatttttatatttgaaatattattaatgttgagttatatttttattacattttagcatctaaaagcatcatattttccactttttgatcatttgttttatgccacttttatatttcaaactaccgcatctttttgcgacgaatttcatggtttgttcaacccttaaccagctaaaatttatagttaattgttttaatcactctaatgtatttaatttcctgactatatctatcctgccrttatctcacttcatccttgcccttggcataagctcaagcccgattacatctgactctctacatactctgaatctgtactaccactattgactatgtctggaggaaaaaagacattcataattatggtcttctgtataaattttatcatatcctatgaatagcaagaagacttttccattctcaggttatcctacaacatatttttgtttattgtcctgattt

SEQ ID NO: 394330 - DNA, 377 bp, Homo sapiens
tggaagtcttccattgggaatagaagttatgaatttaaataaagaagtcaggtctggagctgcagatgtaagagtccattttgaacatgtgtggaaatcataaaagtattgcctccttttgtacttaaatattaaaaatagggcatgctgataccaaaaccatgttggaagttaaattgtaataactgtttaagttcaaacacagtagtgcagtgtaagtgaaaagtaaccatgatggttgaaattacaacacaaataaaggaattctacagtcattagtaatacatgaccagaagtctttttccygtccccaacaaataaaacaattgggacaagagtaagagatttcttttctctgagtattaaaataatgttaa

SEQ ID NO: 394331 - DNA, 584 bp, Homo sapiens
gtggtagtaagtgagtgagggcagaaaatagagaaaggaaggtagtgtcttaagcagacactgtcagggaactcgtataccatttatttgcaatcatgtggttgggaggaatgtgggaaaactcagtcgaatctgagccaaatccctcttcattaaaaattcggcccttgatttttcctgtaacttgtttggcttagtgcaatcaagagtracatataaaatgatatcccaagccctatattgtattttaaacatatcttcatatgtagttgttaggcctgagacattttagagaaaaacagaggtttgaggtgatttcaattgatctaaagaaggaaatattaacatttggtttgcattaaaataaagggaagaaataataatagagaaagaagttaaattgttgtcttgggaacaaatattaagagtgagagacatgaacttggtatgatgggagaattcaatctttctgagatccagttgtaagtgcagatcaaaccataagtatgaagagctttgagatttaaaaataagtaactttcaggaaaaagtaatatggaattacatggtaaaaaatgtaaact

SEQ ID NO: 394332 - DNA, 514 bp, Homo sapiens
cacgaggtcaggagaccgagaccatcctggctaacacggtgaaaccccgtcgctactaaaaatmcaaaaaaaaaaaaaaagaaaaaaaaattagctgggcgtggtggcgggcgcctgtggtcccagctgctcaggaggctgaggcaggagaacggcgtgaacctgagaggtggagcttgcagtaagcctagattgcgccactgcactccagcctgggcaacagagcgagaacccgtctcaaaaaaaagaaaaaaaaatttccagaaaaatcatctaaatgagactcaaactcagctttaaggatgtttgtccacataggatgtgctgtcatctataatctgagtctcccttatcaatattccataaaagtcccaggaaaatctaacatctcattaaaagatgcagaatgctatggatgtaatactagggtaaaacacttaaaaatagtggatgaattaaagttcacatggctaaaataatgttctgtttctttgtatcccttctttatgttcaa

SEQ ID NO: 394333 - DNA, 569 bp, Homo sapiens
gaaagttaatatttaaagcttgttctttgaacagatcgctaaagttgatagccaagctaaggaacaaaaaaaaagcaagagagagagaaacacaaattactgataatcagaaatgaaagaggaagcatcactacacattccatgaacatgaaaaggataataatggaatactttgaacaattttatgcctacaaatgtgacaacctagatgaaatgaaccaacttctagaaagatacaatctgccaaaactcacacaagaagaaataagaaatctaagtggccatgtatctactaaagaaatttaatctacaattaataaaattcaaaaacagaaagcaacaggcccaaaggggttcactagtgaattttcccaattatttaaaaatcatgataccatttatctacaatcttctccaagaagtagcctgaaggaatacttcctagcctattttatgggcattatactaatatcaaagytagacaaagacattacaagaaaataaaactacagacctatatctcccatgaacttagatgaaaacattctcaagaacatattaacaaattg

SEQ ID NO: 394334 - DNA, 618 bp, Homo sapiens
catttcttcatgaaaatataacaatttaaaatatgcatgtactcaacatcacagaacataaatattacaagtaacattaagagattcaaagagagatgtagactgcaagaaaatcataataggaaattttattatcccatttttaacattgcccggatcatctagacagaaaatgaggacagaaaacttggacttgaactacactttagaccaaatagaygtaacagtcatatatagaatattccacccaacagcaacaggatacatattcttctctagtacacagaaaaccttctctgggatagatcatgttaggctccaaacaagacttaacaaatttaagaagactgaaatcacatcaagtacctttttaaaccacaattgtatgaaattagaaattaataacacaagaaaccatggaaaattaacacatatgtggaaattaaacaatttgtttctgaacaactactgggtcaaagaggaaatttaaaaatattttagggaaacaaaagtggaaacaaaacatataaaaacaagattcagcaaaattatttcttaaaggaaagtttagagcaaagaacacctacatcaaaaagaagaaagattgcaaacaagtta

SEQ ID NO: 394335 - DNA, 618 bp, Homo sapiens
catttcttcatgaaaatataacaatttaaaatatgcatgtactcaacatcacagaacataaatattacaagtaacattaagagattcaaagagagatgtagactgcaagaaaatcataataggaaattttattatcccatttttaacattgcccggatcatctagacagaaaatgaggacagaaaacttggacttgaactacactttagaccaaatagatgtaacagtcatatatagaayattccacccaacagcaacaggatacatattcttctctagtacacagaaaaccttctctgggatagatcatgttaggctccaaacaagacttaacaaatttaagaagactgaaatcacatcaagtacctttttaaaccacaattgtatgaaattagaaattaataacacaagaaaccatggaaaattaacacatatgtggaaattaaacaatttgtttctgaacaactactgggtcaaagaggaaatttaaaaatattttagggaaacaaaagtggaaacaaaacatataaaaacaagattcagcaaaattatttcttaaaggaaagtttagagcaaagaacacctacatcaaaaagaagaaagattgcaaacaagtta

SEQ ID NO: 394336 - DNA, 585 bp, Homo sapiens
tgtgtagacctaggctaatgtgtgtgcttgtgtcttagattttaacaaaaatatayattaataaaaagtaaaaaaaaaagaatattctaaaaatagaaaaaaagctcatagaatcaggatagaagaaaatattttgatatagatgtacaatgtgtttctgttttaagttgtgttattacaagagtcaaaagggtttttaaaaaattaggctttgtaaagttaaaaagttacactaagctaatgttaatttaccattaaagaaagaaaaacattctttataaatttagtgtgtcctaagtgtgcgatgtttataaagcctgcagtagtgtacaggaatgtcctaggcctttacattcactcaccactcactcactgattcacccagcgcaacttccagtcctgtgagctccatttatggtatgtgtcttataaaggtgaatcatgttttatattgtatgttaactgcacttttgaaatgtttggatatgtttagctacataggtactgatatggtttggctctgtgtccccacccaaatctcatccaaattgtagttgccataatccccaggtgtacagggagaaa

SEQ ID NO: 394337 - DNA, 612 bp, Homo sapiens
aaactcttctaatgaggacaaaatacacagataattgtgtcttatgttcgtattcattgaatataaatcttagcaatgaagatcttaataatcaagtgtataggacaatctgtgctatagttattagaagacttcttttcccagttaaccatgtttatgctcaacaagtttagaaataaagttgtcaactcaacagggttatagtacacattggattcaacagcatggatctgcaatcactaaggcctatatggttagatccactgctgattgtcaaacctgttagtaggaaagaccaacagtgacctatcagtatggcacattcctggtgcaacctagtgrcaaattaatcacatagaaacattttgaaggtcgtggaattgaccttccacataggtaaatagatttgcctttcttacacacaatgcttctttccaaagcaccacctgtaaatcactaaaatgtctttcttacaatcatgatgtttcacacactattgcttctgaccacagaacatattttatagcaaacacactgtggcaatggggttctacttattggtttcatttagtcttcttatgttctctgtcactgtaaagtagttggcctaat

SEQ ID NO: 394338 - DNA, 569 bp, Homo sapiens
ctccgtgttttgttgcatcccttccttgagtttctttggatcctggttcaagtctgtgcttatctctgtgaggaaagcttctcctgaagttcatctgcaacatagggatgaaggcaaggaggcaatgagaggctgacccaattttcggctcctccttgaaggttccatttctctttgctccccctgcctcactttacgttcaccattccttcacaaccattggctttgccaacctcaagcccagtagctgaggaagaagcaatgattgtatataatctgcgcacctagccccaacatttttttaaggtaacatctccatagttaatttattttgtattatttatcattattccatttcagtaatcaaattctcacgggtaaactatgaatttcgaatatgaggttacctagtcacacatgtatttctagtggccgtatgagctttttcctgtcctcctayccactgcttcatgggatatctgaccagaatagtaagtgggaaaaacaggatttaaacctatgctatattgatttatatgcacttatgcttttatttttacttttatttt

SEQ ID NO: 394339 - DNA, 554 bp, Homo sapiens
aaagctggaagcattccgcttgaacatgggcacaagacaaggatgtcctcccacctcattcctattcaacatagtattggaagttctggacacaacagttaggcaagagaaagaaataaaggggtatctaaataagataagaggaagtcaaagtatccctgtttgcagacaacagaattctatatctaggaaactctatagtattggtccaaaagcttcttcaactgataaacaacttcatcaaatttcaggatacaaaatcaacatataaaaatcactagcattactatacaccaacaacagtcaagccaaaagccaaatctggaatgcaattccattcacaaatgccacaaaaataatcaaatctacaatgagaattacaaaacactgctcaaagaaatcagagatgacacaaacaaatggaaaaacattccatrctcatgggttggaataatcaatattgttgaaatggccatactgcccaaagcaatttatagatttaatgctattcctatcaaattaccaataatgttctttacagagctagtaaaaaa

SEQ ID NO: 394340 - DNA, 614 bp, Homo sapiens
aagttaattaataccaagattaagctgaacacatggcatatcaagaattttcaataaatatttactatttttattattaataaaaaccaatacaatggcagattagaatgtcaagggtggagaattttaaaacagtcattgaaataacagaattatgcagcatagcatattgatgatatggattgattcagttacacaggttaacacaactacagcattaattgytcgaaatactgtttttttaacgtctttcctaaacatgtgtaataggcttgtgagaggtaaatcatacttgatattacctgcaggcatttaatccaaagagatttaatgtttttcatcaaagtaatgttgatatgccatgagtatcaggcaagtagaagaattaaataatgtctccttatgaaaatcaaggactctaaattatacatgttctaaaaactgtttcattttttcataaatagtggaaacatagataccctcaaagtgttaaaatattaaaaatttatttttattcatgcatgtgttccaacaattacttaactgaattcttgagataaaactcacaaaagatgaaaaagatgaccttgatgtagatgctgttatgaacaacc

SEQ ID NO: 394341 - DNA, 614 bp, Homo sapiens
aagttaattaataccaagattaagctgaacacatggcatatcaagaattttcaataaatatttactatttttattattaataaaaaccaatacaatggcagattagaatgtcaagggtggagaattttaaaacagtcattgaaataacagaattatgcagcatagcatattgatgatatggattgattcagttacacaggttaacacaactacagcattaattgttcgaaatactgtttttttaacgtctttcctaaacatgtgtaataggcttgtgagaggtaaatyatacttgatattacctgcaggcatttaatccaaagagatttaatgtttttcatcaaagtaatgttgatatgccatgagtatcaggcaagtagaagaattaaataatgtctccttatgaaaatcaaggactctaaattatacatgttctaaaaactgtttcattttttcataaatagtggaaacatagataccctcaaagtgttaaaatattaaaaatttatttttattcatgcatgtgttccaacaattacttaactgaattcttgagataaaactcacaaaagatgaaaaagatgaccttgatgtagatgctgttatgaacaacc

SEQ ID NO: 394342 - DNA, 564 bp, Homo sapiens
aacagttttattatagtgttttttgaaacattatttttctctctccagtttcccatttttagacaaaactaataggaccaatttgtttgcaaaataagttttaatgttattatagtggccttgcttctttgcataaagtgtaccaagaaaaaatatttgacatatagatttatagtcattctgttttgttttgttttgtttgttttttttttcaacttcactttgctgaaactcattttcataagggatctcagattagatgttttcaagccttgagcmaagccacagatttatctgtgcctgcaaatacctgtatgaattgggtgaatgcctgtcctgttgagatcccaatataacttggggtttctagacctgttagaaagtgccattctttacttaccacaggtgggaaatcctgtacaaggactatatactcaaggtatgaggccagtttttccaaagggtttttatcaggtctataagtcatcttcaatttataaagcatgccattgcagttaaagctttggtaaaaacacaagtctctaaatgtgtcttgttagaaaa

SEQ ID NO: 394343 - DNA, 468 bp, Homo sapiens
ttcaagccttgagccaagccacagatttatctgtgcctgcaaatacctgtatgaattgggtgaatgcctgtcctgttgagatcccaatataacttggggtttctagacctgttagaaagtgccattctttacttaccacaggtgggaaatcctgtacaaggactatatactcaaggtatgaggccagtttttccaaagggtttttatcaggtctataagtcatcttcaatttataaagcatgccattgcagttaaagctttggtaaaaacacaagtctctaaatgtgtcttgttagaaaagaaaaytgattcttatttcacttatgctaaaaactgtattgacataagttaagaatacacaaaaatagtttttatattctggagaaatttggtagagataaagaagtatgttctaaattttgcttctaggagtatattttcctctattgttgaaagctgtaaaaaaaa

SEQ ID NO: 394344 - DNA, 643 bp, Homo sapiens
aagtagcctgtatggtagtttagttttaaaactctcttttacctctttttttctttagttttaaacaagttttttaaaagtttacatttcagttaaaccataaacattgagtcttatctcatcaccagcagcttaacaatagcagatgcaaagcaggcagaaaagaaatagggggagatagagaatgttagamgacttgacttaaatctgtagttacagattattagcattctgaactttttttattgtgcagaaaaccaataattactgtcacactcagatgtgcctggtgccttcctgaaggccagaagtgtggcaaagagaagcaaagcattaatgatgagttttacacaaagatacaaaatcaaaatctaggtacataaggagagaaaaaaaaagggagagagagatatatatttcctgggactcaaacccaaatcaactaatgtgaaggatgaagtgaaacccatctcactgacaactgggttgattatactcagatcagctgtttcaatctgtcctttataaatatatattcaagtgtcccagactggtaaaactgagttgactgtttcaacttgtctcatatggatgtccatttagatccaactttctgtgttaagaagtgaggaagagaggaggg

SEQ ID NO: 394345 - DNA, 572 bp, Homo sapiens
attctacatgtttctgaataaatacaactcaagtaacagaggggcctttctggggggarttggatcacgaatgatactaaatttttcagcatattgaattgaaagttttagggagcatacagcacgtgcacatgtatgcatgcacaggcatacagacacacacacacagacacagacacacacacacacacacacacacacacacccctttgcatactattgggggaaattcagccagatatctggcgaaattcacccccgatatttcatgtagattcttttctattttctctaagtgttggccggtctgaaaactaaagggacagagtacaaaagagagaaattttaaagctggctgtccgggggagacatcacatgtcagcagtttccgtgatgcccccggagctgcaaaatcagcaagtttttattagtgattttcaaaaggggagggagtatatgaataggctgtgggtcacagagatcacttgcttcacaaggtaatagaatatcacaaggcaaatgaaaggcagggcaagatcacaggaccacaggcccggggtgaaattaaaatt

SEQ ID NO: 394346 - DNA, 572 bp, Homo sapiens
attctacatgtttctgaataaatacaactcaagtaacagaggggcctttctggggggagttggatcacgaatgatactaaatttttcagcatattgaattgaaagttttagrgagcatacagcacgtgcacatgtatgcatgcacaggcatacagacacacacacacagacacagacacacacacacacacacacacacacacacccctttgcatactattgggggaaattcagccagatatctggcgaaattcacccccgatatttcatgtagattcttttctattttctctaagtgttggccggtctgaaaactaaagggacagagtacaaaagagagaaattttaaagctggctgtccgggggagacatcacatgtcagcagtttccgtgatgcccccggagctgcaaaatcagcaagtttttattagtgattttcaaaaggggagggagtatatgaataggctgtgggtcacagagatcacttgcttcacaaggtaatagaatatcacaaggcaaatgaaaggcagggcaagatcacaggaccacaggcccggggtgaaattaaaatt

SEQ ID NO: 394347 - DNA, 572 bp, Homo sapiens
attctacatgtttctgaataaatacaactcaagtaacagaggggcctttctggggggagttggatcacgaatgatactaaatttttcagcatattgaattgaaagttttagggagcatacagcacgtgcacatgtatgcaygcacaggcatacagacacacacacacagacacagacacacacacacacacacacacacacacacccctttgcatactattgggggaaattcagccagatatctggcgaaattcacccccgatatttcatgtagattcttttctattttctctaagtgttggccggtctgaaaactaaagggacagagtacaaaagagagaaattttaaagctggctgtccgggggagacatcacatgtcagcagtttccgtgatgcccccggagctgcaaaatcagcaagtttttattagtgattttcaaaaggggagggagtatatgaataggctgtgggtcacagagatcacttgcttcacaaggtaatagaatatcacaaggcaaatgaaaggcagggcaagatcacaggaccacaggcccggggtgaaattaaaatt

SEQ ID NO: 394348 - DNA, 572 bp, Homo sapiens
attctacatgtttctgaataaatacaactcaagtaacagaggggcctttctggggggagttggatcacgaatgatactaaatttttcagcatattgaattgaaagttttagggagcatacagcacgtgcacatgtatgcatgcacaggcatacagacacacacacacagacacagacacacacacacacacacacacacacacacccctttgcatactattgggggaaattcagccagatatctggygaaattcacccccgatatttcatgtagattcttttctattttctctaagtgttggccggtctgaaaactaaagggacagagtacaaaagagagaaattttaaagctggctgtccgggggagacatcacatgtcagcagtttccgtgatgcccccggagctgcaaaatcagcaagtttttattagtgattttcaaaaggggagggagtatatgaataggctgtgggtcacagagatcacttgcttcacaaggtaatagaatatcacaaggcaaatgaaaggcagggcaagatcacaggaccacaggcccggggtgaaattaaaatt

SEQ ID NO: 394349 - DNA, 616 bp, Homo sapiens
gataagtgtccatgaaatcttcacaatttatgttcagagattgcagtaaagacagtcgtaagaaattataaaagtattaatttggggaactaataaatgtccatgaaattttcacaatccacattcttctgccatggcttcagccggtccctccatttggggttcyggacttcccgcaacagtatgccctagtacttaacagagggcttaacatatagtccgtactttgtgtctgttgacataaattttcttgaacaaacttcagccactgccagcaagaatttgtgaaaagcctttcattctataataaacagaaaaacttatattcagctgagtttcttaaagggttttctgcacaggtttggagtccacttcttttgctatagtcctgatattcttgagatgctttaaggattaaaagtcacaaacattatagaccaaattgatggttcaagttcccttggaaacattttagcctttgatctattagcatacagtttccacatgaaagtaattgcaaaggcctttgttaagtacagttcataaatcagtaatctgtcagttatttactaattctactattaggtttagcattctctcccaaattaactgtggc

SEQ ID NO: 394350 - DNA, 546 bp, Homo sapiens
gcaatttattccttttaaaaccacttattcaatattatttttctactgggatattgacatttgactactgatttacagtaaatttttatttgttaatttttaaatgtatatttatttttattcatactttgttacattataaagttatgccaatacaatttttaaaacacaaattcagtggtataraagtaaaatagaaagtattaatacttccatctatctgtattagttagtattgattttggctgactataccagaaataacctctaataacaatgattctcaagagagagaattaaatttctctgccatataaaaagcactgatgtagataggaaagcatggtggtttcacatttgtaagtggtgcaagctaaatcgagatgtgtattctcccatttaaggaatgtgatccatgccttcttttttttttttcttcacttttattttaagttcaggggtatatgttgcaggataatggctttcaagtccagccatgtccctgcaaaagacatgatctcattcctgtttatggctgcatagtat

SEQ ID NO: 394351 - DNA, 546 bp, Homo sapiens
gcaatttattccttttaaaaccacttattcaatattatttttctactgggatattgacatttgactactgatttacagtaaatttttatttgttaatttttaaatgtatatttatttttattcatactttgttacattataaagttatgccaatacaatttttaaaacacaaattcagtggtataaaagtaaaatagaaagtattaatacttccatctatctgtattagttagtattgattttggctgactataccagaaataacctctaataacaatgattctcaagagagakaattaaatttctctgccatataaaaagcactgatgtagataggaaagcatggtggtttcacatttgtaagtggtgcaagctaaatcgagatgtgtattctcccatttaaggaatgtgatccatgccttcttttttttttttcttcacttttattttaagttcaggggtatatgttgcaggataatggctttcaagtccagccatgtccctgcaaaagacatgatctcattcctgtttatggctgcatagtat

SEQ ID NO: 394352 - DNA, 532 bp, Homo sapiens
ggggatgattaatggatacaacaaaatagaaagaatgaatgagacctactatttgatagcacgacaagaggactagagtcaataataacttaattgtacattttataataacttaaagagtataactgaattktttgtaactcaaaggataaatgcttgaggggatgaacaccccatttccatgatgtgcttatttcacattgcatgcatgtatcaaaacgtctctggtgctttataagtatatacacccactacgtactcacaaaaattaaataatattaataacattaataataaaggaaaccatgccttaaaaaataatgataaaatctctgagaatgtaatgtgccactgttttgacatgatcgaaatttgatttagatatttactataaataatatacatgaagataattgaatacatttgattataacaacattttcctttgcaagtaatattgtaaaaaggaattattttatatttcatgaatgtataaatagcagacagaaaaaatgaatactgcttttcatgc

SEQ ID NO: 394353 - DNA, 532 bp, Homo sapiens
ggggatgattaatggatacaacaaaatagaaagaatgaatgagacctactatttgatagcacgacaagaggactagagtcaataataacttaattgtacattttataataacttaaagagtataactgaattgtttgtaactcaaaggataaatgcttgaggggatgaacaccccatttccatgatgtgcttatttcacattgcatgcatgtatcaaaacrtctctggtgctttataagtatatacacccactacgtactcacaaaaattaaataatattaataacattaataataaaggaaaccatgccttaaaaaataatgataaaatctctgagaatgtaatgtgccactgttttgacatgatcgaaatttgatttagatatttactataaataatatacatgaagataattgaatacatttgattataacaacattttcctttgcaagtaatattgtaaaaaggaattattttatatttcatgaatgtataaatagcagacagaaaaaatgaatactgcttttcatgc

SEQ ID NO: 394354 - DNA, 532 bp, Homo sapiens
ggggatgattaatggatacaacaaaatagaaagaatgaatgagacctactatttgatagcacgacaagaggactagagtcaataataacttaattgtacattttataataacttaaagagtataactgaattgtttgtaactcaaaggataaatgcttgaggggatgaacaccccatttccatgatgtgcttatttcacattgcatgcatgtatcaaaacgtctctggtgctttataagtatatacacccactacgtactcacaaaaattaaataatattaataacattaataataaaggaaaccatgccttaaaaaataatgataaaatctctgagaatgtaatgtgccactgttttgacatgatcgaaatttgatttagatatttactataaataatatacatgaagataattgaatacatttgattataacaacattttcctttgcaagwaatattgtaaaaaggaattattttatatttcatgaatgtataaatagcagacagaaaaaatgaatactgcttttcatgc

SEQ ID NO: 394355 - DNA, 575 bp, Homo sapiens
atatttaatcctatccttatctctgcctagacgcccccaaagagattgttaataaaattgtttatatatgtaaatgttaggatatataaagaatgtckgtctttataataaaatgaatttattgagaatatagatccacaaactaatgataatgctacatattaaagatcagttaaaatgatagcaaagcaagtattagtaatattcaggtgattgcaataatggctgagtgaattagaagacatccacatataacaaaatattaaaatattaaagtggtagagctaaacagttacacagatgatacagcactaaataacaaatattggcattgcttgacacttaatataacttagattatattgatattgaaaatggtgagccttcataccattttacaattctttgcataaaaaattgttttcatttttttatttctaaagagatagatacatatgatagtatagaaatcaagagggtaatcacactagaaaaaaatagtatgtagaatcttcatgttagaagtctatatgcataacgctagctacccatcagttatctatggaaacaggcaa

SEQ ID NO: 394356 - DNA, 575 bp, Homo sapiens
atatttaatcctatccttatctctgcctagacgcccccaaagagattgttaataaaattgtttatatatgtaaatgttaggatatataaagaatgtctgtctttataataaaatgaatttattgagaatatagatccacaaactaatgataatgctacatattaaagatcagttaaaatgatagcaaagcaagtattagtaatattcaggtgattgcaataatggctgagtgaattagaagacatccacatataacaaaatattaaaatattaaagtggtagagctaaacagttacacagatgatacagcactaaataacaaatattggcattgcttgacacttamtataacttagattatattgatattgaaaatggtgagccttcataccattttacaattctttgcataaaaaattgttttcatttttttatttctaaagagatagatacatatgatagtatagaaatcaagagggtaatcacactagaaaaaaatagtatgtagaatcttcatgttagaagtctatatgcataacgctagctacccatcagttatctatggaaacaggcaa

SEQ ID NO: 394357 - DNA, 588 bp, Homo sapiens
tagagagaaggaaaccacattaacataacttttattacactatattttatgttttatttattattagttattattaaactcttactttgcctagttttaaattaaacagtatatgttggatttggtattaaccattgtatcaggcaccctctgagggtcttagaaaaaatctcccacagataagatgaaactacactgtattcttgtrtaatactgatatttataaattttgataacttttcataatttctattttagtttaaagttcatttggaaattatacatagatagtaaatgttagtatctaggattgaatttttgaaaattaaattaatatatgtatgactttgtaatcaataattattagtttttcaataagacccacatctaatgcaaagcctggtgggctcaagtaagagagaggcttcacggtttataaagaaggcatttttttttttcagtcaatgatgccttcatcacagactttactccattatgtcttttcttcccacaagttagggactgatgaggtgagtggggacaagagatatggaacaatttatggaagaattgttgtcagacatatga

SEQ ID NO: 394358 - DNA, 536 bp, Homo sapiens
agatgaaactacactgtattcttgtgtaatactgatatttataaattttgataacttttcataatttctattttagtttaaagttcatttggaaattatacatagatagtaaatgttagtatctaggattgaatttttgaaaattaaattaatatatgtatgactttgtaatcaataattattagtttttcaataagacccacatctaatgcaaagcctggtgggctcaagtaagagagaggcttcacggtttataaagaaggcatttttttttttcagtcaatgatgccttcatcacagactttactccattatgtcttttcttcccacaagttagggactgatgaggtgagtggggacaagagatatggawcaatttatggaagaattgttgtcagacatatgaactcagatcctggcaggcaatggagaagtttgaatgtcccactccctgtttggatactgaaggaaaaacagtgccaaaagtgactctgtgtgaggtgcatgcattgtcaaaggcagtactgctgagagaa

SEQ ID NO: 394359 - DNA, 423 bp, Homo sapiens
cttctttcctacagaatagtaaaataattaatgtgtatcattttaagtcaatgaaatttcactactttgctacaaaacagaaaggaaactaatacagcaccccaccccagatcacagtrtaggttggtgtccccattcttttgtggttgttggtgcagttagatacttagactaatgtctaagtattagacattgtgtaaacctttagggagtgatatggtttggctgtgaccccatccaaatctcaattgtatctcccagaattcccacgtgttgtgggaggggctcaggaggagtaattgaatcatgtgtgctggtctttcctgtgctattcgcatgatagtgaatatgtctcatgagatctgatgggtttatcaggggtttctgcttttgcttcctcctcattttctcttgccaccacca

SEQ ID NO: 394360 - DNA, 516 bp, Homo sapiens
gtgtcattagtttcacttcagcatagtcttgaagaacatgtactttaaatttataaaattgtatctactaatcttttccttgagtgtttccatttttatatattgtttaataataaagtcaatgcagtttttaaaccattttattactgaaaattttaaacatatacaaaaataagtagaattttataatgaaccccaatatacccattaccaagttccaataattatcaatttgtgaccaaacttgtttatactggcactagctcccccatatccagtatatttttaaattcttcttttattttagatatgagggtaaaggactcactatacaatcaatgatgctgggataattggmtagccatatgcagaactcagtttttccttaaatattgtagagttttgctttttcacatttagtttttaatatatttggcaaccatttcagaccatgaataacagcagtccaatttaattttttccatatgaatactcaattgatgcagaaccatctac

SEQ ID NO: 394361 - DNA, 622 bp, Homo sapiens
ctttggatacttggaggaaagggtaggaggaggttgagggataaaagactacacagtgagtacagtgtacactgctagggtgttgggtgcaccaaaatctcagaaattaccattaaagaacttatccatgtaaccaaacagcacctgttccccaaaaacttgttgaaataaaaaaataagaattaaaaaaaagctgaaaaagtagaatgagccactttttttttttacgtgctcccraagtatgtattctaactgttctttgtacatagaaatatgatggctttcatattgatgatgcatccatcatggctactgagttacaatttatgattaatttctttgtaaatttatgagacatgtatgtaagcaacctttttatctgaaaataaagagatttgtatttctttatcatctttattctattgtttattttccttatctcaccacactgctgagccatccagttaaaaggtaaatgaaagtaatgagcatttttaatcagcttattttacatacaatacattttaatctcttgtaagtttaatgtaagttttgttggatacctgtcattcagattaaggaagtgtattttgtttctacctttagccataaggcactggac

SEQ ID NO: 394362 - DNA, 653 bp, Homo sapiens
gatacctgtcattcagattaaggaagtgtattttgtttctacctttagccataaggcactggaccctccccactgccttaaataatgtaaaaacagggaaatacataaagcaatatttttatacataagacaatatatagcacaaaatagtratgtgcaaaataagggaaaaaaataagacgagtttctttctaatttgctcgtaggccacagaacagggagagggaacagagtctggcaagcttggtgagttgaagagacatacatcagagttcagaaaaaaacaggaaagctaaaatttgtgaagcaaaatattgaagatgatgcagctgcatattgactagaattctagaaaattgtagaagagggaagcaaaaattggctcatatgtacagctaaacccatggaaagagtcaccaataaagaggtggaccaaacaaattgaagcattaggggaaatacaaatttccactcttaggaatgaaagaggagacaccattccaaattctgtacatattaaaatgataataagaaaatgcggttagctgattcttaaaataaattcaacaatttggattaaatgaaaaaattcctcaaaatacagactattaaaatttatttgagaaaaatgtgataacctctatacctctcta

SEQ ID NO: 394363 - DNA, 686 bp, Homo sapiens
gctatatttaggctgaaaggacatgctaaactcaaatactgatttcaaagatttttcatattcgtagtcaaaaattagaaataaacattagaaacaaacatttcatattcctagttgaaaaattagaaataaaaattagagacaaaacaaaaaacagtaaaggtayatttataagacaatatatggatattaaataaaatgagtgtgatggatgaaatagaatggcaaaaataaataaaagacatgatgtaaatacactacactattttattatttgagaaatcatcagttaaggtttccataaaattcacagcaccaaaaaaatgagacagaatggcttaaaaattgtttaagtaaaggagttttccttaatctaaattcattttacattcccatctttctgtagtcatagctggcatataatgttttgaaaagaaagcaagcctttaaagatcacaaacaaccaatttcacactacaagcagtcataaatagagctaaattccctttagtaatacactatttatctttgtgcttcactgagttcaaagaaaagcattattcagagtgtaagcaattagcttctcattttttttctattccagaaaggatgttatcaaaaaagcatgggattaggaagctacagagctatcagaattattcttagtgtatgaaatttcaatttag

SEQ ID NO: 394364 - DNA, 686 bp, Homo sapiens
gctatatttaggctgaaaggacatgctaaactcaaatactgatttcaaagatttttcatattcgtagtcaaaaattagaaataaacattagaaacaaacatttcatattcctagttgaaaaattagaaataaaaattagagacaaaacaaaaaacagtaaaggtatatttataagacaatatatggatattaaataaaatgagtgtgatggatgaaatagaatggcaaaaataaataaaagacatgatgtaaatacactacactattttattatttgagaaatcatcagttaaggtttccataaaattcacagcaccaaaaaaatgagacagaatggcttaaaaattgtttaagtaaaggagttttccttaatctaaattcattttacattccyatctttctgtagtcatagctggcatataatgttttgaaaagaaagcaagcctttaaagatcacaaacaaccaatttcacactacaagcagtcataaatagagctaaattccctttagtaatacactatttatctttgtgcttcactgagttcaaagaaaagcattattcagagtgtaagcaattagcttctcattttttttctattccagaaaggatgttatcaaaaaagcatgggattaggaagctacagagctatcagaattattcttagtgtatgaaatttcaatttag

SEQ ID NO: 394365 - DNA, 622 bp, Homo sapiens
agagtttcaaataaactctttgcctaaagattcatctctctatatttttatttcatgttaacaaaatgaagcattccaagactagcctattggaaattataccttctatgtaaatggtttgcttcttttatttttcaatagcattcaaagcaattatttatttattcatttatattgacaaattacagttgtatatattcatggggcacaaagtgatgttatgattttgaatacaatgtgaaaaaattaaatcaaactaataaacccatcaccacaaatacttgaaatttttgtgatggaacatttgagtttactctcttggtgataatgaaatgtatggtgctcagttattaactatatttactacacagtacaatagatctcaaaaatagaaaaatccaactatttaaattttgctttatttttttctgtaycttcctgctagaatataatctccacaatttcagattctcatatgttttggaccctgctatattactctatatccaaaacagttcctgatacataccaggttccaaggcctatttgtcccactgaatgaataaatgcataaatgaatgtatgaatgaataaattcaaggtatgagtacaaatgcagtta

SEQ ID NO: 394366 - DNA, 622 bp, Homo sapiens
agagtttcaaataaactctttgcctaaagattcatctctctatatttttatttcatgttaacaaaatgaagcattccaagactagcctattggaaattataccttctatgtaaatggtttgcttcttttatttttcaatagcattcaaagcaattatttatttattcatttatattgacaaattacagttgtatatattcatggggcacaaagtgatgttatgattttgaatacaatgtgaaaaaattaaatcaaactaataaacccatcaccacaaatacttgaaatttttgtgatggaacatttgagtttactctcttggtgataatgaaatgtatggtgctcagttattaactatatttactacacagtacaatagatctcaaaaatagaaaaatccaactatttaaattttgctttatttttttctgtaccttcctgctagaatataatctccacaatttcagattctcatatgttttggaccctgctatattactctatatccaaaacagttcctgatacataccaggttccaaggcctatttgtcccactgaatgaataaatgcatwaatgaatgtatgaatgaataaattcaaggtatgagtacaaatgcagtta

SEQ ID NO: 394367 - DNA, 602 bp, Homo sapiens
  misc_feature (1)...(602): n = A,T,C or G
gcaaatgtttgggaggtcagcccaaacattcaggatgctaaggtttatgtgacctancctccatcttacttaactattcttttcctggaccactttcccccctagccactctggtccgtgcataggcagcctagaaatcttttcagtttctcaaataatcaaatcgatttctaccttgacatcatttcctctgccataaaagctcttcatgctgattttaacttagcaagacttgctctttcatggcattaaaatttcaatttaaatgttaacctcttaaggtatagcttttataataactgaagtagaaatcaytatctgttaaacactaattttccatgtaacgctcaatagtatctgaaattttcctttttagttatgtgttcaatttattctttccaattgaatgtaaatagagggagagagagagagaggtagtgagggagagaaagagagaggcaacttttcttatgtccatgactgaactcttagtgaacagagaaatctctggcgcataggaggtaggtagcaagtacctactcattttatgacttaacaaatgaatatgtaaataaatctatttaattaaaatagatcacttc

SEQ ID NO: 394368 - DNA, 524 bp, Homo sapiens
gtattgattttccctagattttctacttcgtgtgcatgggagtgttcacaatattttctggtggttattgttatttttttagggtcagtggtaatatcacttttgttgtttttgattgtatttatttgagtcctctttcttttttctttattagtatagctagcagtctgtccattttattattttttaaaaagctcctgaatttgttgatctgtttaatttttttgttgttgtttttcaagcaccttctgttcagctctgattttggttatatcttgtcttctgctagctttgggattggtttgctcttggttctttagttmttttagttgtgatgttaggttgttaaattgagatctttctaactttttgatgtgggcattttgtgctataaatttccctcttaactctgccttagctgtgtcccagagattttggtattttgtatctttgttctcattattttcaaagagcttcttgatttgtgtcttaatttcattatttacccaaaagtcatccgaaga

SEQ ID NO: 394369 - DNA, 521 bp, Homo sapiens
tttcttgtctggctgtaccacagtttatccattcacatactataccttggttgtttccaagttttgaaagaacattttttttctaaaacatttttaatgtaattttttcataaatgtcaattaggcaargtattgactgagttgtattgatattggtcattttgtttatttatggatattgatattgtcattttactttctatatcttactaaattacttgtcaaattgtttgggctccatgtaaatggaatctttgttatccaatgtatatataacagcatttttatgtatgtctgatgattttaacattttataatcatataatttcctttataatctctgtttatagtcaatgtcttgaaatctaatttatcaatattaacatagccacttcatttgtcttctgcttatatttttttattttttaaatttttatggatacttagtagttatatatgcttacagggtacaggtgatattttgatacagcatacaaatgtgaaatagtctcatcagggta

SEQ ID NO: 394370 - DNA, 490 bp, Homo sapiens
ttgatacagcatacaaatgtgaaatagtctcatcagggtaactggggtatctatcaactcattgtttatcatttctttgtagtaggaacatttcagttcccatcttttagttattttaaaatgtacaatggactatattgtatatggttgactatagccaccctgttttgctattgaaacaataatcatatttgttcttttaagtatattcttacaccccttaactatccccacttttttcctctcctcccaactacccttcccagaccctgctaaccaccactctatgtcagatacactgtggttttacatacatacaactcaacatatttatgattgcagctcartgagtcttgagaaatatatgcaattttataatcaccacaccaattaatatacatattcttcactccctaaagattttatcattcctctttgcagtcaattactttccctcacctccagtcaatgacaataatctgaattggat

SEQ ID NO: 394371 - DNA, 644 bp, Homo sapiens
ctgtttgttgttatattattgagttctgactgttctttttatataaatatataaacaagttgggtatcaaatatatatttgtccttatttatgaaaagccaccagtaagagccttctcattttctttgaagtaacctttaaagaatataaaattttcattatttttcttatatagtttttaattttgtatcctctctaagaaataattgcctaacataagatgacaaaaatttttttacccaagttctcttctatacgttttatagttttggctgtaagttatctataatacatatttagctaatttacatatgatttarggaaatactggaggttcttttaaactttttttaacctctatttttgccattgctatctccaacatctagttcatatttagcctctgttaacattttcctttgttaacaatggatcaaatttttttactttgtttcttgatttttgattatattctagatattttgctgaaaatatgtagacacagaaataaaaatcattttctcaaggaaaagtcttgccccttttgcctttcatctagctagtaagaatgacagtcaattgagtgtttacttgagtgaatctaggctttgtttttgcctcagtttgattcagctcgccactaa

SEQ ID NO: 394372 - DNA, 546 bp, Homo sapiens
ctagtaagaatgacagtcaattgagtgtttacttgagtgaatctaggctttgtttttgcctcagtttgattcagctcgccactaacttccaatattttgaaggcattatcagggcttgtgtgtcataagagcattagatctaagcacagtgaagattctggcatttactatataatctgcatccaagacatcaactctcctaagartagtagagccctctgctttgcaatgtggataccagatttcatggttactccagagtttttgttctcttctctcactaatagccattctattcctccgaagatcattagcttacttcactgccccctccaaaacctgccttaagcagtgagggccctactttcttgcaagtttgattagattttttttctctgactacttctttatcagcctattgcctttcacttgcagagaatgtgtttagactctgaggaagctccttctcagcttccatgccctgattctagtcataggcctactctgtgcattatctctgttccacctagaacatagcagtcataa

SEQ ID NO: 394373 - DNA, 546 bp, Homo sapiens
ctagtaagaatgacagtcaattgagtgtttacttgagtgaatctaggctttgtttttgcctcagtttgattcagctcgccactaacttccaatattttgaaggcattatcagggcttgtgtgtcataagagcattagatctaagcacagtgaagattctggcatttactatataatctgcatccaagacatcaactctcctaagagtagtagagccctctgctttgcaatgtggataccagatttcatggttactccagagtttttgttctcttctctcactaatagccattctattcctccgaagatcattagcttacttcactgccccctccaaaacctgccttaagcagtgagggccctactttcttgcaagtttgattagattttttttctytgactacttctttatcagcctattgcctttcacttgcagagaatgtgtttagactctgaggaagctccttctcagcttccatgccctgattctagtcataggcctactctgtgcattatctctgttccacctagaacatagcagtcataa

SEQ ID NO: 394374 - DNA, 592 bp, Homo sapiens
ctgctttattaagtcttctaccaattcaaatattaacctccaaaaacacccccacagaaacactcagaataatgtttgaccagatacatgagcacccctggtccagccaagttgacatgtaaaattatgtgggaggccgaggtgtgagaatcacttgaacctgggaggtcgaggttgcagttagtcaagattgcaccattgcactccagcctgggtgacagagggagtctctctctttctctctctctctctttctctctctctctctctctctmtatatatatatatacacacacacacacatacatatagattctttcttgctcccaaaggaacgctgtgtgtatttcgttttaagacttaaaaaacctcatggaacaatgtcttcccttttttccaaatggtgtattcctcactttataattttcttatcaagacagttattttatcaatgtagaaatgttgagaaagatagcatacaatcgtttaataaatttacaagttcacacatcatacaaaggctcataaaattttgtgttgttctataatactattgttttatttcaatgaagcatccatagatacaattgaa

SEQ ID NO: 394375 - DNA, 617 bp, Homo sapiens
tatttgtccaattcttagaggggaggaagcaggcctgccctacctgtcatggggccgcaggttttcatgtcaatggagtgctcccatgggagtgctcctgagccctcctcccagggatttctggtgcccgggagcactctgtctcctttggtctcttctaaccattgctggggctgcgtggctttctcccaggggctcagctgcactcccacgtgctgatcccagtgcttccttgctcagagatttcagaagccttggttcagttactctggtgatctgacttcctcttcttgcaactagcactgcctgtgatcttgtgtcccagtaaaaaaaccaagtcccctcttcctacctcagctccagtaacaggctccccctcttgttttcgttcatagtagtgagaacggctacttgccataggtcccttcttcatcagttcattcaactaaagttgattgtgtgacttggtgtcaagtacttacgggtacaaaggtgagcaaagctggagaggaccctgcccctgagcggcttacaggtcacccatgctaagcactttccctgtgatctcactaaaatttygcaacaactgtactcaatatgggctgttatttgtgccc

SEQ ID NO: 394376 - DNA, 583 bp, Homo sapiens
ccagggtagtccagcccagctaacccaccagctgactgcagctgcatgagtgagcgtaggtgagaccagcacaatccacagaattgtgggaaacaataaatcattgttttaagccactaaattttagggtggtttgttacacagagaatacataagtgagactccaaacttcccacgacctcaccactaccaccaccccacaacacacacgcacacacacgcccttgagcatctctctggcttgccagtggcaatcastgaccgctttgctgttcctgtcttcatcttacccgacattaaaactcaccctctactttggcctggcctgcaagaaccttgcagtccattaatgggtttgaaaacagactcatactttggttcatactgaggtgttagtaactgatgttagcttaatgttttacatggctttcacccaaaggactagctcccttaaatgaggaaatttaggccccaaggcaggcaaagtcctgggcagcatcctccttgtaaatggctgtatctttgacttagaggtagacctttatgtgtatggaaatgaaagaaggtgcctcctagcttcaga

SEQ ID NO: 394377 - DNA, 533 bp, Homo sapiens
ggatggttttactcacctttgctagtctgagatggcacactgactgcgcacagtaggggagctgctgactacaggagtgggtgaactttttttgcaaaggatcggttaggaaatattttaagctttgctggccacaaatgctctctgctgattcttcttccttttctgcaaccctttaaaaatgtaaaaaatcattcttaactccaaaaaatcagctggggcstggatttctcatatggtgaaagatcaattgcagcacatagtccaaatacattttggggcccaaatacatttttgtacttaaaaaaatctctaaaattacacactatggtatctgtatttattttgtttaaaactccagtcaattaaaacatggatgaaacccagcatttataaaggtgaaagtaggaacttgcaaaatccatgcatacgtctttgtgcatcattaaagggccaaattccttcagctttacatagattcttccatggctgatgaggtctcatggctttttaggaagtgggataataaaact

SEQ ID NO: 394378 - DNA, 564 bp, Homo sapiens
agcatggtcaaagaagccttcccagaagaagtgatatccaagctgaggtttgaagtaaggaaggggagagcatccagacactctataccaggtttggaagggggagtgcacatatacagtgtaaacatggcccagcacttaaagaggaatacagacwgcacatcctcaggtgagtgcatggtaaaggagcactccttctattgcagggtgagatgagggatgtgattatgttcagatacatatgggccttagatctttttggatactagctgatactttatcaacagttgtcttcctgagttcttgcatatctgctaatattggagagtttaaggagagagcagagtccaaactcagggtgtgtcttggggtgtcttaagacagattatcactgtgaacaaaacaggaataattaacgacattaaatagttcatccttccctgcctttataaagtctcaccgagcttgcatttggcagcctgacctaccagtaagattataaaacaaatgaattagtaaatatcgaaataattctgtttgccacatgtgtgaatgttaaaaaat

SEQ ID NO: 394379 - DNA, 529 bp, Homo sapiens
catttggcagcctgacctaccagtaagattataaaacaaatgaattagtaaatatcgaaataattctgtttgccacatgtgtgaatgttaaaaaattcactgtcataattcaagcccaggttttaatagaagcacrtggatctaagcaaaatcaaatgaatggaccaatgttcaatatacagtgatggatgtcttgaataacctgagttgacagatataaaatgagatcataaaaacgttggctttttaaaaatgtgttatttacatcatttcttgaagccaaacactgtaatgccactaacattattagaaaatctggaatcagattaaacgtgatcactggttattatcatttttgtgacgtaagtcacagttctacttacatgtctctgggttttgaaaatgtgattaccagagttgggctcttaggacatacacttgaaaagataaattagaaactatggaatcattttctgaactgtttgtgagataactgttgatagttccagaagcatccctaaaaaacgac

SEQ ID NO: 394380 - DNA, 529 bp, Homo sapiens
catttggcagcctgacctaccagtaagattataaaacaaatgaattagtaaatatcgaaataattctgtttgccacatgtgtgaatgttaaaaaattcactgtcataattcaagcccaggttttaatagaagcacgtggatctaagcaaaatcaaatgaatggaccaatgttcaatatacagtgatggatgtcttgaataacctgagttgacagatataaaatgagatcataaaaacgttggctttttaaaaatgtgttatttacatcatttcttgaagccaaacactgtaatgccactaacattattagaaaatctggaatcagattaaacgtgatcactggttattatcatttttgtgacgtaagtcacagttctacttacatgtctctgggttttgaaaaygtgattaccagagttgggctcttaggacatacacttgaaaagataaattagaaactatggaatcattttctgaactgtttgtgagataactgttgatagttccagaagcatccctaaaaaacgac

SEQ ID NO: 394381 - DNA, 366 bp, Homo sapiens
gcgtataataaagtctttacatgttattatttcctcctcaaaatgactctgtgagataagcattagtattataatctctgttttacagatgaaagctttgggagagcaagacagctacaaaacctatttttcattctacagtgtatttgattaaatggagggaagacaggagagatggagaaaaattttggccagtcaaacttcagatcctyaggtcaaatgtagccttggtgtcagaatctggaaattcctattgaagtggtttggtggccaattgtacttctgatccttgaatttgaactttaaaatccacctttgggtgtgacaatatgatcccaggacttaattaacctcttaatatgtcat

SEQ ID NO: 394382 - DNA, 587 bp, Homo sapiens
gttcatgctccctaactttccccactatttatatgttacccctcttatttttagccataagttttacttagtctgaagataaccaaatatttcctgaataataagtctctgaatatgcatattctctaaatatgaatataagcctatttgcaaatctagcacttacatttagaatgttgttggcaggactctgaaaatcaacttttttttttaatggaaaaatatactacagcagaaggatttgttttccacaaagcagaaccaacttttttgatttcaatgattttttgatacttccrtatatatttatatgctcattaaataaataaatattaagtcagaccttcttgattagagaatcgtctgtcactaaaaattggacttaggacttacaagtctctctcattaaagagaaggggttgtaagagggctgggatgcctggatttattcagcccctctttctcccattctagctcccaacgtggtcccattctctgagaaagtacacaaggccccggggccaggcagtaggtgatattcataagcaacaagaaataggaagccctctatatgggtttagtagcgc

SEQ ID NO: 394383 - DNA, 561 bp, Homo sapiens
cctacctggtggtagacggtgggaggagagagaggattgaaaaactrcctatcaggtactatgcctattacctgcatggggaaataatctgtacatcaaacccctacaacacgcaatttatctatgcaacaaacttgcacatgaaccctgaacctgaaagtttttttttaaatgcctttgggaaaattggctatctgcgtgcaaaagaatgaaattgaacccttatcttagcaaatataccaaagtcaactaaaatggattaaagacttaaacacgatacctgaaaccataaaatttctagtggaaaacataagagaaaagctacttgacattagtctaggcaatgagtttttggaaattacaccaaaagctcaaacaacaaaagcaaaaataaacaaatgagactatattagaaagctcctgcatagcaaaggagataatcaacagagtgaagagacagtctgcagaatgggaaataatattcacataagtcctatatatttaaaatgtataaggatctcaccaactcgatagcaaaaaaccaaataactgattaaaaat

SEQ ID NO: 394384 - DNA, 561 bp, Homo sapiens
cctacctggtggtagacggtgggaggagagagaggattgaaaaactgcctatcaggtactatgcctattacctgcatggggaaataatctgtacatcaaacccctacaacacgcaatttatctatgcaacaaacttgcacatgaaccctgaacctgaaagtttttttttaaatgcctttgggaaaattggctatctgcgtgcaaaagaatgaaattgaacccttatcttagcaaatataccaaagtcaactaaaatggattaaagacttaaacacgatacctgaaaccataaaatttctagtggaaaacataagagaaaagctacttgacattagtctaggcaatgagtttttggaaattacaccaaaagctcaaacaacaaaagcaaaaataaacaaatgagactatattagaaagctcctgcatagcaarggagataatcaacagagtgaagagacagtctgcagaatgggaaataatattcacataagtcctatatatttaaaatgtataaggatctcaccaactcgatagcaaaaaaccaaataactgattaaaaat

SEQ ID NO: 394385 - DNA, 561 bp, Homo sapiens
cctacctggtggtagacggtgggaggagagagaggattgaaaaactgcctatcaggtactatgcctattacctgcatggggaaataatctgtacatcaaacccctacaacacgcaatttatctatgcaacaaacttgcacatgaaccctgaacctgaaagtttttttttaaatgcctttgggaaaattggctatctgcgtgcaaaagaatgaaattgaacccttatcttagcaaatataccaaagtcaactaaaatggattaaagacttaaacacgatacctgaaaccataaaatttctagtggaaaacataagagaaaagctacttgacattagtctaggcaatgagtttttggaaattacaccaaaagctcaaacaacaaaagcaaaaataaacaaatgagactatattagaaagctcctgcatagcaaaggagataatcaacagagtgaagagacagtctgcagaatgggaaataatattcrcataagtcctatatatttaaaatgtataaggatctcaccaactcgatagcaaaaaaccaaataactgattaaaaat

SEQ ID NO: 394386 - DNA, 606 bp, Homo sapiens
tcacttcacacctattagaattgtcattatcaaaaaggcaagagataacaagtgttggcgaaggtgtgaagaaaagggaacccttgcacactgttggctggaatgtaaattggtacagccattatagaaaacagtaaagttactcaaattaaaaataaaactaccatatggtccagcaatccctcttctgggtatatatccaaaggaaatgaaatcagtaccacataaagagatctgcgtttttatgttcattgcagcagcattcacaatagccaagttacagaaacaagcttagtgtccattgacagatgaatgaatggataaggaattgtgtgaggtgtrtatatacacacatatatacataaacatatacaatggagtattattctgcctttaaaaaaggaaattctgacttttgtgacaacatggatgaccccgaaggacattattttaagtgaaataagctaggcccagaaagacaaatactgtatgatctcacctatctgtggaatctaaaaaagtcaaatacatagagaagaaggtgagcagagagagggttaggaataggaagatgttggtgaaagatgttggcatttgtgtaggatg

SEQ ID NO: 394387 - DNA, 606 bp, Homo sapiens
tcacttcacacctattagaattgtcattatcaaaaaggcaagagataacaagtgttggcgaaggtgtgaagaaaagggaacccttgcacactgttggctggaatgtaaattggtacagccattatagaaaacagtaaagttactcaaattaaaaataaaactaccatatggtccagcaatccctcttctgggtatatatccaaaggaaatgaaatcagtaccacataaagagatctgcgtttttatgttcattgcagcagcattcacaatagccaagttacagaaacaagcttagtgtccattgacagatgaatgaatggataaggaattgtgtgaggtgtgtatatacacacatatatacataaacatatacaatggagtattattcwgcctttaaaaaaggaaattctgacttttgtgacaacatggatgaccccgaaggacattattttaagtgaaataagctaggcccagaaagacaaatactgtatgatctcacctatctgtggaatctaaaaaagtcaaatacatagagaagaaggtgagcagagagagggttaggaataggaagatgttggtgaaagatgttggcatttgtgtaggatg

SEQ ID NO: 394388 - DNA, 560 bp, Homo sapiens
tgtcatgtgtgttgtatgagacaacccaattctttcttttaaaaacrcaaaatcactgtttagtaaaacacttattttgtctatgatttctctgtcttgttttaattgacacatttaaagaagaccattcactatttttactcttttgaatgtgaaaaatatatgtatgtacacatgagaaattatttttgtggcatcaaaatgtcaatgacaaatttgaattattgttagagctgtaaaactgttgtgagcataggcaaattcccttatcaaaattactctatacctgggaaaagcccaagtaattttccagtggtgtgaaggacagagagtgttcggtcgatgagacttaggaagaggacttcggaggtgactttcaggggacagtgcagtctctcaatttgtatatgagaccctgggcttcacacagctcttgtttcactgaaatccctcagcactccactcctaaaggtaatacctttatgtctggaaggttattatgcaaatgattttttaaaatattcctgcatatttttgtgctatttataatgtcatttata

SEQ ID NO: 394389 - DNA, 560 bp, Homo sapiens
tgtcatgtgtgttgtatgagacaacccaattctttcttttaaaaacgcaaaatcactgtttagtaaaacacttattttgtctatgatttctctgtcttgttttaattgacacatttaaagaagaccattcactatttttactcttttgaatgtgaaaartatatgtatgtacacatgagaaattatttttgtggcatcaaaatgtcaatgacaaatttgaattattgttagagctgtaaaactgttgtgagcataggcaaattcccttatcaaaattactctatacctgggaaaagcccaagtaattttccagtggtgtgaaggacagagagtgttcggtcgatgagacttaggaagaggacttcggaggtgactttcaggggacagtgcagtctctcaatttgtatatgagaccctgggcttcacacagctcttgtttcactgaaatccctcagcactccactcctaaaggtaatacctttatgtctggaaggttattatgcaaatgattttttaaaatattcctgcatatttttgtgctatttataatgtcatttata

SEQ ID NO: 394390 - DNA, 577 bp, Homo sapiens
cacagtggtggaagtataaacccagccctgattaaataaattgctgtcttcccttcaatggctataaaatacttttccccactccttcttctcacatccctcttctcctcctcctcctctttstcttccttaccattcctgctcctctgttcctgtatgtatatattctgcacaaatctgactccagttattccaaaccaattgccattcttcacatgtgccatgctgcctattgcttccctgcccttgcacaggcatttccctgcctctaaattgcatttccccttttcttcacctgtctatgacctatggatactttaatctcatcttgggcatcattttctatgagaagccttttctaatttccaccacttcctcctcatatgctgtgttattagtctattcttacttgccattcctccccactagacaatgagtttcctattgtgatactgccctgttttgccagctcctggcaattgcctggaatatagtaggtgctcactagctgtccgatgaatgaataaatgagtgggcatatttgtatatgaaagtttgaaaaactttgtacaagtca

SEQ ID NO: 394391 - DNA, 625 bp, Homo sapiens
ggtaaaataatgaaatgctcttgcaactgtagaatattatttttctcctttgtgctatatatttatagcatttaagcaaccatgtcatttactcaggttttcttatattagttgatcagatcttttttcccttggtatcatagtctgacataattatcaataatacagaaaggtgatataatcattattttacagaacaaatcctttttctgaaatcctgtgtgtctgtgtgtgcagatatctctaacagataccttaatcattttcattggaataggaattaaaagtcattttgcaaataaggtaagtctagactcccaaaataaaaattcttatgatcaaatattcatagattatgaggttattacatgcgaggcactgctctaagcactttacataggtcatatccttttatgctgagagtggtttttattatgatcccattatataggtgagggaattgaaacacagattaagaaatgggcccagcctagtgtggcagtgcccagtggcagagctcggatcagaccccagtggtctggctgtagagcccgygctctaatcattttgttacactgcctctcagatgcttccactctgctttcttccatgtgcaaactattgt

SEQ ID NO: 394392 - DNA, 608 bp, Homo sapiens
agcagactattagatttagcttgcatggcaaagaactcatttagattcatgaaatggttctcactttcttggtaagatctggcttggacgtttttgttaattttttcttttttccttttttttttctttcaaatttggagatcttcatgagcagatgaatatttactatttcagatttgaaataaaccctgccaaactgctagaatatttattgagagaattttttaaaaattgcacaaattaacactggaaggtcaaactagaaaccaataacacacagaggaaggacagataatcagggcataagactggaaagatgacatttttaagaaaaccgtatatatagatttgacttaatcatgtgttcacttcatgtataaaaaaaagccttcaaatcagaaacaaatctaaaatataaaaaagtcatatataaaattagtcatataaccacataagatagaattattccaagtgacatttgagcaaagtgctgtgtctatacttccttagtcaatgttctgagaaaaaaaggaatatgaaacatgcaagacwtttattagcaacaatttttatatttttgaaatttttatataaagattaagcaaata

SEQ ID NO: 394393 - DNA, 596 bp, Homo sapiens
tgaggggaggagtctatctgaatcaaccactgatctgaaattctacagagactcaaagactagtccatgtggatatttttaattgtgtgggagatgggcaccatttgaagaccctacaccttcaggttcttgatagcaagtaaagctattccaaaggaaagaagataccttactgacatggcaatcacagatcgatctttaatcattataacatttttttcttcagccaacaaaaatttctcattgtgtttcatttcarcttctaccttttaatgtattaccttttaatttttaaacttttggttcagtttatcaattgtccctattaacctcagcctgcttgttacagataacatacagataatagatttaagtaaacaataaagaagaaccactattttttgaatgtattatgtgtcagtactgagctaagcatttttgaaacattagagtcacccacatttgaaacaggacaactgaagctattttatacagaagattcacacacacacacacacacacacacacacacacacacacacattcttctacagaagatggcttatatatatttacacacactcttgaaacttctt

SEQ ID NO: 394394 - DNA, 685 bp, Homo sapiens
tgggggcatggatgggttaagttttagccatgtggagtttgagatgtttatggaatgacaggatattctagccaaactcaatgcaattattttcagtctgtcaacagacaaaacatgaggaatattaactttctcttactctatactggaaaaagtcaatacagtgtgtgataaatctattgtaaaaatgaaatggcttccagaaagctaacaatcagggcccatggctgtttctttctgtagtagtgctgagtgtgtttctttcttagtagatctacatgctgattttaacccagttccacaatgagcttacagtgtcgttattctgaactatgcaatccttcttgtttacagctacaaaacctccagttgaggccaaggaagtaggtatgttgaagccattctgacaccctccagaaactggcaaagccagatcttctgatctgaacccctaccagtttctttccctcccttcaccaaaatcttttacaatgaaagccactcaacacaattcgkttcatagcgtagttttggtgacaagcagtcagtggagtggttggtaaggcaggacttttttccatagtatggttatagttatgattcactacctttcaagaaatagccaccctacattacctcacgttagttagctgaatttccttcctccagggcttggaaaacagct

SEQ ID NO: 394395 - DNA, 582 bp, Homo sapiens
aagaaagactcatgcctatccctagctctcaactcgacataaatatttgggcactcaattattaaatgycatcagattaatatgtatataagtgcccactatatgccaaaaaaatgcattatgcactaaaattatagtagacaaaatacaagtgatctctaaccttgtgtagaaagtcctccccagtagcgagaattctaatgtggactcaccctatttttcagtttttatcaagagtaagcatttctccttctaggaagactctcttctcatgataccaccttattaagctttttcctgcctttctatctggccactctgagtttcctctgatggctcccttccctccgccataagtgcgggaaacccccagggctatattctggaaactctttcattctctttccatcttccctctttaggagatctaacccatttcctatgtctttaaataccatctaaatataagtcattaacagaatcaaaaacagaaacggtatacttatttcaatagatgctgagatagcatttgataaaattcaacattcctttatgataaaaattctcaccaaaatggatata

SEQ ID NO: 394396 - DNA, 603 bp, Homo sapiens
gcaaaaacagatgccggtgacaaaatggggtcaaaggggaaccctcatacagtgctgctagaaatgtaagttattacagccactatgaagaacagaatagaggttcctcaaaaaagtaaaactagaacgatgatatgatctggcaattcttgtgggtatatatcctaaagaaaggaaatcaatacattgaagaaatatctacactcccatgtttattgcagcactattcacaatagctaaaatatggaatcaaccyaagtgcccatcaatgagtgaatggataaagaaacatacatacataatggaatataattcaaccataaaaaaattaaaatcctgtcatttgcagcaacatggatggacctggaggcaattatgttaagtgaactaagccaagcacagaaagacaaatattgcatgccctcactcatatgtgggagcttaaaaagcaaatctcatgaacatagagagtagaatggtagttactataggagaggaaacggtaggtggagggcgataaagggaaaaatatatatataaatgtagttattgccagtggactttacacttaaaatggtaaagatgatacattttatatgtata

SEQ ID NO: 394397 - DNA, 483 bp, Homo sapiens
tagcatagtagtggaagtcctagccagagcaatcaggcaagataaaaaaataaaaagcactcaaattagaaaagaagaagtcaaataatctttcttcactggtggtatgatctttatatctagaaaattctaaagattccttcacaagactcctaggcctgataaatgacttcagtaaaattttaggagacaaaattaacacacacaatcagttgcatttctatacaccaacaatgctcaagctgagaaccaacttaagaaagcaatcccatttgtaatcctgcccaccmccgcccccaaaaaaagaaactatcaaaacgtctagcaataaatggaggactttcacctccatttaaccaaggaagtgaaagacctctatacggagaactacaaaacactgtgaaagaaactggacaaacaaatggtaaaacatcccatgctcatggataagaagaattattattaaaatgactatactttcta

SEQ ID NO: 394398 - DNA, 604 bp, Homo sapiens
aacagttttattttcaaacccattaagtactgactcttttttatttaacagttatttctttagcttgaatctctcttcttacattttattataagcaagtaaaaatataaccaggtaacaacttcaacactttgcctggaagtctttgcagctagacccccagttcatgagacattttctatttgccacattatgacacatggcacatttgctaaactccctgaaatcacttaatttccctcagtttccaagaacattttttcacttttctttacaccataactgatagattccaaaagggccattagatttcctctacatcctttcaactactacctgctacttagtcacaaacctactaccacaatttcatgtctttcaatatccagataccaatattggtaccaattagctaatgctgcatcacaaaccagtgcaaaacttacaggcttaaaacaacaacatttaaatgtttcatgaatctgcactttctccagggttcaacaaaggaaggctgccgccttccctgagtgtctggaggcctggagggtgggrcctactacatgcttgtttactcgtatgtctagcatttgatgttggttgt

SEQ ID NO: 394399 - DNA, 548 bp, Homo sapiens
tatttttagtacagatggggtttagccatgttggccaggctgggcttgaactcctgacctcaggtgatccacccaccttggcctcctaaagtactgggattacaggcgtgagctaccgtgcctagcctaaaatctcttttattgtctattagtcaggacttcttggaaagtcatttggcccttctgagcctcagttcacaactgagggcattagtgagggcagtaatagaacctaccccacaatgtatttcggaggattacgggaaatatactttgtaagcctctaacataatgcctgggacaaagcagacacttggtaaacacaagtcaccttccctcctccaatggcacagcatttttagatgtctttgaataggctaactttacttctcatatgacaagtatttgttttacttcatctagtcatccaatacattccttgagcttgtgaatcaaactttgtttctttttattgcccatggagcttcacacagtgtctgttcatggagaacagcmctaataaatgatttgtagcttcataacgtata

SEQ ID NO: 394400 - DNA, 589 bp, Homo sapiens
ggagcgttccctgtacagagcattaacaagaacttaagataaattcctcttcactgggctttggaaatagaagcctatttagggctaggctgggcaccctgcaccgtggcagtcattttacttatagctgattaactccttctttccttacctcattttaggcctccctcccatttcagtttcccctcctcctcttatgcctcaggttttcccatctcttactgtgtaatctgaaagaaattcctcaggcatgtaccctgatacatttggggcccatcaatttaccagtgggcgccttccgagggagagtcaccctagagtggttttctgcagtgggtgctgtgactgagagtggtgggaagcctgcagtcacactcctacctgcttcttccccttggagtaggattgtgcaggttgatgggtggctcctcttgcccttggaakaaaggtgcatttgtatgtgtgtgcatgtgtgtgcatgtgtgtgcactgtggccctgcaaggtctgctgagctttcaccccagctaagcttctgtagaacttgttccagctccaacaactcactgtactgtgagtcccctgaggtt

SEQ ID NO: 394401 - DNA, 510 bp, Homo sapiens
ctaacaagcaaagtagatatttcaaaggccatttaaaaggaactgtagttgaaaggatacattaaatccagatgaaaggagtcctttaatgctgtctaaagtcttgggccttttggggggcctaatttaaagtctttaaagatttttgagctggggaaggctaaggtaagagttgaaatttaggaaaatttaccaggcaacaggaaatggacatgactggagttaggcttatcggttactagctgggggctgaggaagggagagccatcattgaatcatgtgttaaataaaccttagagctctggtgtgcatgacccagggctgcccgcagatatctctgagcttccacagctgtgggcatgagaggtcctggggattgtcrtgccatcttgttgatgttagggcttcaagactctagagccaggggtttaaggcctgttgaaaggcagtggctatgcaagacttaggagacaatgtcacacaagacaaatgtacttggtcacacaaagg

SEQ ID NO: 394402 - DNA, 506 bp, Homo sapiens
cacttttatctaaattggttggacagaggagcacagcatatataatccataatgaaacagataaagctgtctccttgtgcttgatataaaaataaccaacaagaaaatgagcrtggatagggaaaaattaatttacttccctgcctaattactagatgcaggataaatgtatctgcttagctctctaattataataatacttagcagttacgtgaaactctttatcatcaaaaataccaccctccactgacactaaataattaatctttggcaccctagtgtgagcatcttatctgagcaggaaaaggaccattggttggaggagagtggagcagggtgaggtgcaaaaactcctttcatcactaagcagaaactgtttcctgggtctcagttccctggcctccacttgcatgcttgggaagaatctgcctgccagggctctgccagctgcagagagaagtctaccatccagtgccagaggctgtgatcactcaccccactgtgtt

SEQ ID NO: 394403 - DNA, 640 bp, Homo sapiens
gttttttgtcaccaacttcttcctcccctagaggtggcaagttcatcacaattagctatacttatcttgcctgagaaatcccaagagaaacagataatttctttcccaacatttccaggaaaatccagaagcttaatttcacttgcctgagaaatcccaagagaaacaggtaatttctttcccaatatttccaggaaaatccaggagsttaatctcacttgcctggcttaggccgtgtgtccatccccaaacccataaggcggccaagacaatgaaacaatctgattatccagacctaggtaatggaaatacatgtacttaaagtccaggaaagggattcccaagacaaatcagagtgtcatggccaaaagaatggtaaatggatgctggagaggaaaaacaacaaatggccactaaactatctgtggttagtgcatatcctctgtgtctaccagtttccttatctgtaaaacttattgtgcatctcacagcattttcgaaggatcccatgaggtaatgtttgaaatcacatagcccagtgcttggtgcttcgtaaatacatcaaatagcatattattattttacattataatggcacaggcctctggactgtcttcttatcaattcctagatgcaactt

SEQ ID NO: 394404 - DNA, 550 bp, Homo sapiens
tcatgcctgtaatcctagcactttgagaggctgaggaaagaggattgcccaagagttcaagaacaacctgggacacacatttgagactccatctctaaaatatttttttaaaaattagctgggcatggtggcacatacctatagtctcagctatttagggggcagaagtggaaggattgcttgagcccaggaggttgaggctacggtgagccatgattgcaccactgcactccagcctgggtgacaaagcaagaccctgtctcagaaaaggaaaaaaaaaaatcaatctgaaaaggacaaaactacatgctaaaatatgtgtaaaagcaaaatgtgtaactataaaaaattcmcaatagtacttttttttttttactattaaaaggctaatagaataatacattgagaatttgactactaaatgtagaaacattaagaagaactgaaaggatgaaattaattaaaattaagaactaaaactgaaggaatagaaaacaaccaaatgggtaaataggataataaaatatttttctctccaaaacagtaaaat

SEQ ID NO: 394405 - DNA, 276 bp, Homo sapiens
gcaaattgccagatacatgtccaaggtacaaaggaactgagaagattgttcaaggaggctaagtttagtcacagaaatgaaataaacaaaccaaatgaacagaattttcatgtagcataaaatttccaatgctyatgggtctggaccatacttgtttttctggtctcctttacttctggcttctaatgggacagaccacctaggttttcagtgagatctcaaactattcactcccactctccacagcctgtgttatggtttatttcaaatggagaa

SEQ ID NO: 394406 - DNA, 476 bp, Homo sapiens
ttttgtttgtctaagcgtctttatcaccatttatttttgaaagacagggttgctaggtataacattcttggttcaaaaatttttttttcaggattttgagtatatcatcctacttcattctgacctgtagtttctactgaaacaagtccactgatagtcttttggtggttcctttcagcgtaacaactcactttactcttgctggtttcaaaactctgtctttagcagacaatttggttatgatatttctttgtgtgagtttctttatattcatcttacttgrtctcctttgggcttcctggatctgaatttttactatctttttcaggcttaggaagttttctactattatattttaaatgttttctgtttttttttctttgttgcttctccttctggaacaccaatattgcatgtgttgtaatgtttgattacatcccatatgtttcttaaacctcaattttttttactgtgct

SEQ ID NO: 394407 - DNA, 476 bp, Homo sapiens
ttttgtttgtctaagcgtctttatcaccatttatttttgaaagacagggttgctaggtataacattcttggttcaaaaatttttttttcaggattttgagtatatcatcctacttcattctgacctgtagtttctactgaaacaagtccactgatagtcttttggtggttcctttcagcgtaacaactcactttactcttgctggtttcaaaactctgtctttagcagacaatttggttatgatatttctttgtgtgagtttctttatattcatcttacttggtctcctttgggcttcctggatctgaatttttactayctttttcaggcttaggaagttttctactattatattttaaatgttttctgtttttttttctttgttgcttctccttctggaacaccaatattgcatgtgttgtaatgtttgattacatcccatatgtttcttaaacctcaattttttttactgtgct

SEQ ID NO: 394408 - DNA, 579 bp, Homo sapiens
gctgtccaaattctccacaatccaaacttttccaaacttgagtattggaaagcattgtagaggtagtgatttttgtatcaggaagccagtctaatggagatggggctccatggagtagattatcctgaagctggaaggactggagaaaaccttggtgccaggctagtacatataatgccacaaattaagtgctacatggccttttcttgtaggatctcagccctaagggcaggtcaaacaggctgtaatgtcctgatccactggttggagtcgatatttcagctcctagttccctgcccasttgctctccataccacaagaggccccacacagcaagggatgagcccagcctgctgaaaagtaattatacgccaggcccaacaggctcctatagaggccccacctaatggtttcaggccacaaggcactctgtccaatgtagggctctgagaaatcctggtatgtgaaaatgaccaatccaagccttcaggcccctaaaggaattttctggccttctcattttgccatacttaacaataaaaggaatcaaatcaggaacctaccccaccactgcacccc

SEQ ID NO: 394409 - DNA, 587 bp, Homo sapiens
atattccaaaatgatcttatatatttcctgtaccatacttggaatttgtcattctgaagagccatttggtgaaaaatggcatttcaagattacagtctgtgaactatgggggctctttactaccagcttatcatattgtatttctaaggcattttcagagaacaaagctagaaaacacacacacacacacacacacaatccctgtactctaggagggatgatagatttagaatattatatgataattaatttgatggattccaaaatgcacataccctayagtctcaaaaacaaataacacataaatacataacagcactattaccaacatttttactatacaacatttgactttttttgttatagtttcttcacctgagagtatatcattgggaatttagcatcaaatgactggggttttagagtcagttggtcagttgtaatagttccactctgaatatgccaccaaataggaaaacacttagtctcatttttccatataacctttcaatttcttaaagatctgattctaaaattaaatgtataaaacaaagaatattcaaagatgtctagtttctacctgtgtg

SEQ ID NO: 394410 - DNA, 538 bp, Homo sapiens
ggtgggtacctcagttggaaatggagaaatcccccaccttctgctttgatctcactgggagctgcagaggggagctgttcctatttggtcatcttgccaaccacccacagctatacgtgttttaaaaatggataataacaagtattggcaagtatgtggagaaattgaaactcttatgcgttgcttctargaatgttaaacaaggtatccattgtgaataagtaagtttgatggtttctcagaaagttaaatatagagttaccataagacccagcaatttaagtgctaagtatataacctccaaaattgaaaacagatacttaaacaaaaacttgtatgtgaatgctcacagtaacactatccataatagtcaaaaagtggaaacaacccaaatgttcaaactgaaaaattgtttttcttataaaaaggtatatacatatggtgctatattgtccagccaaggataaagaactgataaagaactgatacatgctaaaacatggaggaaacttgaattatgttaggtgaaagaatccag

SEQ ID NO: 394411 - DNA, 568 bp, Homo sapiens
aaggagaattctacccagagtcccagagggggtatggycctgctgaccccttaattttagacttacagcctccagaactgtcagagaatgcatttctgttgtcttaagccactcattttacttgattgatagagagagtatattattagatgcataaaagtttaaactttgtgtaattttctggagagttgaaactttcatagttattgcatgtgcttatttatctatgattttcagcttacagtctacttttatattaatattactaccctgcctctattttgagtgtttgcatgctataactttttacaccttttcatttgcaagctttgtgcatccatctgtctcttatatttaatgtttgtatgtttttttcaaataagcccaagaatgcatgccatttaattggattatttagttttcttacactaaatgtcaatttttgtattttaatctaccctgttcttaattgctctctatttgtcccatcctcctatcttttttttccctctgccttcttccttttctgaggaattattgttattacttatcattcccctcattaagt

SEQ ID NO: 394412 - DNA, 558 bp, Homo sapiens
gctgtgggggaggtgaggatggctaatgattacaaaaaacaatagaaagaatgaataagacctactatttgatagcgaaatagagtgattatagtcaataataattgtacatttcaaaataactaaaagagtgtggactgttggtgatacagaggataaacgcttgagtgagtagataccccattctccatgatatgattatttcatattgcatgcttgtatcaaaacatctcatgtaccccataaatatgcatatctactatgtagacacacaaattaaaaataaaaataaaataaataaataaattgaagaaaaaatggcctttactatagatattcctaccagcattctgatcacaaccacttagataatctccgagaagatttaggctctttctacagcyctcttcttccaagctttcaccagaatcaccttacatgctccattcacagcaatctaggctttttctagcacacacttcaaaactcttccagcctctgctcattacccagttccaagatgcttacagtttcttgtgtttgttacagcaacaccac

SEQ ID NO: 394413 - DNA, 622 bp, Homo sapiens
tttaactcattaaacttggcaccacttttccacaatgtaaatatataagtttgcttacaaagaaggcacacaaaggtggctttctaatctttcattctgaaatccagtggtagggctgttcatagagctgacagagctgcacatggcctttgggacagagatgagtcatcagtgaccaagtacacagcaacctgggaatattccctcctattctggtgggctttcaaggctaataatcaagggctctcgccttatctgcttcttccttagtcttctcagcacatagtgaataggccatattaatgaggaagatgaggcataggtgccttttttctgatatttaaaatatgaatcaccatagatggtaagattcatggttagttgtactttctcttttaagtgttcctgtactctttgaattaaaataataataatacattattttcataataaaaggtaaacttgttctatttgaaaagtaataaagataaatacactttactgaagagtactaacagtctaagtagtgtataaggacggagagtcagyagccttattctgcactgaagctgcctacctcccccatctcctctgaagactttattttttatatttatgttta

SEQ ID NO: 394414 - DNA, 537 bp, Homo sapiens
tgtccataccaatatcacactgtcttagttamtgtcatttataatgtctatatgtaatttataaagctgtcttggttattttagatcttttgcattttctatttgaattttaaaattagctggcaattcacatataaaagcctgtgagaatttttattgggattgcattaaatctttagatcaatttggggagaaatgaccttatagcaacattgattcttctgacatatgaacattgtatatctctccattgttgagtttttcccagtaatattttttagatttcagtaaacagatcttgctcaccttttatcaaatacagcggtattttcatacttttgaagctattttaaatgatttttttcaatttctcatgttcattgttagtatgtacaaatacaactgatgtttgcatactaatgtatcctgccatctggctaactcagttcttatagctttttgtagattccattggattctctgcatggaagattatattgtctatgaataaagatggtttcctttcttcctttccaa

SEQ ID NO: 394415 - DNA, 515 bp, Homo sapiens
ggaaattaagaatggagggaaggtgagagagagatgtagagagagttgtcaatctgtgtaactaagtcaatgcaaatgattgatgtaatgaattatctgcatcaactttaaacctattgtctaccacatccaaccaccacattgctttggctacagagatcagtttaaagagcagatgattaaaagaattaaccacactttagaggtgaagaaagttgattttagggagttggtgtggtttatatattacattgaaggaaacgaggaaatccacagtaagtcaacctgaaacggattgagtcatcagaactatggtttgccacggtgattacagtattcctraggtatctgaaaacactgaggtctatgatttttaagccacttcatcatcatccacttagaaaagtgatgatatcaatctgcattgatgcaactatttaagtgggcaagcttagtcaatatggaaaaaaaacataacgtgtgacatataactgaacaaaaccaaacaataacca

SEQ ID NO: 394416 - DNA, 562 bp, Homo sapiens
aaaacaaaataggctatcagttaatgtcatattccatacctgaagttccagggacgtagaggtgtctcgagaaactgtttatctataaacttgaaacctttaagattgaacataatcccaaattcataacatccttggtcaggaagtctccagggaaacactttcattcagaatctgtcctggaaactttatactcactgtaccttatgaagtttgaaccaagtctcaagtcaatatgaagtcagaaaagacagcagatctaagcttcctaactggtccccaaaattgcctcatgttctttaagttccacagtttaactaaatggtgatgggatcttcctaggtttatgactgaaataaaagtattgttggaaaaggctgtgtgcttaaaawctctgttggcttctgcaaatccaaagcccaccctgcaccctgctctgagctgcggagacttccccacttggctgtatccacaggcttcatcatcctctgtcctctggcttcagatgagctcagccaatgaggaacctgggtacaagctagagggacataggcctgcagac

SEQ ID NO: 394417 - DNA, 586 bp, Homo sapiens
aaccaaaacagtgaaaaattgatattgtagttcattctgttctaatgaagatagtgtcggtcatgctatttcaagttcttaaaagaaaactaggatcagttaggtatagaacataaatactatagttccataggacaataaaaaagaacaaggaaaggacaacatcatccctgatatcaatggagctgtaaaagatggaaagtggataaagatgcagtaactaacttagtgtatgctaaaggtatttagattgcatcttcctctagtgagttgagcaaagagacacagaggtagcagacataaaaaatagaagtgtaaagctcgggsatgaatgaaagagttggtttaaagtatatagactatttaaatgccatattcttttatcaaactgaagaatctaggcaattacctcctcttcatctcacagagttgaggaatttttgctgaaaattttaacctgagagatctagacttataacacagaagataagaagatcaagagctaacaaaaatatgcatagtaaacagtgggggtaaccagctcccatttcacctttatgccaagagccaggtctcacctctcaga

SEQ ID NO: 394418 - DNA, 621 bp, Homo sapiens
gtcttagactgtgagttaggaaacagtgagagatgagtcagaaaaggtgggcagaatccaggctgtatgatctttgaagccataaatacatcttttgacttattcaaaagcatactggagcagtgaagggactcatgctgaaaagagcagcgagatttgtgcttggactggtcattccatttacctgaagatggcaagttgaacacaggcagaaatctccccttccactytatcatatggagttgatatcagtatattaaaattgtattactaaatacatcttatgcttgaaaataagaaaagggaaatacaaatcagaaatccagaagcttgccaaaaagtgaggggagaggaagtagacaggaatccatgatagtaataagggcctaaatccattgggcttttaggggactgggattgtggaactggagcctttcaatatttggaagcagggctgacaccattctatctgcccatggctgggggctgaaaggggctacctgttctcagcagggtccagagttcctctgccacacagaaacaaagtaccacaacagaaattttgtgggtggcttaaacaacagaaatttattgccttgcagttctgaaggctagaagtcc

SEQ ID NO: 394419 - DNA, 585 bp, Homo sapiens
aaaagatgtttgcaaacttgcacaagactgttcagttcttggaaacacatgccctttggaaaaatacctaaagagatgtttgaaaatttgcacaagaacgttcagtgcagctctgtttgtaaaactgaaaaactggaaataagttaaatgtccatcaataaggagaatgcttaaataaacaacggtgtagccattctgtggaagaccaagaaggtgtgaaaaagaagaacacaatttctatgcactgtcatgggaagacaagttgctcccatacattgctggagggaagtaaattgatacagcctccatacctccatgcagggcaatttggcaatatctgttgtagggatggcaaaatttaacctccatcctcttagtgtccctgctgggcccggtaattaaatttacataagatagattaacagaagaaaagcacacagatttatttatttaagtttgacatggcatggggagccctccctcagaaggaaatgaagacccaaagaagtagttagtcagttgcytatatattaaattaggcaaaaaacagtaatttgtaaagaaggaattaaattgtgttggtag

SEQ ID NO: 394420 - DNA, 525 bp, Homo sapiens
gctgacgtgagcagaggtattccctggcaaaataccagcagccagcacccagcacccaggctgtgggagtctctaaatccacagctttctcagtatcatgcttttcaggactgtgaaactaattagccaaactctattttcattttaatcataataaaaggttaagatgttgtaaaataaatacaatatccataataagcgtttgtctctttggtataattacaatttcttcagtctgtaaaaaagttccctacatgtatggttaataagtaccattcgatcatcttcacaggaaccatgcattttaagagacagtctaaatttcagtcaatacaaaccaaaataaatattcttaatttctgtatagttactcattttgtttatatatgttattaatgtataaaaaaggtaaytgaaatttatgtaattaaaatttcccaatctatagtttcaaccctctttaaccccctctacagtgactgccactgtctactttaggtgggtgacatgtcagtcaccagctta

SEQ ID NO: 394421 - DNA, 535 bp, Homo sapiens
aactgcgcaatgaaaattataaaacaaagagttcctcaaacaaatataatttacatagcaatgcagggcaatatggtggcacttcaatagtgatttaatactattcacttcattggtaccaggaaactcttaggaatcaatcattatttgctctaattgagttccatttttcaccatcttttaagtaactggtagaacaccctataacagcatttgccacttactagaccacaggtcacttgcaaatttatgctactttgctgcaacacctgtagattcttaagagacatgatcctctacctttgcgttaaggtaaacccaaaaacttgtctcacagatgaatttgttggtacrtgaaattcagctgtacaaaatataatcaaatttgaatattctaaatttgggatgagtaatttttgaattgacgacaaacaatttaataatggtacagattaaaaagcatgtacatgtgtcaggtaatttcatgtgagtttctgatgtgggtaaaataatttcataaatttatatttaatac

SEQ ID NO: 394422 - DNA, 550 bp, Homo sapiens
gcatccttgacaaaccaccctgttccaaagttttcacttggattttttctgcgcctcacttagtgactgtcacccacatcaatatattttccctttaaggccaaactctctgaaaaagcagtctaacttctttgcctcactttcctcacttccgattcatttttcccamccattgcaacctattctcccccagaacactactgaaattgctttttcacttatcatcagtgacggcttaaatgataaattgtcttcttagtctggataaaaaattattgtgcattattggcatttgacactgctgattattccctctttgaaatgttctcctttcttggtttctcaatattaattgactgagtctactattaggatgtactattgtttctcactctctcttgctgcttcctctctctctgtaagctttaaaaattttaaatgcttggtattctatggagcaataatctgggcaattttcttgatctgcatctcagcccctagaaaatatcccatagcttaaactaacatctgtatatttatgacttctaaa

SEQ ID NO: 394423 - DNA, 550 bp, Homo sapiens
gcatccttgacaaaccaccctgttccaaagttttcacttggattttttctgcgcctcacttagtgactgtcacccacatcaatatattttccctttaaggccaaactctctgaaaaagcagtctaacttctttgcctcactttcctcacttccgattcatttttcccacccattgcaacctattctcccccagaacactactgaaattgctttttcacttatcatcagtgacggcttaaatgataaattgtcttcttagtctggataaaaaattattgtgcattattggcatttgacactgctgattattccctctttgaaatgttctcctttcttggtttctcaatattaattgactgagtctactattaggatgtactattgtttctcactctctcttgctgcttcctctctctctgtaagctttaaaaattttaaatgcttggtattctatggagcaataatctgggcaattttcttgatctkcatctcagcccctagaaaatatcccatagcttaaactaacatctgtatatttatgacttctaaa

SEQ ID NO: 394424 - DNA, 578 bp, Homo sapiens
ttcacaattctgacagcaaatgatttcacacaagtggtttccatacaagtgatccaacaaatgtaggggcagaaaaaaagtttactttagatacttaaggactcagaaaatttacttcccttagaggaagtaaattaagactcaagaacatgctcaagtaaaagaagaaaaatcaaagagctgaatgaaaagaataaatacaatttgagtacaatctatggctttaaagttaacaatatacacttaatgactaaaaaaagtcatataactatatcgccagaatggagaaaagtatgcagacaagcttataataaagatgggtcctcatgttacaagatgtcaacagataatatttaaaatgaaacattaagaaataatgrtatatcttcaggtaaaatggatgtaactatcaaatgaacagctaaaattgctgagtagttgcttctggataaggaaatgggatggggtgacagtacattcttcctgatggacctttcaatgctatttgatttactatgtatccaaatgactttaatttttaaaaatttatgaaaaaacaaatactctaaaatatgact

SEQ ID NO: 394425 - DNA, 549 bp, Homo sapiens
aaatactgtttgctacttttttaaaaaaaggacttatatagttctcctctattttatatgtttttttttgttttgttggttataagtaatttaattacttagtaacttcaaaaaagamttactaaaaatctaggttcaacgtaactatatggattctacacacataggccggtggaatacacaacagaaatttatactcatgaaagcttattaagctgattacgcaataggcttaacatgcactatcctgtttaatctcatagctaccttaagctgtaggtacgtattcctgtttcacaagtgggaaaaaatgtacagagaaatcaagaaatctggcaatggtcacagagtatgaccccaaagctctccatactaatttatacaggaataattatttttgtcatttttgttccaggcatgttgtcaagaaggaaatgaagaggaagtattcgtattaaggcagtaccgtagaaattcaattttaaatggaagaatgcttgctttactttgagctggaggtcagagtgctatccagcaaaggccagtgtg

SEQ ID NO: 394426 - DNA, 549 bp, Homo sapiens
aaatactgtttgctacttttttaaaaaaaggacttatatagttctcctctattttatatgtttttttttgttttgttggttataagtaatttaattacttagtaacttcaaaaaagacttactaaaaatctaggttcaacgtaactatatggattctacacacataggccggtggaatacacaacagaaatytatactcatgaaagcttattaagctgattacgcaataggcttaacatgcactatcctgtttaatctcatagctaccttaagctgtaggtacgtattcctgtttcacaagtgggaaaaaatgtacagagaaatcaagaaatctggcaatggtcacagagtatgaccccaaagctctccatactaatttatacaggaataattatttttgtcatttttgttccaggcatgttgtcaagaaggaaatgaagaggaagtattcgtattaaggcagtaccgtagaaattcaattttaaatggaagaatgcttgctttactttgagctggaggtcagagtgctatccagcaaaggccagtgtg

SEQ ID NO: 394427 - DNA, 549 bp, Homo sapiens
aaatactgtttgctacttttttaaaaaaaggacttatatagttctcctctattttatatgtttttttttgttttgttggttataagtaatttaattacttagtaacttcaaaaaagacttactaaaaatctaggttcaacgtaactatatggattctacacacataggccggtggaatacacaacagaaatttayactcatgaaagcttattaagctgattacgcaataggcttaacatgcactatcctgtttaatctcatagctaccttaagctgtaggtacgtattcctgtttcacaagtgggaaaaaatgtacagagaaatcaagaaatctggcaatggtcacagagtatgaccccaaagctctccatactaatttatacaggaataattatttttgtcatttttgttccaggcatgttgtcaagaaggaaatgaagaggaagtattcgtattaaggcagtaccgtagaaattcaattttaaatggaagaatgcttgctttactttgagctggaggtcagagtgctatccagcaaaggccagtgtg

SEQ ID NO: 394428 - DNA, 531 bp, Homo sapiens
gtgaccgcagtctttattatctaatctctatgattaatgtgagttttaaaaaacatctgatattaatttcattcaacataktgaataaaaacatgcaactgttaggctttcattgaagttatatgagcagtgggaccttgataaaggaaaggcacgtggaaagaaagagtaaatttaataaagacgctgtttgggtatgatgcataatttctcataaccatggtaccgagaatttaattttcagaaagatagagaggaatattttgaaaaaataattgataccttttctaaaatatctaagagcattgctaatcataagctttaaaatattaataaaaggaaaacatactgtgtttggtaaaatataatttataataatttttaaatattattttatagctttcattttatatattatatattttatatgatctttatattattcacatatctttaaaggtagattttaaatatcagaacattttcaaagaaatattcctaaactccagtctttggggtgagtggcatggt

SEQ ID NO: 394429 - DNA, 531 bp, Homo sapiens
gtgaccgcagtctttattatctaatctctatgattaatgtgagttttaaaaaacatctgatattaatttcattcaacatagtgaataaaaacatgcaactgttaggctttcattgaagttatatgagcagtgggaccttgataaaggaaaggcacgtggaaagaaagagtaaatttaataaagacgctgtttgggtatgatgcataatttctcataaccatggtaccgagaatttaattttcagaaagatasagaggaatattttgaaaaaataattgataccttttctaaaatatctaagagcattgctaatcataagctttaaaatattaataaaaggaaaacatactgtgtttggtaaaatataatttataataatttttaaatattattttatagctttcattttatatattatatattttatatgatctttatattattcacatatctttaaaggtagattttaaatatcagaacattttcaaagaaatattcctaaactccagtctttggggtgagtggcatggt

SEQ ID NO: 394430 - DNA, 531 bp, Homo sapiens
gtgaccgcagtctttattatctaatctctatgattaatgtgagttttaaaaaacatctgatattaatttcattcaacatagtgaataaaaacatgcaactgttaggctttcattgaagttatatgagcagtgggaccttgataaaggaaaggcacgtggaaagaaagagtaaatttaataaagacgctgtttgggtatgatgcataatttctcataaccatggtaccgagaatttaattttcagaaagatagagaggaatattttgaaaaaataattgataccttttctaaaatatctaagagcattgctaatcataagctttaaaatattaataaaaggaaaacatactgtgtttggtaaaatataatttataataatttttaaatattattttatagctttcattttatatattatatattttatatgatctttatattmttcacatatctttaaaggtagattttaaatatcagaacattttcaaagaaatattcctaaactccagtctttggggtgagtggcatggt

SEQ ID NO: 394431 - DNA, 307 bp, Homo sapiens
ttctcttctgatgtagtattgatcatgtttttcatttgatagtaacccaaataatggaarctactaatagaagttgtaaatattgcttttatttaaccatttcataacatatctgagcattcacactactggaaatcgctttttaaaatgccagaaatgaccacattgtgttttgatcttcttctaagtataggaaaaggcctaccacattgaaatgctaatggtgtccactgagataaatcacaggctttgtggtttatccaccaagaacaatagccagtgatgcatcctcaggtttacaaagcaa

SEQ ID NO: 394432 - DNA, 618 bp, Homo sapiens
ttattttccaaggctggagacgaacggaatccatggtattatagttatttcacctcctccccataaaataaaaagggggcatgccattgtttttaacccgtatatgttggtgtcacacttaaaagccagcatgtggaacacttgaaaccaaaaatgtgtaattaaagaaaattatataccaccaagtaacaaattcagtgccatttttagctccatgttgagagaaaaaggtgccaaattttgatctcgtctctggggaccatgccactgaagttgttaccacagctactattatttctactggcatgcttgagtccccagatcctgccaaaaatggatggsaaggaagggtgatgacagctggtgacatagtccagcaattgccagaaccttggagcaaattacaggggatgttgtgaagggaacacagacccgagcacccagccatcagtcacctgaaggtggtgtgtgccaccagaaccctgaggagtgtgctctaaggttttggcaacacagagtagcgtgctgggagggcctgccagggttggctaaacgctgtttaatattacaagatcaagtgaacattctcacaaagacaaagaggatgaggtaatatgg

SEQ ID NO: 394433 - DNA, 582 bp, Homo sapiens
ttatcttttttgttttgttgcattgatgagattaataccaattgtcttcactgaagaatgactacagaggcctttttatgcatttatatccccaatctacttcctcttactcmactgatacacagtatcttttaagaaacaacatctttcagctttgccatttttatccccttcatctagagtagcctgttggcaaatcagcggcatgtcagaaacgggtgaggaacatgaagatatacaagtgtgaatttcatgaggcctgatgctcctaccatgccatgtatttttggccactaaaacactacaaattcttagcttcaacaccccatgttgtgcatctcatcccagtagcaattacagctagagtccagctgtaaaaacctgatggagatgctgtgcacattcaaagaaccaaaagcacaattcattaggagtgcatcacttgttttccaagcgttttcgctacaggcacgcactggcagggcagggctattcccattctttcctcttgtgcactccatcgagggcaaaccactgcaaagtaacccagaaactcacgattacctcagatgccatttaaac

SEQ ID NO: 394434 - DNA, 462 bp, Homo sapiens
gtggaactgtaagtccaataaacctctttcttttgcaaattgcccagtttcgagtatgtctttatcagcagcgtgaaaacagactaacacacttgtttattgttgttgactacccaatcaccagaaaaacctgttagtcaatcaaaactgggtttatgagatttcctgcaataaagaagcagaccactttgacagaatcttagtagtgtttcaaaatgagaagttagagcagagtctttgtggggatttaaggcttcaactaggtgatgccaaggatgatcttgtaaggaggagaattggctggaatcagatgatgtatgacataccagctttgaattggtgggaggattgaggtgagggtcttgtaggrtttgatacgtaaactgttagtcttgataaacaagcaccatttcctagtattgtttaatacatcaattgagaattatttctgtttcagttctc

SEQ ID NO: 394435 - DNA, 556 bp, Homo sapiens
tgccactgcactccagcctgggagacaaagtgagaccctatctaaaacacaaaacaaaacaaaacaaaaattgtaaatatacatgtgcattcaatatcggaacacccagatatatcaacaaatattattaggtctaaaggaagagatacattctaatacaataagagttggggacttcaacaccccactgtcagcattgaatagagcatctacacagaaaatcaacaaaggcagatcgaatttaaactggactgtagaccaaatggacctcacagacatttacaggacgtttcacccaatagctgcagagtagacattcttttcaccagcacatggaacattgtccaggatagaccacataytaggcccacagaacaagtctcaacaagtttttaaaattttaaatcatatcaagtatcttttcagatcacaatagaataaaactagaaatcaataacaagaggaactttcaaaaatgtacaaatacatggtaattaaacaacatgctcctgaattaccaataggtcagtgaataaacaaagaagaaaatttaaaa

SEQ ID NO: 394436 - DNA, 556 bp, Homo sapiens
tgccactgcactccagcctgggagacaaagtgagaccctatctaaaacacaaaacaaaacaaaacaaaaattgtaaatatacatgtgcattcaatatcggaacacccagatatatcaacaaatattattaggtctaaaggaagagatacattctaatacaataagagttggggacttcaacaccccactgtcagcattgaatagagcatctacacagaaaatcaacaaaggcagatcgaatttaaactggactgtagaccaaatggacctcacagacatttacaggacgtttcacccaatagctgcagagtagacattcttttcaccagcacatggaacattgtccaggatagaccacatactaggcccacagaacaagtctcaacaartttttaaaattttaaatcatatcaagtatcttttcagatcacaatagaataaaactagaaatcaataacaagaggaactttcaaaaatgtacaaatacatggtaattaaacaacatgctcctgaattaccaataggtcagtgaataaacaaagaagaaaatttaaaa

SEQ ID NO: 394437 - DNA, 589 bp, Homo sapiens
attttggcatcatctttattttaggcatgcatcaagcacagtattttttaacatctttaacaagtcattacacagagagagatataaatatattacttagatktatatgattatagaggcattatgggagaaaggtataatttgttgcctagcttttgaaaagatttgactaaaatgtttgtctcttagatgcaaccatgttggcaaagacatttagaatgagattttgagaacagtttcaacctgcatataagatatatgattggagggcacaggaatattttctattctaggtattttaaaaattgatgtttattgtgttttctacttatccaaagttatgtggcaaagaaatgctcacagatattttgaacacaatagcattctactataattgcaggcacaagaagtgcattcttgaaaatctcaatcattgttataaattgttattataacatagtgagtatatccaaggataagatattcctacaagggttaatgtttgtctctctctcagcatatttttaatatgtattgaaaaaaatctttaacatttattccattaagagaaatgaaaatatcaacagaa

SEQ ID NO: 394438 - DNA, 536 bp, Homo sapiens
agataattgcacttttaattttctcattttcaaccaagcgaaatgttcctcacaataatctttctgctttttgagagaaaattactctgacagaaatgccactttgaatatcatgaacttttaagtaggattcttattatgtaaaatgtagaatatttaattattgcagttgttataatttctaaacccatatggaaactgatctgatagattatagaataaagaaaaaaatggaaatggtttaattaaaattaatttaattctctgattttctgtacatgtaatatgattttagttttagtttctatgttcttcttaggcatctgtgccagcacaaaatgtatagttcaacattaaaattgtttccttaggcagagactcaattttacttatcatcatatgcctaccattttctcatcacacactccttcaaaacagacctccatacattcctctgaagccyggttgctgattgtcatgaattacttctccccaacaaataaccataaatcaaatcagaaattattaagtagtag

SEQ ID NO: 394439 - DNA, 514 bp, Homo sapiens
atattctcttgttgaaaattaggctaattctatcttgataattaaatactgcaaggagtggattgttggaagaggaagtaaagctcaaagtggtaggcagaattccaacatagccccccaagctctctccccrtgatttgtgtaccttgaataatctcctcccattgagtgtggaagaacctggcctaatttagttataccttttaaaaagataatttagaggtcagagaaaagaagtcagagagatttgaaaaaagagacattcttctgttggcctcaaataaacaatttgctgtgttgagagaaaaccacaaatctgcaacctgaagacaacctctatgagctgaatgcagctcctagctaacagtcagcaagaaaacaggcacgtaagtttcacgaccacaggaacaggactctgccaacctccaggtaagctatggatgagaatgcagccgggctgtcacctggatttcagctgtttgaaatcctgagcagagtgcccagatatgccata

SEQ ID NO: 394440 - DNA, 443 bp, Homo sapiens
acctaccttttgaagcctacttctgtcaacttgtcaaactcattctctgtccagttttgttccattgctggctaggagttgtgatcctttggaggagaaaaggcattctggtttttggaatttttagccttttttgtgctggtttttcgtcatcttcatgatttatctacctttggtctttgatgttggtgaccttcagatgaggtttttgagtgggcgtcctttttgttgctgggtgatgttgatgctattgctttctgtttcttagttttccttctaacrgtcaggtcccttctctgcaggtctgctggagtttgctgggggtccactccagaccctgtttgcttgggtatcaccagcagaagctgcagaacagcaaagattgctgcctgctccttcctctggaagcttggtcccagaggggcactggccagatgccagca

SEQ ID NO: 394441 - DNA, 500 bp, Homo sapiens
ttccaaatctagtcctattccatcttttgtataactatagtcttcattctcaatttcagccttgatcactccccctccagaattgagcagagcacacatagctcgtgagacmctttcattctgcttttttctcagtttacaatccttcatttttttcctactgttctctccaagagtgactcttcccacatctagaaccaactcggcataattcgtttccaaatcaacactgatgttcattttcccagcagctatgcagtgtccaagcagaaattcttttctgtaaaatagacagagccattagaataggacctgaactagaaagatagcaaattctgtattatgaggcaaatgcaaaaaaatcctgtgctgtatatattctactagactggtaagtatatggatatgaagagactggcaaattttgagctaagaccgcaataatttatactcctactgaattttcaaatttgttactatagttctatataatgtattct

SEQ ID NO: 394442 - DNA, 627 bp, Homo sapiens
ctggtagttgaacaagagtgaagccaggtaagcacaatcattgaagtttaaatttaaaactcaatagtagtctcaatgtggcataattatgctagaaagcagaggaagatgtatatctctgccatgctgagctttctccttagtattatagcacaattagtgttctttagacccaatttcttcatatttcttgcacatgaggctgccccaaaggcaagtccaccttccctgttgaccagacagaagagattctccatctctacccacaaaggctgcaggagaatcagttccacttctacccaggcrcacagccccagccctacaattttctggtaatgcctcaccaagcagcctctgctctgctccccgattcttttttgcagcctctctaactagagtcttgtcccctttcctcttagcccacctttctgcactgtctacatcaggctgggctctgtgtaaacttttttgcctaacccaccatacacagaaggggacagaaatcacatctcaccctcagattgattaaggagggtgctcataccactgagaaacttggaacccatgggagctgcagttgagccaccttatagaggacccagcgcttgtgaactagcctgggatccc

SEQ ID NO: 394443 - DNA, 627 bp, Homo sapiens
ctggtagttgaacaagagtgaagccaggtaagcacaatcattgaagtttaaatttaaaactcaatagtagtctcaatgtggcataattatgctagaaagcagaggaagatgtatatctctgccatgctgagctttctccttagtattatagcacaattagtgttctttagacccaatttcttcatatttcttgcacatgaggctgccccaaaggcaagtccaccttccctgttgaccagacagaagagattctccatctctacccacaaaggctgcaggagaatcagttccacttctacccaggcgcacagccccagccctacaattttctggtaatgcctcaccaagcagcctctgctctgctccccgattcttttttgcagcctctctaactagagtcttgtcccctttcctcttagcccacctttctgcactgtctacatcaggctgggctctrtgtaaacttttttgcctaacccaccatacacagaaggggacagaaatcacatctcaccctcagattgattaaggagggtgctcataccactgagaaacttggaacccatgggagctgcagttgagccaccttatagaggacccagcgcttgtgaactagcctgggatccc

SEQ ID NO: 394444 - DNA, 573 bp, Homo sapiens
agcgtcagacgtctctgaccttaggtggtcaccagtgccactttacatgttttccctccagaggsgatggcctactgtgagctttccttttgtctctggatgaaggccttgacttctagcatccttataatttgataaggccatgctttcccatggttcccattccactagagtgatagtcatgaactttaatgatatgaaatggaggctaggtgggtttcttttaaccttagccagtagagtaggggaagggaagaatttaacataaggaaagaaggtttaagtcacctgaaacacgtgtgagttcgccctggagaagctgcgtcacacatagggatcagggaccacaaccagaaaagacagaaaagagcccttcccgcttctgggcagggcaactatccccattcactccttggccttcaaggcagcactggagagtagcccccggccagaaacctgcagtcgcctccgtgtctaggcgctacccaccaaggatcccacgttggaaaggaaaagagaaagagagagatttacctgtatggagcagaaaggaaaagggaaaggagaaaaata

SEQ ID NO: 394445 - DNA, 558 bp, Homo sapiens
gatgaacatagatactaaaatcctcaacaaaatactagctraccaaatccaacaatatatcaaaacgatttatagattgtgaagattttttcccactctgtgggttgtctgtttactctgctgactgttccttctgctgtgcaaaagctctttagtttaattaggtcccagctatttatctttgtttttattacatttgcttttgagtccttggtcatgaaatctttggctaagccaatgtctagaagggttgttccaatgttaacttctagaatttttatactttcaggtcttaggtttaagttcttaatccatcttgaattgatttttgtataaggtgagagctgaggatccagtttcattctcctgcattggactagcaaattatcccagcaccatttgttgaaaagggtgtcctttccccactttatgtttttgttggctttgtcaaagatcacttggctgtaagtatttggatttatttctgggttctctattctgttccattggtctatgtgactacttttatactagtaccatgctgttttggtgactata

SEQ ID NO: 394446 - DNA, 416 bp, Homo sapiens
aatatatcaaaacgatttatagattgtgaagattttttcccactctgtgggttgtctgtttactctgctgactgttccttctgctgtgcaaaagctctttagtttaattaggtcccagctatttatctttgtttttrttacatttgcttttgagtccttggtcatgaaatctttggctaagccaatgtctagaagggttgttccaatgttaacttctagaatttttatactttcaggtcttaggtttaagttcttaatccatcttgaattgatttttgtataaggtgagagctgaggatccagtttcattctcctgcattggactagcaaattatcccagcaccatttgttgaaaagggtgtcctttccccactttatgtttttgttggctttgtcaaagatcacttggctgtaag

SEQ ID NO: 394447 - DNA, 554 bp, Homo sapiens
tggtgttttgaggataatatttctaaatagcwttcaggaagagaatattattgcacagaagatctgatgatcaaaaaaaaaaaaaagctcaaggagatgcagattgaaagtgctgacaagttatatttattgaagatccaacttttaaggaagtgctaagattagtcactcatgtgaataagaagccaggaaaggaaagatggggaaacctagatgaccaggcttctgttaaggaggaaagcaacggaggaaaacagtgaaggggaacagaaaagtgtagcaaagtgttacagaaaagccaactggatagacaacactgcagaaggtagaggttggggagaactgaaagggaaaacaaaatacttgacatagtcttaagtagtagaaggcaattagagaaaactaagtatctactggccttgtcaacatacagacttcaaaataccccttatgagaatccaaagaatgatgtgtgtaagggaagattttatgtgcccttccagaagaaatcagtatctatgtaaatcttgaaagatgaaatcaaagctcataat

SEQ ID NO: 394448 - DNA, 561 bp, Homo sapiens
tgggtgccttttatttctttttcttgcctaattgctctggctaagaattcagtatctcttgaatagaacccatggttcctgatttcactctcaagagggtgtcattatctttttccacttttttttttttttttttttgagatggagtctcactctgttgcccttcttccacttttaaagtggaaagtttcccttttctattattttcttcaaccacatttaaagcaggaactggggactgtaccttcctttagaactaaccagctttctcaacctactgcttgcccaaagaatgttggagtccaagggttgtgtttagtctgaaagcatcacagtttttgctttctggattttaaaaatctaggtatggctccttggcaatttaactttctcaaaaacttcttgttgtttttctaaatctatayggtcccagttaactctgtgtgctaatacaattcagtatttttgagatgtgcttctctctttagatttaattatattaccttgaattagcaggctttcatcagaaagcaatgcactcaagctcttttctctgagcaa

SEQ ID NO: 394449 - DNA, 579 bp, Homo sapiens
cttttgctatgctcaaagttttacttagccttgttgaaagtagggccaagtgttgactgctaatgtgtgaaacaaaagatatgacttctttccatgcttgggatacagaggagcatagaggaacagaagcttagaaaagccattatgtcaagccaactagaaactatcagaggccttggtacagcattttattgcaagaagtggccggagactaccaggacagatctgtggaacatggaagcattcctggaattctcagaaatctcaatagaaagaagctaggtttaaaaaacaaaaacctttgtctatttacacataatragagctcagacaatattagtgggtactaaaaatctcagtgacactgatacctggagaatttagatacattccaatttcaaataaataaatttttctgctataaagtagaataaattaaacaaatatcttgaccctccctccattgccccttgtgtccaatctagaagtaagagaaagaggaaacataggtgctgtggggttgttggtcatatagattccccaaaaaacaaggagaacctcatcatggtgttcagaaac

SEQ ID NO: 394450 - DNA, 579 bp, Homo sapiens
cttttgctatgctcaaagttttacttagccttgttgaaagtagggccaagtgttgactgctaatgtgtgaaacaaaagatatgacttctttccatgcttgggatacagaggagcatagaggaacagaagcttagaaaagccattatgtcaagccaactagaaactatcagaggccttggtacagcattttattgcaagaagtggccggagactaccaggacagatctgtggaacatggaagcattcctggaattctcagaaatctcaatagaaagaagctaggtttaaaaaacaaaaacctttgtctatttacacataataagagctcagacaatattagtgggtactaaaaatctcagtgacactgatacctggagaatttagatacattccaatttcaaataaataaatttttctgctataaagtagaataaattaaacaaatatcttgaccctccctccattgccccttgtgtccaatctagaagtaagagaaagaggaaacataggtgctgtggrgttgttggtcatatagattccccaaaaaacaaggagaacctcatcatggtgttcagaaac

SEQ ID NO: 394451 - DNA, 611 bp, Homo sapiens
tagcaatttgtctgagaaggacaactaacctgaaggggactgtgaggctcaggctggggcaaatctccagtgaaccctcaaagccctcaggtcttaggaatccacctctggctgcccacaatgggtattttgctctcttccctcctccctcatcctcttctctctctctctctctctgtctctctctccctctcttccttgtgaagctctagtccaaggggccctttgccaattccaatcagaacatccaacatcggacactaatccagctgactagtaagatctgccctctcctgactttctcacagcacctgggagagtcaggtcagctgtcccggtcctcagaggaccagtgggactaagctagaagaaatcttggagatgcccagtttcttcgcagcttgatcatcctctttataaagaggattccaggtttctgtcttttatctgtggatgcctagaacaaaaacagacaccttcagcttcctcttaccagtccacatgggtgccaaacaatcccactttcctaagtcctctccattgggctgtcyccttcacaatgttgctaagcttggcttaaaggaagcataaagccaaagagtatgcttttt

SEQ ID NO: 394452 - DNA, 558 bp, Homo sapiens
catacatttttgtttgcatttattaatcaagcaatttcatagttatctctgccaaatactataagatgtgaaaattttgcatagaggccacaaaactataactcagcccaaacagaataatctttgcttctgtaattttttaatcaatgaaacattaatattggtttaataaagatagctacatcttgaactatttagtgaaataccctaacttctaatcttgatattaaagaaaaaagaatttatggccaggcacagtggctcacgcttgtaatcccagcactttgggaggccgaggcaggtggatcacgaggtcaggagattgagaccatcctggctaacatggtgaaacccygtctctactaaaaatacaaaaaattagccaggtgtggtggcaggtgcccatagtcccagctactcgggaggctgaggcaggagaatggcatgaacccaggaggcagagattgcagtgagctgagatcgcgccactgtactccagcctgggtgacagagcaagactctgtctcaaaaaaaaaaaaagaaaaggaaaatttatat

SEQ ID NO: 394453 - DNA, 558 bp, Homo sapiens
catacatttttgtttgcatttattaatcaagcaatttcatagttatctctgccaaatactataagatgtgaaaattttgcatagaggccacaaaactataactcagcccaaacagaataatctttgcttctgtaattttttaatcaatgaaacattaatattggtttaataaagatagctacatcttgaactatttagtgaaataccctaacttctaatcttgatattaaagaaaaaagaatttatggccaggcacagtggctcacgcttgtaatcccagcactttgggaggccgaggcaggtggatcacgaggtcaggagattgagaccatcctggctaacatggtgaaaccctgtctctactaaaaatacaaaaaattagccaggtgtggtggcaggtgcccatagtcccagctactcgggaggctgaggcaggagaatggcatgaacccaggaggcagagattgcagtgagctgagatcgcgccactgyactccagcctgggtgacagagcaagactctgtctcaaaaaaaaaaaaagaaaaggaaaatttatat

SEQ ID NO: 394454 - DNA, 413 bp, Homo sapiens
gggttagaggacatggagcggaagacctgagaaggaagagaagaaggttctatgcctgactggttatatttagaagacattttcgtattctcaccattgttatgtgtgtgtgtgttttattcaccactactgtatacatagctgacaatgctaagaacttttttgaaatgttaatatctagtctttctagatgttctgaagtgccagacatttgttaaaattagaggtagtaaaataacacattttggtactttggtgttaaaattcatatgaaatgttgttttggagaggaatggccaaaccacatcttgcgtaatacacattgtgtttgtgtactactttggtgcsgagggagaaggaggaagtgtatgaactctatgccagggtgcttatagtgaggcaagattaatcat

SEQ ID NO: 394455 - DNA, 505 bp, Homo sapiens
gctacagtccgcgggctcactctccacagagtaaaaagaacgcgaatccttttctgttttccggccctccccatcctgggctgcggctccacacttccccagcgtggcctgcatttctattgggcagytggcgctccggaagtgtccgcactctttattatcgactctgcgcctttgggcaattgtcactattttggttcatcaaaattgaagaaataccaggcattcttaccatgcccctaaaggggtgactcaacctttccagctgtactcgcattcccagagcagcactgctgcccccttgcttaaaagcacggttgcccccaggaaccaggccagggcagctgtggatggacaggagaggacaaaggtgcaaggagcggattgctccaggacagacagattcaaatacctacccctggcagtgtagggagcatcttggggccatttgggagattcctttattgggatgctccaaaggctagtctggccggatacagtcctc

SEQ ID NO: 394456 - DNA, 505 bp, Homo sapiens
gctacagtccgcgggctcactctccacagagtaaaaagaacgcgaatccttttctgttttccggccctccccatcctgggctgcggctccacacttccccagcgtggcctgcatttctattgggcagctggcgctccggaagtgtccgcactcttyattatcgactctgcgcctttgggcaattgtcactattttggttcatcaaaattgaagaaataccaggcattcttaccatgcccctaaaggggtgactcaacctttccagctgtactcgcattcccagagcagcactgctgcccccttgcttaaaagcacggttgcccccaggaaccaggccagggcagctgtggatggacaggagaggacaaaggtgcaaggagcggattgctccaggacagacagattcaaatacctacccctggcagtgtagggagcatcttggggccatttgggagattcctttattgggatgctccaaaggctagtctggccggatacagtcctc

SEQ ID NO: 394457 - DNA, 651 bp, Homo sapiens
gtattgagaatatgtaacattacttttaccaatgaaaccagaaagaatccctctctaagttatttaggaaaatgaaatggatagcaaataagtaataatatttatttgctatcatcgcagtcaaattgcttacctaataaatttactcaaaagcaaatttccacaaatgccaagaatgttgccacagtaaagcacattcttaatcttttcyatgatcttcatagtcacaactacatcaggtaagccacaaattcttcatttgtcttggagcaagtctttaaaggcaattcctgctgtttatttaagagtagatttatacctcagatcccaactggccacataagaattttctaaacccaaacaaggctatcacagggaacattagcatagcttcgtgttttaggtggctgtaagctgataagactcaagataaattatttgcaagtctgaaccactgaggagctgtgtgtttctctcagatcccagagtgaagaccataatcaagacacatacacttccatgtttcattcatgttcactaactttactagcgtgcgtgggatggcccctccaacctgcatcattccatactctggacccaggtccacagccccactgctaaaaaaaaataaacaaacaacaacaaaaaaaa

SEQ ID NO: 394458 - DNA, 482 bp, Homo sapiens
cctcatccagataatttttaatttttattttttatggagacaaggtctttctatgttgcccacgctggtcttaaattcctggcttcaagcaatctttccacctcagtcttccaaagtgttgggattacaggcttgagccactgcacctggctatcttttcactttcttaatgatgtcccttgaaacacacaaaaaatttgaattttaatgcagtacagttcatcttttttcccstcttgtgcttttcctgtcatatctaacaaatcattgcctcatccaagctaacaaagatttgctcctatgttttattctaagagctttataattttagctcttacaagtaagcctatgagtcagtttgagttattttcttgtgtacaacatgagatataggtctaacttgattcttttgcatgtggatatccagttgtctcagcactatttgttgataagactagtctttttcacatggaattaacctg

SEQ ID NO: 394459 - DNA, 482 bp, Homo sapiens
cctcatccagataatttttaatttttattttttatggagacaaggtctttctatgttgcccacgctggtcttaaattcctggcttcaagcaatctttccacctcagtcttccaaagtgttgggattacaggcttgagccactgcacctggctatcttttcactttcttaatgatgtcccttgaaacacacaaaaaatttgaattttaatgcagtacagttcatcttttttcccctcttgtgcttttcctgtcatatctaacaaatcattgcctcatccaagctaacaaagatttgctcctatgttttattctaagagctttataattttagctcttacaagtaagcctatgagtcagtttgagttattttcttgtgtacaayatgagatataggtctaacttgattcttttgcatgtggatatccagttgtctcagcactatttgttgataagactagtctttttcacatggaattaacctg

SEQ ID NO: 394460 - DNA, 578 bp, Homo sapiens
gtgtgataggcaaacagatcatgttcctgcctatgtaggatggggagccagtacagccccctaacctcctcaccccaaagacacctcagcgcatttcaccgggagccacccacccactgtcatcagggctggtgcctgcactcactactggggccttcttaggcaagctaggggctccagctaccctccaagaacaggaaagcttagggtagggggctctccactgcccagcccacctcctgagacaatagagagaacttcacagtaaacaaagatcagttacatactcmtctgcttgtgccgcagctgacaattacccttaagcgccatctactggcctgtagatcaaatatcacagcccagtgtaaaacctgccaacagaagtgcatagggttacagaagcaaagccagaaggccctactcaacatactctgtagctataccctgctagagatggggtgggggagaaaggcaaagaaaaaaaattctttccacattaaattaattacaaaaattagaagtgctagcctctccagataagaaggaaacagtgtaagaattccagcaccatgaaaaat

SEQ ID NO: 394461 - DNA, 601 bp, Homo sapiens
acagctggaaaacttatttgaaggaataattcaaaaatgttttcctaatcttgttagagaggtagacatccaaacacaataaacctggagaacacctgcaagatactatacaaatgtcaccaaggcacatagtcaccagagtatccaaagtcaatactaaagaaaaaatgttaaatgacacctagggaaaagtgtcagatcacttacaagggaaccccattaggctaacaatggacttctcagcagaaaccttacaaatgagaagagattgagtacttattttcagtattctcaaakaaaaggaagtccaaccaggaatttgatgtcttcccaaactaagcttcataaacaaagaagaaataaaatattttccaggcaagcaattgttaaaggaccttattttttaccactagactagcattacgagatatcctaagagagttttaaatatggaaatgaaagaatgatgcctgctaccacaaaagcacacttaagtattatacatagttcacagaccttataaagcaactacacaaatcgggactacaaagaaaccagctaacaacatcacaacaggattaaaaacctcacatataaatat

SEQ ID NO: 394462 - DNA, 589 bp, Homo sapiens
atattgtagcatattttttgttaaagggctgtatcttgggtgtcatacttggaacagagaaagaaatgtgttgtgagtttattagtatttgaaactcaaaaagtgctaaataagctgcatgcaggtgtggagtggccacaggagtggtgttcaaacagagttacagctggagcactgtgcctgtgttaggtcaaaagtggagctatagcttgggattctcgtgaacagtctgggaaaagagtattcaaggatatcagaccaaaaggagtatagtaagaagtaaattagatgataagacagagggcaaggaagagagttaccagctaggaactgggaattacacaggaattgagggaagaaamtgtctaggaaaatttgggggtggtgtggacaaggagaaaaagggtctaatcccaagaaaagaactaaccctcaagcatagtatatccaaaaaactcaaagaccttcagatttgaagttaggttgtgtctccattaggaaacttacatgatttaggaatgtaggaatcccaacgtggaggataccagactcctaacatggaaaatgattctgtagaagcacatggttg

SEQ ID NO: 394463 - DNA, 573 bp, Homo sapiens
aatatactcatacaaaatttaatttagaaaaaataattagagagacaataacatgagaggtgctctctacaattctcttcatgccagaccatggctgattgatgtgttccctgagccaagagctgggaaagtggcttcttgtcctctcagtctcctggttatggcagggataggtcacttagcaggttagttctacagtgtttttctggtaacaatttctataatagatgcccagcataaataatggtcttctatacttgaaaaattttataagtacctaatttctcacattagaccccactattaatacaggagttattaagaaattatttttaggcagctagaaagggtaaaagagtcctcagaaaggcttttccttttaataaaaaagcagcccccaaaccatttcttttctaacagaaagcagcctgaaaagccatgctggaagcataggtatgtaaattacaggcttgsagaagtaaatgcaggtggctaagagccaggtccactcaatatgactgttcccgctcactttcctttgttgccacatgtgcagttgtcatggcaccagcc

SEQ ID NO: 394464 - DNA, 573 bp, Homo sapiens
aatatactcatacaaaatttaatttagaaaaaataattagagagacaataacatgagaggtgctctctacaattctcttcatgccagaccatggctgattgatgtgttccctgagccaagagctgggaaagtggcttcttgtcctctcagtctcctggttatggcagggataggtcacttagcaggttagttctacagtgtttttctggtaacaatttctataatagatgcccagcataaataatggtcttctatacttgaaaaattttataagtacctaatttctcacattagaccccactattaatacaggagttattaagaaattatttttaggcagctagaaagggtaaaagagtcctcagaaaggcttttccttttaataaaaaagcagcccccaaaccatttcttttctaacagaaagcagcctgaaaagccatgctggaagcataggtatgtaaattacaggcttggagaagtaaatgcaggtggctaagagccaggtccactcaatatgactsttcccgctcactttcctttgttgccacatgtgcagttgtcatggcaccagcc

SEQ ID NO: 394465 - DNA, 562 bp, Homo sapiens
actgagaaaaaacttaaccccagttattgaggwcttcatgttttgctttgaatggaagatgagctgggattgacagcaaagaagaatgacagaacttttcaaggggacagaaatgttccgtttttaattataatggttatatgtatctatttttgtcaaaatttattgagtattgaactatacagcaattagtacaatttattttatataaatgctaccttaggaatgtttatctaaaaacttttataaaggcaactgtacttaccagaaataattcccttttctctatagaacatcaaccaaatgaactggtctaaataaaaagctctcagtcactctggagaaaacaagatctgaggcttctctgtacagtggcttccaaattgagactgtgctcatgcttggggatgtgcatgataatttattggtatgaaagcaataataggagaatttctacacttacattattgtatcctattgtttgaagttttatttttgaacattttacatttatatagaatcatgatgtaattggatatgaaatgcataaagaagatacgta

SEQ ID NO: 394466 - DNA, 578 bp, Homo sapiens
tctgtgcatataaaacctgctaatagaaaagtcgggaatccctctctgcttactcttaagttgtgtacatcttgcatgttattatgcagttggttatttcatactctttcaaaaattgaggatgtatttgggtcatagragaaactttcaagtatctctgagattgggagtttcaggttcttgcactgtaccttgcattttattccctgttatccacttctgttctcctactgactctgtaacatctggaaccctctaccatcaaatatctttgattcactgtgttccctttgtgtgcttccctctaagctcttttgttatatggatagtgctcacatcatgctcattatggatccagaaaccaaatatatatattcataaggtggacattcctctaggtaaaatgaagtaagtcctagcaaaataaaagcacagaaattcctgcaaagacaagcttggtcttgtctaactatattagaagaacataacaatgttagaaggatcactgtcagtggaagctgaaatagaaatctgaatgactgccactccctctatcctatatttcaatttcaacagaa

SEQ ID NO: 394467 - DNA, 510 bp, Homo sapiens
aaaatggaacatggggaaaagagaaaaagggagaaagagatacacaaaatcataaaggtaaaaaaaccgggggggagaaatgcaagaacaggaacaaatgcaaagacagtaatggaataataggaaataaaaagccaggcacaaaaatkcatattttgtaaaactatatacaccaaataaactaaaaagtgtagtgtttactttcttaaaagaaacagaaaagaagtgatataagtaaagaaacacatggaaaaacattcccatttttgagtatattatagtctttcttgctaccaaagattttttaaaatatgattttttcataattgtagacataattagggactttgcttcctaatgttttccacaatacttaaagtgaagatagtctaatgatctaaattaatccttagaatgaaggcttgttattcctgctaggaaagatttgtctccctagactatcttagaaactaaaaccatgtaccaggctgtattgtagtgtctgcaatg

SEQ ID NO: 394468 - DNA, 563 bp, Homo sapiens
tcataaaggtaaaaaaaccgggggggagaaatgcaagaacaggaacaaatgcaaagacagtaatggaataataggaaataaaaagccaggcacaaaaattcatattttgtaaaactatatacaccaaataaactaaaaagtgyagtgtttactttcttaaaagaaacagaaaagaagtgatataagtaaagaaacacatggaaaaacattcccatttttgagtatattatagtctttcttgctaccaaagattttttaaaatatgattttttcataattgtagacataattagggactttgcttcctaatgttttccacaatacttaaagtgaagatagtctaatgatctaaattaatccttagaatgaaggcttgttattcctgctaggaaagatttgtctccctagactatcttagaaactaaaaccatgtaccaggctgtattgtagtgtctgcaatgcagcaccgaacaagacagaaaatatccctgttcctggggattttacatcctaaagcatggaaacagacaacaaacaaacataccagagagaaaacaactgat

SEQ ID NO: 394469 - DNA, 563 bp, Homo sapiens
tcataaaggtaaaaaaaccgggggggagaaatgcaagaacaggaacaaatgcaaagacagtaatggaataataggaaataaaaagccaggcacaaaaattcatattttgtaaaactatatacaccaaataaactaaaaagtgtagtgtttactttcttaaaagaaacagaaaagaagtgatataagtaaagaaacacatggaaaaacattcccatttttgagtatattatagtctttcttgctaccaaagattttttaaaatatgattttttcataattgtagacatarttagggactttgcttcctaatgttttccacaatacttaaagtgaagatagtctaatgatctaaattaatccttagaatgaaggcttgttattcctgctaggaaagatttgtctccctagactatcttagaaactaaaaccatgtaccaggctgtattgtagtgtctgcaatgcagcaccgaacaagacagaaaatatccctgttcctggggattttacatcctaaagcatggaaacagacaacaaacaaacataccagagagaaaacaactgat

SEQ ID NO: 394470 - DNA, 629 bp, Homo sapiens
tccatttcaccccatacctcaaaaytggaagctaatattaatttttgtatccttcaagaaatttatctgtatttacaagcaagcatgaaaataaattcttggttgtatttcttagaatacaatgtatatacattaaaatacacacatttaagtgttcaacgtagtaacttgtgttaaatatatgcactttagaaactagtattctaaacaagataaagaatatttccgtcactccagaaaggtttcttgtgatctttgccatccacccccaccatctaacatcataatgagctttcatcttttaattcctaatagcatagattagttttaccttttcttggattttataaaaacagaagcatatgacatgtgttattttgtatctggcttttaaactcagcattacgatttagagattcatgcgtattgttgcattttctgtagttgtttctttttactgcggactaatgtttcattatatacttaaccctaagtttgtttattatcattttatccttttatggacatttgggttgtttcaaatcttaggccaccaataaggttttcattagcatgcgaatttaaatcatttcatagacatgtcttagctaaacacgaatgggattatc

SEQ ID NO: 394471 - DNA, 629 bp, Homo sapiens
tccatttcaccccatacctcaaaactggaagctaatattaatttttgtatccttcaagaaatttatctgtatttacaagcaagcatgaaaataaattcttggttgtatttcttagaatacaatgtatatacattaaaatacacacatttaagtgttcaacgtagtaacttstgttaaatatatgcactttagaaactagtattctaaacaagataaagaatatttccgtcactccagaaaggtttcttgtgatctttgccatccacccccaccatctaacatcataatgagctttcatcttttaattcctaatagcatagattagttttaccttttcttggattttataaaaacagaagcatatgacatgtgttattttgtatctggcttttaaactcagcattacgatttagagattcatgcgtattgttgcattttctgtagttgtttctttttactgcggactaatgtttcattatatacttaaccctaagtttgtttattatcattttatccttttatggacatttgggttgtttcaaatcttaggccaccaataaggttttcattagcatgcgaatttaaatcatttcatagacatgtcttagctaaacacgaatgggattatc

SEQ ID NO: 394472 - DNA, 628 bp, Homo sapiens
gtattctaaacaagataaagaatatttccgtcactccagaaaggtttcttgtgatctttgccatccacccccaccatctaacatcataatgagctttcatcttttaattcctaatagcatagattagttttaccttttcttggattttataaaaacagaagcatatgacatgtgttattttgtatctggcttttaaactcagcattacgatttagagattcatgcgtattgttgcattttctgtagttgtttctttttactgcggactaatgtttcattatatacttaaccctaagtttgtttattatcattttatccttttatggacatttgggttgtttcaaatcttaggccaccaataaggttttcattagcatgcgaatttaaatcatttcatagacatgtcttagctaaacacgaatgggattatcaggtcataaggtagctgtttgtttacatctacctgaaattacctgaagtttctattaagtttttcagagtggttagccattgtaaattcccaacatcaatgtatgagagttcaagttaytccaacaattaattcaccaacatttggtgttgtgttttacttatgccattatattttctgcatttctaatgctttgat

SEQ ID NO: 394473 - DNA, 576 bp, Homo sapiens
ctgactgcctttcccttgaagacgatctccgttttcaacgtctgcttagttgtctttatagtttaataagcctaatactagattaaatacagtagccccctcttacccagtgttgctttctgtagtttctgttgtccatggtcaacttcagtccaaaaaatgttaaatggaacattccagcagcaaacaattcataagctttaaattatgccccattctaagtagcaggatgaaatctcaagctgtccttctccatccttccagggacatgagtcatccctttgtccagtgtatccatgttatacatgccacctgcacgttatcacttagtagccamcttggttatcagttagacacagcatcacagtgcttgtgttcaagtaatccttattctatttaataatggccccaaagtgcaagagtagtaatgttggcatattgttgtaattgttctattctattattggttgttataaatctgttactgtgtctaatttatgaattaaactttatcataggcatatatgtataagaaaaacatggtatatataggatttggtactatccatggtttca

SEQ ID NO: 394474 - DNA, 576 bp, Homo sapiens
ctgactgcctttcccttgaagacgatctccgttttcaacgtctgcttagttgtctttatagtttaataagcctaatactagattaaatacagtagccccctcttacccagtgttgctttctgtagtttctgttgtccatggtcaacttcagtccaaaaaatgttaaatggaacattccagcagcaaacaattcataagctttaaattatgccccattctaagtagcaggatgaaatctcaagctgtccttctccatccttccagggacatgagtcatccctttgtccagtgtatccatgttatacatgccacctgcacgttatcacttagtagccaacttggttatcagttagacacagcatcacagtgcttgtgttcaagtaatccttattctatttaataatggccccaaagtgcaagagtagtaatgttggcatattgttgtaattgttctattctattattggttgttataaatctgttactgtgyctaatttatgaattaaactttatcataggcatatatgtataagaaaaacatggtatatataggatttggtactatccatggtttca

SEQ ID NO: 394475 - DNA, 498 bp, Homo sapiens
tcacacaagtcagtgtataattgaaagtataatcacaatactgagctaaagataatatactcaaccgagatattgctgattttaaacatagtagctcagcagcagttttgaaagaaagaggagtaggagagactgaaagaaaaaaaaagagattaaaagacatttaaaagtaactgaaagaaaatataggagttatatagggaaaaggagtcctgaakcatattttgtatttgactgctgaggatcctgagctatttggaaacaatattcaatgagacaagattgcatatgaggttaacacctatttcttctacactaacctgccttatccctgcccattatttaagtcagagtttctcaacctgatggagttctttattcttggcactattgacattttgggccagataatccatgtgggagtcaggggctgggggctgtcctgtgcattgtaagatgtctaaacagtacaagatgccaatatatgtcctcagttgt

SEQ ID NO: 394476 - DNA, 588 bp, Homo sapiens
tccctagttttgaaattaaaaactaataaatttaagtaaaaaacataacctataaaatcaaatgttctaatctacctcttacattctgaagcttggagagtgagtttttagtgcttgagaataggaaatcagtccctaataattctctaagggatcatgggaaccaatacgtctaggtctgtcaatgggaaagaactctgaattaagcactaacraaaacagcactctaccaatttaagtttaacatgagaggcagaattagcaattatggaaaacatacaaaagtggcaaaggagatgatagtttagaaaaaaattacacggctagatgtctaccaatcccagtcaacctagaagctttctccccaaggctgctttcactctgaaggatgtaagtagggactggctacaaaaattgctagttgcctggaggcttcatctggaatgacatgaatctcatgtatcagccaaattatactctgctttgaattcataaaaattgttttcataatgtgataaaattttgagttctgtctccaaactgttgaatagacaccacctgaaatataaactgaaatacctttataag

SEQ ID NO: 394477 - DNA, 633 bp, Homo sapiens
ctctttggaatccacagcctgtaaggtggggggcagtactgcagcttgaaagctaagggatgggcggttgagttgcccaaggtcactctgcagccttactgcaatgaaagttccatagaataggggtgttgtctgttgtgttccccaaacctacaacagttcctgaccytccatcactataagctgaatgaatgaatagatggatggatgaatgaatgtaactgagaagctggagtttgagcccaggtcagtgtgactccatggtcagatgctacacacttcctgctccatttccacagacacacacacatatcctatttgtccttgtaaaaccagcatattccaagagttttctgccagctgcagctcatcatacccatcttttcccatcgtccttccataacacacacagtctctgccacacaatataacaatttattagacctcaaactctctgggggcaaagaccacttcttagccactggacttcttagtctcagtctcaaatcaggctcttaagaagcaatttctggttggctggcttcttttgggggaaagggaaccaattgtcacctcctccagaccctcgtatttccaaaccctagcctttcttataggaaagaggaagggaac

SEQ ID NO: 394478 - DNA, 566 bp, Homo sapiens
attactagctttgggagtagggggtttgattggctgcctgactattggattgagatgctccagcaaaatatttcttttccacttgacacttgtgaagggtgtaggacagagacactcatcaaggagtgtggagggatgaatcctttgtatttttgtcctaaggaataaatgtggttgattttggttcttaatgcaaagtatatacatcattagtttctaattttatgtcatatgttcaacactgaggtacaaaagaaaatctctttgacacttttttctggtaaaatcaccctttctattccataatacctgatgtatgtctgtcttttcaagacatcaacactcattcaccyaaattctttctagattagtgccattttctacttctgttttggtggaatgggtatggagtaaagcagaggaagaaggggtgatttgtgtgacgacactcagaatcattgcatcatgtccccataataataaaaaagcatatgatcttgtaatggtatttactgctttaaaatattcatctcctttcaataataaagggacaattatttacttag

SEQ ID NO: 394479 - DNA, 605 bp, Homo sapiens
atcataatatttcagatgcttttgttagaaatttatttgattgttggaacctcatagttgacttatcagtgaatgtaaatgagttagtatataactagctcatagccctcataactaataacacaatgttgtgttattagttatgagggctatgagctgcctcctccaggtaagtacaataagatcattgtttcttggaatgttaggaaatatttcattctggataaccttattatctttcttttgattaaaatcttcctaaaccaaattttaaatttttcaatcttattaaatatgcttcattaactcactgaggtccacactgggcaatttatggacaaggggaaattgatcccttttctaaatagtcccacactattcaatttctragtatttttacctttcttccgcttgctaccagattcctggaaaacactggttttatgtgtgtgtgtctgcttgtagtaagccatccctttttcaaaatacaatgcttctataagatattgaaagtcatttatctatgtttgttaaaattatgtataaattgagtcagtaggttccaaaaatggcgcatttaatttcttttctcagtagtatacgta

SEQ ID NO: 394480 - DNA, 582 bp, Homo sapiens
atttctgagtatttttacctttcttccgcttgctaccagattcctggaaaacactggttttatgtgtgtgtgtctgcttgtagtaagccatccctttttcaaaatacaatgcttctataagatattgaaagtcatttatctatgtttgttaaaattatgtataaattgagtcagtaggttccaaaaatggcgcatttaatttcttttctcagtagtatacrtagtgcccataagtgtttggacacagccacatctatttggttttacagaaccttaactttttaaaaattccttttcatatttaatttttttaagtaataggagaggcaatatcataaaatatcacatcaacagaaaagaaacaactctcttgtatttgctgttggttacaacaaaacttactttggtgtggcagtttttaaccttacttaaagaaaagcatatttggtaatgtgaactgttatttcatttttatttgacaagttttgtgctacttagtggtgtcagattcaatacagggcagtaagcaaaattttaaaaataatattattcccattgtcaccttgaaacagcagagcagat

SEQ ID NO: 394481 - DNA, 582 bp, Homo sapiens
atttctgagtatttttacctttcttccgcttgctaccagattcctggaaaacactggttttatgtgtgtgtgtctgcttgtagtaagccatccctttttcaaaatacaatgcttctataagatattgaaagtcatttatctatgtttgttaaaattatgtataaattgagtcagtaggttccaaaaatggcgcatttaatttcttttctcagtagtatacgtagtgcccataagtgtttggacacagccacrtctatttggttttacagaaccttaactttttaaaaattccttttcatatttaatttttttaagtaataggagaggcaatatcataaaatatcacatcaacagaaaagaaacaactctcttgtatttgctgttggttacaacaaaacttactttggtgtggcagtttttaaccttacttaaagaaaagcatatttggtaatgtgaactgttatttcatttttatttgacaagttttgtgctacttagtggtgtcagattcaatacagggcagtaagcaaaattttaaaaataatattattcccattgtcaccttgaaacagcagagcagat

SEQ ID NO: 394482 - DNA, 564 bp, Homo sapiens
ctaccaattttgtttatttttattttgaaggaccaattattggtttcgctgaccttttgtacatatttttgcatctcactttcattaagtttttctctatttgtagttatatctgttcttctgctagctttgagcttttttttttctagttcctttaggtacaaagttggattattaaattcagatttttctaacttcttgatgaaggtatttagtgctataatctttcctcttattatcttatttacttatttatataaaaagttttatttcctgctttagcttcatttcagagattttggttagttgtgtccctgttttaatttcaaagaatttttttgatttttgcctaatttcagtgtggacccatgagttaytcaggagcaagttgtttactttccatgaatttgtgtacttttgagagaccttcttgacgtttatttctaattttattgcactgtggttcaagaatgtgcctgggatgatttcagtgtttttgaatgtattcagacttgctttctgacgaagcgtgtggttgatcttacaatatgttccatgtgtaga

SEQ ID NO: 394483 - DNA, 567 bp, Homo sapiens
attcccaaaccagggatccttttatgttattacattgcctaaaaaactggcattcaaatggaatttagagggcatttaatctggccatctcatttgattgatgaataaattttctggctaagaatctayacatttgtttagtgctttatatactcagcatcagcatcagtataaattaaattttctattatgttctcagcctgattcacactttttagaaaatataaaacttatttcatactcaaataatttactaaccttgtgtagttagtaaattattactactaatattacatctctatttttgaaatttacattcaatatatttatttcattaggatgctactaatgaaattaacttttttttaaaaaaaaggtgaatcatctcatttttatcaggttcactacatatatatgaagtagttgataaatgactcagcgttggccaattgcaagaataccacttaaaagtaaatggttattactgaagagtgaattatatattttcattttgtagacttaacatttaaaatggaagatggtgggaagcacacacatttctcagtc

SEQ ID NO: 394484 - DNA, 567 bp, Homo sapiens
attcccaaaccagggatccttttatgttattacattgcctaaaaaactggcattcaaatggaatttagagggcatttaatctggccatctcatttgattgatgaataaattttctggctaagaatctacacatttgtttagtgctttatatactcagcatcagcatcagtataaattaaattttctattatgttctcagcctgattcacactttttagaaaatataaaacttatttcatactcaaataatttactaaccttgtgtagttagtaaattattactactaatattacatctctatttttgaaatttacattcaatatatttatttcattaggatgctactaatgaaattaacttttttttaaaaaaaaggtgaatcatctcatttttatcaggttcactacatatatatgaagtagttgataaatgactcagcgttggccaattgcaagaataccacttaaaagtaaatggttattactgaagagtgaattatayattttcattttgtagacttaacatttaaaatggaagatggtgggaagcacacacatttctcagtc

SEQ ID NO: 394485 - DNA, 596 bp, Homo sapiens
atatcaacaaatcactgaagcagttcctctttttttgtggttttaacatggcaattaaccagcattccttcctgataagagaccaactatatgctactcatgaaggggcatgaagcacaattgtgcatgtgcatggttgtcctttcataaatattcaagattcctcctatagcttattgagcatatgtatttggccacctcactcagtacatattccttttgwcactgtctcgaaatatttgtttctggctcctggccagaggctatatttcccagcctgtcataatagccacccttcaggctacaactctatgagaaataaaggtcctcctttccaaatttatgaaccccatcattcttcagttgatagcactgacaccccatatctaagtatattaaaagagaaataagctgcaaatatatataatatataaatatgtaatatatgtaaatatatgatatatacatatttatatataatttatattatatataaaatatattttaatatactttaatatattcaagtaaattaaaagaatatattaatagttgtatataaaataagtattttaatatactttaatgttaatgta

SEQ ID NO: 394486 - DNA, 604 bp, Homo sapiens
tatttatgacactcgaggtcccttggctacctatacccatctatatggtgaagatgcttctgtatactccttcctcaccatcccacagaataagtgagctccatatcctaaaaataggaaaattaatttkcattctttctaagtgttgtatatatccacaatggtgatgatatcactgtttctccctattgctacccaaatcattcttaatttacctttctgagaattttactctcaacctacttttactttaacggaatcataggattttagaggtagaacatttcttaaaattctagttaaaatccctccttttgctatgaagaaactgtcatagaggaagatctcacgacctcaacatcacgcagattcttgttttctcccaaagcattgcttctcttgagaagatttcacagttcactcaccgacagggaatgcacctgtactcctaggtatttccatagtcatcctctaggtactacatccctgtagattaagaatgggaattttctagatgttgttaaaagaggagcagaagcttaggaggagtaggtgggtggatgtaagatgaagtaaatcttcttaaggaacttatccaaccact

SEQ ID NO: 394487 - DNA, 546 bp, Homo sapiens
ctgtctgtggcaccttataaaactaaggagcttgtacagagccaagaaactatcaagagagtaagcagagatcctacagaatgggggaggctattcacaaactatgcatytgatgaaggtccaatatccagattctataagaaatgtaaatcaacaagcaaaaataataataataatcacattttaaaaataggcaaatgacatgagcataaacttctcaaaaatacataaagtggccaggacatatgaaaaaacgtttaacgtcactaatcatcagagaaatgccaatcaatcaaaaccacaatgagatgctgtctcacaccagtcaaaatcagtattactaaaaattaaaaaaaaaacaaaacagatgctggtgaggctacggagaacaggaaacgcttgtacagtgctgggtggaatgtgaattagtccaagcactgtggaaagcagtctggagagaggctgcggagaacaggaaacacttgtacagtgttgggtggaatgtgaattagtccaagtactgtggaaagcagtctggagtgaggc

SEQ ID NO: 394488 - DNA, 546 bp, Homo sapiens
ctgtctgtggcaccttataaaactaaggagcttgtacagagccaagaaactatcaagagagtaagcagagatcctacagaatgggggaggctattcacaaactatgcatttgatgaaggtccaatatccagattctataagaaatgtaaatcaacaagcaaaaataataataataatcacattttaaaaataggcaaatgacatgagcataaacttctcaaaaatacataaagtggccaggacatatgaaaaaacgtttaacgtcactaatcatcagagaaatgccaatcaatcaaaaccacaatgagatgctgtctcacaccagtcaaaatcagtattactaaaaattaaaaaaaaaamaaaacagatgctggtgaggctacggagaacaggaaacgcttgtacagtgctgggtggaatgtgaattagtccaagcactgtggaaagcagtctggagagaggctgcggagaacaggaaacacttgtacagtgttgggtggaatgtgaattagtccaagtactgtggaaagcagtctggagtgaggc

SEQ ID NO: 394489 - DNA, 548 bp, Homo sapiens
aatcaactgggcacggtggctcacgcctgtaatcccagtactttgggaggccgaggtgggtgaatcacgaggtcaggtgttctagaccagcctggccaacatagtgaaaccctgtctctactaaaaatacaaaaattagctgggcrtggtggcacatgcctgtaatcccagctacctgggaggctgaggcaggagaattgcttcaacctgggagacagaggttgcagtgagctgagattgcgccactgcactccagctagggcaacagtgtgagactctgtcacaaaaaaaaaaagagtaagttaaccaattctgtcaaaaataaaagatcttagtaataaaatatatataattgaaaaggtgaatgtgattaaaatgaacatgtttatatatttatatattagtatataaatatgaaaatatataaatattaaatgatctcattttacctccctaattctataagctggttatttctatgttttttaaaaaggaaattaaaagacaaagcaaataaatgacttacataaactgacatgtttaattgg

SEQ ID NO: 394490 - DNA, 571 bp, Homo sapiens
gcaacagtgtgagactctgtcacaaaaaaaaaaagagtaagttaaccaattctgtcaaaaataaaagatcttagtaataaaatatatataattgaaaaggtgaatgtgattaaaatgaacatgtttatatatttatatattagtatataaatatgaaaatatataaatattaaatgatctcattttacctccctaattctataagctggttatttctatgttttttaaaaaggaaattaaaagacaaagcaaataaatgacttacataaactgacatgtttaatyggaactgtatttggaaatgaagttaaattgacttgatattcaggcaatgccctttgtcagataatctttctgagcattagatagtttgctgtaatatggatatttggagatgcatttttcacttttgcatggtcttaggttaccagcaaatgggctggcaaaatcatgtaataatattgtctgaaaggtactgcccttaggaatgagtttgttacctggcaggatttggtctgcttctatcccatgaagttaatccaattaacaggaaagccattaaacacactag

SEQ ID NO: 394491 - DNA, 427 bp, Homo sapiens
agagcctttcaatttgatttatgtcttcaggcaagaaactcaaagatgcttatttcctcaattttagaagagcygcttttgagtaaaataggtagaaaggggttagggatttgggataggactgtagaaaacaaatcatgaatatttttacactccatttcagttttgcaacatttcggagaccacatcttgctcttctttcttataggctaggatgtttcaatgagacttcaaccagcatatgtggttggggtggggggaaacagtgacacctcattttctctttctcttttgagactacgcgcatgagtcatttttatcacactacaaagtcttgccaacaattatggccaataacattgctttccatcacaatataaacatgagctaacccttaaaactttgaaagtttcttaaagacaagaat

SEQ ID NO: 394492 - DNA, 514 bp, Homo sapiens
aaatatagcaatacggtgtcctacatttctaacaaaatgttgaacaytttattttattgctattatgcaagtatagataaagccatccttaaattcgtctgggaagacaaaggatgcttcacagaggttatataccatgggaactgaattttctggagttggttcagaatgcagattctggaatcaaattccctgtgtttgaatcctggctctggctcttagctgtgtctttgtgtggaaggtacttaataatgtaaacctcacttttctcaattgtaaacagatgtagaaagaaaattactgataacagctaccacttagcagtcaccatgtcaggtactattccaaatactcaacagccaataatttatttagccatcacagcaatcttacgaagtaggtactattattagatgaggaaactgaggtactgatatattaaacagatttcacacaccacactgctggtaaatggcagagctaagatctgaacccatgcagttcgcctcccgaa

SEQ ID NO: 394493 - DNA, 560 bp, Homo sapiens
gaagcagaaggccaggacctccatttccagcttctctacttgtaggcagtgggattgcctgtgctcatgcctatgcttcatgcttcatagcatggaatctttgaaataaacagataggagagcatggatttattcaaacaataatcattttcaaaggtccagcaatgggtcaggccttgggccaggtttcatggggaatacamaattggaataacgccttcaaaataagattagtggcttagagctcaggttctggagacagattttccaggttgaatactaactctgccaattggccacttgagactttgggcaagtcaccttacttctctgtgcctcatttctcttgtcaataaaatgaagaagagtaagcagattttatagggttgtgtgcagacaaagagaggcaagacctgtaggaacagggcaggggctctataaatgtgccctttgcttattcccaactctccacaccatcccacatgtgtgacctcaacttgcgtccttgccacctttcatcaatactaaagcaattgcccaaaaagtgctttttaaacttc

SEQ ID NO: 394494 - DNA, 592 bp, Homo sapiens
gtgttcgttgactttttctgtcccttcttaagacaaatgtgtacttatattgtctgcttatttttaattggattgtcttattattgagttgcaggagttctttgtacattctagactcaagtcccttatcaactgtatgatttgcaaaaatgtttcacattctgtgggttgtcttttcactttcttgatagtgtcctttgaagcacaaaagtttttaatttggtgatgcccaatttatctattttttaaaattgtgttacttttatttttggtataatttatctaaataactattagctaatgagagttcacaaaatttacaccaaggctttcttctatttatatttttacctttacatttgggtttttgatcygtttgagttaattttttttagatggtgagtaggaatccagcttcattcatttgcatgtagatttccagatgtaccagcccatttgatgaaaagaccaatctttccctcataagaaaatttagaattaaactccatactacgccacctctgccttcagggaatgcatagtactgtgatggagactggtagatacatgaaaaagtggcaatgcaacatgg

SEQ ID NO: 394495 - DNA, 549 bp, Homo sapiens
ctgggttgctttgatttcaccatcgccatttctcttttctgaagattttctgtgtgtctcttcctttgggactaaagtcattaataagtccttccttagttagggacacaggcttctttcatgtgtctggcaactctctgcccctctggatccatctcattatgaagcaccctacagaccaagggagggtggtgtttatatttgattatgctatcatcaaattaacaggcctcattagaaggaaattgcagatttggggctccctaatacaatagattcttagaaaacctcatccaaaraataacaaagcatagttaaagagaactattgcaagaaggccaggattttagtgagggctgcttagatggatagagaagctgaactattggtgctgtgctaatcaaacaatgtcagtatgaacttaagctaatttgaatatcatgctattcccccttctcagaaaccctcctttctcctgttcagttatcaaatcctacttatctttaaaatccatatcaaatcttacccaaagtatgcaaattaggctgc

SEQ ID NO: 394496 - DNA, 592 bp, Homo sapiens
ggaatgggtttcttgaagacagcatacgattaggtcttgcttatttattcagtttgccactttgtgccttttaattggggcacttagcccatttatattcagggttagtattcatatatgtggatttgatccttcgttatgctgttagctggtaattctgcagactcgtttgtatgcttgctttatagcatcactagtctatgtacttcagtgtgtttttgtagtgaatgataatggtctttcctttccatatacaactcccttcagtaacttttgtaaggcaggtctgatggtagtgaattaccttagcatttgtttgtctgaagaggatcttatttctccttcatttatggagcttartttggttggaaatgaaattcttagttggaaattcttttctttaagagtactgaatactttgaagattgatgggccatgtgataggggaccaccagtcacctttaggaactgagactagctcatgtttgacttgcagcaagtaagcaggaatctcggtactaaatcacacacacaaaaatgaaatctgcctctatcttgtgagttagaaatagtttcctcaagctccagagaa

SEQ ID NO: 394497 - DNA, 575 bp, Homo sapiens
cttaattcctacccacaaagcttggggccacatgtgtttccaacttcagaatttttcacattttaggaaaaaaaaatgtatacgctttatgttatatatacccccagtggggtctagggcaacactccatatgcaaggtcattaaatgcttctgaatcattgcatataatattcattctaaggttaatgaagactctacagtagactcacatgagttcagattttgcccccaaatgagtgctgatcaagttagttttactaataagtgactgccccatccccmaaaaccctctttatttttggagttctttagatttcagaattgtgggaaagagatcatggacctgtactgccaaataaatctataaattgattagcatcaactttagctcatctttagtgctatctcagcccagtgggaaacattgttgtgcctcaggaccttggttcaggcacagagagggttcccatggcacttgttgcctccaatctgcaggcccagaaggcttagactgttttcctctactcattaagtgagattcaacattcagtaatgtttgaggatgctttctccc

SEQ ID NO: 394498 - DNA, 467 bp, Homo sapiens
acctctgcccattacccacttcaaaagtcgcttccagattttggggtatgtttacagcagcactccacaccctagtaccaatttactgtattagttcattctcacgatgctatgaaaaaacacccaagacagggtawtttaaaaggaaagaggtttaattgacccacaattgcacagggctaggggggcctcaggaaacttacaatcatggcagaaggggaagaaaacatgcccttcttcacattgcagcaacaaggagaagtgctgagcaaaaggggaaagccccttataaaaccatcagatctcatgacaagacactaacatgagaacagcatggaggtaaccaccccatgattcaattacctcacatcaggtccctcccacaacacatggggattatgggaactacaattcaagatgagatttgggtgggtacacagccaaaccacatcagccttcatgaatgc

SEQ ID NO: 394499 - DNA, 664 bp, Homo sapiens
gttttcagtgtactcacaaaattgtgcaatcactgccacaatcaattttagaacattttttatcacctccttctctaaaaaacccttgtgcccattgtcaccattgtcttcttttcccctctcctcccctycccaatcaccccaactctaggaaaccattaatctacatatctctatagagttgctcattttggacatttcacaaaaatagaaccatacattatatagccattagtgtttggctttttttacttagtgtaatattttcagggttcatccatgctgtggcatgtatcagtacttcatttctttttatggctgaataagaacccattgtatgtataaatcacattttgtccactgacagacatttgggttgtttccacgttttggttattatggctattatgaacaatcccgctatgaacttttgtgtacaagtttttgtggggacacatgttttcattttccttgaggctctgtttgtttttatgtcatccttatctaataaaaaggtggggctcaaacatactctggtgaccaaagaccttgtggaattctaaactataatcacatcagagctttacttttacattctgtgagttatacgttagagacagagtgattaattcagacaccattgctcagggttcttagccactct

SEQ ID NO: 394500 - DNA, 564 bp, Homo sapiens
cattaatctacatatctctatagagttgctcattttggacatttcacaaaaatagaaccatacattatatagccattagtgtttggctttttttacttagtgtaatattttcagggttcatccatgctgtggcatgtatcagtacttcatttctttttatggctgaataagaacccattgtatgtataaatcacattttgtccactgacagacatttgggttgtttccacgttttggttattatggctattatgaacaatcccgctatgaacttttgtgtacaagtttttgtggggacacatgttttcattttccttgaggctctgtttgtttttatgtcatccttatctaawaaaaaggtggggctcaaacatactctggtgaccaaagaccttgtggaattctaaactataatcacatcagagctttacttttacattctgtgagttatacgttagagacagagtgattaattcagacaccattgctcagggttcttagccactcttacaactttcatgaagatattcaactcattcttttctaagtgacaataattattga

SEQ ID NO: 394501 - DNA, 537 bp, Homo sapiens
cagtttcagtgatattttgggtttaatgttacataaatattgtttgaatttcttaaactactgtggacaattatggactattgaaattaatgataggaataatacattttctaaataaaaaaacctattcgtgcaattaaatcactcgaccctaaattttttttctatatctcatgagaatgttttcttagtggttatccattattagatttcaaggttttagaatcaaattgccaaaatcaattccaaatgaataataattcatattgggacaattataaatttaaattataaaatacagtcaaaaagatttaccgagaaattaagagaaaccaaagagggttgctatgtgcatacacttccaaaataattaaccacatttgccaggaaatacataatttaaatgtatcatgatgaaaccaaaatgcgwttaaaaagggggctaaagttaatttgtcacatagaaaggtaaatgtaactgtctttacattcaaagctttgcaacaatattttcatgaagtgtaaagtaaccacaac

SEQ ID NO: 394502 - DNA, 529 bp, Homo sapiens
cagttgttctccatggacacagaggtgcaaacaagcagaaattggtttaataaagcagaagatatttcaactggacacaaagcagaacttcttgactatcatggagataaagaaaaatgggggaatctttccaataaatktttaaagataactgtaaaaaaatctagtgaaatggataagagatgtctttacttttactacttatatttacaaaattgagtactagacagaaaataatgtgtacacaatatcatttcaaccattttattttatgtttcaataaagtaatactttcatactaataaactaatagagcaaacaaggaatagcatttcaatttccttcaggtttttgttttgtagatagacacaagtatattttgtcatatacattgtaagaactgggcttcctttacataacatttactggtggggaaatacaaaagacagccaatgtagataaaaatgtttttcaattcttacttgctcaacaaattttaccaaactgaaagctccttaactgtagggac

SEQ ID NO: 394503 - DNA, 465 bp, Homo sapiens
atgttaatgaaacaggtcactacacatttttttaacmaaaaaaaattacctcctattaagaataaccacaaaatcatcaaactgggttctttcagtatgtatttattaagctcctattgtctgttctgcagctagtatgctaaaaactgccttcaaagattattcagccaatcacagaaaatgcccatgcaaaatacaggtaaagcagtgccctagagtgtcatggatagttttatacagttaggtacctgatgtaaatgggggatcaaagagttgtgcatggagaagatcacaaatggggttatatataattcgctgttaggtgttcaagctaagtgtcatccaattaaatacggcttaaaaggaatttttattagcaatgatcatttgtgaatgaattcttctaagaaattacaagagaggtctaatattatcgaggcttaaacagtgaatatatgaagcaag

SEQ ID NO: 394504 - DNA, 609 bp, Homo sapiens
cttaccgaatcctaatcaagtccccacattaaaacacccatcttaaaccaaaagtctcaacaaattcaaattttgctttcccgcttcccacacactgccaaagttctatcaaggtggtattctctcttacttcggtaaataatgaactgaactttaaattatcaacacattgtgctagtgatatttggggagcaagtattcaataataatcatgagcacaggataagggaaaagttaggagagaaataacaacattagggacacattgggattcatcagggaagccaagggacccatgtagagcagagaggaacaaggcagtacagccacccatctgggattggcatgcaggcaagggaggctccccactgyagggaaagggtgagtgagcgagagaacccagagacctacacttctgccatggacctttgcaaccctgggcacaggagatacccccttactgcctctccatgggatctccagactgaaacgaagagctgggtagagtctgggcagagccgcagcacaggcctatgtacagccccaaggaaattggatccctgggctccctggcacccgggaccacagccctgccaacaagggaggcca

SEQ ID NO: 394505 - DNA, 599 bp, Homo sapiens
tatacatagaaaaccgcataatcactctccaaaaactcctagatctgataaacaacctcagcaaagttttaggatacaaaatcaatgtacaaaaatcagtagcatttttatacaccaataatgtccaagctgagacccaaatcaagagtgcaatcccattcacaatagccacaaaaagaataaaatacctaggaatacagctaactagggaggtgaaagatctctacaacaagaattacaaaacactgctgaaagaaaccagagacaacasaaacaaatggaaaaaatatcccctactcatggataggaagaatcaatgttgttagaatggccattttgtccaaagcaatttatatattcaatgctattcctgtcaaactatgaatggcattttttcacagaattagaagagaaaattctaaaattcatttggaaagaaaaaaagagtccaaatagccaaagcaaccctaagcaaaaagaacagagcaggaggcatcacattacccaattccaaactatatcacaaagctgcagtaataaaaacagtaaggtactggtacaaaaacagacatatacaccaatagaaaaggttagagaac

SEQ ID NO: 394506 - DNA, 546 bp, Homo sapiens
gaaatagcaaagtccttggcaggaaaccagtaaggcttttagaaaggaagactgatatgatctggcttatttttgcaaaggatctttctggctgcagtgttgatacagtttgctagaggggcaagggcagaaacaaggagaccagttagaagctattgtaacagtccaggcaagggattggcaggagggaaaatatatactggataatgtcagaaggcctcaactccattgttttaaatgaaaagatatgtgtgaaagtattatacacagcacagctctattcaaattctaggagccacagttattgtcatttttatacaagtccctgccattttgcccattatttcagaccacatctagatgatgtggctgtgtgatttttcagtccacgttgatattaacggccacattccctttaaagtcattttctgtctgcacatgmatcagacattgcttcttgtccttttattgtggttgttattgctgttttttagcacacacccaggcacgccatgtaattgctgctacatgattacttcagtgttt

SEQ ID NO: 394507 - DNA, 513 bp, Homo sapiens
aggggggcagcagatggtggaggagatggctgggcgagtgctataaggcctacagtccaaaggcccaagaacctagagctctgatatccaagagcatgcgaagatggatgtcctagctctcactccagaagaaagaataatttgcctttcctccacctttctgttctatgcagtccatcaaccaattgggggatgcccgcccacattctctttactcagggcgtattttctttacttggtctactgatccaaatgctaactgcttctggaaacactctgacaaacacacccacaaataatgttttaccagctccctgggcatcatctcttaacccagtcaagatgatayataaaattaaccgttacaccatagaacccttttttaattttctactataacagctttgaaaataatgatgaccttagaactcatctagttcactttcctaccactaccagaatcccatctccaacattctggatgattctccctttttgctaccgccatcatcc

SEQ ID NO: 394508 - DNA, 453 bp, Homo sapiens
atctgaatttgtctagtatattttattaagctctcttcagcctgtcctcatcaaaaataagtattacattaacattacagttatttaaaaattaaccttttctaggctggtttaattttatggataatgtattaatcaacatggcttgaagtttcctatcaaaatgcagtcaaggccatttacactactattttcaggaatctccttctgctacctttgtaaagcatttacttcataggaagcatttcaaacactactagtggaaaaatacactaggcaattatagccaaagtttctayggatgtggctgatttatttcctggtttaaaccatatctaaacgagatttaagagttcaagagctgggaatgaatggacaattgggttattttgtattctgtggagtgagatttgcagtcaatgtcagtattaaatctaggtgtaaaatgcaaag

SEQ ID NO: 394509 - DNA, 453 bp, Homo sapiens
atctgaatttgtctagtatattttattaagctctcttcagcctgtcctcatcaaaaataagtattacattaacattacagttatttaaaaattaaccttttctaggctggtttaattttatggataatgtattaatcaacatggcttgaagtttcctatcaaaatgcagtcaaggccatttacactactattttcaggaatctccttctgctacctttgtaaagcatttacttcataggaagcatttcaaacactactagtggaaaaatacactaggcaattatagccaaagtttctacggatgtggctratttatttcctggtttaaaccatatctaaacgagatttaagagttcaagagctgggaatgaatggacaattgggttattttgtattctgtggagtgagatttgcagtcaatgtcagtattaaatctaggtgtaaaatgcaaag

SEQ ID NO: 394510 - DNA, 453 bp, Homo sapiens
atctgaatttgtctagtatattttattaagctctcttcagcctgtcctcatcaaaaataagtattacattaacattacagttatttaaaaattaaccttttctaggctggtttaattttatggataatgtattaatcaacatggcttgaagtttcctatcaaaatgcagtcaaggccatttacactactattttcaggaatctccttctgctacctttgtaaagcatttacttcataggaagcatttcaaacactactagtggaaaaatacactaggcaattatagccaaagtttctacggatgtggctgatttatttcctggtttaaaccatatctaaaygagatttaagagttcaagagctgggaatgaatggacaattgggttattttgtattctgtggagtgagatttgcagtcaatgtcagtattaaatctaggtgtaaaatgcaaag

SEQ ID NO: 394511 - DNA, 502 bp, Homo sapiens
gctgaatttggggtcttcccttgctttgacttgtttcttatggtattgcaacattttgtgtttgagagaaaagtccttgactaccagcattggcccccatgagttcttcagtttgtcatcaacatggattctgattttattgtttgaaagttctaaaatagcaaattgacaaaattggtatttactcctgaaaatcctacgtggccatttcaaagagaagcacgtttagaagaattaaaaggtgcatgtaaaatgcttccataatatatttttaagtgaaagagaaagcaggattagagcagcacatacagtatgatcctaatatagtttttattatacttatgtattttcctaattttctacagtgagcacacactacttttataatgaggaaaatgttcttaaaagtattgtmttaaaagtcacactaacagaaatggttataaaaacctatgcaggaagaaaattacaatcattattatggtcacaattgttaccttat

SEQ ID NO: 394512 - DNA, 620 bp, Homo sapiens
gagtgtcccgctttgcagcccagtcccttgatttctgtgatttgacaggaagatgatatcaaagactgcagaaaagtgttaagggacagctcaaatgctggtgtgtgtgtgtggtggagcaggtgagcagttaggattgtgtgtcatgggctgacaggagagggagtgtcaggctaccacgtgggtgaacatgggccctatcatagaaaatatgctttttgttaggattctcaatatctagaaggaggggcaacctttctggcatgaatgtgcaactgctgtgaggatccagtaaaaggtcttctcaggatttgtttaaaamggtcagctcaggaactactgacccctctgacttcatcctgacagtttcagccctctcacaaaatcactcttgtcacttctagcctcctgtgcttttctgaaaacaaaaccctctaccacctgccatccattattccaccagcaagcaacatgcgctctcttcagctgatatttcaatttattcgtggttagatgtgcagtaatcctctgactgaagctgagggagcagtttaaagatttaaaacaaaacaaagccagtgcttcaaacatctcttcatgcaaagcttaccagatgcaga

SEQ ID NO: 394513 - DNA, 544 bp, Homo sapiens
ggccctgtgggacacatagtttaaacattagcaggagaagctgccacctgctggaacaatagcagcagccacagatgcttgcaagccctcagaacctgcagtcccttcactaccaaacatgagaatttcctggtggactccagggttggaaagcagagcactggcatacactgatgttggggagagggaggtgcaaggtggaaaagagctgatacctggagttgagatcatggtgaagccacacaaatgcacacagccctgagtccctaggagctgcatagagctttccaggatggatggtcccggttggccactggtcctgatcaccaacgaactgccctgcctggccctgcccacccctctgctttagcctctgctgatctccccaagtctccastgccttcaccaggctagcagtccttgccaacccttcccaaaacattatgtggcttccctataatatcacaccatttggtttaattgtctctcctgttgaacagcaaatgccgcaagggtgtctctcttgctcactggtgatcccaag

SEQ ID NO: 394514 - DNA, 544 bp, Homo sapiens
ggccctgtgggacacatagtttaaacattagcaggagaagctgccacctgctggaacaatagcagcagccacagatgcttgcaagccctcagaacctgcagtcccttcactaccaaacatgagaatttcctggtggactccagggttggaaagcagagcactggcatacactgatgttggggagagggaggtgcaaggtggaaaagagctgatacctggagttgagatcatggtgaagccacacaaatgcacacagccctgagtccctaggagctgcatagagctttccaggatggatggtcccggttggccactggtcctgatcaccaacgaactgccctgcctggccctgcccacccctctgctttagcctctgctgatctccccaagtctccactgccttcaccaggctagcagtccttgccaacccttcccaaaacattatgtggyttccctataatatcacaccatttggtttaattgtctctcctgttgaacagcaaatgccgcaagggtgtctctcttgctcactggtgatcccaag

SEQ ID NO: 394515 - DNA, 557 bp, Homo sapiens
acgcacactcatatgttcatcacagcactattcatcacagcaaagacatggagtcaacccagatgcccatcagcagtggattgggtaaagaaaatgtggtacatacacaccacagaatactatgtagccataaaaaagaatgaaatcatgtcctttgcagcaacatggatgcagctggaggccattatcctaagtgaattaacacgggaacagaaaaccaaataccacatgttctcacttgtaagtgggagttaagcattgggtacatatggacataaaataggaacaatagacactgggaaccactagatgggggagagagggagggaaaaaagagctgaaaaactacctattgtggactatgctcactaacctctgcatcacacaatataaccatgtaacaaattagcacatgctctgaatctaaaacaaaggttgaaattattaaaaaaaaatctttctsctccttctcctccaacaacaagaagaagaacaacaacaataccagcttatatttattaaggaagcttaatatgtcaagcatggggctggccact

SEQ ID NO: 394516 - DNA, 612 bp, Homo sapiens
ctgacaggccagcaatttactgcattttctgcacatttgaatttgtagccctccatagccattaagcaaaattagtttcatgatgtcagccaaaaagcctcatgggcagcagttttatgtcattaaaaaaactaccatcctcaatctgtttgaatctgtgtttgctcattagaagcctctcaatgaatcagaagcgagggtttaatcacactcttrctctatgaatgcttagtatagccctgaactataacaaattcctattctacctttccctgtatctaaaatagtttagatatggctgaagaacctaagtatcagacaggctagcagttctcaactgatatggttcggatatgtgtccccgctcaaatctcatgtcagactgtaatccccaatgttggaggtggggcctggtgggaggtgattggatcatgggggcagtttctaatggtttagcaccatccccctagtactgttctcatgataagagttctcacaagatctggttgtttaaaagtgtgtagcaccttcctcctctctctctctctctctttatgcctgcttcccttggccttccgccatgattataagtttcctgaagcctcaccagaa

SEQ ID NO: 394517 - DNA, 573 bp, Homo sapiens
tcttggctaaacctaattcataattaacttgttaatgttttctatgttcttaatattgttcatcttatagatgcttagactgttgaaataaaataatttacaagattttggataagggagctcagagaattttgacaccatgtgaagcaaagcctttgagatagagtgaagagatgtaaaacaataaagcatatgatgtcttgttcaagtccagccatatcctgatagaaaactaatacaaagaatacaagctgaggttgagtttagaactaagtctattttcagcaattggaaaatttatatatttgaacatatttgacctttattgcttattgcttttttgtatggaaggaaaaaaaaagccttcatttaaaactaatggttatgatgatcacaaatctgttcaaactccttatagccaagttactatctcccttaggtaaattggttctcgggattctgaattaacaaaataacctttgtagscttttttcgcattaaacaggttggaactgtttgaatcctgaagtgttttggacccattgcccctggggaggctgtgaagaagctaat

SEQ ID NO: 394518 - DNA, 622 bp, Homo sapiens
ctgatgatccttttcatcttatctgcatagatgaacggcctctctctgttgaacacaaataaaatgtaaagctacacatatccctggaggaaaggtacaatggcattcttcatagcttgtcaaagattgaccctcatgctccttactagacaaactgactactaagaaagcagacaaatttatataaaggtcaaggggccttctaggggggaagagattaaaattctgtcctcttcttttttgggagttcaatcacactatacttctctgatgggttaaagtgcttctaggtgaagtttgctggcaggaaaaaaaaaaccctaagggccttaaaggtaagtgtttcataaaggaacaaggattataaattggggatctaaaatcaaartcaagcccttgaagttcaagagtgaggaggaagtttccaaacagtagcatgatgcttgtacctcagaaatggcagcgcatgtaaaatatagattaaggcctttaacctgatagggtgaaaaccttatagggcagtggatgaggatagaataaactagacagcatgagctttcagcagcctgaaatcaagatatctagaactgagacctcttggtagactgatgagaaattctag

SEQ ID NO: 394519 - DNA, 598 bp, Homo sapiens
ggttaaagtgcttctaggtgaagtttgctggcaggaaaaaaaaaaccctaagggccttaaaggtaagtgtttcataaaggaacaaggattataaattggggatctaaaatcaaagtcaagcccttgaagttcaagagtgaggaggaagtttccaaacagtagcatgatgcttgtacctcaraaatggcagcgcatgtaaaatatagattaaggcctttaacctgatagggtgaaaaccttatagggcagtggatgaggatagaataaactagacagcatgagctttcagcagcctgaaatcaagatatctagaactgagacctcttggtagactgatgagaaattctagttctttccttgcctaggacagtcatacatcacctaaccatagggacacattctgagaaatgtgttgttaggtgatttcaatattgtgcaaacatcatagagggtgtttatacaaacctagatggcatagcctactacacatacacatctaggttgtttggtatagcctatttctgctaggctataaacctgtatagcatgttactgtactgaatacagtaggcaattgtaacacaatgataagtatttg

SEQ ID NO: 394520 - DNA, 571 bp, Homo sapiens
ttgttgctcctggggcaatagcaggcaggtgggtgaactttggcagagggcagatgtaagatttcgatggcagcttccaggcatccttctgccaatcattaaatgtgggggctgcaagtagccaagatcattgccagatgttctgtgattgcagcatttcttgatttcttgtctactagagacagttttcttgacatccactcaccctagccttccaatagtttcacaaacctctaatgcttgtcttttattattattattattattattattattattattattgtagtagttttggggkaacaggtggtgtttggttacacggataaattctttagtggtaatttctaaggttttggtgcacccatcacccgagcaatgtacactgtaccccatatgtagtcttttatccctcaccctgctttccacccttccccccgagtccccaaagtacattgtatcattcttctgcctttgcatcctcatagcttagctcccatttataagtgagaacatacgatgtttggttttccattcctgagttactttacttagaataaaggtctccaac

SEQ ID NO: 394521 - DNA, 575 bp, Homo sapiens
gtttagcacattcttcagaaaaagtttacgcactccctcccctcttcaccatttgtccttcmttgttgatttgcaaatattcttttcagatggaggcttttaaattaaaaagtgcctaggtttgtgccaatagggaaggaaagaattgcatttaagtgttaaaaggtaagcagatcatccagttaattagtggtatgttgtatattaagatatatgaatttgcaaaccttaaaaaagacaaataacatcatggttgcctggaagatgctgaaagggggcagacaccttgaacactgatcctacaaatagggatctaaaaatgccaccagggtatggctaatagatgctgaatgactttctatcacagaaaggagccatttttcaaaattcaagacaagatattatagtgctaatgaaggcaaaatgttatctgatgcataagggtctaggacctaatgaaagaaactagtataaatgcgggagtatctttgattaatatttgtgaaggataaggaattaatagtagacaaggaggcttaataatcatgtgtccccctaaaattatttataggtac

SEQ ID NO: 394522 - DNA, 516 bp, Homo sapiens
taaagaatttccatcagaacttctttatagttatccaaaattttgactaggaaatgtattacttttatattcagaaaacatgttatgaaaatatagaatttctttaaatataaatctcttttgctggatttaaaatgtgatgtaatttcccaygaatctgtctatagtggaaggtgagtgggcctgagggaggggaaggtagtggatggaagaaagcaagaactattagagggggaaaaagtgattgtgtgttcttgggtaggggagtagtttgaaacctgcatgtcaattttcaaatctccctggaacattcccataacggtttacttgagaaaaaaaaaataccttaagattgtccctgtacaattgccacaaagaaattacaaatggggacagaaggagggagttgtatttatagactttaataccagctcttatggcttaattttatacttaactgtatagatttctttaactcctgagtaaatgggttggaaattatttttcaagcttact

SEQ ID NO: 394523 - DNA, 516 bp, Homo sapiens
taaagaatttccatcagaacttctttatagttatccaaaattttgactaggaaatgtattacttttatattcagaaaacatgttatgaaaatatagaatttctttaaatataaatctcttttgctggatttaaaatgtgatgtaatttcccacgaawctgtctatagtggaaggtgagtgggcctgagggaggggaaggtagtggatggaagaaagcaagaactattagagggggaaaaagtgattgtgtgttcttgggtaggggagtagtttgaaacctgcatgtcaattttcaaatctccctggaacattcccataacggtttacttgagaaaaaaaaaataccttaagattgtccctgtacaattgccacaaagaaattacaaatggggacagaaggagggagttgtatttatagactttaataccagctcttatggcttaattttatacttaactgtatagatttctttaactcctgagtaaatgggttggaaattatttttcaagcttact

SEQ ID NO: 394524 - DNA, 516 bp, Homo sapiens
taaagaatttccatcagaacttctttatagttatccaaaattttgactaggaaatgtattacttttatattcagaaaacatgttatgaaaatatagaatttctttaaatataaatctcttttgctggatttaaaatgtgatgtaatttcccacgaatctgtctatagtggaaggtgagtgggcctgagggaggggaaggtagtggatggaagaaagcaagaactattagagggggaaaaagwgattgtgtgttcttgggtaggggagtagtttgaaacctgcatgtcaattttcaaatctccctggaacattcccataacggtttacttgagaaaaaaaaaataccttaagattgtccctgtacaattgccacaaagaaattacaaatggggacagaaggagggagttgtatttatagactttaataccagctcttatggcttaattttatacttaactgtatagatttctttaactcctgagtaaatgggttggaaattatttttcaagcttact

SEQ ID NO: 394525 - DNA, 587 bp, Homo sapiens
acacatggccctgcacagcccattatggctcacatgggaaaagcatgttgttggtctgtgtgctgaaggggcagcagtggggcgtgggggcatgagaycagaagagatgtctggaagtgtgaaatcagagaaaatgactatattgaaggcctgatttttcttagttatgaaatattatttgttattgggccttccgcagataagattctatagttcaaattatgattattttctattatgaactaaatttcatggttgcatggtgcttaaaaaatttctatgcacaatcttgtgacataggtttctatggaatagagatgtgtgtgatatatggaaactgggacacccgggaggcggaggttgcagtcagctgagattgcgccattgtactccagcctgagcgacagggcgaggctccatctcaaaaataaataaataaataaataaataaataaataaataaataaaaagatcttctttagcgctttgccttttctaagtgctagatgtagatcaatttttatttatctcccttggaatacagtatgtttcttagatccatgaattcatattcttattagatttta

SEQ ID NO: 394526 - DNA, 645 bp, Homo sapiens
gttgttggtctgtgtgctgaaggggcagcagtggggcgtgggggcatgagatcagaagagatgtctggaagtgtgaaatcagagaaaatgactatattgaaggcctgatttttcttagttatgaaatattatttgttattgggccttccgcagataagattctatagttcaaattatgattattttctattatgaactaaatttcatggttgcatggtgcttaaaaaatttctatgcacaatcttgtgacataggtttctatggaatagagatgtgtgtgatatatggaaactgggacaccygggaggcggaggttgcagtcagctgagattgcgccattgtactccagcctgagcgacagggcgaggctccatctcaaaaataaataaataaataaataaataaataaataaataaataaaaagatcttctttagcgctttgccttttctaagtgctagatgtagatcaatttttatttatctcccttggaatacagtatgtttcttagatccatgaattcatattcttattagattttagttttgcaaaactttcagccattttctttttaaatattgcctttccttccccacctccctctcttatttcctcttgtgtctctgggtggttgtagcctcatttt

SEQ ID NO: 394527 - DNA, 417 bp, Homo sapiens
tatctagtattattttcctttagcttaaagaacttttatttagtaaacttttgtcatataatctgctggtaattaattgtatgtcttcaattttgcattaaagtatttattttaccttcattttttgaagttttttcttggcgtggcataaaattccagcttgatggaattttttcctgtattttaaagatgtcattttattgtcatttggctttcatagttcttgacaaacagtcagtcatcagtcttactaatgctcctttgcagggtcctttgaaaaattatttctcactgcttttaaggtttttctctttgtctttgattttcagcatttgattaggttatgaccctgtgtggtttcttttgtatttattctgcttgaggttccctsaggtttttgatatttttggaatattc

SEQ ID NO: 394528 - DNA, 498 bp, Homo sapiens
atttctcactgcttttaaggtttttctctttgtctttgattttcagcatttgattaggttatgaccctgtgtggtttcttttgtatttattctgcttgaggttccctgaggtttttgatatttttggaatattctcagcaattgtttttccaaatattgcttctgctccattctctcctttctcttaatttgggactccaattgcatgtgtgttasaactattgatcatgtcttacatatttattttgctttttcactatattatttttttcctactagtgatttaatataaatcttttttattattttttctttgaacattctaatcctgtcttctgatgggtccagtctgctgacaaactcatccagcaagtttttaattttagatatcctgttttgatcccttagctttaaataatttcaattaatttttttcacagattacattcctaaatcatggttagccattaaggaaatgcattttatcaatatcaacaa

SEQ ID NO: 394529 - DNA, 515 bp, Homo sapiens
aaggcaggtaatttctgcacttacaactgaggtacccagctcatctcattggggctggttagacagtgggtgcagccggcagagagcaagcagaagcagagtggggcgtcacctcacccaggaagcccaaggggttggggaactcccttccctagccaagggaagacatgargaactgtgctatgaggaacggtgcattccagcccagatactacacttttcccatgtgctttgcaacctgcagaccaggagattccctcgggtgcctataccaccaaggccctggattgcaagcacaaaattgggtggccgtttgggcagacaccaagctcgctgcaggagtttcttttcataccctagtggtacctggaatgccagcgacacagaaccgttccctcccctggatagggggctgaagccagggagcccagtggtctagctcagtggatcccacccacatggagcccagcaagctaagatctgctggcttgaaattcttgctgccagcacagcag

SEQ ID NO: 394530 - DNA, 515 bp, Homo sapiens
aaggcaggtaatttctgcacttacaactgaggtacccagctcatctcattggggctggttagacagtgggtgcagccggcagagagcaagcagaagcagagtggggcgtcacctcacccaggaagcccaaggggttggggaactcccttccctagccaagggaagacatgaggaactgtgctatgaggaacggtgcattccagcccagatactacacttttcccatgygctttgcaacctgcagaccaggagattccctcgggtgcctataccaccaaggccctggattgcaagcacaaaattgggtggccgtttgggcagacaccaagctcgctgcaggagtttcttttcataccctagtggtacctggaatgccagcgacacagaaccgttccctcccctggatagggggctgaagccagggagcccagtggtctagctcagtggatcccacccacatggagcccagcaagctaagatctgctggcttgaaattcttgctgccagcacagcag

SEQ ID NO: 394531 - DNA, 591 bp, Homo sapiens
gatgccgttgctgggcaagtgttctcttgagagcctcttacctgaattcctgacgtcctaaagaatatctagtgataaatcttgtcaaagcaggaagggggtgaaggacatgaaagactttcttgtgaggttttttaaaagtccttagaaaaagctctgatctgagacctggaagcatgagcctcctctccttcagsccttcctggccctatggggtctgagtttgacgaaagtcatctcatccttgcacctgtgactttcctattgggtgtctgtagtgaagggattgggttacgaagtttaacctgagcatttcaggggtttggttcagggcagggcttgtttctacatcattagcaaaagggttaatttttcaatgttttctaaaaacaacctaaggtgctttagcagtacctggggatgctcaagtctcagtttgggttcaagcctgcaagtgaaaacatgcacctgtcttctgccctggcaatatcaatgtttttcactaatagtcttcccaacaccctcaagaaatctctcattagaagcaaggggagttatagaaggcgggatgggggaaaaatagggaaaata

SEQ ID NO: 394532 - DNA, 418 bp, Homo sapiens
gtgttgttttccagatgaggactataatagtacatttatatgatggtgggaattatcyagaaatgggaggaggcatgctataaaagtcttgtctttgggtaggcaagagaggatggggtctaatgcttaaaaaagcatggacagctcttttattattattataagccagaaggaagaggatgtgggttcaaatgcaactgggtgggtagatatgggagcaggagtgtgtggaagtcctcttcaggttgctcctactttctcagtatgtgaaagatggaaggttatcagctgagagtaatgaagaggaatgtgatgttggacatctggatggagaggaaaggtatgaagtcatcacattggagagcaagacagtgcagtaaccagtgaaacagtaggatcacagggtagaactgagggc

SEQ ID NO: 394533 - DNA, 502 bp, Homo sapiens
tgttgcctaggctggtcttaaactcttgggctcaagaaaccctttcacccttggcctcccaaaatgttgggattatagatgtgagccattatggctgaacctggtgttaattattaaatgtttggtagaattctccagtgaaactatctgggcctggagatcatttatttgtgagtttcaacttttacagttgttattaggctattgaaatagttttatattaagtgagttgtagtttttcctgttcaagaaattttcttttcaatttcattggtatctgctcttatttttatttcctttctcctgcttgcttggagtttattttgcccttctatttctaagttcttgaggtgggaatttagactattgactcaatcttttaaygtatgcatttagcaatgtaagtttctctgtcatcactgctttaattgcatcccagaaatttctgatacgttgtattttcattttctttcaactcaatggattaaaaaaaatttccgtg

SEQ ID NO: 394534 - DNA, 608 bp, Homo sapiens
cctcctttcagttatatcagtttgcttcacatattttgcacctctgtggtgtggtaatatgtatttaggaatgctatgtcttcttgggttgggatgaggtggcatcattactgccaagtgggggtgaaaagcttggacttgcacgtgttctccactgaactgtcagtggggggaggttcttgtcactacccagaggagatgaaagttctcgtttcccacttgactttcctttggcaccatcgcagaggggaggttggagagtcttgttacaacctggatattttgaaagtctaggctcttcatatgatttgtgttagaggagaaatggttgaggccataggtttcttctgtgatakttgattgtaggagaacagttattgtctaatagttttctgtcttgcttggctgtctctttctttatccaaaggctagaaatcagcctttatttatttatttatttatttatttacttatttattgcttgtttatttcatttttgtctctgctcattaccttttgtgacttgctggcttctctagcactcagttgggatatatgaggcaaaaagaagacccatgaatcttaccagtttgtagctaattgggtcc

SEQ ID NO: 394535 - DNA, 608 bp, Homo sapiens
cctcctttcagttatatcagtttgcttcacatattttgcacctctgtggtgtggtaatatgtatttaggaatgctatgtcttcttgggttgggatgaggtggcatcattactgccaagtgggggtgaaaagcttggacttgcacgtgttctccactgaactgtcagtggggggaggttcttgtcactacccagaggagatgaaagttctcgtttcccacttgactttcctttggcaccatcgcagaggggaggttggagagtcttgttacaacctggatattttgaaagtctaggctcttcatatgatttgtgttagaggagaaatggttgaggccataggtttcttctgtgatagttgattgtaggagaacagttattgtctaatagttttctgtcttgcttggctgtctctttctttatccaaaggctagaaatcagcctttatttatttatttatttatttatttacttatttattgcttgtttatttcatttttgtctctgctcattaccttttgtgacttgctggcttctctagcactcagttgggatatatgaggcaaaaagaagacccakgaatcttaccagtttgtagctaattgggtcc

SEQ ID NO: 394536 - DNA, 597 bp, Homo sapiens
ctatgtgacttttagctatatagattttaagagcaactagaagtcagcaattaaaagaaagcaaggtaggttaattttggtgggcttaatcaggctagccttctgtttccacaattgtcacataataactcaataaatggcagcttcattatgttggctgttatctttttttttttttttttttttgagagggagtttcgtgctcttgttgcccaggctggagtgcaatggcacgatcttggctcgctgcaagctccgtctcctgggttcaagtgattcttctgccttgggctcctgagtagctgggattacaggtgtgtgccaccatgcccagctaattttttttgtatttttagtaaggacgaggtttcaccatgttgacaaacctggtcttgaacttctgacttcaggtgattcaccaacctcagcctcccaaaatgctgggattacaggcgtgagccaatgcgcctggccrgctgttatctttataaccgtgatattataaagaggttgtgaaatagatcccgctaaaaacaaggatacattatcctcttcagatatctccagttgtgtctgtctggttcacttaaagaaaaa

SEQ ID NO: 394537 - DNA, 575 bp, Homo sapiens
cattgtttttacagcccatctaatttgggtgtaagcttggccagcctcgttgtcatcttaatatatattatttcagtttttcacacaatctgtaacttattttattgactttttaataaatagtgggggaaagctcttatttccatatggactgtgcattttggagaagcttctcakggctcaatactacagcaaatctactctggctcattttcatccctcccatttgaggtttatgtgtctctcctctcctaatttttcattagaatataataacagtctgaggaaagggtgatttgatatgtgatctatttcattatgttcttatggtaagggtagcgtctgaagtgggagagcatcactaatttttcggcgcagtaatttattccgcagtatttaaatgttgtcattttcacacggaggcacatgctgccacatctatcttcccctggaccagtctgtcttgctctttccttttcatctgttttgtttttgcatatttttttcataaattcgacagatggcctcttgatgaatccttgataatactgtcatgtaaagcagctaagactaga

SEQ ID NO: 394538 - DNA, 621 bp, Homo sapiens
aatagtttaattaaatctccccctacttactctatcatggtgcttcttaaccatacattttccctttttctgctgtctgtgggatgatagaaatgacagaaaggagagatactgcttgggctgtgcaaatgcctggatataaattaatcttaaattaatctggaaaacactaaattaaactaatatttaataagtttaacttttgggaagtaaattgtgatttgctccagtattttaaagtaggtggctgcagtagtgtagggtctgggcaatcagacacctcactggcagcttcactgtattagaatgcccttggttaggatttctttttgatatttctcactttctaagctagagcagaartcttttttttttccggtgacatttattaatctttgccctgcttttatgtaaatcacctctctacctaaatttcatgctttcaatccttcatggatcaatcatttgctgagttcccacactgtgctgggagctgggatgctatggtgaacaatacagccagatacctgccctcctggagcatcagactggtcaccacccctgtgaccagagagtacagggtgctaggagtgtgcagaggagggggcccccgcctggatc

SEQ ID NO: 394539 - DNA, 572 bp, Homo sapiens
cttattcacttcttaattcaaaagtttgccttttcagactgacctcttacaaggtaagaggaagcgaactagagggcctagaagggtcagtgtgagcatactaatcttctttcaaatataaaagaggaaggcaccctgggtaagactttttcaacttttttttcaacagcaacagctttgggtctccctgtaggtggggctgrgtctctgttgctgcattttaagatgggccttgaaacgggttcctctgttacgcctggtttcctcctggcagagacatgcagtgttgtgtctctcttaccaccagatctttagcacaattttggcccattcctgaaagaattacacagtcccaatcaacacactctcttcttcagagatgaatagcattatatacttgcgtatctgaataagcaagaaatacatgcatgtctcttagtgagcttcattgcctttgcaattttgtgattcatgggatcccaggacctgaaaaggtggaagaaaagtctctctagttcacgttaatgatacttgtatttttttgaacacctagcacatataagacacagtgc

SEQ ID NO: 394540 - DNA, 559 bp, Homo sapiens
ttggaattcctcaagactcaggcccttttatttttttttattctacttccttttctaatgatcgacatgcaaatgcccctccaaataccaactatacaccggtgtttcataaggattttcaatcactctttactcaatatctccacttagatatctcaatggcacattcaaactcaagacatccaaaaccaaagtaatgatattctcttctccccaaacgaagtcctcctcaattgtttcctcccttgaaaaatggcgtcacacatatcttgccttggttaaagaccaggtgtcatcctcgactgcttctttacttttatacttcaattcattgtcaggtaagatcaattttattccctaatyctcttttatatttgtgcaattctctttaccctggttccagatattagcaactttccagtggatctctctccatgtctacttcagccttcctctaatacttggcgtgtctgcatcctttctgggccccttcctgtccattctccacatagctgccagagcaatcttttctttttttttttttttataatttcaattt

SEQ ID NO: 394541 - DNA, 559 bp, Homo sapiens
ttggaattcctcaagactcaggcccttttatttttttttattctacttccttttctaatgatcgacatgcaaatgcccctccaaataccaactatacaccggtgtttcataaggattttcaatcactctttactcaatatctccacttagatatctcaatggcacattcaaactcaagacatccaaaaccaaagtaatgatattctcttctccccaaacgaagtcctcctcaattgtttcctcccttgaaaaatggcgtcacacatatcttgccttggttaaagaccaggtgtcatcctcgactgcttctttacttttatacttcaattcattgtcaggtaagatcaattttattccctaattctcttttatatttgtgcaattctctttaccctggttccagatattagcaactttccagtggatctctctccatgtctacttcagccttcctctaatacttggcgtgtctgcatcctttctgggccccttcctgtccattctccacatagctgccagagcaatcttytctttttttttttttttataatttcaattt

SEQ ID NO: 394542 - DNA, 552 bp, Homo sapiens
ggtaagtgtgctagaaatgtgctctttatgggatcrgggggccggggagaggacctcctcccttcattactgctgctggggaagttggaggttctcaaattctttaaaacaaaattagaactccatagcataaggctcatatcagaggagatggttctaaaagacctgaatattttatatcctattaacttataattattctaataataatttatctgcttttttggttcaaggagcacgaaatgaaactctctcatggtatccagcattccttagtcaaaaatttcagagagagaaagagggtaactcttgaaatctaaaggcctaagaacataagaggaaaaggaaggtctttcctcataagagaaggaggaaaaggctgtcagatgtgaacttgcccacccatgagaaaatatttggagagagtttgtagggacatatcagacatggcatgtctcttgtttacatcatggcttctatcactgaatccctacacaacaaagcaatcatacagcatagagttcctttgaatgctagtattcaacagggtaa

SEQ ID NO: 394543 - DNA, 552 bp, Homo sapiens
ggtaagtgtgctagaaatgtgctctttatgggatcggggggccggggagaggacctcctcccttcattactgctgctggggaagttggaggttctcaaattctttaaaacaaaattagaactccatagcataaggctcatatcagaggagatggttctaaaagacctgaatattttatatcctattaacttataattattctaataataatttatctgcttttttggttcaaggagcacgaaatgaaactctctcatggtatccagcattccttagtcaaaaatttcagagagagaaagagggtaactcttgaaatctaaaggcctaagaacataagaggaaaaggaaggtctttcctcataagagaaggaggaaaaggctgtcagatgtgaacttgcccrcccatgagaaaatatttggagagagtttgtagggacatatcagacatggcatgtctcttgtttacatcatggcttctatcactgaatccctacacaacaaagcaatcatacagcatagagttcctttgaatgctagtattcaacagggtaa

SEQ ID NO: 394544 - DNA, 485 bp, Homo sapiens
cctctcaatcactgagcttttcacattaggtgataccctacactacctggacaatgttgtagtagttttatgcttctgatagggaatcttgaggctaagagaaattacattgaaatgcgttgtttctgtgtatgccctgtgtgatcttatgcttctgagaaggtttggtaggctttgctcattgaaacaggaacttgatgtaaccagtaagtatgtggatatttagagcatgtgagrtcttcctcactatctgcaagccatctgaaatgctacaggtgtcagaagtaaaaccagtaaccctgatattggcagtagaaatgcaattggcatgaagttaccactgcagccacagttagagtttagaaagggtgttgagacaccaaatgtgggactggtgaactgaagatggctggatggttatccaataactgaggcatgagtctgaagagtatttgaaaggctactctgagagaatcaaattagtg

SEQ ID NO: 394545 - DNA, 561 bp, Homo sapiens
tccaatcagtctgatttgggtgcctaaactgcaagctatataacccaataagaacatataattcatgccacacttacagaggcattatattttgagtacccaaagtaacttgaattatacatattagaatttctaatcatgcataatttcatgtcataaaatagacaccctgtaacctcagaattayatttatctaccaaagatttccatggtaaaaactatcaccatctatacatactttcgagacacaatattttaaatcaggagtcaacagtatataactaatgggccaaatacaacctgcagccttaatttaatattcactggattttgttctgtatggccttacagaggtaagaataatttttatagttttaagtaattgttttttaaacaaagaaagaaacaaaaacaaagaagactatgcatgagagggcatatgtggtctgcaaagcctaaaatatatactatctggccctttagataaaaagtttgaagacttgttttaaatgatgagttgcaaatacttattttcatttgtggtatgtaatgacagcataa

SEQ ID NO: 394546 - DNA, 605 bp, Homo sapiens
acagcacaaatgattctccagatattctttcctgctgtggcaacygaagtgaccatgtgtttcagtcattcaaccacaaggtgagggagtctctctgagcttgggaccccagtgactgtgtgtcacacagtctcctgtcaacccacatggcactggtagtgtgagctggaaataaatatctgttctgttaagccactgacatttttgtgaccagggcacaatgtagtctatcccaactaacaagaggagccacttaaagaaactgaggaggagtcatagagaaatgagaagatagagaggaaaagggcatcgtgattccagataatcatttcatcaacaacttgtccttaatacagcttcactctacttcaactatttccctgaatccagaaagcatgtacaaaagcactacatcacaaaagtataaacctgaaatatgaaaactaaatgcatataagcagaccaaaatatttacaagatgtaaaacattaaataaataaaccattagaatagtcctattgaattgagcaaatgaaatccaatagaacagctgttaatattgccttccctcataaagagaaaccttgatgactcatttagagctt

SEQ ID NO: 394547 - DNA, 622 bp, Homo sapiens
acaggatctttgatacttatgatcatgtcacaggattaagactgtcgatccaaaattatggatgaatgttttcaaagaaggtatctctaaaagaccagaaactaacttgtccacaggtagaagagagttaaggacctgtgcccattggaggatgcaggttcaaggatacctagagaatgcaagaggagcttcattcaaacatcctctaacccatctggtgagaaatatgttctcaaatcctcgacagaggtaggaccaagagatcatgacaaaggtataaaaacccaaaagaactctagctacttaagtcttcccaaagagccacatcacataggagaaaattcctgctacttgagaaagaacaaaacaaagcaactcgcatgcatctgggattataaaataatgacaatattaaccacaattactgaataaaagcgtragttactaaaacccattgtaaagtgaccagggtcactggggcagggagtagagaattagagccaaacacctagtgatttttttcaacttatatgatatgagtttcattggaaatgtatagatcttgagagagtagtatatcccccaagttaatctaaatataaacagccactattcagatttt

SEQ ID NO: 394548 - DNA, 621 bp, Homo sapiens
gttcacttattttcagtgataatcaatttatcctgtgtattttttattttagttattatagttttcagctataatatccatttggtttttttcatagtgtccattttgctgttgtgattccctattgattctatcatttttactacattttgctttaattatttgaacatattttaatatacttctttaaatatatttataaatcagctttaacacttttgtctgctaaatccaatatctgggcccactcagagtaagtttctatagattgtgtgttttttcccctgagtgaaggtcacaattttctatttctttcaatgtctagtaagtttagtcagaacttaaagttgcaaataataaattggagatttgttcttctgacaactggcaattcacttcctggattccaactgaagtatctgttcytcccatggtatacagtcactgaggtctctgctcagattttttcttccagctttgatttttagcctggtcccttagtgatctttcctactcccgagtgacttaatgatcagccacggatttgggaggagatatactcagtctgagcttcatgctggttaaggaatgcaatctttcaatgtctcagcaaactcccac

SEQ ID NO: 394549 - DNA, 519 bp, Homo sapiens
ggttgctttgtgaaagtattgtcaaaatgagaggtttgatgtaggacataaaaggaaaggatatgctaatcaacccaagactgggcgggaagcagtagagtgagtgaaaaaagaattaggtcwacatcagaggaaacagaaagataatttccaaaaaaggtaaaccaagctcttggagatttacagaaaaatttgtgttttaatctgggtcttacccactaccctgtcaatcgtccatttttaggagagcctatcctcttagagttgtataattttatggaacaaaattacacttttagttagaatttattttattctgttgtggtagagcatgatacttcttcagtatggactctggcatgcttttacaattagattgttgatttaaaatgtaaattattgagcctcaccctcagagaaacagattcagtagatatggggttaggctaagatctacattttaatgagctacacaaatagctctgcactgataatttttcccttctgcttcctgctgtg

SEQ ID NO: 394550 - DNA, 572 bp, Homo sapiens
tggccagaaatcaaagcatgagtgatcaaatgtaaaagttatttccaggagaagataaaagcctcaaagctgaaatctggacattagtggtaggtagcaaaatagaaatggaagaagacaacttgtcaaaaatgcctactttgtgccagtttatatacattatctgatctttatggtaattgtaggaaaaggatgttatagtacccactttattattgataacatcaggcctcagagaggttaagttccacttctgaggtcaaacatctagtgayagagacaggattgaatccaaatctctccaacactttttctttgcaccccatagaggacctgaggccacttacttagcaagtcttgacgaccttttttattttctacatcttcacccaagaccctcctgctatctacccattctatagaatcagacttctacttttccctatttttagatgtatttggagaatgtagtctatcatcctggctttttccttttagaacaaaagaaaacaaagcaatgcagaaaaggacatgaacacagtgtaggaaaaaagaatgccatggaaagttag

SEQ ID NO: 394551 - DNA, 572 bp, Homo sapiens
tggccagaaatcaaagcatgagtgatcaaatgtaaaagttatttccaggagaagataaaagcctcaaagctgaaatctggacattagtggtaggtagcaaaatagaaatggaagaagacaacttgtcaaaaatgcctactttgtgccagtttatatacattatctgatctttatggtaattgtaggaaaaggatgttatagtacccactttattattgataacatcaggcctcagagaggttaagttccacttctgaggtcaaacatctagtgatagagacaggattgaatccaaatctctccaacactttttctttgcaccccatagaggacctgaggccacttacttagcaagtcttgacgaccttttttattttctacatcttcacccaagrccctcctgctatctacccattctatagaatcagacttctacttttccctatttttagatgtatttggagaatgtagtctatcatcctggctttttccttttagaacaaaagaaaacaaagcaatgcagaaaaggacatgaacacagtgtaggaaaaaagaatgccatggaaagttag

SEQ ID NO: 394552 - DNA, 634 bp, Homo sapiens
agtggtgatgattgaacaactttgtgagtatactaaaaaacactgaattgtgtactttataaggatgaattttatagtatgtaaattatatctcaatgaaactattactttttaaaattcataggcacaaataaataagatctcttgttatggctctttacaaaaccattgtacaccttctcaatatagctcagcctggaaacacagtgcataagcaacattaacaaaaatggattgagtttttaagaaagcaaaacagcacttattttaagatgggatttaaataaactacaagtttcatctgtgtttcctattagtccaatagccttaaatttattccttggcctacaatgccaacagaaattaacarcagtgataatctcaatgaatctgttaactgattcttctggactttacttaaatatattccagtataaagccagctttattttcctacttctatgggtgattatagccttaggcagtaatgcttctaacaaatataattcacattctgatcgatttgtttctttattatgctatttattgatactctgcaataattgtattgctccttaagttacactaataacgtattcaaaactaacttgtttatagtgcattttactagaag

SEQ ID NO: 394553 - DNA, 583 bp, Homo sapiens
ttttaagatacattcatagccataaccacaggaatggtatttaaatcatggaactgaatgagttcatatttaaatcgtggaactgaatgagttcatcaagggagtgcatgagtacagagaagaaatttggactcattgctgaaagtaccaatgcctgtggctctggaggtttatctcatcaccactcgttttttcttaagttcataataattaaacgtagtttcaaacctctgattttcccatttatctcagaccatttgtgctgctataacagaatccctaatactgagtaatttataaaggacagagatttattggctcacagttctgaaggctggaaagttcaagatcaaggtgccagcatttggagagggccttcttgcttgtcatctcatggcagaaggtgagatggggagggggaacaagagttaacctgaatgaatccttgtataagaaacacacccccacaataaaaggaaaaaattaccaagttaatggcattaatcccttcataagggcaaagycctcatggcctaatcacctcttaaagataccactgtttaatactgttaaaatggcaatc

SEQ ID NO: 394554 - DNA, 560 bp, Homo sapiens
acactttacactataattggtggcagattgaataagaaatatgtttcccaattctcaaatgattttcccacatttcaaaaacttttgtaaaacatagtcttatgatcattgtatgctttttgtccttctccctaattcctacacccttgtaaccccacctgttttaatatattgcatactaagccttcttcttagagttgactcatttagaatactattgctttatatcacttcttaatggaagaagctctcagataacatctcaaggacatccaacgttgttttcactacactgggacttttaytgatagaaatgtgtaataacatattatgatccactctctgattggcaagtactaataactggatgattttaaaagaactgtgtagtctgcccatgtcatcaccaaggcaatgggtcatttctgaataaacataggtcgcagagtaaaggtgttcctacacctcccaccggccccgcctgctggcattgctttggggcctgacagcttgccttgtacatgctgtccctcagtaaatggctgcataataaacaattg

SEQ ID NO: 394555 - DNA, 631 bp, Homo sapiens
tagctattagtatattggagtctatctctttgtagctgctctaatgttacttgctttatatatctgggtgttccagtgttggatgaatatatatttacagttgttatattctcttactgaagtgtgtcattatrtaatgactgtctttgtctctttttatagtttttgtatataaatctgctttgtctgatataagtatagctactcctgctctttttattttttccatttacatgaaatatattttttcaagtctttattttttatctatgtgcatctttatgggtgaattgtgtttcttgcaggtaacagacattgggtcttcattttttaattcattcacccaatttatgtcttttgattggagtgtttattccacttgcattcaatgttattattgataagaacttacttctgacattttatttcttttctgattgttttgtggtcttctcttcctttttttcttccttcctgtcttcctttcagtgaggatgatttcctctggtggtgttttaatttcttgctttttattttctgtggatctgttttatgttttttgatttgaggttactgtgagtcttataaataatgccttataacccattattttaaactgatgacaacttag

SEQ ID NO: 394556 - DNA, 658 bp, Homo sapiens
aattacctcatttgattttcactaccttccagcaagttagattttattatgttcacttcactgatgagaaagccatattcaaagagattaagtgttccactcaatgccataaacgaatagagaagaaatatgaaacttgaaatcatatctgtaagattccaaagttcatgatctctctgctatactgtcattcaaattaattttaaggggctagctgaaaaatgtaaattgatagccctaagcaataactctgctgattgagtgaatggtggtgtaatgcttatagacccaggaggcaaacattctggttaccaatacttggcatttgtatgactttaggtctctgagtctgacattattaacctgtaaaatggaakaaaagacatgctttacctcttacattaaattatataattaaaaattaatatatttacttatttgttgaattctactatatacacaaaatagtttcagaatggttacataaatggttacaggattacaatggttacaaactaaaaacaaatctgctaagaggaattagagatttgccattattttgtttttaaactgaaaggatgtgttcaaaatacatactcaacacttacatcatttctccccacactcttttcttcaggacagttatgttattaatttg

SEQ ID NO: 394557 - DNA, 658 bp, Homo sapiens
aattacctcatttgattttcactaccttccagcaagttagattttattatgttcacttcactgatgagaaagccatattcaaagagattaagtgttccactcaatgccataaacgaatagagaagaaatatgaaacttgaaatcatatctgtaagattccaaagttcatgatctctctgctatactgtcattcaaattaattttaaggggctagctgaaaaatgtaaattgatagccctaagcaataactctgctgattgagtgaatggtggtgtaatgcttatagacccaggaggcaaacattctggttaccaatacttggcatttgtatgactttaggtctctgagtctgacattattaacctgtaaaatggaagwaaagacatgctttacctcttacattaaattatataattaaaaattaatatatttacttatttgttgaattctactatatacacaaaatagtttcagaatggttacataaatggttacaggattacaatggttacaaactaaaaacaaatctgctaagaggaattagagatttgccattattttgtttttaaactgaaaggatgtgttcaaaatacatactcaacacttacatcatttctccccacactcttttcttcaggacagttatgttattaatttg

SEQ ID NO: 394558 - DNA, 570 bp, Homo sapiens
gtgtaactaagtaaccaatgggaagcggctagaggggtatttaaaccccccaaaattctgtaaccagcactttagagccgcttgctcgagcctgctcccattctgtggattgtactttggtttcggtaaatctgtgctttcgttgcttcattcttttgttgctttgtgcattttgtccaattcttagttcaaaatgccaagaatctggacragtcctagtcaagaccctccactggtaacaatatttcagccatctggtgaagatcttctagctgggtggatccctgtaagaatgtaattgacaacaaccaagtttaatgctgctatgtctgcgtaattagcgtatatccttcttagaaggctttactcttttccttcagtcaattcatgccttaactcattatttagcattctaaattaaacttaaatattatctcttgtgagaaaccttccccaaacctttgaggattattctatcttttcttatcataaaacttttttctctagcaattatgtaacttattatagttattaaaattattgactctatttttgccccaataaaacatt

SEQ ID NO: 394559 - DNA, 579 bp, Homo sapiens
gtcactcccacaacatgtgggaattatgggatctacaagatgagatttaggtggagacacagagccaaaccacacacacacacacatgcacacacacacatatatgtatatatatacacatgtgtatatatatatatatacatatatatatatatatacacacatatatacacatatatacacatatatatacacatatatatatatagagagagagagagagaaagaaggaaagaaatgagaaatgaagacagtgagaaagacaaagagagacatttattatgaagtattggccaatatgattacggaacctgaggtcccatgatctgccatgtgtgagcagaaagcccasaaaagccgatggtgtagttcaagtccaagtccaaaggcctgagaaccagaagcactgatggaataagtgccagtctgagggcaggtgaagactcatgtcccaggccactcaggcagagaaagcaaattctcctttcctctacctttttgttctgttcaggccctcagtggattggatggataatgcccatccacactgggagggcaatctactttaccagtctactg

SEQ ID NO: 394560 - DNA, 558 bp, Homo sapiens
ttttacttggaattttaaatcaccaaatgtactttttgtattttaaacttgttatgtgtgatacttttaytttcctcttatttcactaagattacagatgctagacaacccttctctcagattcattggcattttgttaaattgaatttcttttgcctatcttgagaaatgttaatctgaatagaaatgctctatttttaaacagaaacacttgttaaagttacacttctagaatacataaatgtgtggaaactttagaagcgatgaacacttttccctgataaatgtcccactatttttgattcatggtgattttgttttcttccacatatattaaaaacacagaacatttcagtctcatactttggcaaatctcaagtaaacactccagaactggcaaactgattgcaatcgagatattctttacaaatatctttaattgcacatttcaaaactaagtcctcctgagcttgaaatttctctcaagagaatgtatcatgtggagtttagtagaaggggcaagcgcttgcattgctccttattcctcatagtggtatt

SEQ ID NO: 394561 - DNA, 583 bp, Homo sapiens
ccagctctttgggaggctgaggcagccagatctcttgagctcaggaattcaagaccagcctgggcaacatggtgaaaccctgtctctaccagaaatacaaaaactagtcaggcgtggtggcacgcaccygtattcccagctactatggaggctgaagcaggaaaatcacttgaacccaggaggcataggttgcagtgagctgaaatggcaccactgcactccagcatgggcgacagagccagaccctgtctcaaaaaaaaaggtaactttagttgttttcctcttcttatctataaaatagtgatagccatatcagtccttcttaactcatagacacttttaaaagtgataaaattactgtatgtactatcaattcaaagaggcataggcgtatttcatgagaatttgttgcttgtttcaatgattttaaaaaaacacaatcttggagatatagtttcaaattttacctgtttatattaaaggagataaaaatgatggctgtgtgtattttcacaagtgtgtgtgttttattggaaaagaatagatagattccagttccatttgatggcatactgtgtatttt

SEQ ID NO: 394562 - DNA, 532 bp, Homo sapiens
ttttattcttagtaatcaacaggtacttatgaaacattctctagggactttaatctcatttgggaaacagtttttttttttttcttcactgattcagccagaggaagaaaaaaggcacaaagaagagaacacatttgatatccattaattatttgcagaatgacagtttccttttgtataaataaatgataataatgataataacagcagttaaacatatagctcttaccatgtgccaaacattctaagcattttacatacatttgtttaaacctcaaagaaagccatgaatgcagtattatcatctcaactttacatgttgggaaactaaggcacagaaaggtcaactgatttgtccacaatcatacaaacagaaaatgagagcaccgggattctaaccyaggctaactccagagtttgtgctcttagccatgaatatgagaccaccaattccttaaacctggcatctggtataacatagtcaggaactgatcctgggttccagaatacaattttactttaaggaagccaa

SEQ ID NO: 394563 - DNA, 551 bp, Homo sapiens
aggtgtccattggattaaataaactgcagattttatcatgtgagaagccacatgttttgtattataaaggcaagctgctactcaaaagtaygacaaggctgctgatatatagctcaacatccagatctctgatttaccctttaatttatatgacttaaaagactcttataaatataaattgggagcccactcttctacttcagagatatgagaaagctgctgtttaaataaattcactattcaactgtttcagcctatataccagcaacttcatatgatttcaacttaataaaatcatgtatgccaacttcattgagggcagagtgttttgttgtttttactttttgtttcctgttatatacctagcagcatccaaaacagtgctttaacataaggaataataaattttgtttagtttgtggaataaacatagtcagtagaaaaaaataaaaattgaggttagttaacaactttaattagcaatgaaaacaatggcttagattgagcactcactgtgtactaactcgtcactgagttcagcacttcagccc

SEQ ID NO: 394564 - DNA, 582 bp, Homo sapiens
ggtcagtgtatgtggctacattaggcattatacttatcattagtaattattgataaactaactaaaattttttaaaaagacaaaaatcaaagaaaaaaacaatttgggaactgaaatgttaaaataatattttccatactttctcattaacagtatttcaaatttttcagaatttgcaatgaattttgcaattattttctagttaattttcacaaaactgccataaagaaagcaggtgttacagattgtgtgattaaaatgatgtaacagttgaatattttaaactacatatcatgctccattgttttaaatttattattattaaaagataaggaaattaaagttcatgtgctaagctttcaactaagagattataatgtcaatttgatactatattgttaagattagtaagtagattttagaaaaaacaaacacaatatgaaaattgcataaactggaacctacaattgtagaacagtaaaaatttccttgattttagctttagctctgtgatgatgaagcaagcatgcaaaatatttytgaaggcatacatcatatatgtttgacctggtaaaattaggc

SEQ ID NO: 394565 - DNA, 569 bp, Homo sapiens
aacagaaccagggggaaacaggcattaaattcttactgagatataaaaagtaaggttttggaagagtgcatgatctagttcttatttcattttgttttgttttccaacttcagaatagtttttaaaataaaaagaaactttttgggtcgcaaaaaaaaaaaaaaaaaaagaggaagataattccgtatggagttagatactgcyggtggtctgtgagatgaccaaggcccagctccctaactcagtagtttcatatgcatatttctgaaccaattttcagtttagcatctcaggatgagtaagagttgagtagatgggaagagggcagtgtgttttactaaaaggaaatagcatatctatagacaaggagaccttcatattcacctttcccctaccaccaccattaggtgccaatgtcctcattaattgctttatgataaccaaccaagacctgactccacaggccacatatagtggacaaaagtcatctttgcaacaatattaatatagtttgctcactcttctacgcttttcagggtgttcctaaagctgtgtatccattagttgaa

SEQ ID NO: 394566 - DNA, 605 bp, Homo sapiens
tcttgccaattgtggctttagtagtgactgtcctaactaagactttttatcacctacagacaattgtcttgctttggtcctctttagaagatggattatagtcagatattggactttgacagatgctcttaaatgcaggtttctgataactttggagattgtgacattagaatagaggaaaaactttttcaggayccatggaaagctaaagtgttaatgaatatcaagcaggacaggagctaactgcatggaccaaactaagagaagactgaagtaagcttttttgaatttttgcttaaaatgttgctgatcctttgtttttcagagccaagcaaacttttcttttgcactaatcacagcttttaacaattgagtaaagtatactcctgtcaacaaaatttggggcatgtttgtttctctctacttgatttctccaatatttgtacactatttgtaaatatccttaacttacggcaatatttttttcagaagtgcaataagaatctgttttcatttgtaacaggacataattggagaaactggttattttaccaaggctttgactgaaatgatgttttcttttaagaagtcaaacttgacttata

SEQ ID NO: 394567 - DNA, 584 bp, Homo sapiens
attctaaaatttatatgcaatgtcaagggacactgagcagccaaaacaatcatgaaaaaaagatcaaagctctaggactcatacttcctgattcaaaacttactacaaagctaccgtattcaaaacattgtggtactagcataagaacaggcatataaaccaatggaatagaatagagagcccccaaataaataaattatcatctatatggtccagtgatttctgacaagggtgccacaactattcaatgggggaaaggacagacttttcaacaaatggtgctgggaaaactggatatccacatgcaaaagaatgaatttggacttyttttttttctttttttttttttatgttaatttatttatttatttatttatttttttaattttttttttaattatactttaagttttagggtacatgtgcacattgtgcaggttagttacatatgtatacatgtgccatgctggtgcgctgcacccactaacgtgtcatctagcattaggtatatctcccaatgctatccctcccccctccccgaatttggacttttacctaatgccatatgcaaaaataaaccaaaa

SEQ ID NO: 394568 - DNA, 569 bp, Homo sapiens
caaaacttactacaaagctaccgtattcaaaacattgtggtactagcataagaacaggcatataaaccaatggaatagaatagagagcccccaaataaataaattatcatctatatggtccagtgatttctgacaagggtgccacaactattcaatgggggaaaggacagacttttcaacaaatggtgctgggaaaactggatatccacatgcaaaagaatgaatttggactttttttttttytttttttttttttatgttaatttatttatttatttatttatttttttaattttttttttaattatactttaagttttagggtacatgtgcacattgtgcaggttagttacatatgtatacatgtgccatgctggtgcgctgcacccactaacgtgtcatctagcattaggtatatctcccaatgctatccctcccccctccccgaatttggacttttacctaatgccatatgcaaaaataaaccaaaaatagatcaaagaattaaatataaacataaaagtataaaactcttacaagaaaacagaggccaaaagctctatgacgtt

SEQ ID NO: 394569 - DNA, 569 bp, Homo sapiens
caaaacttactacaaagctaccgtattcaaaacattgtggtactagcataagaacaggcatataaaccaatggaatagaatagagagcccccaaataaataaattatcatctatatggtccagtgatttctgacaagggtgccacaactattcaatgggggaaaggacagacttttcaacaaatggtgctgggaaaactggatatccacatgcaaaagaatgaatttggactttttttttttctttytttttttttatgttaatttatttatttatttatttatttttttaattttttttttaattatactttaagttttagggtacatgtgcacattgtgcaggttagttacatatgtatacatgtgccatgctggtgcgctgcacccactaacgtgtcatctagcattaggtatatctcccaatgctatccctcccccctccccgaatttggacttttacctaatgccatatgcaaaaataaaccaaaaatagatcaaagaattaaatataaacataaaagtataaaactcttacaagaaaacagaggccaaaagctctatgacgtt

SEQ ID NO: 394570 - DNA, 543 bp, Homo sapiens
ttgtttcttttctcttgctgatttgagaatcctctctttatccttcacctttgggagcttgattattatataccttgaggcaatcttctttgggttaaatctacttgggttctacaaccatcttgtacttgaatattgatatctttccttaggtttggtaagttctctgttattatccctttgaataaactttccacccttatctctttytctaccttctctttaaggccagtgactcttagatttgcccttgtgaggctattttctagatcttttaggcatgctttatctttttgtgttacttttttcttttgtctcctctgactgtgtattttcaaacagcctgtcttcaagctcactaattattttttttttgcttgatccattctgctgttaaaacactttgatgaattgcattttcaatttctgcctgattcttttaaattgctttaatctctctgttaaatgtatctgatagaattctgagttccttctctgtgttatcttgaatttctttgaatttcctcaacacagctatttgaa

SEQ ID NO: 394571 - DNA, 544 bp, Homo sapiens
gttgggtgacacaagccccctcctgtggccactaccagtgagaatttgctgggtcagacctgaagttagcataggcctgggtctccctcaaggccctctgtaacttctacttggctactgcctatgttcacccaaggctctagggttctacaatcagtagatggtgaagtcaggtgtgcttgtgttctttccttcaggttggcaagattccccagtccccaggtgagtccataratgccatctaggagctggggactgtagtcaaaaaccttagatgcactattctactgtggctaagctggaactcaaaccatgagatgcagtccttcccactcttccctccccttttcacaggcagaggaacctctccttgtggccaccactaccataggcccacataaattactgccaggttacttccaatgtttacttaagacccaagggctcttcagtcaactttggtgaatgctgcctggcctggttcttaccctgtgttcccctctgatccaggtcaaatccagaaataccatccaagagccaaggc

SEQ ID NO: 394572 - DNA, 582 bp, Homo sapiens
ctgcctggcctggttcttaccctgtgttcccctctgatccaggtcaaatccagaaataccatccaagagccaaggcctggaataggggactctaagcacttacttggtgctctacgccactgtggctgagctggtacctaaggtgcaagactaagtctccattagttttcctctgctgttctcaagcagaaggtgtctctcattatagccaccacagctgagaatgttctgggtctcarctcaagcatgcgcatctcagagtctcacacaaggcccataggcatactctctggggatgattttcatggcccaacagctctttggtcagcaggtgataaatcctgtaaggactgggttcttcccttctaggtgtaggttcccttctggcccagggtgtgtctagaaatgtcatccaggagttggggcctagaatgggagcctcataactctgcctgatgctctattctactgtggctgagctggtatccaagatgcaagacaaagtcctctttatttttccctcttctcaagcagaagaaaaaactcactgtcattgctgcaagctgaactgcctagggttgg

SEQ ID NO: 394573 - DNA, 579 bp, Homo sapiens
aggttctcttagcagctattgaatctgtgaataaattcaacttttttttttaacctttacctccagtttactttttattatattgtctctctgtgttggtgataacttagatatattagttactatacaaaaggtaatgatgattttgtttctgtttttctggagatmaggaaaagggggtatgcatataaagtagcagagaaggattttagaatttgggataaaaatgtttgtttttcagtacttgtgaaacatcataatgggatgattgagggttattttctgaagatttaaagacatggatatatatataactataattggaggaagatgtgatgagcataggctgaatgattcatccaagacatttttcaggcttaaaattatgagattctccatcaggcatgttaagcagctccccataaacttttctctatacttataaaaagattttgtttgtcattcttcctctttgtgtacaccaccaaacccatgccatggtagcaaataccacatgtacacacacatacacacgcatacacacacaacttttattaatgtacaatagtaaactatagc

SEQ ID NO: 394574 - DNA, 382 bp, Homo sapiens
tttggctctgtccccacccaaatctcatcttgaattatcatatgttatggtaggaaccccatgggaggtaacttaatcacgggagcagrtcttttctgtgctgttctcatgattgtgaataagtctcatgagacctgatggttttaaaaaggggagttttcctgcacaaactctcttctcttgtctgccaccatttgagatgcacctttcaccttctgccacgattgtgaggcctcccagccacatggaactataagtccattaaacttattttgtgagttgcccagtctcagtatgtctctataagcagtgtgaaaacaaactaatagagtaaattggtatcagaagtgggtgctgctgaaaagatacccaaaaatgtgga

SEQ ID NO: 394575 - DNA, 608 bp, Homo sapiens
aatgatatggtttggttgtgttcccacccaaatctcattttcaattctcatgtgttctgggagggactctgtgggaggtaattgaatcataggggcagtcctttyccatgctgttctcatgatggtgaataagtctcatgagatctgatggttttaaatagggaagtctccccacacaagctctcttctcttgtctgccaccatttgacatgtgcctttaacctttcgccatgatcgtgaggccttccagccacgtggaactataagtccattaaacctcttttgtttgtaaattgcccagtttcagatatgtctttatcggcagtgtgaaaatggactaatacatatgggaaagccaaggttcccaggaagaagcctgcaagaggggtagaattctcacagagagactctactagggaagtgccaaagggaaatgtaggattggagcttccacacagagtcccaaatgtgggctagtggagctgagggaatggagtcactctcctccagattcctgaatggcagagtcactgggagcttgcaccctgagcctggaaaattcacaagtactcaactccaacccataagagctaccacataggctgtgc

SEQ ID NO: 394576 - DNA, 468 bp, Homo sapiens
ttctaaaagagatgccagtagagctattactttctcaataacctattcgatctctggaatcagttttcaacatgttacctgccttaagtgtgatcattaagtatttcttatagtgatcaatttatttggaagatactatattggagtttagaaagagctgagggcattttaagaggtgacatttgattacctatacaaattttcacctactgacataatagcatatttataataaatggaagctataaaatgttaacatgagtaattattttggcaatatcgtttgttaaatgctrtagtctattcagatagtcattaataataacccagggttgtgatattctcaatacttatagaatctgcctggactctctattgagtagaaatttatggtatttaactactgtattccaaaaagagcatttgtaataataagaactgaaaatcttttgtttcctggttgtgtca

SEQ ID NO: 394577 - DNA, 591 bp, Homo sapiens
tattcaggacataatgcttctggcaatgatgacacacagggtttctaggagcttaatatgattttttaaatgttccatcctactcttagtatgaagtatttactagatagctcatctctccttgtcaaacctgatacaagccctatccgatagagaacatctgcataatgatgatctcaatagacatcaaaaaatagaaatatctttcttattagttttttcctggtaatakctgctctttatgatttaaactcaactagtttcttctaattattatgttctattgagctaaatatatacacataccacttttctctctcttgctctctctctgtgtgtttgtgtgtgggtgtgtgtatgtggcggggtgtgttttgctatattttgttttcatggcattttgtttgctgaacatttaatacaattcaggtcaacatgacctgtttattttctgtaattttgagcttggtagagtctatacttatttaagggaactcaatctattaaaagctattgagggattttaatttaccaagagaagacttattagatgactttaactaactaggctctcagctagcataaatgaca

SEQ ID NO: 394578 - DNA, 647 bp, Homo sapiens
aaattacaatgcatttccaaagaacatcatcattcagaaattattaycaaaatcatatgtctgtgtcatataggtaacctggcataaaagtggcagcactgcagttcttactgtgtgtatgtatgtggagtgaacacaagcaagaaatatgcactctaagtgatgtggccaaatgcagaattaagaaatattaccctgtaagcttgtcagtagtgtgcaggatgcagtctcatttttctaatttatactgctgcttccattggaattgacgatatatatttgagagaatagtacataaaacagtatgccctttctctttacagtggcacttttaactctggctttttaggtggcattagtcatgaaaagtccaagatctgagcaatgccaggacaatggtgcaaatggtcaaaatgtgaagaactgtgaagaatcagattttaacttacttgtaagcaaacagtttcttggatgttggcagaagacctgagtcttcttggacaggagtttgtattactcatagtaatagcagtacccagggtaacagtgttttttgtgccagatccttgaaccccagtttccacaaggagatgtaaagagagccaggtgatacctgcatatgatgtgtattatattacacaagagaa

SEQ ID NO: 394579 - DNA, 619 bp, Homo sapiens
ttctctgcccttttgagatgtaaattttctgcaacctaggaatatctttctcgagaacttggaagccatcactatcatcaagatagttccccatttcccaatctctgtgggaaagcaggagcataacttcaawaagagtcaatcagaaaacatggatagcctgatcacgttgaccaacttcctccagcatcttcctgtacttctctactagctcatcctagtgtttataaacttttctgtcgttcatgttaatggaattgagttcaatctttctcctctattgcaatagtctgtctttaccattgcaataattttgaataatttttagactgtctgatgtaatttttattttgcaatacatatccagaagcacttaggaagtgtctgacatatttctaagtgctttcaaatattaatttgtttaatttcatgaaaatcctgtgagacagactgtaaattgaaaataaatcgaagttccccaaccaactgaattagacccctcctcttggccaaggagactttaaagtaaacttgaaaaactagttcaggccatggtgagaaggggttgggggtggtcagacatgcctcattatgcttcttcctccctttggaattcagg

SEQ ID NO: 394580 - DNA, 619 bp, Homo sapiens
ttctctgcccttttgagatgtaaattttctgcaacctaggaatatctttctcgagaacttggaagccatcactatcatcaagatagttccccatttcccaatctctgtgggaaagcaggagcataacttcaaaaagagtcaatcagaaaacatggatagcctgatcaygttgaccaacttcctccagcatcttcctgtacttctctactagctcatcctagtgtttataaacttttctgtcgttcatgttaatggaattgagttcaatctttctcctctattgcaatagtctgtctttaccattgcaataattttgaataatttttagactgtctgatgtaatttttattttgcaatacatatccagaagcacttaggaagtgtctgacatatttctaagtgctttcaaatattaatttgtttaatttcatgaaaatcctgtgagacagactgtaaattgaaaataaatcgaagttccccaaccaactgaattagacccctcctcttggccaaggagactttaaagtaaacttgaaaaactagttcaggccatggtgagaaggggttgggggtggtcagacatgcctcattatgcttcttcctccctttggaattcagg

SEQ ID NO: 394581 - DNA, 619 bp, Homo sapiens
ttctctgcccttttgagatgtaaattttctgcaacctaggaatatctttctcgagaacttggaagccatcactatcatcaagatagttccccatttcccaatctctgtgggaaagcaggagcataacttcaaaaagagtcaatcagaaaacatggatagcctgatcacgttgaccaacttcctccagcatcttcctgtacttctctactagctcatcctagtgtttataaacttttctgtcgttcatgttaatggaattgagttcaatctttctcctctattgcaatagtctgtctttaccattgcaataattttgaataatttttagactgtctgatgtaatttttattttgcaatacatatccagaagcacttargaagtgtctgacatatttctaagtgctttcaaatattaatttgtttaatttcatgaaaatcctgtgagacagactgtaaattgaaaataaatcgaagttccccaaccaactgaattagacccctcctcttggccaaggagactttaaagtaaacttgaaaaactagttcaggccatggtgagaaggggttgggggtggtcagacatgcctcattatgcttcttcctccctttggaattcagg

SEQ ID NO: 394582 - DNA, 474 bp, Homo sapiens
caattgcaaatcagaaaatctttgaatccacccataacctgcttcaagttgtcctaactttctcgactgaaacgatgtgtaccttacatatattggctgatgtctgcctataaattatgttcccctaaaatgtataaaatcaagctgtaacccaaccacctggggttcatgttctcaggacctcttgaaactgtgactcaggctttggtcactcatatatggctcaagataaacttctttaaacattttacsaagtttgactctttttgatgacaatgctgttattcccattttaccgtattacgtagagatgttcactttctccggagagtaagaaggaaacaaagacttattctgtctcccgttactcttgactcccataaacacccacttctaacattcctgtcactcttttcttttccaactaaagctgatcattaatttttacagattgtattatttatttacttggtt

SEQ ID NO: 394583 - DNA, 539 bp, Homo sapiens
tggacaagtagatttctaatttgactttgttttattgtggagaaatgacagcactaaattttcttattggctttcacttgggtttattactaacagcctgttaatagatagttaatctatgtgtttaaggaaggaaatgaataacaaagatatcataagacaattattattttcattgccttgagataacttttatatgctaattccaaacatgaaattatttctaattatccaatatagactaattgatgcaatgatagtggatccatggtttagttgagcacttacttgaaactttttgaaaagtgatcatgttcaaagataaaacattcatctttaggtaatcctgatcattggaatgtcttttttttttttatcttragccttaagtctatgtatttgtggcctttaaattgtgcaactcctttcatttttcttcttataaacaaaaatgaaattggttgtgagcaccagataaattggtgaagaaaaaaagaataatcctaagagatttggtttccaattagaaacataagtct

SEQ ID NO: 394584 - DNA, 463 bp, Homo sapiens
cctttttccctttgatggataagattgcttgccgttgtgattatttattgcacgttaataacagttaaatttcctgttggggaaattgctccttgttcttattaaaatattttataatctcatagtgttctttaaaggatataatggaccatgaaaggtaacattatttcaggaacttcaccatctgcagacttgcatcatggtatttatgcacaaaactagaataaccctataacatttgcaaatatcttagggcatttagtagttttataactggtgtttaatgtcttagagaaacaatttaaattgcmtttattacttattgctgctgcataacccatcatcctgaaatatggatgcataaaacaaaagccattttattatcataaggagttaaagggatttgagggatgatcaagaaaaaagacctgaccatgaggtagcagtaacccatacatgcttt

SEQ ID NO: 394585 - DNA, 549 bp, Homo sapiens
tcacgaagtgttctaaaaactagaaagataaagaaacacttcaactcatgttgtgagtcattttaaccctgattcctattcaagacaaaagcatgacaaaggaaaaatgtatgagtcaatctcacatatgtcattaggtataaaaatcctaaattaatcttccattcggagagtccaacaggtttctataagcacaggttcatcacaagataaaaggatcagggtgttatatataaagtttaggtgccgcaaaagaaatagcacttgaatrtaaaattttctttttaattctcagcatggcaaggtacttctatagaagggtgcacccttacagatggagcaattgtgagtgcacacttggacaagggaagggaagaggttcttatccgtgacgcgcacggcccctgctgctgtgctgttcccctattggctagagttagactgcgcaggctaaactaattctgattggctaatttaaagagagcgacggagtgagggaaaaatggttatgacagagcaggtaatcagaatgagtcagggtagagcagg

SEQ ID NO: 394586 - DNA, 549 bp, Homo sapiens
tcacgaagtgttctaaaaactagaaagataaagaaacacttcaactcatgttgtgagtcattttaaccctgattcctattcaagacaaaagcatgacaaaggaaaaatgtatgagtcaatctcacatatgtcattaggtataaaaatcctaaattaatcttccattcggagagtccaacaggtttctataagcacaggttcatcacaagataaaaggatcagggtgttatatataaagtttaggtgccgcaaaagaaatagcacttgaatgtaaaattttctttttaattctcagcatggcaaggtacttctatagaagggtgcacccttacagatggagcaattgtgagtgcrcacttggacaagggaagggaagaggttcttatccgtgacgcgcacggcccctgctgctgtgctgttcccctattggctagagttagactgcgcaggctaaactaattctgattggctaatttaaagagagcgacggagtgagggaaaaatggttatgacagagcaggtaatcagaatgagtcagggtagagcagg

SEQ ID NO: 394587 - DNA, 653 bp, Homo sapiens
caattacagacagtcctaataccctctccagccctaggcaccattatctattttctgtctatgaatttgcctgctctgaacatttcatataaatggaatcatataatgtatggtttttcataattggcttctttcacttagtgtaatgttttcagggttcattcattttgtatcatacttcaataattaattcctttaattgctgaataatattctttgtgtgaatatagcacaatttgtttatccattcatcagttgatagatgatatggtttggctttaaccccaccctaatctcatcttgaatttcagctcccataattcccacatgttgtgggagggacccgatgggagataattgaatcattggggcagtttcccccatactgttctcacagtagtgaataagtctcattcaatctgatgtttgtataaggggtttccccttttgcttggctctgattctctcttatgtgccaccacrtaagatatgcttttcaccttctaccatgattttgaggcctcctcaaccctgtggaacagtgagtccattaaatctctttttctttttaaattatccagtctcaggtatgtctttatcaacagcatgaaaatggactaatacagtaaattggtatcaatagagtggggcat

SEQ ID NO: 394588 - DNA, 468 bp, Homo sapiens
tgttacagccctttaagtcctgccatttggtgggtcctgagttcctgtcccacgtctgggaagaatgaagtatgcagacaactggagggtgagcaaggtgaagtgctttactgagcgacagtagagctctcaggagacccgaaatgggtagctcctctctgcaggcaggttgtcctgtaatccgtgcagccatcagtggagaggggacccagagtgggtagctcctattctcatgcaggtcatcccaatgaatgtacagctattaatagagaggagacycatagtgggtagttctctccacaggtacgtcatcccattgtctgcccaagtctggctgagtctgaggtttttatgggcttcagatggaaggaagtgcatgctgattagtccatgggtggccatgggcaggctagaaaaagcaccataagttctcactctgatccactgaagtgacagcctggcccccag

SEQ ID NO: 394589 - DNA, 582 bp, Homo sapiens
agcaaaggaacatcttacatggtggcaggcaagagaacaagtgcaggggaactgtcttttataaaaccatcagatctcatgagacttattcagyatcacaagaacagcacaggcaaaacccattcccatgactcaattacctcccactgggttcctcacatgacatgtggggattatgggagctacaattcaagaagagatttgggcagagacacagccaaaccatatcatagggattataatttttccttcttttccatgtcagcacattattctgtactctgtcctctgcagatagtcaaaaggcttatttatggaaggagcaaacaccattggaaacttacttcagattttgtcttcctgtttaaaacgtggggctctcttattctccacagtgacttctataaaattttatgctgttcttgctgtgcaagcctggcttctcaagttcctaacacatcactgacaatgatgctagtagataaattggctcagaatcttgaatggattccctaaggttccttggagcccagcagctgctacaaatgtgttgcacttgattctcttggcaagtctcattat

SEQ ID NO: 394590 - DNA, 582 bp, Homo sapiens
agcaaaggaacatcttacatggtggcaggcaagagaacaagtgcaggggaactgtcttttataaaaccatcagatctcatgagacttattcagcatcacaagaacagcacaggcaaaacccattcccatgactcaattacctcccactgggttcctcacatgacatgtggggattatgggagctacaattcaagaagagatttgggcagagacacagccaaaccataycatagggattataatttttccttcttttccatgtcagcacattattctgtactctgtcctctgcagatagtcaaaaggcttatttatggaaggagcaaacaccattggaaacttacttcagattttgtcttcctgtttaaaacgtggggctctcttattctccacagtgacttctataaaattttatgctgttcttgctgtgcaagcctggcttctcaagttcctaacacatcactgacaatgatgctagtagataaattggctcagaatcttgaatggattccctaaggttccttggagcccagcagctgctacaaatgtgttgcacttgattctcttggcaagtctcattat

SEQ ID NO: 394591 - DNA, 568 bp, Homo sapiens
gtgtgagaaaactatgatgacattttttgagtgtttaggttttgaattttgaggatgtgagtatgtgtacatactagttcttgatggctccgagaaaattggcagaaaagtgtgtgtatatgtatgtatatgtgtatatatatacacagacacatacatacatacacatacactatatttaaattttctataaaacatcattaattttgaagaaagtcaaaattgyttccatcattaactttaacttgtgataaagtaaaataaacaatctattaaagtagaaagctattcagttgtctcgcaatttttttcaaataacaagtgtttcactcacatctaatgtttattcattttgtgatattaaattccaagcttgctggacatcttcaataccacagatcttctttcaagtgcttaaactagcagtcaatttgcaatctaccttttcgctattatcactaccccgaaaatgcatgccctgaatccctgccacatttcattcttcaccatccaggacactatcttctctttacagaatctccaaatctgctcttattatttcttcatc

SEQ ID NO: 394592 - DNA, 656 bp, Homo sapiens
tagaatttattgattaattgaacatatttactgaggatgttctatatgcaaagcactgttttgagtattgggataaagcagtaaatataccagattaactttttaccatagtgtggctgacgttctagtttcagaaatagaatgattagcacaatctttttattttactaagaaactgagaaatcagaagtccagatgacttttatatagttctaaaaccaggacaaagtccagatttaawtgtagactatcctgataaccagtgcagtgctcctttcattacaaattcagctatctacatggagtagaaatgctatctaatagacacagggatggaagaaaggtggatgagtggagagagagatacgcattcataaatattatacctaagcaaaaacaaataatacattaagaatatgttctgttagggagttatctgttggattctaatagcatatactctttcacttccaaatagtcctcacaaaatgtcatctcctgacaaatgcagtcatttgcatctcatgtttatttcaaatggtgacagacactaaaatatactcttcaatgccccaaattaaatgagagtattttaacctttacaactaatcagtaatagcaaattgtttagatactttagtagtgacatagtgaca

SEQ ID NO: 394593 - DNA, 656 bp, Homo sapiens
tagaatttattgattaattgaacatatttactgaggatgttctatatgcaaagcactgttttgagtattgggataaagcagtaaatataccagattaactttttaccatagtgtggctgacgttctagtttcagaaatagaatgattagcacaatctttttattttactaagaaactgagaaatcagaagtccagatgacttttatatagttctaaaaccaggacaaagtccagatttaattgtagactatcctgataaccagtgcagtgctcctttcattacaaattcagctatctacatggagtagaaatgctatctaatagacacagggatggaagaaaggtggatgagtggagagagagatacgcattcataaatattatacctaagcaaaaacaaataatacattaagratatgttctgttagggagttatctgttggattctaatagcatatactctttcacttccaaatagtcctcacaaaatgtcatctcctgacaaatgcagtcatttgcatctcatgtttatttcaaatggtgacagacactaaaatatactcttcaatgccccaaattaaatgagagtattttaacctttacaactaatcagtaatagcaaattgtttagatactttagtagtgacatagtgaca

SEQ ID NO: 394594 - DNA, 575 bp, Homo sapiens
gttagagcgcatgttttcaccttaataccacaaccatttgctttgatgttctgggttacagtttgcaaatgcacataattcaagcaaagtttagaaggtgaagtaaactagaaacattattctcaggtaggccacataggtcatcctcagcagctacaccaaccttaccatgaaatttcaatgtatgattgcagaggtcagtgatgactttttggaattcyccacaaactctgtattttctgcctgctttaagaagttattcgtaaccatttctgcttcactgtttcagacctttgctctcccacctcctctgacattaatgcaaaccctattcctataaccagcatcttagaggtagtgtcttgtgcaaataaacacacactgatatacctggtaagcaatgagaggcaacatttttattaattttcatctggttcttctgcctctcttctactttcttctactccatccactacactgtatccagaatattctttcagagtacatccctcacttttcacccaatgcacttcctcagtaccattccactcagtgttggatagtttttagttttt

SEQ ID NO: 394595 - DNA, 575 bp, Homo sapiens
gttagagcgcatgttttcaccttaataccacaaccatttgctttgatgttctgggttacagtttgcaaatgcacataattcaagcaaagtttagaaggtgaagtaaactagaaacattattctcaggtaggccacataggtcatcctcagcagctacaccaaccttaccatgaaatttcaatgtatgattgcagaggtcagtgatgactttttggaattccccacaaactctgtattttctgcctgctttaagaagttattcgtaaccatttctgcttcactgtttcagacctttgctctcccacctcctctgacattaatgcaaaccctattcctataaccagcatcttagaggtagtgtcttgtgcaaataaacacacactgatatayctggtaagcaatgagaggcaacatttttattaattttcatctggttcttctgcctctcttctactttcttctactccatccactacactgtatccagaatattctttcagagtacatccctcacttttcacccaatgcacttcctcagtaccattccactcagtgttggatagtttttagttttt

SEQ ID NO: 394596 - DNA, 609 bp, Homo sapiens
gcagaaagccttaggggctgaaaagtaaccagctaaagagtctccctctggctcttggttctgtatttaccaagcactacagaattggaccagctttttcctaatcctgatgctcagttttgctttggcttatttaagtccatccttagtcatcaatcttgtaattctccagtgtggtggaagctagcagggagagaaggcaatgctaaaatgaatgcccagtkactgctagtcttaagattattaaaaacaacaggaattgttcagctgggaacaaaaaccttgaacctgtatgcaatcacgcctgttcttcacattcagggctaacattaagcccatgggttactagggtaaactgaggctgaaaaaagcaacacagtctttcttgtacccaacagcctgtcctgcatagtagtcaatgctgttggtagacttctcttttacatatgaagccatctgatttggtctgtcttgactttttctctttaaaaaaaaaaaagtgtattcctttaataagtatgtcatggtaggtagttactgagctaagtgaattccttggcctcttctatgtgaaccttgcagaaatttttggccagtaagagagtaagg

SEQ ID NO: 394597 - DNA, 567 bp, Homo sapiens
ttttttactatatttgaatatatatgtggatgagctttatgtgcccactttaacacttttttcttcatctgtacaccagcctcatgtttccaaattgtagtttactttttgtaattaaccccaccataactgtgagtcagtataaatatatatatatatattcatagcattaattaaattatattttaacattcatacctgctttatacatagaacaactagttaaaggttggggttaggttaaattgaataagctgccacttatatcctgtagattgaggagtatagaagggtattttcttacctccaaacaaccacattaatcccacagaaatggcacttarccagactgaaatggctgaaatgatagaagtagaattcggattacagataggaatgaagatgatcaacattcaggagagagtcagaatccaatcctagtgagagaaggttccagctgggcttcgagtcgagtaggggctcagaaagctgtgaaactcactcatttcctgcatcaggacttactttggtcctagatgaataatattaaagatatatgtttaaaat

SEQ ID NO: 394598 - DNA, 627 bp, Homo sapiens
aactattcaaaaatccacaaaagttcctcgtagtttttattcctttgcagtcacacactccatccatcccaaagctcaggcattccctgtgtattcatcatcactatcattctctatcagaatttcaattcaatggaatcaaatagtatgtaacatattgagactgttttctttgctcagcatagtctttttgagatttatataaattcttatttgtatccatagggcattccatttgattcatgaatagtattccattgcatgtatgtacaactgtatgcatatkatttacttgtttcagtacattcatgatgtccaatttttgtaataatgaataaaaccactatacacatttatgtgcaggtgtttgaatagaaataagttttcattttctccagagtacgactgaaatttacatagctgtgtcatagagtaacttcatatttcaatttgtaataaattaccaaagagtatttcagagtagctctatcattttacattctcaccaatacagtaatgcatgagacttccaattgctctgtattctcaccaatatttggtactgtctctctatatttttttaaacttcagctattccagaatgtgactactggtatctcattgtgg

SEQ ID NO: 394599 - DNA, 583 bp, Homo sapiens
gacacagtgagaagatgctgctctatgaattaagaactgggattttactggacactgcatctgatagcaccttgttcttcaactttccagcctttagagctgtgaaaataaatttatgcttttataagccacaccgtttatggtattttgtaatagcatcccaaacacactaagacaaccttttaccagtaagtggcttatgttaacccaggtaagaaacctaggtagccagagaaaaagttgaaaacaaaacaaaacaaatcttagtagcaacatcagaggctgcacagtgcaaaaagaataaacctcacacaattagttcaggtaagtcactaaaaaaataaataatgaagataacaacmaccagccatggtggtagtggtgatggttagcgtgtaactattcagagttgctacaatatattattttaaataatatagtcccgttttctgcaaaaaccttaggagacatggaaggaaatggaaatatgaccacatatactagacggggcagagaagatcagtcaataggaactggctttcaaggagttgagatgttgaatatagaaaaaaaaaaaaaaaag

SEQ ID NO: 394600 - DNA, 583 bp, Homo sapiens
gacacagtgagaagatgctgctctatgaattaagaactgggattttactggacactgcatctgatagcaccttgttcttcaactttccagcctttagagctgtgaaaataaatttatgcttttataagccacaccgtttatggtattttgtaatagcatcccaaacacactaagacaaccttttaccagtaagtggcttatgttaacccaggtaagaaacctaggtagccagagaaaaagttgaaaacaaaacaaaacaaatcttagtagcaacatcagaggctgcacagtgcaaaaagaataaacctcacacaattagttcaggtaagtcactaaaaaaataaataatgaagataacaaccaccagccatggtggtagtggtgatggktagcgtgtaactattcagagttgctacaatatattattttaaataatatagtcccgttttctgcaaaaaccttaggagacatggaaggaaatggaaatatgaccacatatactagacggggcagagaagatcagtcaataggaactggctttcaaggagttgagatgttgaatatagaaaaaaaaaaaaaaaag

SEQ ID NO: 394601 - DNA, 583 bp, Homo sapiens
gacacagtgagaagatgctgctctatgaattaagaactgggattttactggacactgcatctgatagcaccttgttcttcaactttccagcctttagagctgtgaaaataaatttatgcttttataagccacaccgtttatggtattttgtaatagcatcccaaacacactaagacaaccttttaccagtaagtggcttatgttaacccaggtaagaaacctaggtagccagagaaaaagttgaaaacaaaacaaaacaaatcttagtagcaacatcagaggctgcacagtgcaaaaagaataaacctcacacaattagttcaggtaagtcactaaaaaaataaataatgaagataacaaccaccagccatggtggtagtggtgatggttagcgtgtaactattcagagttgctacaatatattattttaaataatatagtcccgttttytgcaaaaaccttaggagacatggaaggaaatggaaatatgaccacatatactagacggggcagagaagatcagtcaataggaactggctttcaaggagttgagatgttgaatatagaaaaaaaaaaaaaaaag

SEQ ID NO: 394602 - DNA, 555 bp, Homo sapiens
ccttgatcagataaaactggttgtcttataaaaagaggaggggtgagggatttatctccccatgcagccgtcttcaagccaggaaaagagccctttcctaaaaccaaaacctgctgcaaccttgattttggacttttcatcctccaaaactttgagatgagaaaataaatttctgatggctaagccatgtagtccgtggcattttgttatggcaggccaagaagaccaaaaaaaattggcactgaagaagtgggatgccgctattaaaaatacattaacaatgtggaagtgacgttgtaactaggagatgaccgaggctgaaagtgttttgaggtccatgctagaacamaagcttagatttccagaagtactttttggtataaatatgcacattaaaaggtgattcaagcgagggctcaagaagaaaagaggaaagctatagaaaaggcctttatcattttagagaatacatatattttcatgaacagactatttatagaaatatgaatgttaaagacagttctgttaaaatttcagacaaaaatgagaaacatg

SEQ ID NO: 394603 - DNA, 647 bp, Homo sapiens
gtataaatatgcacattaaaaggtgattcaagcgagggctcaagaagaaaagaggaaagctatagaaaaggcctttatcattttagagaatacatatattttcatgaacagamtatttatagaaatatgaatgttaaagacagttctgttaaaatttcagacaaaaatgagaaacatgttactggaaactgaaggaaaggtgatctttgtcataaagttgcaaagaacatggctgaaatgtgttctatctgttcatgtaaggtagaaattgtgagagaagaaactggatatttagttaaagatattttgaagcaaggtgttgagggaatgacgtgctttttcctgactatcaacagcaacaaaaaatcaattctatccaaggattaactctcaggcctaatttcctcctgtgcataataggaatgattacctgcctaattgaactgttgtcagattaattaagtaactaagttcaacttcaaattcattttgaacaaggcaaaagatgagtccagtaccacccccaacatggtatctagaaatgacactcatatttattgaaagtttaataggtggaggtgtctgtgctaaatacttcccaagagattatcacccagctttacaggcagaatgtcattagtcactac

SEQ ID NO: 394604 - DNA, 654 bp, Homo sapiens
taccagttttctgtgttagcctatttgcattgctaaaaaggaatacccaaggctgggtaatttatacagaaatgaggtttattgggctcacagttctgcaggctgtacacaaattaagtaaatagtgctggcatctgcttctggtgagagcctcaggatgtattcaataatgaataagatgtcactttttaaagctctaatttataaatcatgggaaataatatctaccacaagtttaaaaaatacaattattatgtagtatgatatctaaattaataggtctttttaaaatatagttttacttaaattttctaaaggcatttkgatattaacaaactcattttatattatttaaaatggtattaataaaataagaactccaacatacgaagagaaatagaaaagaaatatcacatccttttggatagagaaaatctttttttttcttttgtttttgccaaggagtgcatgtatgctatacatttttcagtgttattaattccaataatgccatatcaaaatccagtcttcaaatttttcatatagatttatagactcaaacagaggtgaaacacaatctctgagtaatttatatatcctgctctgtgtgagcctacatgtctaatttcctttccccaatgcttctgaaaacac

SEQ ID NO: 394605 - DNA, 654 bp, Homo sapiens
taccagttttctgtgttagcctatttgcattgctaaaaaggaatacccaaggctgggtaatttatacagaaatgaggtttattgggctcacagttctgcaggctgtacacaaattaagtaaatagtgctggcatctgcttctggtgagagcctcaggatgtattcaataatgaataagatgtcactttttaaagctctaatttataaatcatgggaaataatatctaccacaagtttaaaaaatacaattattatgtagtatgatatctaaattaataggtctttttaaaatatagttttacttaaattttctaaaggcattttgatattaacaaactcattttatattatttaaaatggtattaataaaataagaactccaacatacgaagagaaatagaaaagaaatatcacatccttttggatagagaaaatctttttttttcttttgtttttgccaaggagtgcatgtatgctatacatttttcagtgttattaattccaataatgccataycaaaatccagtcttcaaatttttcatatagatttatagactcaaacagaggtgaaacacaatctctgagtaatttatatatcctgctctgtgtgagcctacatgtctaatttcctttccccaatgcttctgaaaacac

SEQ ID NO: 394606 - DNA, 596 bp, Homo sapiens
caccccttgcattatcctgccctggatatgacatgaattgaaaggagattattttgggactttacaatttaatgactcccctgctgtgtttcagacttgcatgagccctgtagcccctttctttgtccaatttctcccttttggaatgggagcacatacccattgcctgtaccctcatcayatcttggaagtaactaacttatttttgatgttacagactcataggtggaagggacttggcttgtctcagataagactttgacttgagctttgacttaattctgaaattagttaagacttcaggggactgttggaaaaggcataattgattttgcaatctgagaaggatatgagatttgagaggatccaagggtggagtgatatgattttgctctgtgtccctatccaaatctcacgttgaattgtaattcccacatgtcagcagagggacctcatgggaggtgattggatcgtgggggtgaattttccccatgctatttggtgagtgagttctcatgagatctggtggtttaaaagtgtgacattttccccctcactctctcctttctgccaccatataagacatgccttgctcc

SEQ ID NO: 394607 - DNA, 638 bp, Homo sapiens
ttactattttcctttaaagttcagaatcattacagcttgttttgcaaaatttccaaattatttatatctgccaatacctaagctgaatgaaatatagtactaacaccagtaggattattaggattgctagaggaatagcatattgttttttctactgtttggcaaggaagagaaaaagataaattgttcataaacrataaatactaagttccttcataaagatttctctgtgtcttcccaagttacttctcttttctgaatagtcaaaatattaaaggaaacttgtttctatttcacttagcacattcagttacttttctggttattcatatacttgatttatctattataaaagattgaatgtaaatattgtctgggtgtataatactctacattatacttctttgaaattttagaactcccagaatagttcattaaatgtttgactcaataacttactaaagaaaagagaatgcccaaaatttgtataaattaacacaattatatcattttgttatatcacccttggatgactgggcgcaatgcagaaagaacactgagctataacttaagagagggcatattctgttccaaaatctgtaataatgttttaatcaaatttggggtacttagagaat

SEQ ID NO: 394608 - DNA, 638 bp, Homo sapiens
ttactattttcctttaaagttcagaatcattacagcttgttttgcaaaatttccaaattatttatatctgccaatacctaagctgaatgaaatatagtactaacaccagtaggattattaggattgctagaggaatagcatattgttttttctactgtttggcaaggaagagaaaaagataaattgttcataaacgataaatactaagttccttcataaagatttctctgtgtcttcccaagttacttctcttttctgaatagtcaaaatattaaaggaaacttgtttctatttcacttagcacattcagttacttttctggttattcatatacttgatttatctattataaaagattgaatgtaaatattgtmtgggtgtataatactctacattatacttctttgaaattttagaactcccagaatagttcattaaatgtttgactcaataacttactaaagaaaagagaatgcccaaaatttgtataaattaacacaattatatcattttgttatatcacccttggatgactgggcgcaatgcagaaagaacactgagctataacttaagagagggcatattctgttccaaaatctgtaataatgttttaatcaaatttggggtacttagagaat

SEQ ID NO: 394609 - DNA, 620 bp, Homo sapiens
cacagtctgtctctatttaggtttcttttaatctctctgtcaatgtctgaacattataatagttagatttttcatatatttttcaaatctgtattcaaatattgcatattgcatttttaaaatttattgcaaatggtaaattaaaatgtaaatttctacatatgtattggtggtacatagatataccatacatttttagatattaatttaatatcctacaatatttatcaacttacttattcattttagtaacttttttgtggattctctatgaatttttatgcrcacattcatgtcatctgtgaataaatggagctttttactttgtcttgccttattttaatagctagtatatttagtatagtgtcagtgcaaatgtacaaacctgccttattccttatctttcagggaaaacttttaacattagtcattaaacataattttagctataaatttttatagatgccttttatgagactgagaaaattaacttctatttacagtttactaaaagttctccataataaatgaatgtttacttttgtcatttttttttagttatcgaaattgcctggtttcagtctgatgatatggtgaattatgttgcttgacctccgagt

SEQ ID NO: 394610 - DNA, 620 bp, Homo sapiens
cacagtctgtctctatttaggtttcttttaatctctctgtcaatgtctgaacattataatagttagatttttcatatatttttcaaatctgtattcaaatattgcatattgcatttttaaaatttattgcaaatggtaaattaaaatgtaaatttctacatatgtattggtggtacatagatataccatacatttttagatattaatttaatatcctacaatatttatcaacttacttattcattttagtaacttttttgtggattctctatgaatttttatgcgcacattcatgtcatctgtgaataaatggagctttttactttgtcttgccttattttaatagctagtatatttagtatagtgtcagtgcaaatgtacaaacctgccttattccttatctttcagggaaaacttttaacattagtcattaarcataattttagctataaatttttatagatgccttttatgagactgagaaaattaacttctatttacagtttactaaaagttctccataataaatgaatgtttacttttgtcatttttttttagttatcgaaattgcctggtttcagtctgatgatatggtgaattatgttgcttgacctccgagt

SEQ ID NO: 394611 - DNA, 671 bp, Homo sapiens
aataagctattgctcttcaaactttcaaatgctaattttggtattcattgatgattcctgagtcagcyattattatttttatgattttcaaatgacaaggtttattattctgtcaatcctcctacatattttatttatctttccactgtaaggaagaaccttattacttatttatttttgtgtttactaatttatttatatcaatataggttcatagattcttattttattcaacatgttataattacttacctacattatttatttgaaactcaaattttcctgaatgacccactagacactttcttccattgactttcaagtcctttgatgtatccccgtcattctttaaagtgcttaaagacactgcattaacagacttgttggcacaaaaagtttatctagaattatctcatcaagccctagaatcaactatttcatgaagaatctctagatcactttggtagagaattatatgcaggaacaaaaatgtgggcactaattgtgctcagtgctactagaggtcatttcttctaagctatctcaaaagacagacctaggaggtggaaaaatgtataggcatgcattcacacatatttaaaaacatctcttctatatccatgtcaatgtctttccatctgtctgtatctatctatccatgtatcaattgt

SEQ ID NO: 394612 - DNA, 617 bp, Homo sapiens
gttggcacaaaaagtttatctagaattatctcatcaagccctagaatcaactatttcatgaagaatctctagatcactttggtagagaattatatgcaggaacmaaaatgtgggcactaattgtgctcagtgctactagaggtcatttcttctaagctatctcaaaagacagacctaggaggtggaaaaatgtataggcatgcattcacacatatttaaaaacatctcttctatatccatgtcaatgtctttccatctgtctgtatctatctatccatgtatcaattgtaattcaacaccctatttctatattttaactctttcctctgataatgacacatttgaattttattttccacaatatattactcaatcctggaatacatggaaagtgcttttctcattgtgaacaatgaaagtatagaaaaatgaagcagctaaccaaagtacactacatgtgtttagtctaagagtatacagttctaatactcttaaggttttttcttcctcctttagtatattaatcctatttttttgaaatacactttaatttatgtctgtttatgagtatgttttactattccttttgatttatgtgtttaaaatttttttcagct

SEQ ID NO: 394613 - DNA, 547 bp, Homo sapiens
cctaatcgccactcaccagcaaaggcaggctatgctatagtatcttccacatctatcgttaacactactgctctgcccccctccactacctctcagcaagccgaactcattgccttaactcaggccctcactcttgcaacgggactacgcatcaatatttatagtgactctaaatatgccttccataccctgcaccaccatgctgttatatgggcaggaagaggtttgctcactacacaagggtcttccatcattaatgcctctttaataaaaactcacctcaaggctgctttacttccaaaggaagctggagtcattcactgcaagggccatcaaaaggtrtcagatcccatcactcagggcaatgcttatgctaataaggtagctaaagaagcagttagcattccaactttggtcccttatggccaatttttctccttctcatcagtcagtcccacctactcccccactgaaacatcaccctatcaatctcttcccacacaaggcaaatggttcttagacaaagggaaatatctctttccagcct

SEQ ID NO: 394614 - DNA, 550 bp, Homo sapiens
gaaatctatccttaaggaaaacacttctcagggttccatctgctattctactactcctcagggagtgttcaggccccctccctttcctacacatcaagctcagggatttgcccctgcccaggactggcaaattgactttactcacatgccccaagtcaggaaactaaaataccacttggtctgggaagacactttcactggatgggtagaggctttcccacagggtctgagaagcccatcgtggtcatttcttcctttcaatcagacataattcctcrgtttggccttcccacctctatatagtccaataatggaccggcctttattagtcaaatcacccaagcagtttctcaggctcttggtattcagtggaaacttcataccccttaccatcctcaatcttcaggaaaggtaaaatggactaatggtcttttaaaaacatacctcaccaagctcagcctccaatttaaagactggacaatacttttaccacttgcccttctcagaattcaggcctgtcctcgggatgctacagggtacagcccatttg

SEQ ID NO: 394615 - DNA, 539 bp, Homo sapiens
tttcactctaagtagatttagaggtaatgcatagaatatttcataaatattggtcagtttcctctgaagggcaatttagattgcactaattttctgttgctgcatgtattaatcagcgttctctagagggacagaactaatagtatagatgtataaataaaggagagtttattatggagtattgactcacaggatcaccaggtgaggccccataataggccttcttcaagctgagaggcaargaagccagtccgagtcccaaaatctcagaagtagggaagccaacagtgcagcattcactctgtgattgaaagaaagtccaagatttcgaaagctgaagatcttggagtctgatgtttgagggtggaaagcatcccacaagggagaaaggtggaggccagaatactcagccactctcctctttccacgttcctctgcctgcttttatcctagccacaccggcagctgattagatggtgcccacccagattgagggtgggtctgcctttcccagtccactgactaatgttaatctcctt

SEQ ID NO: 394616 - DNA, 620 bp, Homo sapiens
taaaagtaccaaagaatatgtatagagagatatagactaaaggaggtttctaagggtgctgagttaatgcatcatctaacccatttcctggaattactaactttcttacaatttaatataactcatgtatatattcaataaaaagaaattacttctaaaatcagttcttatataatgatgtattttgattggtttaaccatattatatgagctaaactarctaatataatttaattgctcttcaacaagagatgaagttaataataattaaaataaattttcaggattatgcatactatttagtaaaataaaaacacatcttttatataaaaacattttgtgtaggtcagtctctaagcttaacttgaaatgctattattttaagcaacttacaatggatgagagaattaaatattcaccatttatcttttgtccaacataaaattaattaaatgaaaagcatatctaccttgttaattctcctcgccattgttactgaaaggaaaattttaaattatgaattgtcaagtgaacatgtgaaaactgaggaaacctctttagaaactggaaccgccagaattaatgcaatggggataatctataagttctaaatttattat

SEQ ID NO: 394617 - DNA, 606 bp, Homo sapiens
agacaccagacaagtttgtagaagccaataagaaactcattgaggagaaagaatatctgcctgaagaggtttggaatgccaatgaaaatatctggaaaataatttcacaaaggacacttattagtaaggaagagacgtgagcatcagaatttaaggcatgaagggataggctaactctgctgttttgtgcgaagtcttttgagtttatgattaggactgcccttatctataagcrgctaacctccaagccttgaagggaaaagataaacaatgctgccagacttttaatttcacaaaaagaaggcaatgagactcgtttttctggattgattccattgttgctttgcccctgatcacggaaagcattttgaaagtaaaggactgcttttaaagttcttttatttattgatgtttattaaaatagtatatttttttcaatacaggcttttgctgtgttgcccaggctggagtgcagtggcatggtcatgactcacgatagccttcacctcctctactcaagtgacccgcctcccccacctcagcctcccaagaagttatgaatacaggcatgttcttttgatattagacaatgccctggccacccag

SEQ ID NO: 394618 - DNA, 606 bp, Homo sapiens
agacaccagacaagtttgtagaagccaataagaaactcattgaggagaaagaatatctgcctgaagaggtttggaatgccaatgaaaatatctggaaaataatttcacaaaggacacttattagtaaggaagagacgtgagcatcagaatttaaggcatgaagggataggctaactctgctgttttgtgcgaagtcttttgagtttatgattaggactgcccttatctataagcagctaacctccaagccttgaagggaaaagataaacaatgctgccagacttttaatttcwcaaaaagaaggcaatgagactcgtttttctggattgattccattgttgctttgcccctgatcacggaaagcattttgaaagtaaaggactgcttttaaagttcttttatttattgatgtttattaaaatagtatatttttttcaatacaggcttttgctgtgttgcccaggctggagtgcagtggcatggtcatgactcacgatagccttcacctcctctactcaagtgacccgcctcccccacctcagcctcccaagaagttatgaatacaggcatgttcttttgatattagacaatgccctggccacccag

SEQ ID NO: 394619 - DNA, 606 bp, Homo sapiens
agacaccagacaagtttgtagaagccaataagaaactcattgaggagaaagaatatctgcctgaagaggtttggaatgccaatgaaaatatctggaaaataatttcacaaaggacacttattagtaaggaagagacgtgagcatcagaatttaaggcatgaagggataggctaactctgctgttttgtgcgaagtcttttgagtttatgattaggactgcccttatctataagcagctaacctccaagccttgaagggaaaagataaacaatgctgccagacttttaatttcayaaaaagaaggcaatgagactcgtttttctggattgattccattgttgctttgcccctgatcacggaaagcattttgaaagtaaaggactgcttttaaagttcttttatttattgatgtttattaaaatagtatatttttttcaatacaggcttttgctgtgttgcccaggctggagtgcagtggcatggtcatgactcacgatagccttcacctcctctactcaagtgacccgcctcccccacctcagcctcccaagaagttatgaatacaggcatgttcttttgatattagacaatgccctggccacccag

SEQ ID NO: 394620 - DNA, 606 bp, Homo sapiens
agacaccagacaagtttgtagaagccaataagaaactcattgaggagaaagaatatctgcctgaagaggtttggaatgccaatgaaaatatctggaaaataatttcacaaaggacacttattagtaaggaagagacgtgagcatcagaatttaaggcatgaagggataggctaactctgctgttttgtgcgaagtcttttgagtttatgattaggactgcccttatctataagcagctaacctccaagccttgaagggaaaagataaacaatgctgccagacttttaatttcacaaaaagaaggcaatgagactcgtttttctggattgattccattgttgctttgcccctgatcacggaragcattttgaaagtaaaggactgcttttaaagttcttttatttattgatgtttattaaaatagtatatttttttcaatacaggcttttgctgtgttgcccaggctggagtgcagtggcatggtcatgactcacgatagccttcacctcctctactcaagtgacccgcctcccccacctcagcctcccaagaagttatgaatacaggcatgttcttttgatattagacaatgccctggccacccag

SEQ ID NO: 394621 - DNA, 571 bp, Homo sapiens
atgtaagcagccaacaaatatataagaaaaattgttcaacatcactaatcatcagagactgtaaatcaaaaccatgatgaaataccatctcacatcagtaaaaatgacaattattaaaaagtcctctgaggaaaaggaatacttatacactgttggtgagaatgcaaactactttggccactgtggaaagcagtttggagatttctcaaaaaacttaaattacacctaccatttgatccaaaaatgtcactactggttttatactcataggaaaataattaattccttcaaaaagacacatgcacccawatactcactgcagtgctattcacaatagcaaagacatggaatcaaccttggtgtgcatcaacagtagattggaaaaagaaaatgtggtacaatatacgccatggaatactacacagccatcaaaagaatgagatcatgtcctttgcagcaacatggatgaaggtgaggctgttatcataagcaaagtaaagcaagaacagaaaactaaaaacaacctgttctcacttgtaagttggagctaaacactgaatacatgtagaca

SEQ ID NO: 394622 - DNA, 656 bp, Homo sapiens
atatagctacatcactggctcctgagagagctttgggtgttctgtaaattttttactttgcactcttgaaaaattcgcagagaatgcaaggtttagtaaaaatttattttcttttggcagcctatcacctgtaatttccgttaaacagcatttctgactcaatagtacactgaaarcccatgtttgtaataatgccctaaagcactgcagtacctagagtatatattttgaagagatagctttgctgaaatagaaaaccaaactgtaaattgaagtctgagcattcagagaaataaaaattatgctaaaaacaaacgtatgtttttgaattagttttttgaaaaatggcaaaaagataatattagttagtgatattattaatatcattaatatcactaaatatcattagtatgctttggcatacacagcagaaacaccaaatgtcttatactcccacaatagactgggctttccttttagctgcctgacctagtgcaagtggcctcattgaaatatctaatacttattgaatacttattattttttcagaaactatattaagaactttacccttactttttacagcaatctcaaagaaagtcagatactcttggaatgcttatttttaaagttaatgaaactaagacctacagagt

SEQ ID NO: 394623 - DNA, 563 bp, Homo sapiens
tctcttgctaacccttccttccccggtcaggaggttgaagttttcttcaggtgctgttagcctctcacaaggatggagcagtggagcctgtggtttgcttgcccccaggacagggttggagatctgccaggggttctagctgaagtgaggcttctcagggtagagtcttgtgctggggctttgggctttagaaagggtcctgagcctccaagttgtctrgggtttctcacaagcatggacagggatagggatgaaaccacctggcccactacctcccaagggagcacttgagtattggcagctgaaaattcactctcttagatatgtctctgatgagaggttcaaagttctgctgacatcaggatatggttcaagcagtgagaacagggcttgggctggctgaacagaggccatcttctcccaccatcagccccatcctttcttaggccattaggaataggaatatgaaagctctaaggattcattgttccatcccaagagtagggcctagaaattcctttctcctggttgtagatggaggtgggagaatcacccacttctgt

SEQ ID NO: 394624 - DNA, 563 bp, Homo sapiens
tctcttgctaacccttccttccccggtcaggaggttgaagttttcttcaggtgctgttagcctctcacaaggatggagcagtggagcctgtggtttgcttgcccccaggacagggttggagatctgccaggggttctagctgaagtgaggcttctcagggtagagtcttgtgctggggctttgggctttagaaagggtcctgagcctccaagttgtctagggtttctcacaagcatggacagggatagrgatgaaaccacctggcccactacctcccaagggagcacttgagtattggcagctgaaaattcactctcttagatatgtctctgatgagaggttcaaagttctgctgacatcaggatatggttcaagcagtgagaacagggcttgggctggctgaacagaggccatcttctcccaccatcagccccatcctttcttaggccattaggaataggaatatgaaagctctaaggattcattgttccatcccaagagtagggcctagaaattcctttctcctggttgtagatggaggtgggagaatcacccacttctgt

SEQ ID NO: 394625 - DNA, 563 bp, Homo sapiens
tctcttgctaacccttccttccccggtcaggaggttgaagttttcttcaggtgctgttagcctctcacaaggatggagcagtggagcctgtggtttgcttgcccccaggacagggttggagatctgccaggggttctagctgaagtgaggcttctcagggtagagtcttgtgctggggctttgggctttagaaagggtcctgagcctccaagttgtctagggtttctcacaagcatggacagggataggkatgaaaccacctggcccactacctcccaagggagcacttgagtattggcagctgaaaattcactctcttagatatgtctctgatgagaggttcaaagttctgctgacatcaggatatggttcaagcagtgagaacagggcttgggctggctgaacagaggccatcttctcccaccatcagccccatcctttcttaggccattaggaataggaatatgaaagctctaaggattcattgttccatcccaagagtagggcctagaaattcctttctcctggttgtagatggaggtgggagaatcacccacttctgt

SEQ ID NO: 394626 - DNA, 563 bp, Homo sapiens
tctcttgctaacccttccttccccggtcaggaggttgaagttttcttcaggtgctgttagcctctcacaaggatggagcagtggagcctgtggtttgcttgcccccaggacagggttggagatctgccaggggttctagctgaagtgaggcttctcagggtagagtcttgtgctggggctttgggctttagaaagggtcctgagcctccaagttgtctagggtttctcacaagcatggacagggatagggatgaaaccacctggcccactacctcccaagggagcacttgagtattggcagctgaaaattcactctcttagatatgtctctgatgwgaggttcaaagttctgctgacatcaggatatggttcaagcagtgagaacagggcttgggctggctgaacagaggccatcttctcccaccatcagccccatcctttcttaggccattaggaataggaatatgaaagctctaaggattcattgttccatcccaagagtagggcctagaaattcctttctcctggttgtagatggaggtgggagaatcacccacttctgt

SEQ ID NO: 394627 - DNA, 658 bp, Homo sapiens
aaaatatttaaagatgaaaggatagtacattttaaaataatttaaaagcttgygtagagaggacattgtaagtggtactttttaagcagatgatagatacaggaagtatacttacaaactaaggtaccatctaagagaagcaccttagatgctgggaaagtgaagtttcagcttggaaatggaaggtcacccaggttgaaagaacctggaaatggaaattctagcttccatttgatgccagtgttttatcagatgtaggcttactgtacacatggttctatcaattgttgggaagattccacaagggaaatatacgttttgacttacaaaggcagctttctgtggcttctattcaccttcactaatcttaagcatgcttaaaagaagacaaaggtggtaaacattgtcatttgactccaagaaaccaatatttaacccgtaaggctgcatgttttactatctacctccttacctagcagtatattcatatggatgatcaaagaattctattccagccactaaaggcaatgatcttgagccctgatattatgagtggctataaaattatccagcttttaaatccaaccacagaatgtgattttatgaccttctgtggaagtgtagctataggttaactaaaggttatgaagtaatattt

SEQ ID NO: 394628 - DNA, 516 bp, Homo sapiens
tttggaataagaatcagctgttgatattctttaaaaaacacacrcacacaaatattctgcacacacaagaccatttccaaaagctacagagcagaggtgttgctcagatcctctgctgtttattttagcattaaagccattagctctggttattagatcctcacaggagatgagaaggattactgttaatcagagggagtataaattaccatgtatgctgatgacattttaatgttcatgacaaatccagacaaatcttggtaggcattgttggatttactggattaatttatgtaactgtcagaatataaaattaactgtgaaaatctagtctgacgtcaatgaatgactttcatataaagcaactgatcacttacctgcctttcccttagaaactacttggggatatactaccttaatattaaggactctgtaatcttagcaaaatcataaacattgaaaataaaaccaggcaaaggtttactaacatgagttccttggcagatcatatttgcc

SEQ ID NO: 394629 - DNA, 602 bp, Homo sapiens
ttattgttggagaatagattcctgggaagattgattttccttgtggttgcaggagcattttcagtagcaattaaggctaaatgcttctttgttcccatccagtaagagaaagagagttgcttcttcctcccagaagccccragccactttacccaacttatttgtccaaattatcatgggcttatccatcttggaaccaatccctgacaaagggcatgaaatcaccacaatcggacaaatcatctgaggtagatgctggggaactaggcacagcatcccccacaccatctcccaaagtccaattcagttaacactttttgcaaagctttcttcctcctttatccttcctgtctccatccctaggctggaggtaagctttcactactcagacctctgataatgtttactctgtactacttttatgatacttatcaattccacactttactatgaatattgaataatattacgaactatgttgcattataatccaaatgtgtcccagcatccttgggaagcctcaacttgcattccacattcacctgaggctggactcagtaaatctagacttctcctatctacccttccagctcccccacaaa

SEQ ID NO: 394630 - DNA, 604 bp, Homo sapiens
cctaaaacaataagtgcaagagacagagggaaaggcctccatgagctgkgaaagaagtctgaaaacttcagccttaaaggaaattgggatgagggaactaaacttacgaggaaacccgttaaaataaaacaatcttacattcactaaaaacaacccaatacacaaataggatggcaattgtattttacacacctaaaataaacagtaacaggcagtatacaattactatccatttacaacaccttattcaagagcagtgatttttaagttttccttcctctgcagtttttatgtcatgtgtatgattcattttggatgaactattttactagaagaaaagacacacattatgcatgttatacaaaaacaaattagctcagtcaagatttggctcatctctttaaaaaagtaataatcatggagacagcaaacataataataaaagctattgtttatggagtgctcagtacacattgtcattttgttgttgccattgttatcactttatagatgaagaaaataaggttcagagacattaagtaacatcacaacaaagagtatgtagcatatgagaagcaaaagaaggttttttggttagctggaa

SEQ ID NO: 394631 - DNA, 543 bp, Homo sapiens
ccattgttatcactttatagatgaagaaaataaggttcagagacattaagtaacatcacaacaaagagtatgtagcatatgagaagcaaaagaaggttttttggttagctggaatgcctggatatctggaaactccatcatattaagaagtttataatgttatgaccaaaattatccagaaacccagagcccttaaggacttgcgacttttagaaaggatgaaatgagaattgaggtcaaagggctggtaaaaccatgatgtataactaaaatttggggtcgtacctcaggctactgaaaagtgcagagggaacccagatttttcagagatgtttgtgtggacacaacgctcacacaccagacgcatgaggcaaatggattcaaaaagaaatgttttgacctggtaccaagargacatctctaggaggttggaatgcgatctaaaaaaaaataagtcattctggaatttcaggaaaaactagcataaaaaaaatttttaaaggacaatgctttcaagaattaagaaaaaaaataagcaaaaga

SEQ ID NO: 394632 - DNA, 543 bp, Homo sapiens
ccattgttatcactttatagatgaagaaaataaggttcagagacattaagtaacatcacaacaaagagtatgtagcatatgagaagcaaaagaaggttttttggttagctggaatgcctggatatctggaaactccatcatattaagaagtttataatgttatgaccaaaattatccagaaacccagagcccttaaggacttgcgacttttagaaaggatgaaatgagaattgaggtcaaagggctggtaaaaccatgatgtataactaaaatttggggtcgtacctcaggctactgaaaagtgcagagggaacccagatttttcagagatgtttgtgtggacacaacgctcacacaccagacgcatgaggcaaatggattcaaaaagaaatgttttgacctggtaccaagaagacatctctaggaggttggaatgcgatctaaaaaaaaataagtcattctggaatttcaggamaaactagcataaaaaaaatttttaaaggacaatgctttcaagaattaagaaaaaaaataagcaaaaga

SEQ ID NO: 394633 - DNA, 586 bp, Homo sapiens
aattaagaaaaaaaataagcaaaagaaacccagaagagtcatactaacgcatctaaagtctatgcctaactaaaggaatgactcgaaggtactcctgtgaacttgctcccttgtgtgtgatttgtccccactcccttaaaaagttctcatgccttagtaaggttggtaaagttgaactcatatactctcctctkcaatcaatgaaagcaaaagaagtggtcttgagtcctagacattagtgctagaattgtagactaagatagaaatgccaagggtagggatgctgataatctgaaactgggagatccaggaattcactgaagctgaaatgttcgaagctcaacagtgagttagcaataaggcaggcaggcaggcaagagtccaaaaggactgcacagtgtgtcaaagggcaggcagaagcagtgagttaggaatcaggcagacacatggaaggcagagcctcacagctcccggagattcaggcaaacacagggtcggaaatcaagcaggaaggccaaagccaagaaggcataactatcacagagcaaaggaaagcagatggccaaagccctggacaagcagcaca

SEQ ID NO: 394634 - DNA, 586 bp, Homo sapiens
aattaagaaaaaaaataagcaaaagaaacccagaagagtcatactaacgcatctaaagtctatgcctaactaaaggaatgactcgaaggtactcctgtgaacttgctcccttgtgtgtgatttgtccccactcccttaaaaagttctcatgccttagtaaggttggtaaagttgaactcatatactctcctctgcaatcaatgaaagcaaaagaagtggtcttgagtcctagacattagtgctagaattgtagactaagatagaaatgcmaagggtagggatgctgataatctgaaactgggagatccaggaattcactgaagctgaaatgttcgaagctcaacagtgagttagcaataaggcaggcaggcaggcaagagtccaaaaggactgcacagtgtgtcaaagggcaggcagaagcagtgagttaggaatcaggcagacacatggaaggcagagcctcacagctcccggagattcaggcaaacacagggtcggaaatcaagcaggaaggccaaagccaagaaggcataactatcacagagcaaaggaaagcagatggccaaagccctggacaagcagcaca

SEQ ID NO: 394635 - DNA, 586 bp, Homo sapiens
aattaagaaaaaaaataagcaaaagaaacccagaagagtcatactaacgcatctaaagtctatgcctaactaaaggaatgactcgaaggtactcctgtgaacttgctcccttgtgtgtgatttgtccccactcccttaaaaagttctcatgccttagtaaggttggtaaagttgaactcatatactctcctctgcaatcaatgaaagcaaaagaagtggtcttgagtcctagacattagtgctagaattgtagactaagatagaaatgccaagggtagggatgctgwtaatctgaaactgggagatccaggaattcactgaagctgaaatgttcgaagctcaacagtgagttagcaataaggcaggcaggcaggcaagagtccaaaaggactgcacagtgtgtcaaagggcaggcagaagcagtgagttaggaatcaggcagacacatggaaggcagagcctcacagctcccggagattcaggcaaacacagggtcggaaatcaagcaggaaggccaaagccaagaaggcataactatcacagagcaaaggaaagcagatggccaaagccctggacaagcagcaca

SEQ ID NO: 394636 - DNA, 567 bp, Homo sapiens
ccatatgaataagataatatggtatctgtcttgctgtgtctggcttatttcactgatatgattgggctatgtccccatccaaaatttcatcttgaattgtaatctccataatccccataatcctcatgtgtcaaggttgggacaaggtagagataagtggatcatggggtcggttttccccatgctgttctcatgacagtgagtcgcacgagatccgatggttttataagtgtctggcatttcccctgcttgcactcactccatcctgctgccctgtgaagagggtgcctgcttctcctttgccttccaccataattgtaagkttcctgaggcctccccagcaatgcagaactgtgagtcaattaaacctctttcctttataaattacccagtcttgggtatttcttcacagcagtttgagaatgggctaattcattcactcaatatgatgtcctccaggtgcatccatgttgtcaaaaattacaggattttattttttttatgcctgaatagtatgccattgtgtatatataccacactttctttatccattcatccacagatgga

SEQ ID NO: 394637 - DNA, 587 bp, Homo sapiens
ttctttatccattcatccacagatggacacttagattcattctatatcttggctactgtaaatagtgttgcaataaacatttcttttgaatatataccaaataggattgctggatcctatttctgtttttaatattttgaggaatctccagactgtttttccatgatggctgtactagtttacaatcccaccatcaatttataaatattcccttttctccacatcccttccaacacttgttttattttgtctttttgataaaagctattctaactggggtgaggtggtatctcagtgtagttttgatttgcatttctctgatgattaacaatgttagcattttttacatgtctattggccatttgcatgtcttcttttgagaaatatctattaaggtattttgccatttttaaattgggttgtttattgctttttaccattgtgttgcttaagtttcttatatattctggatcttgacaccttgtcaaaagtgtagtttacaaacattgtcttctattctgtaggytgcctctcactgtattaatagttttctttgttgtgcaaaagctcttttagtttgatgtaat

SEQ ID NO: 394638 - DNA, 520 bp, Homo sapiens
gttggaagttagctgtaagaatgtcataacgagaaaagccacaagcaaagtgagtagagagtaatcagagacagttacccatgtttcagctatagctaccttaagaaaaggcctaagaaggtgcctgaaaggggtttgtgcattggataaagaaggcttcctcaacagacggtctcaagttgtacatcgtgatttaattctctctgacagaactacttgggtaccacggacacatcgtaggtcagactgacatggtcttaggctttaaaggaaataacctagacatytgtgaatttacataacttgttctatggatggctactgcataaagtgaaatcccagattaagggaagagtgaaaagcatattctccccatgttgcggcttgcagttttggcatactgctgccatgactctctccctggccttgcagccatcaaagcatcttgagaccactcagtgcggtgaagataggtagatgggaacaaataagaacacgaggttgtcttttattatgaaac

SEQ ID NO: 394639 - DNA, 595 bp, Homo sapiens
aaacctggagggttattatagccctggaaagtcttgtaggtgactttctgtattagaaaacccagtattagagaagatattctgtaaaatcaaaatatttgcaactaccaagggttattagagcacatatagagtgtctattggttatttattgagaaatacaactcacactaaaatgagaatttcattagcaaaatggcaaattcagaagaaagcctatgaaaattgcacttctactttccacattgttaaagagagtagaaaaatagtttgtcatgaacatcattattgctataacaatccaaagaattaatggtgaattggtctgtagagagtatattgaattactataaattcaaatccttttttagtgaacaagttgtctaaaggagacagtacacaatgaaatttcgcctgctagagaccataaaagaggataattaaaaacataaagacaggcaggaattagttctctctagaaaacatcctaaattggygggagctctgagactttttaaaatttactcaatatgtctgtatagtggttactgctggaagaggtcccgtttgactcttgtgtaaagaaaaggaaaac

SEQ ID NO: 394640 - DNA, 499 bp, Homo sapiens
tatagttctcggacacagggacgcaaatattgaatatactataccaactttaattatgcataaaggtgcrtttatgttattttctgaagagtatttttaattttcctccaactatgcaaacacaaatatttttgaagatggttccacaatggagagaaagacatttttatttgagtgattccccaataaattatgttctcaaatgacttatcataaatcattacttactgttcaaaatatgacagaattcagacttttatggccttctaagagtgccagcatatgtatactgaaaacaattaattcatctctccactcaattaatctgaagttttggccattctttcagtaaggaaaagggatctctttggatttctctgctgttaatgacaaagccagagtcaagaagtatttctttgactgcactggctccattactttatttaagaaatctcattatcccccccacaaaaaaaactttaattgtagagaagcacag

SEQ ID NO: 394641 - DNA, 559 bp, Homo sapiens
aggctagctgttgggaaggaattgtttgtcaagtgtccctagtccctgctctcacatactgtaaataacccactcatattgttctaagtcattccttgcaagttttaggttgagccatattgcaatgctgtctggtaggtgaaaaactgtcaaatatcagctattttatgtgatccaaccaacaccattgrgagatggagcccatccctcactactcccctttctcagctacactgttctgtttgctgtgcttcacccgggaatgttcttgcctcagggcctttgaactattgttgtttctatcttgactggccttcttttagatatccactcccatcctcacttcagaagttttatggaaacattaccttcttcaagaggtcttccttcactatccagtctaaaatttccatcccttatcctggcaaaacactttttgtgaaactaaattctctgctttattgttttctctttagaattcaccactattttacgtagataattatttatttttatgtattgagtgtcttcactagtataaggtgaaccccaagagagc

SEQ ID NO: 394642 - DNA, 559 bp, Homo sapiens
aggctagctgttgggaaggaattgtttgtcaagtgtccctagtccctgctctcacatactgtaaataacccactcatattgttctaagtcattccttgcaagttttaggttgagccatattgcaatgctgtctggtaggtgaaaaactgtcaaatatcagctattttatgtgatccaaccaacaccattgggagatggagcccatccctcactactcccctttctcagctacactgttctgtttgctgtgcttcacccgggaatgttcttgcctcagggcctttgaactattgttgtttctatcttgactggccttcttttagatatccactcccatcctcacttcagaagttttatggaaacattaccttcttcaagaggtcttccttcactatccagtctaaaatttccatcccttatcctggcaaaacactttttgtgaaactmaattctctgctttattgttttctctttagaattcaccactattttacgtagataattatttatttttatgtattgagtgtcttcactagtataaggtgaaccccaagagagc

SEQ ID NO: 394643 - DNA, 601 bp, Homo sapiens
ttttcctagctgcatctgataatcgcaaacttccttcagttatttggggccatctactactatagatgtctaaggagttctgaaacgtaaagagtragcttctaatgtggcagtagttgcagagttaatagttctgcagaacaccagcccttgggattcattcccatgaaagaatactagaagaggtctcataaatctcagctactaaggtatacagaggtggtggataatagttaagcctttgatttagttctcaaatcttccccaggaatgcagtacatgcatatgaatccagaaactactagagaaatcaacactctactgaaatactcttgttataaatacagatacgtgggggatgattaccaaatgtggttgggtttttagtggaacgtttatggaaattactttatttgggttcaaatgcttgtattgccactggctaacaagttgtctcatttcctgagattcagtttccccatctataaaatacaacccttaatgcctgactaatagaatgtgataaaaataagataatggatgtgattatggagacagtacttcattgtaatttatagcatgagctctggaatcagtctgt

SEQ ID NO: 394644 - DNA, 601 bp, Homo sapiens
ttttcctagctgcatctgataatcgcaaacttccttcagttatttggggccatctactactatagatgtctaaggagttctgaaacgtaaagagtaagcttctaatgtggcagtagttgcagagttaatagttctgcagaacaccagcccttgggattcattcccatgaaagaatactagaagaggtctcataaatctcagctactaaggtatacagaggtggtgsataatagttaagcctttgatttagttctcaaatcttccccaggaatgcagtacatgcatatgaatccagaaactactagagaaatcaacactctactgaaatactcttgttataaatacagatacgtgggggatgattaccaaatgtggttgggtttttagtggaacgtttatggaaattactttatttgggttcaaatgcttgtattgccactggctaacaagttgtctcatttcctgagattcagtttccccatctataaaatacaacccttaatgcctgactaatagaatgtgataaaaataagataatggatgtgattatggagacagtacttcattgtaatttatagcatgagctctggaatcagtctgt

SEQ ID NO: 394645 - DNA, 584 bp, Homo sapiens
tgggttaagactttgggaaatgttgggatagggtgaatgtatcttgctgttgagagcaatatgaatttcaaggggccagagggcagaatattgtggattaaatagtgtcttcccccaaaatatgttaagtcaaagtcccaacccctttacctctgaatatgactttgtttggaggttttgaagatgtaatagaaataaagtcatactggattactcagtgactggtatccttataaaaaggagagagagaagacatttaaagacatcaaggagatacagggaagaagtccatgtgaagacagagacagasattggagttatgctgccacaagccaagcaatgccaaagactgtcggaaaccatcagaagctagaaaaggcaaggaggaagtcttccctagaggctttggaaggagactggtcttgttgacaccatgatttcagaattctagaccttagaactttaagtgaacacatttctgttgtttcaagccacctggcctgttgtaatttgctgtgacagccccaggaaactaatacaatataggattccatttctataaaattctagaaaatacaaactaa

SEQ ID NO: 394646 - DNA, 512 bp, Homo sapiens
gggaaaactgaagactgcatagaaggagcaaaggatgtgaaagaaatgagcagagtccttgcccccagtatccagttatgaatcctacctcaagttgctcataatgacctgtgcatcctgctatttcagttattcatatttgcaaatagggcaagtaatgcctaccttacatagctttatggaaagtgaagcatctagttattgtctttcatagatgaggcagcaacacaaacccagtggattcccaaggttcatctagtcaatgtctgaaagaacagaaactggagttctagaattttcctgtcaaaacaggcaaattgttcaaaatcactggtgtacatttatttttcaktggagtggctaagagccaatccaaaattctagcagaactgcagttaaacgggctgtctttgattttcaattatatgagggacccattatctgaagaatatatcctgtcaaagaatataaaaaaagtttgttaaaatatatttgtaaaggcagagctgtca

SEQ ID NO: 394647 - DNA, 223 bp, Homo sapiens
ataacacaatgtcactggcattcagtgtgagtgagcaatgactaccattctgtttgtggtgccagagactcaacttcacacatacaaagtgtatgaatctgttcttggtttatgtgcagtatatatatgagaagcatttttctgttatcctttaaaggacttattctaaaaaacacatattatataaaagatctggtttcwaaaaacattttctgagctatga

SEQ ID NO: 394648 - DNA, 645 bp, Homo sapiens
ttcagcccatagcacatgcctactcataaagagttctgttgcttaccaatcatccatagagcaatttgttccaaacatcaagaggtggacttttcctttcagaggttttattcctgttatcagttaggcccccaaatatagcattggtgaaatgcaacattttagagccaagtagaaactcccaacagatgagaactcacraacacaaaaaagggagctgcagacactggcgtcttcttgaaagcggaggatgggaggcaggaaaggagcagaaaaaataactttggaggactaggcttagtaccggggtgacgaaataattttcacaacaaacccctgtgacacgagttgacctatataacaaacctgcacatgtacccctgaacctaaaataaaactaaaaaaaaaaaaaaagaaactcttcacagaactatgattttattattctcttggaattttttgtgactgttcttacagatatgtatagaacctaatcacataaatttggtttatgtatggtaaaacagctacttaattcattgttcaataactagttaatgttatttgtctaatgtaacttttataaattccccttagagtttggtgctaagtaaaactgtccctcctgagcaaataagttttttt

SEQ ID NO: 394649 - DNA, 582 bp, Homo sapiens
gttctactgtcattgttttgggtaaacaaatataaaggtgctattctaatgagtcrggaacatagttaaaattttagagtcacaccaaattctgcagcatcctggttggctagaagaatgtctgtgtctctgtgcatgtctgtgtgtatgtcttgtgtatgaatgtgtggtgctgagaagtcaacaagggaaggaaagaaaaagacttttcttcctgcaatctttcttttttttttttccccactgttcctaaggtgatgataagtggacagaagctctggtgctagtaattcactgcaatcctcctgtacagggttacctaaaactgtgtttcacctttagcttctcagctgttgagaaaaggaattgttattctaaaagattacacttagaaaaaagatggtgacaaagctgttaggtataagtaatcataataaaaaagtacaattagtcaaaccacatataggaattttacaaaaattccccagctgtaaaacgtaaaattttagaatcttgtggtggggaaatcagagcataaataccctgtgtttactcgagaaatccattcattgaccactgaaa

SEQ ID NO: 394650 - DNA, 559 bp, Homo sapiens
ggggctctaatcctacagactggagttctaaggacatgatcaagtcccattagctaagacctagagtagaagctagttgcatggctctggaagcatgtccatcacatgcaaggggaatggagactatagatccaggctcatcacctgctagggctctgctcctccactggatgttttccggacattctagaccacactctgktgggggtaaaaataaagcccataataccctgtaatattttgttctcactggtttcaaagttaagtggagcctagtaacagacctctagtaggtcctgctagcctgagcagaggtagtcattttctgaaatatttgatagagtaaattctgaagtgaattccttgccaaagaggctatgactttgtaggacttccctgtgggcagcagttaagcccaagagcactgggtgagttggtgctgcaaaggctagagggccagacgagaggagggtaacacctctttaatatcattcctcccaaaatacatttggaattgtttgcagacatcccaactctttttccctggaaactgggcaga

SEQ ID NO: 394651 - DNA, 589 bp, Homo sapiens
ttatttgtctgaggtaatcttgctccaacaattattggctcaactaatagtgatacctctaggttataatctcccaggtggcaggtcattttcatatagaaatttttttggaataaaataactgccatttgaagatctcaaactgtgtccaaagctacactcaaaataccatgaaaatgatgataggccttcacggcagtccaaacacacacaatcagcgagtgggcaaataaaaatgcaactaaaaattaacaatgacaacagtcaatgctagtctcttttaggacattttttccacctatgtatggcttttcttccccttgcccctaccaacatgataattctggctcatactgtttcacatttaaattgtaatgttgtccctgtttctaagggtatacctttagttcttcctatctgtcctagatacaaagtaaaaacagggagcaagtgggagatagtttcagtaaaaaaactaacaattattaagcccagactagggtccaggcttagtacaaaggactttacatatgcattttcttcttataatatgcagcctttgaggtgggyaatcatcttcccattttag

SEQ ID NO: 394652 - DNA, 405 bp, Homo sapiens
agtgctgttgtgataagcccatgctctggaatcaaagaaacctgggtttaatactggctcagaatttatcaagtaagtaatttaaatctccaaaccccagtttcctacgctatgaaatagcaacaatgatatgagtgttttatagatgttgtgaggactaaacgaaagacacatgtgaagcacttggcacaatgccaggcacttctcatcttccctcctattacagagaacagcatttccctacccatctttgaggttacttttgtctttccatccttctttcatgatcattatttccctggtrttcccttcctcccacactgtcaaccacttctccccactctctgcaatcacactcaggtcttcaatatcaggacaaaacttgactccactggcccctcctgc

SEQ ID NO: 394653 - DNA, 555 bp, Homo sapiens
aaaacttcaatcactcttcctgtgctgtagaaaattcatgaacaaataaatatattcatgcaaatagctcccacctcaacgatgagtttgtaagaaggtgttttttccttaaattaacctgcattttaaagcaagtgctccccaactgggaaatctggcagaattagtgagtaggaatgacctttattcagactgtaatccgtacatataattgatgacagcctccaaaaagatactaacattctgacctggtactattacatttcaaggtaatttgtgtcataatggttcatttgaaaacaagtacaagcaagttaatgcagcactgaatataatcacttgttcacattctcaggatctaaaagaaatggaacaggcttttaaaaaatcaatacacaaggctgaacttaatggatttttcactggaacctgctctgctgcacrgcacaatatacaacccaacctaggtctcagcagagctggattagattggaagagtctatcctacccacctcctaggccaaggatattctagtgtcaggaaaaaagacagtt

SEQ ID NO: 394654 - DNA, 473 bp, Homo sapiens
atgggcatttaggttgattccatgtccttgctattgtgaattgtgctggaatgaacatatgcatgcatgtgtcttcataagagaatgatttatattcccttgtttataatcccagtaatgggatttctgggttgacccaggctgtaatcttgaaactgtattctatccctgacttggttcctggttcgtagtgactttaggttatttctagtttcagcaacctgtaatcatgggaaggaaggagaaagggagtcccattttttggcctacttcctgattctattcctgaatgaccttgtcttttaggaatatatggttaagctattttaaaatgccaacatggctacagataacatactggaggagaagccatcttttttttaaggaaagagaggaaaattwttataaaataaagtagttctgattttcactgaaagtgctacctgttcctgaaaccactggactggaagcta

SEQ ID NO: 394655 - DNA, 556 bp, Homo sapiens
tgatttctttgcagaactgtccacttaaaaatctctgttgcaaacatgggcatatgagataatgcaaaggtactcttacttcggacagaagcagctaatcacagcttgttccagaaatcartgttattgacagattgagaaattgtgaaatgagttttactggaaagtgttgcaagatctttatttgaccaactcctaaactcacatttggctgagtcctggtggctcagggaaggaagacaaagagaaaagggcagacaacagaaagcggcttttctttcactgctttcagctggaaacgtgttagtgcccacgcctgtggtcttgcaggtttgcactctcttctttcaatgactttcctgtcaaagctgctttgttttcaacttaacataatggaacgccaacctaatactttgccaagctctcattgatccttagtgtggaataaatgtgaatactgcctcattaatcctctctctggtccttggggagaagtggcaagcaatatcccatccattttgcagtggaagaaagaaaggcaaagtaaattgctcac

SEQ ID NO: 394656 - DNA, 556 bp, Homo sapiens
tgatttctttgcagaactgtccacttaaaaatctctgttgcaaacatgggcatatgagataatgcaaaggtactcttacttcggacagaagcagctaatcacagcttgttccagaaatcaatgttattgacagattgagaaattgtgaaatgagttttaytggaaagtgttgcaagatctttatttgaccaactcctaaactcacatttggctgagtcctggtggctcagggaaggaagacaaagagaaaagggcagacaacagaaagcggcttttctttcactgctttcagctggaaacgtgttagtgcccacgcctgtggtcttgcaggtttgcactctcttctttcaatgactttcctgtcaaagctgctttgttttcaacttaacataatggaacgccaacctaatactttgccaagctctcattgatccttagtgtggaataaatgtgaatactgcctcattaatcctctctctggtccttggggagaagtggcaagcaatatcccatccattttgcagtggaagaaagaaaggcaaagtaaattgctcac

SEQ ID NO: 394657 - DNA, 556 bp, Homo sapiens
tgatttctttgcagaactgtccacttaaaaatctctgttgcaaacatgggcatatgagataatgcaaaggtactcttacttcggacagaagcagctaatcacagcttgttccagaaatcaatgttattgacagattgagaaattgtgaaatgagttttactggaaagtgttgcaagatctttatttgaccaactcctaaactcacatttggctgagtcctggtggctcagggaaggaagacaaagagaaaagggcagacaacagaaagcggcttttctttcactgctttcagctggaaacgkgttagtgcccacgcctgtggtcttgcaggtttgcactctcttctttcaatgactttcctgtcaaagctgctttgttttcaacttaacataatggaacgccaacctaatactttgccaagctctcattgatccttagtgtggaataaatgtgaatactgcctcattaatcctctctctggtccttggggagaagtggcaagcaatatcccatccattttgcagtggaagaaagaaaggcaaagtaaattgctcac

SEQ ID NO: 394658 - DNA, 516 bp, Homo sapiens
gaaaacaaagagacaacaattaagcaggacgatctcaaggtaggatcatccaatgtcatgaaataaccatggaaagtaacaatctccaggggaaggtgaaggcttttcctacctagtcaaatcctagtcttatcaaatttcttcacaaatgtatttaagaccttaaatcaagacgcttctgtttcaaatttttattattttttccagtcatgtatgtatatgtaaaaatwtacattttatgcttttaaaatttgtataagtggtattagaacagaaaaataggaaattgtaaggcaaataattagggaaatgatgcaagattcctcatgagcttcaaattgctatgaattatgtatttcaaaaaacaaaaggtactcttcagtattcaccaatcttacatggccaggagttaaaagaaaacaaagaaacaaacaacaagaacaagaataaataaactgcatagtttatattgtagcgaggtgatcaaaggaacctattttggcatgaaaataagac

SEQ ID NO: 394659 - DNA, 566 bp, Homo sapiens
tgcttttcacttgtcccctttatgatcccatcatgttaatgggcaaaaatgcttgatagttagatatctcttcaaaagttctggaaaactccaaatcccaggcygaggtgggcagatcaagaggtcaggagatcgagaccctcctggctaacacagtgaaaccgcgtctctactaaaaatacaaaaaaattagctgggtgtggtggcgggtgcctgtagtcccatatactttggaggctgaggcaggagggtggtgtgaacccgggaggtggagcttgcactgagccgagattgggccactgcactccagcctgggcgacagagcgagactctgtcttaaaaaaaaaaaaaaaagaaaaagaaaactccaaatcccaatacctataatgactgtgagtctgataatcacctactagtcattggatataaaggccatgagattttgctgcaactacacaccagaagttttctctgtattcacagttttccccagagttaaatgtgtgcctgttcagtgcatgaacattgtgtgtgtacagattatgatcagaatgacaaatgtgccc

SEQ ID NO: 394660 - DNA, 442 bp, Homo sapiens
gctcaggaactttggcactttgtgtcctcggggtgaccaccttcttcacctgatctggggactctggggctttttaactcctaagttcrtaactctttcctctaattgaactagtaaagctttttttcttcaccccctccccacccttattaacaatgtagatgcttttcttttcccttgattgaaatgtgattcaggaggagttgaagtttttctactccatttggatgattttcaaccctttgaagcttctttaagaaaataaattgcatgaaatgtttggcattaaagtattccttattaagaagaaaggcaggaagaaatggaagaagaaaaaaaacccattcctttatattataatacaaatgcatattcatattctgaattttaaaattaacattataataaagctgtttttatctttaggaatatcatgagcacc

SEQ ID NO: 394661 - DNA, 569 bp, Homo sapiens
ctgcctcaaaaagaaaaaaaaaattaacactgaggcrttattgccatctaaccctcacatgccaccattcaaatgttccccgtagtcctttgtagctaaagtattcatttcataataaagagttgcagtcatttgtcatgtcttgtttgtctccttcactccataagactttttcagtcttggctgggctttcataaccttgacacttttttaattgatgcataatatgaatttttacggggtacaggtgatattttgttattgatagaatgtgtaacgatcaggtcagtttatttaggataaccatcccctcaagcacttatcattttgatgtgttgatatttcaaatcctcacttctagctatattgaaatatataatacattgtagctgactatagtcaccccattctactatcaaatgctagaatttattccttctatctaaatatatgtttttagccattaacccacctcttttcattccccctcccccaccgacaaacccacgttctttccaggccctggtatctatcattctactctctgcctccatgagacgatggaacta

SEQ ID NO: 394662 - DNA, 569 bp, Homo sapiens
ctgcctcaaaaagaaaaaaaaaattaacactgaggcgttattgccatctaaccctcacatgccaccattcaaatgttccccgtagtcctttgtagcwaaagtattcatttcataataaagagttgcagtcatttgtcatgtcttgtttgtctccttcactccataagactttttcagtcttggctgggctttcataaccttgacacttttttaattgatgcataatatgaatttttacggggtacaggtgatattttgttattgatagaatgtgtaacgatcaggtcagtttatttaggataaccatcccctcaagcacttatcattttgatgtgttgatatttcaaatcctcacttctagctatattgaaatatataatacattgtagctgactatagtcaccccattctactatcaaatgctagaatttattccttctatctaaatatatgtttttagccattaacccacctcttttcattccccctcccccaccgacaaacccacgttctttccaggccctggtatctatcattctactctctgcctccatgagacgatggaacta

SEQ ID NO: 394663 - DNA, 530 bp, Homo sapiens
aacaacaaccaaaatatattgtgttataataagtaatattaaaataaaatagcaaagttgcctagtacatgactgggagttacttagcatggtcaaagaagagtttttctcttccctgattttatttggaaaattttaaaattgcagagattgaaaatatagaacacacatgtacaacactcatgtagattcacaattttcacataggttatcacactcgcctttcctttgctgaacaattgcaggcatgataacatgttatctctaaatattgtagcatttgtcctgtaaaagtaaagtacttcttctatatttcacaatataattaccataatcaagaaatattaaatttattcaawgatatatggtgctaggtttcaggctatcagacccagataggaaatatttttacactttgtggttcaagatgcaaaatcaaggatatgatcaggtaactatacaacaaaatgaaaaacagttgcctaacattttatattgatgaaattaaaaaatataattgagtacttttt

SEQ ID NO: 394664 - DNA, 569 bp, Homo sapiens
ctgcctcaaaaagaaaaaaaaaattaacactgaggcgttattgccatctaaccctcacatgccaccattcaaatgttccccgtagtcctttgtagctaaagtattcatttcataataaagagttgcagtcatttgtcatgtcttgtttgtctccttcactccataagactttttcagtcttggctgggctttcataaccttgacacttttttaaytgatgcataatatgaatttttacggggtacaggtgatattttgttattgatagaatgtgtaacgatcaggtcagtttatttaggataaccatcccctcaagcacttatcattttgatgtgttgatatttcaaatcctcacttctagctatattgaaatatataatacattgtagctgactatagtcaccccattctactatcaaatgctagaatttattccttctatctaaatatatgtttttagccattaacccacctcttttcattccccctcccccaccgacaaacccacgttctttccaggccctggtatctatcattctactctctgcctccatgagacgatggaacta

SEQ ID NO: 394665 - DNA, 542 bp, Homo sapiens
cttaacaaccagcttctctttttctgctaacagagaaagaaagagcactctgttgcgcacaagtcactcaccaaactgaagccttggctctgaagaagagaagagctcagagatgtcattgggagaggaagccaatctgtttgctgcccccasaaaaagaggtccacctctagtaaaagagttccacctttaagacagcaacaaaacgagtgtcttgtcctgactgcctaagatcaaaagactgacaccaaaatgtcaatgaaaactttaagaacagtgatgtcatgatgcttctagggtattaggttgattcaatcaaaatgtagcaccctggtgaatccgtgaagaaaaattcacatctggatgagcagttcccacagatgccaatgattcaattcagaaagcattaactgaccagtggcatgggctgacagtgaggctaagaattctgggactcatattgccaaccctaaggtggacacagtctagttggtgagacagaagtatatacaaatcatgctgagggcttgtgctaaaacaga

SEQ ID NO: 394666 - DNA, 547 bp, Homo sapiens
ttgcctcactaaactggtctggaaatataccattttgctcttaagcaaatgttttcamagcaaagcaaagagagctgcaacaagagcctctttctattatttgcaaggttgcttggccaggttgccttcattatcaactccatcaggcctgaggtcaatgtgcacattttgccacctgctgatgccccatctctgtaggctgcaagagaaacaagacagccatagtttgtttgattttgtatcacattcaggtaatccttcaatattgagactgctcataattgaatgttttgctactaggcttgagttatcaaacaataaaagggatacagggctcaggcgagattgtgacaaattataggagccatcttcttgggttgattgcttttgtatttaattgtatgctaattattagttttacaagacggatacctaaagaaatagcaaagtaacaggaaaaaatgtaaaagacaacacatgaatatatatgtcagtctcacagggcaatttaccaaattaaaagacagaaaaataaactgtgcatgaa

SEQ ID NO: 394667 - DNA, 574 bp, Homo sapiens
tttcttgtattttttttcctgaacactcatttgaaactattgacatatrtcttatgactaatttcttttaatacagcaatttctggagtacagtaattttgctcaacatcagtttgttacaatgtcgaccagagaaaaaaatccatttctgtctgggtcagctgtctgtgtggagtttgcatgtttgccccacatctgcatgggttttctctgggtatttctgttttctcttacgtctcaaatatgtgcacattaggtgagttgtcatgtctaaattgtcccagtctgagtctggtgagtgtgtgtatgtgagtgcatcctgtgatggaatgctgtcctgtccagggttggtttccacctgacacccagggctgctgtgataggccctgtctacctgcaaccctgagctggaataagcagattggaaaatgaatgaacacaaaatattgtacgataaaaatgcgtaaagaatacaatagtcacagaaatgcataataataaacaatgcactttgaaagtgctcagccaggccagcctgttggttattgtctttgaagtacgtggtgatagcaga

SEQ ID NO: 394668 - DNA, 509 bp, Homo sapiens
tcatttgaaactattgacatatgtcttatgactaatttcttttaatacagcaatttctggagtacagtaattttgctcaacatcagtttgttacaatgtcgaccagagaaaaaaatccatttctgtctgggtcagctgtctgtgtggagtttgcatgtttgccccacatctgcatgggttttctctgggtatttctgttttctcttacgtctcaaatatgtgcacattaggtgagttgtcatgtctaaattgtcccagtctgagtctggtgagtgtgtktatgtgagtgcatcctgtgatggaatgctgtcctgtccagggttggtttccacctgacacccagggctgctgtgataggccctgtctacctgcaaccctgagctggaataagcagattggaaaatgaatgaacacaaaatattgtacgataaaaatgcgtaaagaatacaatagtcacagaaatgcataataataaacaatgcactttgaaagtgctcagccaggccagc

SEQ ID NO: 394669 - DNA, 586 bp, Homo sapiens
ggcttgtcagggggttaggggttaggggagggatagcattaggagaaatacctaatgtagatgacaggttgctgggtgctgcaaaccacyatggcacatgtatacccattgattctcacagtgaccttacatactaagaattattgtttctgaacctcacagaattaatgggattctctcagagtggaaatagaataagtaaagtttggtgaaaataagaaaaaagggatagttccactctaccctaaaaaataactgaaataccagtttaacccaaatattctataagatgctgagtaaatgatgagtgtgtaaacccctctgtgatggccaatgcagaagcacacataatcaggctcacattatccccactctgtttaaaagggccttctgctgttggttctacccccaagaggagagaacaggaaccagggcttggactccaaggtcagacattgggagtctaagtaaaattctgtcattttccagctatgggatattagtcaagatagttatcctcctaacccttggttctcttattaatataatgaggataattataaggttactgtgagaattacataag

SEQ ID NO: 394670 - DNA, 586 bp, Homo sapiens
ggcttgtcagggggttaggggttaggggagggatagcattaggagaaatacctaatgtagatgacaggttgctgggtgctgcaaaccactatggcacrtgtatacccattgattctcacagtgaccttacatactaagaattattgtttctgaacctcacagaattaatgggattctctcagagtggaaatagaataagtaaagtttggtgaaaataagaaaaaagggatagttccactctaccctaaaaaataactgaaataccagtttaacccaaatattctataagatgctgagtaaatgatgagtgtgtaaacccctctgtgatggccaatgcagaagcacacataatcaggctcacattatccccactctgtttaaaagggccttctgctgttggttctacccccaagaggagagaacaggaaccagggcttggactccaaggtcagacattgggagtctaagtaaaattctgtcattttccagctatgggatattagtcaagatagttatcctcctaacccttggttctcttattaatataatgaggataattataaggttactgtgagaattacataag

SEQ ID NO: 394671 - DNA, 547 bp, Homo sapiens
taataaacttggaatctactaagagggtataccttgagtgttcttaccactcacaaaagatattataattatgggactcaatggwtatattaattagctttattgtggtgattattttacaatacatgcatatatcataacatcaagttgtacaccttaaatatatctagtttgtgagacatatctgaatgaaacgctgatagggtttggatctgtgttcctgctcaaatctcatgtcgaattgcagttccggttgttggaggtggggcctgatgggaggtgattggctcatggggctgtatccttcatgaatggtttagcatcatacttttggtgctgttatcttaatagagttctcatcagatctggttgtttaaatgcgcatggtacctccctgctctctctcttcctcctgttctggctatgtaagacgtgcctgcttccccttcaccttcctccataattgtaagtttcttgaggcctcctcagaagccgagcagatatatcatgccttttgtacagcctttggaaccatgagccaattaaa

SEQ ID NO: 394672 - DNA, 547 bp, Homo sapiens
taataaacttggaatctactaagagggtataccttgagtgttcttaccactcacaaaagatattataattatgggactcaatggttatattaattagctttattgtggtgattattttacaatacatgcatatatcataacatcaagttgtacaccttaaatatatctagtttgtgagacatatctgaatgaaacgctgatagggtttggatctgtgttcctgctcaaatctcatgtcgaattgcagttccggttgttggaggtggggcctgatgggaggtgattggctcatggggctgtatccttcatgaatggtttagcatcatacttttggtgcygttatcttaatagagttctcatcagatctggttgtttaaatgcgcatggtacctccctgctctctctcttcctcctgttctggctatgtaagacgtgcctgcttccccttcaccttcctccataattgtaagtttcttgaggcctcctcagaagccgagcagatatatcatgccttttgtacagcctttggaaccatgagccaattaaa

SEQ ID NO: 394673 - DNA, 606 bp, Homo sapiens
tgtgaccccaaactgctctggagaacaaaggtggcaggacccctgcccagcaggtccattggatggggatactgccctgtgggaccaagtgtaagtgtagagcatcccactagaggggattattcttgagcctaaagatctaattaagtttctcttgctagattttggactctggagatttgtttccccttcctcttttctakttcacccttttggaatggaatgtctaccctatgcctgtctcactgttgtatttcagatgtgcataacttatctggtttcacaggttcatagctacagaggaatcatatcttcattcctcatgatgtctcaagatgaatcatgcattgagtctcacccatacctgatttagatgatattcatatgataccctgcactttagactttagagttgaagctgaaattagttaaaacttttggggcagttggaatggaatgaatgcattttgcatgagaaaaatatataaatttgggaaagccaacagtggagtgttgtggaatgaatgtttaaatttccacaagctctaaaccccagtgtcactgagtttgaagatggggcctataaggaagtaattaaggttaaat

SEQ ID NO: 394674 - DNA, 549 bp, Homo sapiens
ttctatataatattctaacataaaatattttatttagtatgtaattgtaagggataaataatcatggatcaagatggaagaaaagtatctgattagtggcagaggttgattttggaaggtggatcatcagtgatcctttatcatcgtctttatgattatttcaattcctctgcaagaaacatgtattgctttgagaattcaagaattgttcaagactttttaaatctggaggtaagatggtctggaggggaggtcactgaacttagagagcccagcatttgactctcagctcagcttctcactaaggatggactttgaagccgggatagctggctagccatatgcagaagaatgaaactagacccctacctttcaccatataaaaaaaattaagatgaattaaagatttaaatttcaacctcaaactataagaatcctagaagacaacctaggaaacacctttctggacatcagcsttgggaagcaatttataactaagtcctcaaaagcaattacttttgcaacaaaaacaaaaattgacaagcagga

SEQ ID NO: 394675 - DNA, 549 bp, Homo sapiens
ttctatataatattctaacataaaatattttatttagtatgtaattgtaagggataaataatcatggatcaagatggaagaaaagtatctgattagtggcagaggttgattttggaaggtggatcatcagtgatcctttatcatcgtctttatgattatttcaattcctctgcaagaaacatgtattgctttgagaattcaagaattgttcaagactttttaaatctggaggtaagatggtctggaggggaggtcactgaacttagagagcccagcatttgactctcagctcagcttctcactaaggatggactttgaagccgggatagctggctagccatatgcagaagaatgaaactagacccctacctttcaccatataaaaaaaattaagatgaattaaagatttaaatttcaacctcaaactataagaatcctagaagacaacctaggaaacacctttctggacatcagccttgggaarcaatttataactaagtcctcaaaagcaattacttttgcaacaaaaacaaaaattgacaagcagga

SEQ ID NO: 394676 - DNA, 402 bp, Homo sapiens
gggaggaagaaaggaagagacggagaaaagaaaaagtgaaggaaatcaattagaaaggaggatgaatggaaggcagtgagagaaaaagtttgtatttcttgagggtaccagctatgaggcagacgttttctgcttaattctgtgccagaagggcctcctgcattcatttatgaataaagaaactgaaactcagagaaagttcaagttctttatcatcatatggctaagtcaaagcccaagctcgttctactccaatatgccattggctcttcccctgtttttcctgagccaaatgttcaaaagggcaagttcaaggstgttaaaaacaccggaaatgcctgtcatcactcattttccatgccagccactgtgctagacacttaaagccagtgtctcactgaa

SEQ ID NO: 394677 - DNA, 446 bp, Homo sapiens
atctccaactctaagaaaaagaaaagaaaaatgaagaattgttgcttgcatcccaaataaaatatgaggtcttgaaactcgctgtgtcttctctctactcttcatttcctgcctttaaggggacctggaaacaaacatgaatggcasagaaccttggtggtagggacacagtggagagtgagtgttggggataagacagagaggagatgtgtgtaactggatggccccagagactgtgaggcccttaacagaagtctgccaggctgagggagcaggttggatggcacaggttatatatccagactgggacaggtttgagacacatgtaagtctaaatgtctaacagaaaactggaagagctagaatggaggtttcatgagggctggggttgtgtctgtctcatctctatgcccactgcttagggcagggtctggcatagcacagat

SEQ ID NO: 394678 - DNA, 325 bp, Homo sapiens
aataaattgttgcgggaagtcagggaccccaaacggagggaccggctgaagccatggcagaagaacatggattgtgaagatttcatggacatttattagttccccaaattaatatttttataatttcttatgcctgtctttactrcaatctctaaacataaattgtaaagatttcatggacacttatcacttccccaatcaatacccttgtgatttcctatgcctgtctttactttaatctcttaatcctgtcagctgaggaggatgtatattgcctcaggaccctgtaataattgcattaactgcacaaattgtacagcatgtg

SEQ ID NO: 394679 - DNA, 325 bp, Homo sapiens
aataaattgttgcgggaagtcagggaccccaaacggagggaccggctgaagccatggcagaagaacatggattgtgaagatttcatggacatttattagttccccaaattaatatttttataatttcttatgcctgtctttactgcartctctaaacataaattgtaaagatttcatggacacttatcacttccccaatcaatacccttgtgatttcctatgcctgtctttactttaatctcttaatcctgtcagctgaggaggatgtatattgcctcaggaccctgtaataattgcattaactgcacaaattgtacagcatgtg

SEQ ID NO: 394680 - DNA, 325 bp, Homo sapiens
aataaattgttgcgggaagtcagggaccccaaacggagggaccggctgaagccatggcagaagaacatggattgtgaagatttcatggacatttattagttccccaaattaatatttttataatttcttatgcctgtctttactgcaatctctaaacataaattgtaaagatttcatggacacttatcacttccccaatcaatacccttgtkatttcctatgcctgtctttactttaatctcttaatcctgtcagctgaggaggatgtatattgcctcaggaccctgtaataattgcattaactgcacaaattgtacagcatgtg

SEQ ID NO: 394681 - DNA, 329 bp, Homo sapiens
tttaaatttcccttttgatttcttatttgacccattggttgttttggaatgtattgtttaattttcacatattttgtgaattgtccatcttttctctggttattgatttctagttttgtacaattagtgtcagaaaagatasttgatataatttctattttattaaatttgttgacttgttttgtatcctaacttatgatatattctggggaatgtttcatttgtgcttgataagaacgtgtgttttgctgtttttggatgaaatgttctagtatatatctgtgaggtctgtttggtctaaagtttagttcaagtccattgtattctta

SEQ ID NO: 394682 - DNA, 538 bp, Homo sapiens
actttagacattcactttgtcaacctacataacaggcaagaagagatgctccaaggataataagtttattcaggagtgggcattgcaatgtagtaaacaatggagatattcacagaagtaaaggaagacaagtgactttaaagaaaaaatgaggatgttacataagttgttttgaaacaattattcttggcaacaaaaatcaatagcaagggtggtgtcagtccaaggttgaacaagtagttgctgggcagatatctttgcagaagtctttttttgtatgtgaaaggttatgggggtctttggcaagtttttggtttttgcagtcttttgtgatagttcttgttctcaggcatacatgtgtgagaacactgacttcatggccttccctggtctattttgtcagggttgacacaagtgactccatttyaatactgacaattttcacaactcccacgagaacaaggtgataatctgggccttgctaacacctgtaattgtttgcttaaaactgtccttaattcaaatttctcatttttca

SEQ ID NO: 394683 - DNA, 572 bp, Homo sapiens
aaatatttcagagtattattatgcaactaattcaattaaatgtattattttctactttttgacagcaatgtgcttggcaattttacatactttatttcatttttttccctcaaaaccaatgctatatgttatttcataatgcaaacattgaaactctgagaggttgttactttccccaaactacaaagctatcgagtaactgagctaaataaaagctagtctttctaattccaattcttttcactcagttttttaaaaatgtttattttattttcaggggtccatgtgctgctttgtttcataggtaaatttgtgtcktgagggtttgttgttcagattatttcatcatccagatattaagcctagtagtacccattagttatttttcctgatcctctcactcctcccatcctctaccctccaataggccctttccccacattttttctttgtatctaagatctatttggacatgatagatccgtttgatgttccctgaagaaatgtactttctatcatgcacacatggacgcacatggacatgaacatatacatattctcattttctgaat

SEQ ID NO: 394684 - DNA, 564 bp, Homo sapiens
cattttaaatattatgtcaagagtctgggtcttaatttaaatgctgtggaaaatgttgatgtttttgttttagcaggcaatttatccagttaggttcatgctgcatgttccaaacctgcttctgtgcgctgggattccaaagtcaaactgcgaagcctttgtagagcgcttcacatctgtttccaagtgcaccacccagtggacagtctgggtcctgggcagtagtttacctgtagtttagttctcaaacttttaggtatgttagttaggttcccatcatggcatgggtgagcccagagctcataaacaactttatgaggccacttgcccaggctcctctttgtaatctccctagtactgtgattccsaggtgctctcttttacagcgtggtcccatcctgttggaactgcttcctcagtaaagggagaggaaaactagactgcctcagagttttggctcctgtggccttccattatgggtggctgtcttccactcttacccgcatccccatgggattacttgggagttggagtatgagaaatggagggaaaaaagaagaaaat

SEQ ID NO: 394685 - DNA, 610 bp, Homo sapiens
ggtgacttctggtccagttcttgtttttcttactgcagtgaattcaggatttgaatggaagttcaaggtcaagttgctctgagttgcatctaagctgtgggaggaatgggtgagtgactttcatatatcaaggtactggggaagaacagcgtctgagcctagacatagtctgtccacatgggtattccttgagacgtgatcatctaatctggttttcagctatcctcatctgctcactctggtatatacagagatgcttgcatttgcatccggtgatggtcataaagtccaccctgacattgaactgctccayttgtcctgactgagagctctctcaggcccagcaaatcacggcagcccatgtctgtcctgcctgaggctgcacaaggtggggagggggtggcaggaacagtagtgtacagggccccttcatagagacagacaatgtcatcaaaagatattcctttcttcttcagtaaaagagaaagaactacttgggacagtactagatgcttcaaggggaaaaatgtcttctcggcacaaataaatttgtcaatttaacttctaaacacaattaaacaaattttcttcgtggtggcattgcttagga

SEQ ID NO: 394686 - DNA, 610 bp, Homo sapiens
ggtgacttctggtccagttcttgtttttcttactgcagtgaattcaggatttgaatggaagttcaaggtcaagttgctctgagttgcatctaagctgtgggaggaatgggtgagtgactttcatatatcaaggtactggggaagaacagcgtctgagcctagacatagtctgtccacatgggtattccttgagacgtgatcatctaatctggttttcagctatcctcatctgctcactctggtatatacagagatgcttgcatttgcatccggtgatggtcataaagtccaccctgacattgaactgctccacttgtcctgactgagagctctctcaggcccagcaaatcacggcagcccatgtctgtcctgcctgaggctgcacaaggtggggagggggtggcaggaasagtagtgtacagggccccttcatagagacagacaatgtcatcaaaagatattcctttcttcttcagtaaaagagaaagaactacttgggacagtactagatgcttcaaggggaaaaatgtcttctcggcacaaataaatttgtcaatttaacttctaaacacaattaaacaaattttcttcgtggtggcattgcttagga

SEQ ID NO: 394687 - DNA, 652 bp, Homo sapiens
ccactctgtgtcatttgattggataatttcatacatttacattccaggtaattattgatagctgaggactcactactacaagtttattaactgcattttgattgttttgtagattctttgctcctttcttattgctgtcttcattcgtgattgcacagaatcataataaaatacaatgtatcaagttctttggtatgcatctaaggaggctttaaatgaaattttcaatcttaaatgtcaatattaaaaatgtggagagtaaagagcaacatcagcaagatggcaaaacaggaagtcaccccttgtatccccacacttcagtaagaattctgtacccatccatggacagaagtatctttgtggtagcctttaggtttaattaggaagttgtgaaaccttggtggagcccaagacctggctggataattttgaggctatatacctgaacttagatgaaagatctgccagtcatactcctgggttcaaacctggaaacagcctcatcccctaaagtgtttggctacagcttcatttggccttaggcctgctatcaaawttgtcttctaagggttccaggagaatctaaacacactagtgcctctgcagaaaggctgctctgcccaccaacatttgtcttagtgatggacttgag

SEQ ID NO: 394688 - DNA, 591 bp, Homo sapiens
agaccgagaggatagggatattaaaagatttctcaggcaaatagtaaccaaaagagagraggggtgtctacacttgtattagatggaataggcagtaagttaaaaactgtaaaagagacaaagaagatcattacattataataaagaggttaaatcatcaagagaatatagcaatttaaaatgtatatgcacccaacattggagcacctaaacatataaagcaaatattattagattaaagaaagaaatagactgcagtataataattgtggaggacatcaatactccacaagcaaaaatgcatagatcatctagacagaaaatcaatagggaaatgaacttgaacaacatttaaaacatatggatctaacagacatatatagaacattctgcccaacagcagcagaatacacgttcttttcaagtgcacccagaacattctctaggattgtcatacattagtccacaaaacaagttttaacacatttaagtagattgaagtcatataaagtatttttactgattataatggaataaaactaaacgtcagtaacaggaggaattttggaaaatttgcaaatacatagaaat

SEQ ID NO: 394689 - DNA, 652 bp, Homo sapiens
tgattaaatcatctggagtcagaagatctgatttcaagtcccaggctgcaactgaggaattgcttcgcctgtctgatcttcagtttcttcttctgtaaaaattaattatcgttattctacctactttaaagagttgctgtgagtctccaatatatgtaacttatttttataaggatagaattgctaagaggtaagagatcattgggctatatgaattttaaggttcattttcaatccaatattttgttaatctctgaatatcttaaaatggcatgtgagtagaagcttgacagtattaatgcttggaagagtttctggacaaaaacagaattaaaaaaataataatctcaagtcatccaaccaatcaacaagttccattctggaactctagattccttttatttctttctcttgtctgattgctctggctaagagttccaatactaggttgaataggaatggtgagagtgggcatccttcttttgttccagttctcaggggactaggtccaawtaaaatgccaatgtcatcctttacagaattagaagaaaaattctaaaatgtatatggaaccaaaaaagagtccaaatagcccaaataaacaaaaagaacaaagctgaaggcatcacattttccgacttcaaactatgct

SEQ ID NO: 394690 - DNA, 560 bp, Homo sapiens
aaggttaatataaaaagttaaattgcctttccatatgccagcattgaacaatgaaaatttgaaatttaaaaagcagtaacattataacatcaccaaaaaataaaatacttagatatacatataataaaatacatacagctctatatgtgaaaaaccataatactctaatgaaagaactcaaagatttcaataagtagagaaatataccatgatcatggatttaaacataatattgttaagatgttgattcttcacaatatgatccataaagacaatgtaatcgcagtcaaaatctcaacaaactattttgtagatctctacacactaattctaaagttcatgtggaaaagcaaaatacctagaatggcaatacaatgctaaagaacaaatctgtaagactcacactacccaattttaagacttactataaagctgcagtaatcaaaatagaactacctcattgaaacaacagacacacagaccaatggaacagaayagagagcccagaagtagatccagacaaatataattaagtgatctttgtcaaaggagcaaaggca

SEQ ID NO: 394691 - DNA, 510 bp, Homo sapiens
cattataattctctgatctatctaaatcactattattatgaggcccattttagggaataggataataaagtcaagagacattatatggttctcttgagggcaatcagcaaggaagtcacaaagacaaatttctgactctctttccagtccttctttaattacaccattctgttacacacttcacatcacaacaaattactgacctgtttatccttgtatcatcagtattttatgcaaggtataattaataatagattcagaaaataatgtgtacaataatctgtatttcatgtttagaattttaaaaatttacgactgagagaagattaagagataatcttttcagctcaagcccttctagttggaaatgagaaaaatgaaactcasaaggctgagctaattttcacagtgtcattgcatgagtagtatctgtgccagggatgaaacccagttctatctgatggcgaactttggttctttcttgaatagtatgctagttgacaggttgtg

SEQ ID NO: 394692 - DNA, 507 bp, Homo sapiens
atggtccctgacctcaataaaccgatgtgcttatatttagtgaacttctattgtattgcagacattatrctagcagctaaggagaaaaaagataaatgaaatatgggctccacactcaaagtatttatgaacaaacagagctagacataaaaagttatcactttataaacaaggcagggagtgccagaaatgtggctgaagaggtgggaatagcacgaatgacagggagctttgtaagctaagctaaggcagtcagtgagaagtcattgaaggttttcatcaagataataatgtgatcaaaaatataatgtttgctgctgtgtgcatgatgggatataagggagatcagtgtgaattcagaaatatacatatttgtagagaggaaaaggatctaaattaaggcaatgggagaggaatggaaactttctttcttcagcttctgctcacagagatacacaaatcaatccagaaattcacctctcccttaatcagccaccatacacaagc

SEQ ID NO: 394693 - DNA, 507 bp, Homo sapiens
atggtccctgacctcaataaaccgatgtgcttatatttagtgaacttctattgtattgcagacattatgctagcagctaaggagaaaaaagataaatgaaatatgggctccacactcaaagtatttatgaacaaacagagctagacataaaaagttatcactttataaacaaggcagggagtgccagaaatgtggctgaagaggtgggaatagcrcgaatgacagggagctttgtaagctaagctaaggcagtcagtgagaagtcattgaaggttttcatcaagataataatgtgatcaaaaatataatgtttgctgctgtgtgcatgatgggatataagggagatcagtgtgaattcagaaatatacatatttgtagagaggaaaaggatctaaattaaggcaatgggagaggaatggaaactttctttcttcagcttctgctcacagagatacacaaatcaatccagaaattcacctctcccttaatcagccaccatacacaagc

SEQ ID NO: 394694 - DNA, 593 bp, Homo sapiens
tgaatttttaattaacataaacctccttcatgagccttcctttctccaatgtggtctctgtaggttgtaactgctaaaagaaaaatagcaaatcatytcttagtcttatctggccttgtcaacatttttatttgtcttatcctctcacagtttgtcagtttatgaaagaatttatttaacacctatcatatgtcaggtattctcttaggtaatagtttaggtataaccactgctccagaagagtcccagctaaatggtgaggaggaggatgggtgatatcatgaaagagtggtgaaggcattaattacttatctcacttatttggccattgtgaccaaattatctatattatcattaagaaatagcatctctcttgttataaaatacccctaggaaaccctaaattaaaatgttgcgctctacaaaagactactgtactacagttttaatataaaatctacatataggtacagtgacatcagctagagttgcctggtgctcattctcctccactccccaacaaaaaaggaccaaacaacaaactatatttttgcctcgagtgatggaggaagtacagagcaccagggggaggc

SEQ ID NO: 394695 - DNA, 575 bp, Homo sapiens
ataacattgcatgaacagatttctgcctacatttccaaacatagttatcccatattctttaactttgatgcatatgattatgcaaaattcttctttctttaggctttgatgcatattccactttgatatgactacattgctatatattatttattatactcctgtatgctacttcatgctgagtgaaaagtagaggtgaataaaatgccttctcaactacactgaaaaaagaaagcaaacaaaacaagaggatataaacaagcagttcagaaaattacttctataataattgaagttgtgcttttaattactgtattagttcattatttagtaaatatttttgtcagactttgtgttatctcattttgacagaagtggggaaagtcctaatgattcaaatattccaattaccattataatttttaaaatggttaagtgctgaacaattcacaatactcttctcttccattgttatattttatatctatcacartgcagcgaggtagggagccttaggacattaccttgaacctagtaagcatttaatcaatgttttctatggactattcttaaac

SEQ ID NO: 394696 - DNA, 569 bp, Homo sapiens
ttattgaaatataaaataaacaaaattgataaaattaacacattgactcttctgcttttgctattcattgttagcactttaccatgtaatcrtgctgacactggaatatgggcagagaagctttccaggctcgcagcatttgtaaataaagaagagcttagaagggcaggagtagggccaggcgccgcggtggctcacgcctgcaatcccagcactttgggaggccgaggcgggcggatcacgaggtcagatcgagaccatcctggctaacacggtgaaacctcgcctctactaaaaataaaaaaaaaattagccgggcgcggtggtgggcgcctgtagtcccagctactcgggaggctgaggcaggagaatggcgtgaacccgggaggcggagcttgcagtgagcggagatcgcaccactgcactccagcctgggcgacagagcaagactccgtctcaaacaaacaaacaaacaaaaaagggcaggaatagggctgagtatgaacagacacactcatccagagggcaggcatttgagtcacaatctggtacgaattccagaaaaacag

SEQ ID NO: 394697 - DNA, 569 bp, Homo sapiens
ttattgaaatataaaataaacaaaattgataaaattaacacattgactcttctgcttttgctattcattgttagcactttaccatgtaatcatgctgacactggaatatgggcagagaagctttccaggctcgcagcatttgtaaataaagaagagcttagaagggcaggagtagggccaggcgccgcggtggctcacgcctgcaatcccagcactttgggaggccgaggcgggcggatcacgaggtcagatcgagaccatcctggctaacacggtgaaaccycgcctctactaaaaataaaaaaaaaattagccgggcgcggtggtgggcgcctgtagtcccagctactcgggaggctgaggcaggagaatggcgtgaacccgggaggcggagcttgcagtgagcggagatcgcaccactgcactccagcctgggcgacagagcaagactccgtctcaaacaaacaaacaaacaaaaaagggcaggaatagggctgagtatgaacagacacactcatccagagggcaggcatttgagtcacaatctggtacgaattccagaaaaacag

SEQ ID NO: 394698 - DNA, 569 bp, Homo sapiens
ttattgaaatataaaataaacaaaattgataaaattaacacattgactcttctgcttttgctattcattgttagcactttaccatgtaatcatgctgacactggaatatgggcagagaagctttccaggctcgcagcatttgtaaataaagaagagcttagaagggcaggagtagggccaggcgccgcggtggctcacgcctgcaatcccagcactttgggaggccgaggcgggcggatcacgaggtcagatcgagaccatcctggctaacacggtgaaacctcgcctctactaaaaataaaaaaaaaattagccgggcgcggtggtgggcgcctgtagtcccagctactcgggaggctgaggcaggagaatggcgtgaacccgggaggcggagcttgcagtgagcggagatcgcrccactgcactccagcctgggcgacagagcaagactccgtctcaaacaaacaaacaaacaaaaaagggcaggaatagggctgagtatgaacagacacactcatccagagggcaggcatttgagtcacaatctggtacgaattccagaaaaacag

SEQ ID NO: 394699 - DNA, 564 bp, Homo sapiens
tctcaatttgaaaaagtaaccagggagagaaaaaaataatcgtttatgtgattcagtgtccatagggtacaaacaaacacattgtttgcaagtagctcacatattgctgaaatttctcttgtttgtcctcatggaaagaatattgtattacatggtgaacaactaactggaaagcatccctccagaaaatgcagtttgagttgatgaggatacttttcaccatgttctttggaagctttatgacaaagcataaagatatagtacaattcagggaaagcaattctataaaggcaaatatgatacagtttgagtatatatctctcacactgaatttrggaatatgcatatatagctatgtacacatgtaatttagaaatatatattttctagtatttctgatttctaatatttagaaatttctaaatatatgtatatatttgtgggcgtgtgcatattatatatatatttaaaaatgaactttattgaagtataatttacctaaaataaaaaaagacattaaatgtttatagtttgatgagttttgataactttatatactcatat

SEQ ID NO: 394700 - DNA, 497 bp, Homo sapiens
gtgggatgttattggatcatgggatcttccatggattcccccatgttgttcttgtgatagtgagtgagttctcacaagatctgatggtttaaaagtatgtggcagtcccygcaacctctctttcctgctgccttgtaaatatggtgcttgcttctccttcaccttttgccatgattgtaagtttcctgaggcctccccagtcatgtggatctgtgagtcagttaaacctcttttctttataaattacccactctcagttctttatagcagtgtgaaaatggattaatacatcctcctctcccccaaattttctttatgcactatatttttatgctaaattaacaagacatcaaaatgggaccttttctataggcatgccatgtgaaataatcacatcatggagaatgggtcccctttatgttatgaacattccaattatactcttttagttacttaaaaatgtacaattaagttattattgactatagttaccagtt

SEQ ID NO: 394701 - DNA, 497 bp, Homo sapiens
gtgggatgttattggatcatgggatcttccatggattcccccatgttgttcttgtgatagtgagtgagttctcacaagatctgatggtttaaaagtatgtggcagtccccgcaacctctctttcctgctgccttgtaaatatggtgcttgcttctccttcaccttttgccatgattgtaagtttcctgaggcctccccagtcatgtggatctgtgagtcagttaaacctcttttctttataaattacccactctcagttctttatagcagtgtgaaaatggattaatacatcctcctctcccccaaattttctttatgcamtatatttttatgctaaattaacaagacatcaaaatgggaccttttctataggcatgccatgtgaaataatcacatcatggagaatgggtcccctttatgttatgaacattccaattatactcttttagttacttaaaaatgtacaattaagttattattgactatagttaccagtt

SEQ ID NO: 394702 - DNA, 497 bp, Homo sapiens
gtgggatgttattggatcatgggatcttccatggattcccccatgttgttcttgtgatagtgagtgagttctcacaagatctgatggtttaaaagtatgtggcagtccccgcaacctctctttcctgctgccttgtaaatatggtgcttgcttctccttcaccttttgccatgattgtaagtttcctgaggcctccccagtcatgtggatctgtgagtcagttaaacctcttttctttataaattacccactctcagttctttatagcagtgtgaaaatggattaatacatcctcctctcccccaaattttctttatgcactatatttwtatgctaaattaacaagacatcaaaatgggaccttttctataggcatgccatgtgaaataatcacatcatggagaatgggtcccctttatgttatgaacattccaattatactcttttagttacttaaaaatgtacaattaagttattattgactatagttaccagtt

SEQ ID NO: 394703 - DNA, 473 bp, Homo sapiens
ttaaaagaacattgttaatatgatacatggacacagatggagcactcatggggcagcagtgttagcaatcttctcttctttttatgccaagtgagaggggcttcaaggtggccacttggagaagttgattccatgtccctggagtatgtcaagatgcagagcctgttactggatctatgcctgggaggtccgaaagtgaacacctgtrgctggagttgcctagctgacagcagaaagaaagatggtagctacattttagaagcacctgtgctgtgcttctaccaatgacaagtcagggtgtatttactgaggaacaaaggtgtgtctttgtaagggggatagagagagaataagagctggtaaacacaagtgtgagcacctgaggcaatattaaagggacattgttcaagggaacaggaaagagtatatataggaatgtccacatacaaccagggtttgaaagagaagtgtat

SEQ ID NO: 394704 - DNA, 406 bp, Homo sapiens
gaggttgaggtgagccgagatccagccattgcactccagcctgggcaacaagagtgaaactccatgtcaggaaaaaaaaaaaaaaaaaraaagaaagaaagaaagaaagaaaaagaaaaagcaggtttaccatttcactataccataaatggaaattgtttaataaaatatgctagctctgagtaacatgaattaagcttttcaatagcatcttcctttttttaaaatgcggaaaaaactttcaacagatgttttgggataaaccagttctatacaaagagaaatgaaaataagcactaaagtcaattggttccttcttttttgtcttgataaacttaaaaggaaatagcattcaaagtcatgtcactggtcttaagctagttcttaccatttaaattttttgaca

SEQ ID NO: 394705 - DNA, 406 bp, Homo sapiens
gaggttgaggtgagccgagatccagccattgcactccagcctgggcaacaagagtgaaactccatgtcaggaaaaaaaaaaaaaaaaaaaaagaaagaaagaaagaaagaaaaagaaaaagcaggtttaccatttcactataccataaatggaaattgtttaataaaatatgctagctctgagtaacatgaattaagcttttcaatagcatcttcctttttttaaaatgcggaraaaactttcaacagatgttttgggataaaccagttctatacaaagagaaatgaaaataagcactaaagtcaattggttccttcttttttgtcttgataaacttaaaaggaaatagcattcaaagtcatgtcactggtcttaagctagttcttaccatttaaattttttgaca

SEQ ID NO: 394706 - DNA, 552 bp, Homo sapiens
aacaataaaaccctccaaaggaaagcatcatcaatttatatcctcaggttgcacacagattaagttgaaccaataaaatattaacaaaaacaaaaggaagcaaaccaccatatgatacagcagaaataacaaaaaatggatttctttargtgactgaagttctcagatataaagtgtaacggtataaaaaatatatatatttaatgtgtaagggaaaatatataatgggtatttaagaacccaaaaagtaaaactaattgatttcaaggaaggagaaaaagtggcagcaaagatggtaccaaaaggccaagaagagaaaggggcagagcaagatggccaaataagagcctccaccaattgtcccttctgcaggaacatcaaatttgaaatctacacaaaaaatacaccttcataagaaccaaaaatcagtgggaaatcacagtttaacttcctatcactgaaagaggcattgaagagggtaggaaagacagtcttgaatcaccaacaccactcctaccccattccctggcagcagctccatggtgaggagaa

SEQ ID NO: 394707 - DNA, 490 bp, Homo sapiens
caaaaaatacaccttcataagaaccaaaaatcagtgggaaatcacagtttaacttcctatcactgaaagaggcattgaagagggtaggaaagacagtcttgaatcaccaacaccactcctaccccattccctggcagcagctccatggtgaggagaatctgtgcacttgaaggagggagagcacagcaactgagggacttttcattgaactcagtgctgccttctcatagaggaaagaaaaacccaggtgaactcagtcaatatgcacccatagagagataatttagaccagctatagcyagagagaaatacccatcccagcagtcagaacatgagtttcagcaagcctcaccaccccacatgggctaaagtgtatggggtcctaaataaacttgaaaggcagtccagcccacaaggaatgcaattcccaagcaagtcctagtgctgggctcagagtcagtggatgtgggggacacatgacctagtgagt

SEQ ID NO: 394708 - DNA, 578 bp, Homo sapiens
gattcatctcctgctgactaaagagccctagggccctgaataaccagcagcaatacccatatgccatgggctgtgggtgagacttactggcttcaggtgagactcggcacattcctagytatggtggttatgctgaaagactcctctgcttgagaaaagtagagggaaaagtaaagattttgtcttgtaccttaagcaccaactcagccacggtggggtagagtgccaagcaggcttttggggtccctaattctaggccttgcctcttagacagcatttctggacctgcccttggccagaaaggagctctttgccctaaagggtgagtcccagggctggtatcattcacaaccaagctgactgaaccctttggccttaagtgaatattggcagaaccctggcagtactccccatgggcctgtcttggaggtggctactgagagaggctcctctgcctgtggaaagaagaaggaacaaaaggaaagacgagggaacaaaaggaaagatgaagaacaaaaggaaagactgtcttgtagtttgagtgccagcttagccacagtaatatagagcaccaggta

SEQ ID NO: 394709 - DNA, 578 bp, Homo sapiens
gattcatctcctgctgactaaagagccctagggccctgaataaccagcagcaatacccatatgccatgggctgtgggtgagacttactggcttcaggtgagactcggcacattcctagttatggtggttatgctgaaagactcctctgcttgagaaaagtagagggaaaagtaaagaytttgtcttgtaccttaagcaccaactcagccacggtggggtagagtgccaagcaggcttttggggtccctaattctaggccttgcctcttagacagcatttctggacctgcccttggccagaaaggagctctttgccctaaagggtgagtcccagggctggtatcattcacaaccaagctgactgaaccctttggccttaagtgaatattggcagaaccctggcagtactccccatgggcctgtcttggaggtggctactgagagaggctcctctgcctgtggaaagaagaaggaacaaaaggaaagacgagggaacaaaaggaaagatgaagaacaaaaggaaagactgtcttgtagtttgagtgccagcttagccacagtaatatagagcaccaggta

SEQ ID NO: 394710 - DNA, 562 bp, Homo sapiens
gggcctaggggaactcgtgactctgaagggaaagacaaaagcctgactggctttgccacctgctggttgtagagtcctagggccttgagcaaaaataggcagtagtcaggtagtggtttcagtgggccttgggcaagactaagtgctgtgctggcctctggtctgactcagtacagtctcagtggtggtggccacaggggggtttctgtcaccccactcccagctctaggtggctccacacatagagataaactccatttgtttgggagaaagtaaaggaggagaacaagattctctgctttstgatcaggaggattcttccagatcttatcccagaccaccaaggagctacagcattacagggctgggggtgctccctaacacagatacagcttacatcacaacacctacgacccttcaaatacctggaaagtcttcccaaaaaaggaaggtataaacaagcctagactgtgaagactacaataaatatctacctctgagacttactggcttcaggtgaaactcagaacattcctagctgtggtggcccaagagcccaagg

SEQ ID NO: 394711 - DNA, 460 bp, Homo sapiens
agaaacagtaagggcagtacttcagtcaaaaagaaaaggatgttaatgagcaataagtaatcacctgaaggtacaaaactcactggtaagagtaagtacacaggaaaacacagaaattataacactgtaactgtggtgtgtaaactacccatatcttttgtagaaaaaggaaatgatgaaccaatcaaaaataataactatgacaacttttcaagacayagacagtacagtaagatacagatagcgaaaacaaaaagttaaaatgtgtggagatgaagttaaagagtaaagtgtttattagttttatttttgcttgtttctttatgcaatcagcgttattttgtcaaagtttaagataatgggttgtaagatatctctgcaagactcatggtaacctcaaatctaaaaacatacaagagatgcatgaaaaataaaaagcaaaaaattgcagcataccaac

SEQ ID NO: 394712 - DNA, 460 bp, Homo sapiens
agaaacagtaagggcagtacttcagtcaaaaagaaaaggatgttaatgagcaataagtaatcacctgaaggtacaaaactcactggtaagagtaagtacacaggaaaacacagaaattataacactgtaactgtggtgtgtaaactacccatatcttttgtagaaaaaggaaatgatgaaccaatcaaaaataataactatgacaacttttcaagacatagacagtacagtaagatacagatagcgaaaacaaaaagttaaaaygtgtggagatgaagttaaagagtaaagtgtttattagttttatttttgcttgtttctttatgcaatcagcgttattttgtcaaagtttaagataatgggttgtaagatatctctgcaagactcatggtaacctcaaatctaaaaacatacaagagatgcatgaaaaataaaaagcaaaaaattgcagcataccaac

SEQ ID NO: 394713 - DNA, 586 bp, Homo sapiens
gttaatgggtgcagcacaccaacatggcacatgtatacatatgtaacaaacctgcacgttgtgcacatgtaccctaaaacttaaagtataataataataaaaaaaagaaagtcagagcctgagacttaagcatacatgcttatagtttgggaatatgatccaaaggagcaagaatacaggatagggaatgtgaaaaaggaaaggaagaaaaggcaatacaaaaatatgcactgattggccatccccaggacttttataaggctcttgtaaggaccttcataagaatctttcactggaaatttgtctcagaatcatgtgccttaggagactaatgtcaaggaatttatctattgcctatgcccctcttggtcaactggcattatctccctgcacttccagcttgyacatacataaatgcagaagagatcctatgatactagaaagctccaaggcagaatgtgaaagatgcaaggtgcaggtctgagccatgcactgtcctattgcacctgcaaaagtctggtcaaaaacctcaacaaaacaaaagcattgctagaataagaggtacggtcaaggacatggaagtgcc

SEQ ID NO: 394714 - DNA, 516 bp, Homo sapiens
tgaatgtaattcaccataagcaacttagtacctggaattgactattgtgcacataaggaacataaacatttgtagaatcaaacgtttcttagaaaatcatcaatgttcttcctacccctattgagtgtaatttgaagttcttggcccttaccattcagcaactttctcagaaacttcatgctttcagactgcttttggttttgtccccttaagcatactttgttaatttgtttctccttttaaacccttgctctcactgtattgcctccatacttgaaatgtccctctatttttctacccgtcataattctttcatgcattgaagtccagcccacgttgctcctttcrcattcatagtaatatttctacagagctcctgaagccatttttgtttcgtgtgtgtgtacctccagattatcagttccaaggtctaataggcacatcttatttcaaaacctggagcaagaggtctttagtatgcagatgagagcaagggccatagttgtcttttttaaa

SEQ ID NO: 394715 - DNA, 561 bp, Homo sapiens
tttaatgttgagttttgagagttctttttgtattctagattcaaggctttttttcagatatgtaatttgcaaatatttcttcgactctataatttgttttttcattgttttaacaatcaatctatttttcctcttatagattgtgcttttgatgttaatctaagaaccctttacctacttctagttcctgaaaattttttcccatggtcttttctaatagttttataggtttaaattttatatttaagtctataattcatttttagttaatttctgtataatgcgtgaggttcagtttaagkttctctttttcttttccttttttttttttttttgtcgtttttgtttttgcaggggagggggttggggagtggctgttaaatgccccattaccacagcatcgtatgttgaaagtcttatcctttctccattgaattgtgcgtgttcatttgtcaaaaactaattgaggacatttgtatagatctatctttgagttttctattgtgtcccattgatcaatgtgtttatttctgtgatggtaccacaatgtcttaattacta

SEQ ID NO: 394716 - DNA, 561 bp, Homo sapiens
tttaatgttgagttttgagagttctttttgtattctagattcaaggctttttttcagatatgtaatttgcaaatatttcttcgactctataatttgttttttcattgttttaacaatcaatctatttttcctcttatagattgtgcttttgatgttaatctaagaaccctttacctacttctagttcctgaaaattttttcccatggtcttttctaatagttttataggtttaaattttatatttaagtctataattcatttttagttaatttctgtataatgcgtgaggttcagtttaagtttctctttttcttttccttttttttttttttttgtcgtttttgtttttgcaggggagggggttggggagtggctgttaratgccccattaccacagcatcgtatgttgaaagtcttatcctttctccattgaattgtgcgtgttcatttgtcaaaaactaattgaggacatttgtatagatctatctttgagttttctattgtgtcccattgatcaatgtgtttatttctgtgatggtaccacaatgtcttaattacta

SEQ ID NO: 394717 - DNA, 601 bp, Homo sapiens
ctattataaacactcctggttaggtcttttgatgcctacgtgtacaaatttttgttgggtatatttgcaaaaaatgtattttttcctattttctgaaaatagatattaacgtcataaattttcagtcttcttttcaattgcatgcatttaaagccattaatttccctagttcatggcttcacctgaagtgtacargttttaagatatcatattttattattattcagttcaaaatattttcttctttatcttataaattattctttgaccatgagttgtttagaaaaagaggacttgatttgtactatatatagttattaatattttctagatatttttctattattgatttctagattttttctattatagtggacaaaaattatgctctatgtaatttcaatcttttaaaatgttaaaaaatattttactattctaaaattaatatggaactgtgaaagaaaaataaatcttggggcccccaaaatcactaagctaaagggaaaagtcaagctgggaactgcttagagcaaacctgcctcccattctattcagagtcatccctctgctcaatgagataaatgcatattggattgcctcc

SEQ ID NO: 394718 - DNA, 601 bp, Homo sapiens
ctattataaacactcctggttaggtcttttgatgcctacgtgtacaaatttttgttgggtatatttgcaaaaaatgtattttttcctattttctgaaaatagatattaacgtcataaattttcagtcttcttttcaattgcatgcatttaaagccattaatttccctagttcatggcttcacctgaagtgtacaggttttaagatatcatattttattattattcagttcaaaatattttcttctttatcttataaattattstttgaccatgagttgtttagaaaaagaggacttgatttgtactatatatagttattaatattttctagatatttttctattattgatttctagattttttctattatagtggacaaaaattatgctctatgtaatttcaatcttttaaaatgttaaaaaatattttactattctaaaattaatatggaactgtgaaagaaaaataaatcttggggcccccaaaatcactaagctaaagggaaaagtcaagctgggaactgcttagagcaaacctgcctcccattctattcagagtcatccctctgctcaatgagataaatgcatattggattgcctcc

SEQ ID NO: 394719 - DNA, 548 bp, Homo sapiens
tcatggcttcacctgaagtgtacaggttttaagatatcatattttattattattcagttcaaaatattttcttctttatcttataaattattctttgaccatgagttgtttagaaaaagaggacttgatttgtactatatatagttattaatattttctagatatttttctattattgatttctagattttttctattatagtggacaaaaattatgctctatgtaatttcaatcttttaaaatgttaaaaaatattttactattctaaaattaatatggaactgtgaaagaaaaataaatcttggggcccccaaaatcactaagctaaagggaaaagtcaagctgggaactgcttagagcaaacctgcctcccattctattcagagtcatccctctgctcamtgagataaatgcatattggattgcctcctttggaaaggctaatcagaaactcaaaataatgtaaactttggctctcacatacctgtgacctggaaggccctccctgcttcaagttttcccgcctttccagatggaaccaatgtac

SEQ ID NO: 394720 - DNA, 636 bp, Homo sapiens
ccctctgctcaatgagataaatgcatattggattgcctcctttggaaaggctaatcagaaactcaaaataatgtaaactttggctctcacatacctgtgacctggaaggccctccctgcttcaagttttcccgcctttccagatggaaccaatgtacatctggatatattgattgatatctcatgcctctctaaaacatataaaaccaaaaaagagcttgtatagccaaggcatcatgctacccgacttcaaactatagcactacagtaaccaaaacagcatgatactggtacaaagacagacaaataaaccaatggaacagaacagaaaacactgaaacaagactgcacatctacaactatctgatctttgacaaaactgacataagcaatggggaaaggattcccaattcaagaaatggtgctggaataactggtragcgatatgcagaagattgaaactggactcttctttacatcatatgcaaaaattaactcaagatggattaaagacttaaatgtaatatccaaaactataaaaactataaaaagacaacctaagcaatgccactcaagacctaggcaccggcaaatatttcatgacaaagatgccaaaagcaattgcaacaaaaacgaa

SEQ ID NO: 394721 - DNA, 636 bp, Homo sapiens
ccctctgctcaatgagataaatgcatattggattgcctcctttggaaaggctaatcagaaactcaaaataatgtaaactttggctctcacatacctgtgacctggaaggccctccctgcttcaagttttcccgcctttccagatggaaccaatgtacatctggatatattgattgatatctcatgcctctctaaaacatataaaaccaaaaaagagcttgtatagccaaggcatcatgctacccgacttcaaactatagcactacagtaaccaaaacagcatgatactggtacaaagacagacaaataaaccaatggaacagaacagaaaacactgaaacaagactgcacatctacaactatctgatctttgacaaaactgacataagcaatggggaaaggattcccaattcaagaaatggtgctggaataactggtaagcgatatgcagaagattgaaactggactcttctttacatcatatgcaaaaattaactcaagatggattaaagacttaaatgtaatatccaaaactataaaaactataaaaagacaacctaagcaatgccactcaagacmtaggcaccggcaaatatttcatgacaaagatgccaaaagcaattgcaacaaaaacgaa

SEQ ID NO: 394722 - DNA, 542 bp, Homo sapiens
aatagaacagctcttccattcctaagacatccttactatcattgtggttgggacttactgtcatttcttatctayggatattaattagtaacgtgagaaccatatagttcagaaaccagactgcttggattctaggttcattttggcatttatttgctatataacctgtgacaagttacataacctctctgtacctcagtcagcccatcagtaataatgatacaaccatcgacatacaattattgtgaggaacccaatgagttatgtgcaagaggcttagaatggtgcccagaacgtagtaagacccatacatgagtgagttaagatatgggacacctttgctccatgaaagtctgctttgctgaaatgctctcccctgttcgtgttttctgtcttttactgagaaggtaactatccttccacagcccagggatatcagtacacacttggggtgaggtaagttctccccaggggtggggtttaatgatgcaaaagacatctctagaattgaaagtcaacccttcaaaagatagaagaaggaa

SEQ ID NO: 394723 - DNA, 604 bp, Homo sapiens
atatcaaggtggtaacgcctgttgctggtggaactgtgcttctctatatttttcttcttgctgctcaacagctgcttcattcaggctcgcccaccccctttgtgcacagccttccttcttcatgggctagtttctcaaaggcaaaaaccttgttcgtttctgggatccagagactatgtgtccatttggtcactcagaaggcagccaggcagaaagaaatctcactgtgaatggactggtccagagcctcactttgtgactactcacctcccactgctccacttgggagtyaggacacagcagctacagaaaagtaagcatggtgctaactatggtgttctcacctccagctgcatgctcctgagcatgtcaggccactgtgctgaccccagttcctttacctgtgatacgtgaatattagtgaacattagtgaacatcagattacatgagagcaaatcttctcgagagctctaatagtccgtgatgtcccccctcatccattcaacttaccactctgctttcctcttgctgcttccttttctcttccccctttgactcctgctcttccacgcagctgggactggcagtgattcatggcccatc

SEQ ID NO: 394724 - DNA, 625 bp, Homo sapiens
tgagcaaaagtgtctgaaatccatagacccatgcctaacccaataggctgagtgcaatcaattgatatcctcttgaaaattttgactaaaagactctgaaattgaatcagaatgtggaaaatgcaaaaactaacaggtaacatacgcttggcactggacagttagccactggcatactaatgagttggcagagaaagatgcacaaaaagagaagttggagaatgctggggttgggggtgggggcggaatgcagagatacaaaaatgtggaaacatgtgatcctggagagaggcagaaatatctgtgtctaccttttcagttcccaagaccatgtggycaaatgtatgttgctttctgcctttgacattcatgagcttgctatcctcctaatatcccccgacccttgacttaggatagctttaaagatttttggttgccaagaacaccaaccagaatcacagggaatggagcacaaaaatcatataaatactgtgctctgggaatcatgagtcatttggtttggctaaagtgatggataggttcagtagtattcagtttaacaaacattcattgcatagccactatggatcagatacttaattagttactaggccagcaataagtc

SEQ ID NO: 394725 - DNA, 530 bp, Homo sapiens
ctagttttctaatactatgaaccaaattaccacaagtttagtggcttaaaccagcggtcctcaaccttttggacaccagggacctgcttcatggagacaattttaacacggacaggggagggggatggtttcaggatgtaactattccacctcagatcatcaggcatttgattttcataaggagcacacaacctagagccctgacaygctcagttcacaataggatttgtgctcctgtaagaatctaatgcagccaccgatctgacaggaggtggagttcaggcagtaatactcgcttgcctgtcactcacctcctgctgtgcggcccagttccttacaggccacgggcaggaccagtaccgtctgcagtcaggggttggggacctccagcttaaacaacaaccaggcataatttccccattctgtaggtcagaagtctgggtatttcagctagattatttgttcatggcctcacaaggccaaaattaaggtgttagccaggcaaggctcttacctggaggcttgcagaa

SEQ ID NO: 394726 - DNA, 530 bp, Homo sapiens
ctagttttctaatactatgaaccaaattaccacaagtttagtggcttaaaccagcggtcctcaaccttttggacaccagggacctgcttcatggagacaattttaacacggacaggggagggggatggtttcaggatgtaactattccacctcagatcatcaggcatttgattttcataaggagcacacaacctagagccctgacacgctcagttcacaataggatttgtgctcctgtaagaatctaatgcagccaccgatctgacaggaggtggagttcaggcagtaatactcgcttgcctgtcactcacctcctgctgtgcggcccagttccttacaggccacgggcaggaccagtaccgtctgcagtcaggggttggggacctccagcttaaacaacamccaggcataatttccccattctgtaggtcagaagtctgggtatttcagctagattatttgttcatggcctcacaaggccaaaattaaggtgttagccaggcaaggctcttacctggaggcttgcagaa

SEQ ID NO: 394727 - DNA, 589 bp, Homo sapiens
gctgctgcccttgtttcctgcatgtgttgtaaaccagtctcatcaaatgtttaactaaatgtcaatccagtctacctcactgcagtatatgttcagcctaaattttgcgagttgaaatggatgacaaygaggctgtaagaattgtgcagagcaaataaaccatccagtttgacaaaaataaaagcttaatcctgctcatttgaagaaaactttggatgagtctattcagctggaacctcctaagagcttagagaactaaaatgcctttgtggcctttctaatccatttttagtttttgagtaaaattaataacataaataccttggagttataagctgctttccttcctatggttatgagattctttctcatatatattccccatctgtcttccccaaagcctggtgtactttatgaagataagaataattgtatctattttgcagatcaaggaattaagacacagagatgtgcagttacttgggaaaggacatctatcaagattaatgtcgctttctcacttgtaaattcttattaggctttgtcccaaacaaagaaaaaactcttgatttatttactccagagcttc

SEQ ID NO: 394728 - DNA, 589 bp, Homo sapiens
gctgctgcccttgtttcctgcatgtgttgtaaaccagtctcatcaaatgtttaactaaatgtcaatccagtctacctcactgcagtatatgttcagcctaaattttgcgagttgaaatggatgacaatgaggctgtaagaaytgtgcagagcaaataaaccatccagtttgacaaaaataaaagcttaatcctgctcatttgaagaaaactttggatgagtctattcagctggaacctcctaagagcttagagaactaaaatgcctttgtggcctttctaatccatttttagtttttgagtaaaattaataacataaataccttggagttataagctgctttccttcctatggttatgagattctttctcatatatattccccatctgtcttccccaaagcctggtgtactttatgaagataagaataattgtatctattttgcagatcaaggaattaagacacagagatgtgcagttacttgggaaaggacatctatcaagattaatgtcgctttctcacttgtaaattcttattaggctttgtcccaaacaaagaaaaaactcttgatttatttactccagagcttc

SEQ ID NO: 394729 - DNA, 541 bp, Homo sapiens
aatgtacaagaacattttccataatattgaagtcctacacagtactgctagaaaacaaagccaccaaaaaagcaaatatttgggatatttttgttcttaaaaccatcacaaatttcccaagtgatagaaaactgtgatagagagtttaaaatgatcttggctggacctaaaataaagaatcccaactctctaaacaagaatattaagttgcataagtcagaagacactaggacrtaaatctataaacatggttctctttgaacaacaatccaactttataagttttaaaataaattatgcaggacttcaggaaactttctccaaacactgatcagttgtattacaaatccctttcactaaaaatcagctctgcaacaatatgggcaatgtatgcttccccctccccccttaaactctaaaatcaatatattaagctactagcttactatgaaaattacatgtacttcagagataatacatttaatttccataagctagccagatgcaaagtcaaataacacattctggggaacaagcaatc

SEQ ID NO: 394730 - DNA, 496 bp, Homo sapiens
gtttttaaatctgtatcatgagaccaataataaaacctagtccatgaggttattaaagaacaaaagttagcattttgatgtgctgagaacarttcctagcatagtgcaagtactgtatatgcttgtttgatgaaacaaaggtgttgagcaagaggcactccgatgattcttttctgcttccacactcaaagttggcttcagagaaaatacaaggggaggagaagggaggcgacagggcatggagactgctgaggtcaggcatcttgagtgggccagataacttgagagaaagagcaccaaatttgagttggaaggcctgtaacctgattcctgctttgccaagaacatactggtatggtcctaagcacatatccatgtctgataaaattggaaagatttaatgagctatattcaagcttgcttccaacactggagttatatgatttgaaaactggcaacagaaaaccaaactgtataagcaccaaagtacaccaac

SEQ ID NO: 394731 - DNA, 562 bp, Homo sapiens
ttgtgccttcaggagaggaagatggagatagcaaggtctgcagagcctatatgaacttacttggccaaatgttaggtaaagatgactgaataatgtcccccagtggattgtggacagatggacagtgacttcactcattagtgaaatgcatctcaatgattggcagacactgaccatgcagataagccagatgccctaccattggaagaaacaaattgagggttggtaagagggtgacataaggaccccaggtttcttccaacattctttacttaagggagaggaagtttggaccttacttcctggctctcctgtacaggaacagcttggttccttgtgacaaaataatgaatattcatatcaytacatgtagtttaaggcaagttaacttgattgtaggctttatctgattacagcagtaatctgttttttgatgagcttgtgggcactcgagctatggctttagacttaatcagatttgaattctaatccaaatttccttacagggaaagctactcaacctctttgtgctactgtttactcatcaattaaaaaaatggaa

SEQ ID NO: 394732 - DNA, 609 bp, Homo sapiens
cagggaaggaggtgccacacacttttaaatgaccagatctcaggtgaactcagagcaagaggtcacttgtcatcaaggagatggcccataccattcatgagggatctgcccccatgatccaaacacctccaaccaggccccacctctgatrttagggattatatttcaatatgaaatttggacagggacaaatatccaaactatatcattccacccctggccccctggcaaatctcatgtccttctcacattgcaaaatattatcatgtcttcccaatagtcttccaaagtcttagcttgttccagctcaaaagtctcaagtccaaagtctcatctgagacaaggcatgtcccttccacctatgaacctgaaaaatcaaaacaagttatttacctcaaagatacaatgagggatataggcattggggaaacattcccatcacaaaagggagaaattggccaaaacaaagggactacaggccctatgcaagtccaaaacacagcaggacattcgcaattttttttttttgaaggagggatagaatcttactctgtcatgcagtggcacaatcatgactcactatagcctcaacctcctggacccaagcaa

SEQ ID NO: 394733 - DNA, 566 bp, Homo sapiens
ctgtggctttcctggactagattcaagtcctgctatcgtagtcacctcaggctgccataaaaaaatatcaaagactgggagccttaaacagcagatacttatttctcacagtgttggagtcttcaaagttcaagatcaaggtataggcagctttggttcctggtgagggtccacttcctggcttacagatggttgccttcttgctgtgtcctcgatacggtggaaagagagggagcccaggtctcttgtcctcttcctgtaagaataccaagcccatcgtgaggcccccacaatcacgacctcatctaaatctagttacctcccaaaggcctcgcctctaaataccactgctttggggattagagcttcatgtgaatttgggaggtgatgcaaacaatgggtccatggcacttgyttctctcctcctaactgtgcctcagtttacatgtcacttcttcaaggagtctttctagaacatctccttcattctaatctcaaaacccttgtattttccttatgttatttcttacaacataactgtttcctgggtgatagtatttatgtag

SEQ ID NO: 394734 - DNA, 609 bp, Homo sapiens
cagggaaggaggtgccacacacttttaaatgaccagatctcaggtgaactcagagcaagaggtcacttgtcatcaaggagatggcccataccattcatgagggatctgcccccatgatccaaacacctccaaccaggccccacctctgatgttagggattatatttcaatatgaaatttggacagggacaaatatccaaactatatcattccacccctggccccctggcaaatctcatgtccttctcacattgcaaaatattatcatgtcttcccaatagtcttccaaagtcttagcttgttccagctcaaaagtctcaagtccaaagtctcatctgagacaaggcatgtcccttccacctatgaacctgaaaaatcaaaacaagttatttacctcaaagatacaatgagggatataggcattggggaaacattcccatcacaaaagggagaaattggccaaaacaaagggactacaggccctatgcaagtccaaaacacagcaggacattygcaattttttttttttgaaggagggatagaatcttactctgtcatgcagtggcacaatcatgactcactatagcctcaacctcctggacccaagcaa

SEQ ID NO: 394735 - DNA, 569 bp, Homo sapiens
cttgtcatcaaggagatggcccataccattcatgagggatctgcccccatgatccaaacacctccaaccaggccccacctctgatgttagggattatatttcaatatgaaatttggacagggacaaatatccaaactatatcattccacccctggccccctggcaaatctcatgtccttctcacattgcaaaatattatcatgtcttcccaatagtcttccaaagtcttagcttgttccagctcaaaagtctcaagtccaaagtctcatctgagacaaggcatgtcccttccacctatgaacctgaaaaatcaaaacaagttatttacctcaaagatacaatgagggatataggcattggggaaacattcccatcacaaaagggagaaattggccaaaacaaagggactacaggccctatgcaagtccaaaacacagcaggacattcgcwattttttttttttgaaggagggatagaatcttactctgtcatgcagtggcacaatcatgactcactatagcctcaacctcctggacccaagcaatcctcctgcctcagctccctgagta

SEQ ID NO: 394736 - DNA, 569 bp, Homo sapiens
cttgtcatcaaggagatggcccataccattcatgagggatctgcccccatgatccaaacacctccaaccaggccccacctctgatgttagggattatatttcaatatgaaatttggacagggacaaatatccaaactatatcattccacccctggccccctggcaaatctcatgtccttctcacattgcaaaatattatcatgtcttcccaatagtcttccaaagtcttagcttgttccagctcaaaagtctcaagtccaaagtctcatctgagacaaggcatgtcccttccacctatgaacctgaaaaatcaaaacaagttatttacctcaaagatacaatgagggatataggcattggggaaacattcccatcacaaaagggagaaattggccaaaacaaagggactacaggccctatgcaagtccaaaacacagcaggacattcgcaattttttttttttgaaggagggatagaatcttactctgtcatgcagtggcacaatcaygactcactatagcctcaacctcctggacccaagcaatcctcctgcctcagctccctgagta

SEQ ID NO: 394737 - DNA, 536 bp, Homo sapiens
ctcactctttgttaattctcccacattgatcctggcccggacttcaatctggcytcccacattattcctgataccacacctgagcctcatgactgcatctctctgatccacctgacattcatcccacttccccacatttccttcttccctgtttctcaccctgatcacacttagtttattgatggcagttccaccaggcccaattgccacacaccagcaaaggcaggttatgctatagtacaagccactagcccacctcttaaaacctctcatttcctttccattgtagaaatctatcctcaaggaaataacttcttagtgttccatctgctattctactactcctcaaggattattcaggccccctcccttccctacacatcaagctccaggatttgcccctgcccaggactggcaaattagctttactcaacatgccccgagtcacaaaaactaaaatacctcttagtctaagtagacactttcactagataagtagaggcctttcctacaaggtctgagaaggccaccgcagt

SEQ ID NO: 394738 - DNA, 536 bp, Homo sapiens
ctcactctttgttaattctcccacattgatcctggcccggacttcaatctggcttcccacattattcctgataccacacctgagcctcatgactgcatctctctgatccacctgacattcatcccacttccccacatttccttcttccctgtttctcaccctgatcacacttagtttattgatggcagttccaccaggcccaattgccacacaccagcaaaggcaggttatgctatagtacaagccactagcccacctcttaaaacctctcatttcctttccattgtagaaatctatcctcaaggaaataacttcttagtgttccatctgctattctactactcctcaaggattattcaggccccctcycttccctacacatcaagctccaggatttgcccctgcccaggactggcaaattagctttactcaacatgccccgagtcacaaaaactaaaatacctcttagtctaagtagacactttcactagataagtagaggcctttcctacaaggtctgagaaggccaccgcagt

SEQ ID NO: 394739 - DNA, 536 bp, Homo sapiens
ctcactctttgttaattctcccacattgatcctggcccggacttcaatctggcttcccacattattcctgataccacacctgagcctcatgactgcatctctctgatccacctgacattcatcccacttccccacatttccttcttccctgtttctcaccctgatcacacttagtttattgatggcagttccaccaggcccaattgccacacaccagcaaaggcaggttatgctatagtacaagccactagcccacctcttaaaacctctcatttcctttccattgtagaaatctatcctcaaggaaataacttcttagtgttccatctgctattctactactcctcaaggattattcaggccccctcccttccytacacatcaagctccaggatttgcccctgcccaggactggcaaattagctttactcaacatgccccgagtcacaaaaactaaaatacctcttagtctaagtagacactttcactagataagtagaggcctttcctacaaggtctgagaaggccaccgcagt

SEQ ID NO: 394740 - DNA, 612 bp, Homo sapiens
aggttagcaatgtagctcttactcggattaccatgtgtctcattttctcaatactcaggtttctgaaaaatgaactacmcaaaagtgttaatttgaatttatgacagttactgagtcttaataaacaagagcatctttgaattcacccaaagaagtgacaagtagaatttcagaaaccgctgaaggtcaaggcaggaactatcttttgccaagcaggatcatagggaaactctccagatatagtcatttaggcagccatttttttgggctcatcttttaaagaaaaaagccctctgaaagttaaatgaatctcaagcccaaactgcttcctttaattttcctttgtgtcagataagctatataattattgataactatgagtgtccaaatatttgtttaaagagcaatttaatgtctctgatttatattcatgagttattaagtagctgcatatttcctgtgtatttttttctgaatacatgattaatcgaagtttaatgaaattttaaaagacatttttctaattttgtctggaatgctgtcttctctccagaaattacaattatccactgtggaacaactttgtaaaaaggatagaaaggggaggttttg

SEQ ID NO: 394741 - DNA, 612 bp, Homo sapiens
aggttagcaatgtagctcttactcggattaccatgtgtctcattttctcaatactcaggtttctgaaaaatgaactacccaaaagtgttaatttgaatttatgacagttactgagtcttaataaacaagagcatctttgaattcacccaaagaagtgacaagtagaatttcagaaaccgctgaaggtcaaggcrggaactatcttttgccaagcaggatcatagggaaactctccagatatagtcatttaggcagccatttttttgggctcatcttttaaagaaaaaagccctctgaaagttaaatgaatctcaagcccaaactgcttcctttaattttcctttgtgtcagataagctatataattattgataactatgagtgtccaaatatttgtttaaagagcaatttaatgtctctgatttatattcatgagttattaagtagctgcatatttcctgtgtatttttttctgaatacatgattaatcgaagtttaatgaaattttaaaagacatttttctaattttgtctggaatgctgtcttctctccagaaattacaattatccactgtggaacaactttgtaaaaaggatagaaaggggaggttttg

SEQ ID NO: 394742 - DNA, 612 bp, Homo sapiens
aggttagcaatgtagctcttactcggattaccatgtgtctcattttctcaatactcaggtttctgaaaaatgaactacccaaaagtgttaatttgaatttatgacagttactgagtcttaataaacaagagcatctttgaattcacccaaagaagtgacaagtagaatttcagaaaccgctgaaggtcaaggcaggaactatcttttgccaagcaggatcatagggaaactctccaratatagtcatttaggcagccatttttttgggctcatcttttaaagaaaaaagccctctgaaagttaaatgaatctcaagcccaaactgcttcctttaattttcctttgtgtcagataagctatataattattgataactatgagtgtccaaatatttgtttaaagagcaatttaatgtctctgatttatattcatgagttattaagtagctgcatatttcctgtgtatttttttctgaatacatgattaatcgaagtttaatgaaattttaaaagacatttttctaattttgtctggaatgctgtcttctctccagaaattacaattatccactgtggaacaactttgtaaaaaggatagaaaggggaggttttg

SEQ ID NO: 394743 - DNA, 612 bp, Homo sapiens
aggttagcaatgtagctcttactcggattaccatgtgtctcattttctcaatactcaggtttctgaaaaatgaactacccaaaagtgttaatttgaatttatgacagttactgagtcttaataaacaagagcatctttgaattcacccaaagaagtgacaagtagaatttcagaaaccgctgaaggtcaaggcaggaactatcttttgccaagcaggatcatagggaaactctccagatatagtcatttaggcagccatttttttgggctcrtcttttaaagaaaaaagccctctgaaagttaaatgaatctcaagcccaaactgcttcctttaattttcctttgtgtcagataagctatataattattgataactatgagtgtccaaatatttgtttaaagagcaatttaatgtctctgatttatattcatgagttattaagtagctgcatatttcctgtgtatttttttctgaatacatgattaatcgaagtttaatgaaattttaaaagacatttttctaattttgtctggaatgctgtcttctctccagaaattacaattatccactgtggaacaactttgtaaaaaggatagaaaggggaggttttg

SEQ ID NO: 394744 - DNA, 559 bp, Homo sapiens
caaatttatcagaacattttcatcttcaactaacacttcttaacattcccagaaaacatgtttggaattcagtctggagcaaaagaaatagtaaataaattttttacattttgtttgatttctatggggaccaaaatgtaggaatgttaagggaatgtaatgccttgtcttaacctactcactaacactcaaggaaccttccaaacttccggtctagatatgtatttaattaattatttaaatactttttattttaaagtaactataggttcataagaaatttcataaaatatacagggaactcctctgcacccttatggtaacatttttgcataatataatacaataccaaaatcaggaaatctacattagtacaatccacagaacttatttagatttaatcartttacatgcatttgtgtgtgtgtgtgtgtgtgtgtgtgtgtctatggaattctattacatgtgtagattcatataaacaccatcatgatgaagacatagagcttttcaatcatcacaagacttctgtgttatccctttatgactatggccatat

SEQ ID NO: 394745 - DNA, 559 bp, Homo sapiens
caaatttatcagaacattttcatcttcaactaacacttcttaacattcccagaaaacatgtttggaattcagtctggagcaaaagaaatagtaaataaattttttacattttgtttgatttctatggggaccaaaatgtaggaatgttaagggaatgtaatgccttgtcttaacctactcactaacactcaaggaaccttccaaacttccggtctagatatgtatttaattaattatttaaatactttttattttaaagtaactataggttcataagaaatttcataaaatatacagggaactcctctgcacccttatggtaacatttttgcataatataatacaataccaaaatcaggaaatctacattagtacaatccacagaacttatttagatttaatcaatttacatgcayttgtgtgtgtgtgtgtgtgtgtgtgtgtgtctatggaattctattacatgtgtagattcatataaacaccatcatgatgaagacatagagcttttcaatcatcacaagacttctgtgttatccctttatgactatggccatat

SEQ ID NO: 394746 - DNA, 559 bp, Homo sapiens
caaatttatcagaacattttcatcttcaactaacacttcttaacattcccagaaaacatgtttggaattcagtctggagcaaaagaaatagtaaataaattttttacattttgtttgatttctatggggaccaaaatgtaggaatgttaagggaatgtaatgccttgtcttaacctactcactaacactcaaggaaccttccaaacttccggtctagatatgtatttaattaattatttaaatactttttattttaaagtaactataggttcataagaaatttcataaaatatacagggaactcctctgcacccttatggtaacatttttgcataatataatacaataccaaaatcaggaaatctacattagtacaatccacagaacttatttagatttaatcaatttacatgcatttgtgtgtgtgtgtgtgtgtgtgtgtgtgtctatggaattytattacatgtgtagattcatataaacaccatcatgatgaagacatagagcttttcaatcatcacaagacttctgtgttatccctttatgactatggccatat

SEQ ID NO: 394747 - DNA, 545 bp, Homo sapiens
ttgtgacactttatttatcacaaactcttcaaacatgagaagacaacacctttgcctcatttgaccttccattttatcatctttctccacccatgccttattgttatcctttcattttccttcactttcctctatatttgtatttatttatttatttatttctattttattgaatttttagaccgagtctttctctgtcaccaggctgggtacagtggtgcgatgcttagctcactgcaacctccgcctcccaggttcaagtgattctcctgcctcagcctcccaagtagctgggattacaggcgtgtgccaccatgcccagctaattttggtatttttagtagagatggggtttcaccatgttgatcaggccagtctcgaactcctggcctcaagtgatctgcccaccttggcctcccaaagtgctgggattacgggtgtaagccattgtaccyggccctttagcatttcttttattcattctggctcttgtttcatctttttcttcctagtaataactgctattactgataaagagctggtta

SEQ ID NO: 394748 - DNA, 563 bp, Homo sapiens
gtcacagtggaggttaggatgccaacatctgaatttagagaagaactcaatccagtagatagcagctactctctgggagagttgagaattggaaggaaccactctggaattggaagacacccggtttcaggcttgacaagcagctggcaggagtaatgcccttccttatccacttgccaatctcctacttagtctctaactccagccccagcatcatcccctctgtgaaggytcctctagcttctcacctcaaaattaaccacctcctcttctgaggtcccattggccttcttttaaatattaattgaattatgtttcacactgtattgtataactatctgtttacttatttgtgttattcattggagtgtgagtttcatgagagccaggactatattttattcatctctgtcagccggggctatgataggggctcaataaacagtggatggatagatggatgaatgttttgtcccaacagaaagaccaaacacaactacaggcgaatctgaggcttgagctggtatcagggagcattatcagtgaggaatcactcctccctc

SEQ ID NO: 394749 - DNA, 555 bp, Homo sapiens
agggaaatatatagcattgaatgcatgtatttaaaaagaagagagacctaaaatcaataacctaagcatccacctaagaaatcagaaaaaaaaaaaaaaaaaaaaaaaaaaagagcaatttaaatccaaagtataaagaaggggccaggcctggkggctcatgcctgtaatcctagcaatttgggaggttgtggaaggaagattgcttgaggccccagagttcaagaccaacctgggtgagacgctatctctacaaaaaaaattaaaaataaaaagggataaaataaatattaaaaattatagcagaaatcaataaaattgaaaacaggaaatcaaatgagaaaattttaaaaaccaagagctgattctctgaaaagatcaataaaattgataaaccactagcaagcaagctaaggaaataaaagaagatacaaattattaatatcagaaatgaaagagggatctctctatgacattgcagaaattaaacaaataataaggaaattataaaaaaactccatacccaaatttgataacttacataaaatggaccta

SEQ ID NO: 394750 - DNA, 609 bp, Homo sapiens
ggccatatggtaggtaacactatgtttaaccttttgaagaactgccagactgttttccaatgtggccgcatgattttacattcccacaagcagtatataagggttctaatctctccacatccttttcaacatttttttattatttgtcttttttatcctagccatcctagtggatatgaagtgatatctcattgtagttttgatttgaattttcctgatggcaaataatgctgaccatcttttcatgtctttattggscatttgtgtatcctttttggagaagttctgttcagatccttttccatttattttgttacttttttccttttccaatatttaattaggttatttgccttttaattattgggttgtaagagcactttatatattctggatacaagtcctttcaccagatgtataatttgcaaataatttctctaattctgtgaattgtcttttcactttcttgatgatgtcctttgaaggacaaaagtttttacttttgatgaaatccagtgtatccattttttgttttgttgcttgctcacttagcatcatatttaagaaaccactgccaaatctaaggttataaagccttaccttttattt

SEQ ID NO: 394751 - DNA, 609 bp, Homo sapiens
ggccatatggtaggtaacactatgtttaaccttttgaagaactgccagactgttttccaatgtggccgcatgattttacattcccacaagcagtatataagggttctaatctctccacatccttttcaacatttttttattatttgtcttttttatcctagccatcctagtggatatgaagtgatatctcattgtagttttgatttgaattttcctgatggcaaataatgctgaccatcttttcatgtctttattggccatttgtgtatcctttttggagaagttctgttcagatccttttccatttattttgttacttttttccttttccaatatttaattaggttatttgccttttaattattgggttgtaagagcactttatatattctggatacaagtcctttcaccagatgtataatttgcaaataatttctctaattctgtgaattgtcttttcactttcttgatgatgtcctttgaaggacaaaagtttttacttttgatgaaatccartgtatccattttttgttttgttgcttgctcacttagcatcatatttaagaaaccactgccaaatctaaggttataaagccttaccttttattt

SEQ ID NO: 394752 - DNA, 594 bp, Homo sapiens
agagaccatataatctgagcacccaaatttagttttgcttgaagcctagtctcacagacttttcattttgagagctaatacattcagtttatccttaagctaacttacacctatcccagagtcctgactttataataaagaattccagtttaagggaataaaactgtcatgaagaaatgcacccagggcaggggagagagagccatttctgcctggacaagaccaagtgataataacagatgcaaaattttattacaaaatgattatgtgcatattacctcatttgatcyccataccaccactataagaaggtgactttcattatcctcattaggaaaatactgatgattacaattacccaaagggtgaaaggaggagggtagaaagtgaaggaagtttggaaacccaaatatcttacacaaaatgataaccactgtaaaatgaattctaataccattcctaaaccaacattataaaggtatttcttgagatgtaatgccctttcacaagctattctattgctttatattcatatataacatctagatcttgataaaaagatgttttgtgatattttgagaggtctttagaaaa

SEQ ID NO: 394753 - DNA, 470 bp, Homo sapiens
cattatcctcattaggaaaatactgatgattacaattacccaaagggtgaaaggaggagggtagaaagtgaaggaagtttggaaacccaaatatcttacacaaaatgataaccactgtaaaatgaattctaataccattcctaaaccaacattataaaggtatttcttgagatgtaatgccctttcacaagctattctattgctttatattcatatataacatctagatcttgataaaaagatgttttgtgatattttgagaggtctttakaaaaaacaaccctacaaatacagctaggcactgaaatgatacacataaaaaatgtaggattagctcaaaagtctgtggagctttgcaagaatcttatataatgagccaaaatgaccttcctcattttctatcatttttcccaagaagctaacgttttagatctatgtataaatgttacatgggctgtgttattagatag

SEQ ID NO: 394754 - DNA, 558 bp, Homo sapiens
acaggtaaacacaaaagatgtcattaggatttgccaatgtgtagatgagtgaggcctcagagacagattcagagaaagggtaagaagctagtcaaactgtcttagagcaaacaaatgagaaggaagygaagacatacagagacagtcttttccaaacaatggtttaggaaggcaggagagaaatcaagcaatgtctccagtgagagagaggatcaaagtaaggtagagtttgagcacaacttgagaaacatgagccacaaggtggacaagtgcgtagcagccaaaacatggtggagattaatggctgcccagtgttcttctgcctactctgttagtattacttttaccataaaagaaacagtagtgacccagcttgatttctgaaatcacaggcagttgggagaaatcctgatcctctcatgttccagctttgtgatctcagacaagactcatttcctcaactgtaaaatggagacaataataaccacatcttttggggtttttatgaagatgcaattatctaaaacatgcaaagcacctctcagagtacctggcata

SEQ ID NO: 394755 - DNA, 570 bp, Homo sapiens
  misc_feature (1)...(570): n = A,T,C or G
nnncttcctaaagactgatccctgtcaccctatctgccttgaggtatctgagagctgcagtacttgctattttatttttctgaatggtttcttcacacagctgggtcctacacgtaatttaaaatacagccagctatcacctgctcaaagtctccccagatttcttctacgtttgagttaaatactccttctcttatgtccccctaggaagaactctgtttctatcaatgcaaacacttaacacactaaacttctgatgtctatggaattgtgtttgctactatcacataaataacttaacacccagaatcatgatcttgctctttatrtcttagtccatttgggctgctatcacaaaataccatagactgggtggcttataaacaacagacatttatttctcgcagttctagaattgggaagtcccagactgagtcactggcagattaaatatccgaggagggctctcttcctggcttgcaaatggccactttcttgatgtgtccttaggtcgcagaaggggcaagggacctctctcgggcttcttttataatggcactaatcttattc

SEQ ID NO: 394756 - DNA, 528 bp, Homo sapiens
atttcctgcctctcattctccttgggatagcagctttaggtcatgttgttctcacagcaaattactagaggggacagagagagtggaacctcgctatgcctcctgagacatcagctcagaacaggcacctgctcacttctatccactttcccttagycaaaaaatgtcacatggtcacacccaacttcaataggtgaaaaaatagaccctgcctatttttacaggagctaaactaagtcagaagccatagggcatggatgtgaactctattccaaagaggggctgaagaagtgtggtcactgattggagtgagcacacttcttctatgaagtgaagtaggaagggcacacgactgttttcagtctttacaacaactttgtaaattatatatgacatatttatgtaaactatgaaaggattatgtataattattatttcataattaataacagaaatcattttattcttattagagacatggggaacttgagcaagttaaagattgtagtgaaggcaggtgaaatttcc

SEQ ID NO: 394757 - DNA, 548 bp, Homo sapiens
aataacattgataatgcacccaaaatattggccatacactaaatgctaggctttctatatgtgacccacttggcatgtaggaaaaattagcttcagaaaaggtaaatatattgccacccaattagcaaaagagaagttgtctgaataactctaaggtctgcttttaagcattatcatatgttgaaaaagataatgatcagagtggttaaaaaatcttgctcagggccgtacagccaatcggcagtagacacagctgtcttattctaaagcctttgtcatatgtccaactgctctctacccatgagattacccttggataaaaactggccatgacaatgaccttattggcatgtccataaaccacatcattctcccccaggaagctctctgtctaccttacacactacatccattcctgccttcgcatctttgcataatttcttctacctggaacattctgccccaactccttccacgactggcttcttctctgccttcatgactytgcttaaatattagttcctttttcagaaaaaatacctggtttc

SEQ ID NO: 394758 - DNA, 614 bp, Homo sapiens
cagggaatgaagtctgtagcaggatttactacgcaattagttagtgatgatccttatcacatagcgttggttggatttttccaacatggatcaaaaaggaatggcagaatcttttatttccaatgtgtttgctttatcagaacgtcatgagaaaacactaggagacaattttggctctgtattagaaggagttatcttacgattaaagatgaagaatgtgcagtcccctgaagatgccatcatctcctgctcttgacctctctttattttgctctctgcttaaaccacaattcctctaccgcttatttgaacaaatgggtaaaaaagctgtgtaacaatataaagagctgcctcttaaaataagatgcccaattcctgacaggctgaaggaaaaatgctagctgagctaccatcagagataatatggaagagatctggtcattaattcaaaacttttccttrttttcttcaaaagacctttgattgccgagactttaggaattttgtattctatataactttgctcatgagaagatcactaagatgcttgttacataaacatacataaacaataaaccattgcgtaggaaccatgaagaaaaataataagtttg

SEQ ID NO: 394759 - DNA, 614 bp, Homo sapiens
cagggaatgaagtctgtagcaggatttactacgcaattagttagtgatgatccttatcacatagcgttggttggatttttccaacatggatcaaaaaggaatggcagaatcttttatttccaatgtgtttgctttatcagaacgtcatgagaaaacactaggagacaattttggctctgtattagaaggagttatcttacgattaaagatgaagaatgtgcagtcccctgaagatgccatcatctcctgctcttgacctctctttattttgctctctgcttaaaccacaattcctctaccgcttatttgaacaaatgggtaaaaaagctgtgtaacaatataaagagctgcctcttaaaataagatgcccaattcctgacaggctgaaggaaaaatgctagctgagctaccatcagagataatatggaagagatctggtcattaattcaaaacttttccttgttttcttcaaaagacctttgattgcygagactttaggaattttgtattctatataactttgctcatgagaagatcactaagatgcttgttacataaacatacataaacaataaaccattgcgtaggaaccatgaagaaaaataataagtttg

SEQ ID NO: 394760 - DNA, 552 bp, Homo sapiens
tgcttggttgcagcagtgtttcccccgtctctgcatgcacattcaaaccgcatctcatgcaaactcataacctgtraaattgtgttttgattgggtacaccacatatgcccggacttatctaaccaagtccctaaggaaaattatagaataccatttttttttcttacccctgtagaaaaagattcagttattacattttttaaaattcagggcaggcataaccatagctagctttgacatttctgaacagacctgaatttccaggaaaagcataggtaacatagccagtatactaaggtctattttagcacatagaaaatgtgagtggattcacaatatcccagaacaatcaatattttctcttgcatatctgaaacagatgaaccaaatatttaaattagattatgatgacatggtttattcaacatttcccacctggtaaaactactttttgaatggcattatatattatatgtgcacttagtaaacaggtgtttgataatcctttagaagacatcacatgtgaataagattctaattctcacagttgc

SEQ ID NO: 394761 - DNA, 552 bp, Homo sapiens
tgcttggttgcagcagtgtttcccccgtctctgcatgcacattcaaaccgcatctcatgcaaactcataacctgtaaaattgtgttttgattgggtacaccacatatgcccggacttatctaaccaagtccctaaggaaaattatagaataccatttttttttcttacccctgtaraaaaagattcagttattacattttttaaaattcagggcaggcataaccatagctagctttgacatttctgaacagacctgaatttccaggaaaagcataggtaacatagccagtatactaaggtctattttagcacatagaaaatgtgagtggattcacaatatcccagaacaatcaatattttctcttgcatatctgaaacagatgaaccaaatatttaaattagattatgatgacatggtttattcaacatttcccacctggtaaaactactttttgaatggcattatatattatatgtgcacttagtaaacaggtgtttgataatcctttagaagacatcacatgtgaataagattctaattctcacagttgc

SEQ ID NO: 394762 - DNA, 412 bp, Homo sapiens
aataccataaactaatttaagacagaatgaaatgctgtgtmcatgagaggctgctggattagaaagtagaacaatctgggttctagattcaggtctgtcaataattacctaagagacggcaggcaaattatggaacttctctgggcctcagtgttcttaacatagtagcagctactacttcatgaaagctttcttccatgtattttggttgtttttctaaaagcactttgcattttagttcagagaatccttccaacaaccttataaactaagtaccattagtaaacccactttacagaggacaaaagtgaggcacagaaagtagcttgcccagcaggggtcatgttaatgggatcaaatagaattccaacccacatttaaccacctgctacactgcctctcagctggaaaa

SEQ ID NO: 394763 - DNA, 412 bp, Homo sapiens
aataccataaactaatttaagacagaatgaaatgctgtgtacatgagaggctgctggattagaaagtagaacaatctgggttctagattcaggtctgtcaataattacctaagagacggcaggcaaattatggaacttctctgggcctcagtgttcttaacatagtagcagctactacttcatgaaagctttcttccatgtattttggttgtttttctaaaagcactttgcattttagttcagagaatccttccaacaaccttataaactaagtaccattagtaaacccactttacagaggacaaaagtgaggcacagaaagtagcttgcccagcaggggtcatgttaatgggatcaaatrgaattccaacccacatttaaccacctgctacactgcctctcagctggaaaa

SEQ ID NO: 394764 - DNA, 592 bp, Homo sapiens
cttatgatggttccacttatgattttttgactttacaatggtgtgaaagcaatacatatttagcatgctcctcaatttctgatagggttatatacagataaactctcataagttgaaaatattataaattgaaagtgtatttttggcttacagtgtactcaacttatgatgggttttccggatgtaactccacagtaagttaaggagcatctgtactgtgtttaatatagcatgtaagctgcacagaaggtaagacacttcctratgatgacaaagtttttgagaaagaatgtttaagaataaggtattaggataacctagctccctgtctgactttggtttttgttgctgtaacagaataccacagactgggtaattaataaagaaaagacttttattcagctcacaattctggaggttgggaagtccaaggacatggtgccagcacctggtgagagtcatcccatggcggaagatggaagggcaagagggacaggagagcaagtgtgagagagctcgcttttagaacaaagccactcccaggataagagacccactctcatgataacagcattaatccattggtgagggt

SEQ ID NO: 394765 - DNA, 542 bp, Homo sapiens
attgctcttctgtctttctctctctttttaattaattaaactccacactttccttggatttcaccagtttttccatccagggtaccacattgcattgactatgacatctccaacagcgacttccggtctatgacagtttctcagtctttatttttcactatctcatccatcttgaaaagtactgttcaggcaaatatcctgtagtgcttactaatctgaaggtatagctttcatagtttttcttatgattagacttgtgattacactgaggtcgtaggttttgaaacaatataccagaggtgagatacccttttgtcacatgatatccacatgccatcgctggtgatgttaactttcatctctcggttaaggtagtgtttgccaggtttctctcctgtagaaattgctgttttttttttctgtccgttctccatttattgaaatsaatattcattgactctattcattggatgccagtcactaaatctagccacctgcatgggagggcagaagttaagccccatctcccacagtgggcacta

SEQ ID NO: 394766 - DNA, 627 bp, Homo sapiens
caatcttcagtgtttcagttgcatttttcaactccagaatcttgcttatttttatttcattttttttgttaaatttatctgataggattctgaattccttctgttatcttgaatttcactgagtttcctcgaaacagctatttttaattctgtctgaaaactcatatatccctgtccctcaggattgtttcctgatgtgtcatgtagttcatttggtgaggtcatgttttcctggatgttcctgatgcttgtgtatgtgtgttggtgtctgggccttgaagagttatgtatttattgtcatctccataatctgggcttgcttgcatccatccatcttgggaaggctttccaggtattcaaagaaacttggttgttgtgatccaagtctttggtcactgcagtcattatytgcattaggaggcaccccggcccagtaatgctgtggctcttggtagacttctagatgtactacctttgtactcttggataagatacagagaattccctggattaccaggcagagactcttgttatcttattttctcccaaaataatagagtctctctgtctgtgctaagctgtttggagctgagggaagggtgacataagcacccctgtggccactac

SEQ ID NO: 394767 - DNA, 508 bp, Homo sapiens
acttgttagggcagcctaggaaacaatttgcccacttacttaactgtgaggaccactgaattccatactattccaaaccgcaggccaggtatcattaccatgtcaagcgctggctaagccttcgtaccatgacgtgctcatctcacatcaggccgcaatgctgcttccttctctttctctccatctccactctgaattccttgtgggcagaaatcagatctaattcactgctctttctccagctcctggaatatacttggcgctcaacaaatgttgaaagaaggaatgaataaaataaatacttttttttttttttttgagacggagtcttgctctgtctcccaggctggagtgcagtggcacgatcttggttcactaaaacctccacctcccargttcaggtgattctcctgcctcagcctcccaggtagctggtattacagggtgtgtgccaccacacccagctaagtttttgtatttttagtagagacggggtttcaccatatta

SEQ ID NO: 394768 - DNA, 508 bp, Homo sapiens
acttgttagggcagcctaggaaacaatttgcccacttacttaactgtgaggaccactgaattccatactattccaaaccgcaggccaggtatcattaccatgtcaagcgctggctaagccttcgtaccatgacgtgctcatctcacatcaggccgcaatgctgcttccttctctttctctccatctccactctgaattccttgtgggcagaaatcagatctaattcactgctctttctccagctcctggaatatacttggcgctcaacaaatgttgaaagaaggaatgaataaaataaatacttttttttttttttttgagacggagtcttgctctgtctcccaggctggagtgcagtggcacgatcttggttcactaaaacctccacctcccaggttcargtgattctcctgcctcagcctcccaggtagctggtattacagggtgtgtgccaccacacccagctaagtttttgtatttttagtagagacggggtttcaccatatta

SEQ ID NO: 394769 - DNA, 435 bp, Homo sapiens
gtgcagctgctttggaaaacattttggaagctcctcaaaatgttatgcatcaaactatcatrtgatccaataattctactcttagatatttcttcaagaacaataaaaacatacttctataaagacttatacactgatgtttatagcaattgtttataattgccaaaaagtggacataactcaaatgttcataattgctgaacaaataaataaattgtggtataaccatgcaatggaatactatttggcaatagaaaggaacgaagtaatgatacatgctacaacatggacgaacctcaaatatattagtcaagtaaaagaagccagaaacacaatatgatttcattcattgaaaatgtccaaaataaagaaaatctatagacatagaaattacactaatagttgacttgggctagaagtagaaagtaggaatgc

SEQ ID NO: 394770 - DNA, 591 bp, Homo sapiens
agtacattgggcacccactgcagatgctcagacatgcctcatggatatcagcagaggaaatgcttcctggctgcctgctaccttcaggggactgtgctgagtgacttgcagacattgtctcatctaatcctcagaaaaacatcattttagaaatgagaaaacagctaagagagccattcacttgcaagaggagaagytgagacttgaacccatgctaagaccgttcattcactgtcatctctcagaaaggccttggtttgttaaagataaaagaaaaagatcgtgcctgcccaaagaagaaagggcaaaaattcttgaagcaatttctctgataaagagaacattatcggctctggagctcggaatagagacacgcatgttgactctccccactggctcccttggatggccttctcccggccccatctgtacccctgcaaaggcaagacttgcttgggaggtttttgaatgtgcctgcctgcatgttagtatcagagctctttcagagctgggactgtgtgtggttaaaatgtataacccagcaactctcagggtccttggtacataatatgggcttgagaaatgtttgtg

SEQ ID NO: 394771 - DNA, 655 bp, Homo sapiens
ttagtcacctcctgggctattgttttcctctttagagaagctgtcatgcagtttctgctaaacagatgttttggacaggtcagggagcagaatccaggctgcggctaatggcacaatttgacatcctgccacagtttacccacccatctgcccataagggctggtccccagatagaaagggtatttacgaagctcttagtaaatccagaggacaatcatgtaaaagatagactsttagataattgataaaatttctctgagtgagtggaacccttaggttgttgtaaacatgtgtacatgcttgcacgtgcacacacaagactcaactttgaaccttgagggaaaaattagactctcaaccttgctcctttctgatgaatgggaacaaaaccaattctcagagggtaaataggatggggaaatgcagacaggctcatcagtgcccaaggaaaccaagaagggccaccggagtgtcaaggctctccagggaaaatgtgggtttctacagcatgggagactccagagactttaacacgcaccaactgaaatcaaggctgctcggtgcatgtgttggtttcatggcatggatatttatacaagaaagataaaccctctaggaagtgattaagagaaaaatcaaaagaaagactgaaaa

SEQ ID NO: 394772 - DNA, 420 bp, Homo sapiens
gcatttcagacagaaggaaccgcatgcacagaagtgtggagtctgacagctcctgcatttcaagtgcagggattcctccaggctgtttgctggggagaaaggaaaggtcatagtcagcctgcaagatctgctgccttcatgtatgtgtgttgcttggtttttggagtagtggtgtttgtggtgattttcatttattgtagtaaaatatacataacatcaaatttaccactttaaccattttaaaygtaaaatttactggcattaactacgttcacagtgttgcacaactattacaaccatctccagaattttttttaaatcatcccaaacagaaaatacatccccattaaacaagaactccccattctccaccccactcctccagctcctggtaactttctgtttctctgaatttgccta

SEQ ID NO: 394773 - DNA, 615 bp, Homo sapiens
taattcctaccccagttaacttcacctctaatagagcagccaaatggattagagaaacacgcacaaccctgccacttagcttaagtttaaatgtataacctcagtggggcgtggtggctcgcacctgtagtcctaacactttaggaggccaaggaaggaggatcacttgagcccaggctgagcaacacagtgagactctctctacaaaaaaaaagagaaacaattagccagggatagtggmgtgtgcctgtggtcccagctatttgggaggctgaggtgggaaaattgcttgagtctgggaggttaaggctgcagtgagccatgactgtgccactgcactccagcctgagcaacagagtaagaccttgtctcaaaaaaaaaaaaaaaaattgtaacctcaaatatgaagtggacttgacacgacccaatgatcccagtccgttttcctggtgcacctgctctcctttcctccaccttctgctgtctctgaccctcctcggtgaggacctcacttcttacattactgcagagccagaaacaatcagatggaaactgcaacactcaaccttatcctccccagatctaccctgcatgttcctgctctaacctctcctc

SEQ ID NO: 394774 - DNA, 615 bp, Homo sapiens
taattcctaccccagttaacttcacctctaatagagcagccaaatggattagagaaacacgcacaaccctgccacttagcttaagtttaaatgtataacctcagtggggcgtggtggctcgcacctgtagtcctaacactttaggaggccaaggaaggaggatcacttgagcccaggctgagcaacacagtgagactctctctacaaaaaaaaagagaaacaattagccagggatagtggcgtgtgcctgtggtcccagctatttgggaggctgaggtgggaaaattgcttgagtctgggaggttaaggctgcagtgagccrtgactgtgccactgcactccagcctgagcaacagagtaagaccttgtctcaaaaaaaaaaaaaaaaattgtaacctcaaatatgaagtggacttgacacgacccaatgatcccagtccgttttcctggtgcacctgctctcctttcctccaccttctgctgtctctgaccctcctcggtgaggacctcacttcttacattactgcagagccagaaacaatcagatggaaactgcaacactcaaccttatcctccccagatctaccctgcatgttcctgctctaacctctcctc

SEQ ID NO: 394775 - DNA, 557 bp, Homo sapiens
tttcttgcaatcatttttcaaaccctcaacatccttttgataaactgacacctctttcaccctccagcagtctcttttgctagcaaatccatcccaccaatgaagtcaaatgtatcattgtgcacattccctgcggaagcaatcagttagggttggctgggagcaagagcaagaagctgactttaacctggggccttctgctgagcctcaaggagggcccaatcccccctccccagcttgaagcagtctggggcttgaatgtttgccctgggccttggaggccctgagcaacccacaccctgctcaaccctgtttccaggccggcttcttctggccgcactcccaggctgcagcacatgatctcagcacctgagccaagagaaggagggcagcctactcccaagtatcgaccacactggcccagcaccrcataggcggccagaaagaagctccaggaaaccatcatgggagaggaaagttagtggggcagagaggcaaaagcaagccccaccgcagcacaggcagtgcagagctttcctggcccctgggccacagct

SEQ ID NO: 394776 - DNA, 597 bp, Homo sapiens
gttttattccagaataaaaaaaatactctctctgaagatgagtgtggcaaaccccataccccacacccttttagcaataacccagggcctcataattccctaaaattttattgcttcctgcctccaagctcttttgttgtctactgaccaagcatagctcttacttttgaccttttggtggccactgtgacttccatgagagagaacttttgcgacttcccctgygactgtggttcctgggatccgtgcatgacagctacaagaacccaaacacagtgggactaaaaaagattcttttttcatctctacaaggagagcaatcttatgaatgggacaagcatgatgcaagggaatacgaagaaatgctaacttacattcctgatttcagacatcagaaaaggaagtctaccacccactgtcggctttgagatcaggggcaaccagaaaggtcagttcaattatagactactccttctcaactcccatcccctcccattagctctctccatctgtcaggtcactttgccaataggagacagttctgtgggttctcagccctacggaatagccctggcctaccctaaatcctggagagtg

SEQ ID NO: 394777 - DNA, 548 bp, Homo sapiens
ctgatgctaaaaggaggttaaataaattggctgtgatcacacagccagtaatcagaagagccaaaattcaaactcaagttttattgaccccaaagtccttgaaatgtgcctgtataccacatgactttatcttagtatccatgtattgagaggtaatatttttgagtatttacaatgggctaggcacagtgctaaacatttgcaaagattaacttatttaatcttgcaataaccatatcattggtgatattattgcaccacaktttgtggaaaaaaattaagaagttccccagggtcacacagtaagaaactgacagagccaagattcaatccaggtagtcagactccagaaactttgccattaatgattatgttattatttacgtcagggatcatcttattatcaaatttgatgcaggcagatgccctttggccattcttggaagggtcttggaaactattctcatgagctctcctatgtgaatctaccattagagattatatttttcttttgagttaggcattttcttatgtttacatggaggcag

SEQ ID NO: 394778 - DNA, 548 bp, Homo sapiens
ctgatgctaaaaggaggttaaataaattggctgtgatcacacagccagtaatcagaagagccaaaattcaaactcaagttttattgaccccaaagtccttgaaatgtgcctgtataccacatgactttatcttagtatccatgtattgagaggtaatatttttgagtatttacaatgggctaggcacagtgctaaacatttgcaaagattaacttatttaatcttgcaataaccatatcattggtgatattattgcaccacagtttgtggaaaaaaattaagaagttccycagggtcacacagtaagaaactgacagagccaagattcaatccaggtagtcagactccagaaactttgccattaatgattatgttattatttacgtcagggatcatcttattatcaaatttgatgcaggcagatgccctttggccattcttggaagggtcttggaaactattctcatgagctctcctatgtgaatctaccattagagattatatttttcttttgagttaggcattttcttatgtttacatggaggcag

SEQ ID NO: 394779 - DNA, 569 bp, Homo sapiens
ctttggcaacgcagccacataagcacttgcaggctgttttaaaaacagcgaaggaacagtagagatggtttgctctaggggccattgggaacctagcatagagagccaggccattcattaagcctcatggacagaaaatcaaaaaggagaaaatgaccaccaatgccttgcactatttttatcaccataaaaagcacaggccattgtcttagggaagggggttcatttgacacagtaaattagtttgaaacttttaagagagagggtgcctagttatttgaaatcaatccaagggtattgtactaagtattgtttcttaaaaatatgtggtatttggtttctgtgctgagccmaaaaaaaaaaaaaaaaaaaaaagtgtctggagctgtcacaggagaaatagaaagcaagttcagctaaggtctggccctggcccgcccaggctaacacccatcacccggtgggaagaaagtgaagaaaggggagcagggacgagccttgtagagaagatgcccagggatgatggtaaaataggaagatttttcttgcagtcttccccagagaggggc

SEQ ID NO: 394780 - DNA, 580 bp, Homo sapiens
gtgtatcactacagtaaacagaacttaaaggaacaggcctttgcatggcagcccagctgaatctgcacaaggcccttatctaaagccagttgtgagagaaatacagtagcctctgtgctcattacctctagaattgcattttctagcttctcattaggaagcggtgacatcagaataggaccctgcccctttaagagtctttcccaagataatggrattcatgatctcacaatcacataaatcactgccagcccccttgagtcaattcatacttctgtagttcgttagtggcacgagaggaaattgcatttattataattgcctctaattgcaccagattagtgattacaattattgatggcagctgattattcattaggcatcaaatcaatccccgtgcttcttcattactcgaaacagtaactctgatgagaggtctaaaggaggccatgtccaccctttccactaaatggcaggctgcctccccgtcctgcctcgaaacaaacacctgaaaataatttaggacttaaagtgacagagaaccatccctcgccttccgccatgtaatgcctcatcccga

SEQ ID NO: 394781 - DNA, 554 bp, Homo sapiens
gcacctacaatacaggacatttgtgggatgctgtatctgagatgccctgaaataggctttggaaaatgtgttgttgtcctaattagttattaaggtcgggtatctatggaaacagccatatatttgtccttaagccagacaagcacttactcatttagtagcatgcaatccatacaaatgaagcctggtgcttatacacattagcttcttgcaacacatacaaaaatagagaaagcaggaaagatgaggaaagtatgcaaatggaggaaagagagccccttacaccagcacagtgtcatgcctacagtgagtcactgaggaaatccaaaggccaaagagtgaatttattcacacagcatcaattttgaatgagtccagtgaaattcctccccaatggtgtagcagtggaaggaattgtcctattawtagcatgcttcagctacattatgggttcaatgggttaactgggcttttgttggatggccttgtagcatagtaaccatttataacataatttctatgggaaaatgtgtactgaattctaagtactcagc

SEQ ID NO: 394782 - DNA, 538 bp, Homo sapiens
tgtaacttttttaaagggtcagggggccaattgtggtggctcatgcctgtaatctcagcactttcagaagccgaggtgggtggattacctgaggtcaggagttcgaaactggcctggccaacatggtgaaaccccgtctctgctagataaattagctgggcatggtggtacgtgcctgtattcccagctacttgggaggctgaggcaggagaatctcttgaacccgggaggcggagattgcgtgagccgagatcgcgccactgctctccagcctgggcaacaaaagtgaaactccatctaataaaaaaataaaaagaaaagggtcagggtcaacttgcacaaagggcacaggcttgagattcagaagactgaattcagaagccctagaaatgtactacrcgcccctgaattaataaactaagcatctgttctatgtatagaatataggaattacataatacctgcttctctgctacacaggaccattgtgtaaatcgatgagataatatatgtaaaagcactttgagaaattaaaagc

SEQ ID NO: 394783 - DNA, 584 bp, Homo sapiens
ctaggtaattgacaagcaccatctacgtgcagccttgcaaacactgtgggtgaggccaagtggttctgattcttggtacaaatccagaatcagaagtaacactcaccgtgtgcagtggctcatgcctataatcccaacactttgggaagccaaggtgggaggactgcttgaacccaggagtttgagaccagccagggcaacatagggagacctcatctctacaaaaaaatttataaaacttagccaggcatagtggcacatgctggtagtagttccagctactcaggaggttgaggcaggaggatcgcttgtkcccaagacgtcaaggctacagtgaactgtgatcatgccatgcactccaccctgagtgacagaggaagaccttgtctctctccctctctctttatgtgtatatataaaatacaaggccgggcatgggggctcatgcctgtaatcccagcatcttgggaagccaaggcagtaggatcgtttgagccttaggagttcaatactagcatgggtaacatagagaaaccccacctctacaaaaagaatacaaaacttagtcaggcgtggtagcatgg

SEQ ID NO: 394784 - DNA, 584 bp, Homo sapiens
ctaggtaattgacaagcaccatctacgtgcagccttgcaaacactgtgggtgaggccaagtggttctgattcttggtacaaatccagaatcagaagtaacactcaccgtgtgcagtggctcatgcctataatcccaacactttgggaagccaaggtgggaggactgcttgaacccaggagtttgagaccagccagggcaacatagggagacctcatctctacaaaaaaatttataaaacttagccaggcatagtggcacatgctggtagtagttccagctactcaggaggttgaggcaggaggatcgcttgtgcccaagacgtcaaggctacagtgaactgtgatcatgccatgcactccascctgagtgacagaggaagaccttgtctctctccctctctctttatgtgtatatataaaatacaaggccgggcatgggggctcatgcctgtaatcccagcatcttgggaagccaaggcagtaggatcgtttgagccttaggagttcaatactagcatgggtaacatagagaaaccccacctctacaaaaagaatacaaaacttagtcaggcgtggtagcatgg

SEQ ID NO: 394785 - DNA, 584 bp, Homo sapiens
ctaggtaattgacaagcaccatctacgtgcagccttgcaaacactgtgggtgaggccaagtggttctgattcttggtacaaatccagaatcagaagtaacactcaccgtgtgcagtggctcatgcctataatcccaacactttgggaagccaaggtgggaggactgcttgaacccaggagtttgagaccagccagggcaacatagggagacctcatctctacaaaaaaatttataaaacttagccaggcatagtggcacatgctggtagtagttccagctactcaggaggttgaggcaggaggatcgcttgtgcccaagacgtcaaggctacagtgaactgtgatcatgccatgcactccaccctgagtgacagaggaagaccttgtctctctccctctctctttatgtgtatatataaaatacaaggccgggcatgggggctcatgcctgtaatcccagcatcttgggaagccaaggcagtaggatcgtttgagccttaggagttcaatacyagcatgggtaacatagagaaaccccacctctacaaaaagaatacaaaacttagtcaggcgtggtagcatgg

SEQ ID NO: 394786 - DNA, 581 bp, Homo sapiens
ggtcatccgactacactgctttgctttcccgtgattattcagcatcactggggcatgaggtaatgggaagataatgggctctgggttcagatcccagctytgctgtttcctagatgtatgaactttggcaaggtaattaatctctctgatcttcagctccctcattttaaaatggagatcacaataacaaacttgtagggttacttaacagtaatgtgtgtgtgtatgcatgtatatatacatacactttgcctggaaaaaaatgcctgagatcaacaagtaaacatttctatgctacgtggagttacttgcaaactgtctcatggctccattcagaaattagctaggctgcatcccacggtgttgagattcaacgtaaacatttatcaagcatccattgtaccaggctccctgttgtacaggtgcaggtgtgctctctcgctcaatcctcacaacagtgccattaggcaagaactattgacccatttcacagtgaaggcaactgagactcagagaagccaagagcccaaggagtgagttagcacataaatgacacagtcagaatatgagcccatgtcttt

SEQ ID NO: 394787 - DNA, 581 bp, Homo sapiens
ggtcatccgactacactgctttgctttcccgtgattattcagcatcactggggcatgaggtaatgggaagataatgggctctgggttcagatcccagctctgctgtttcctagatgtatgaactttggcaaggtaattaatctctctgatcttcagctccctcattttaaaatggagatcacaataacaaacttgtagggttacttaacagtaatgtgtgtgtgtatgcatgtatatatacatacactttgcctggaaaaaaatgcctgagatcaacaagtaaacrtttctatgctacgtggagttacttgcaaactgtctcatggctccattcagaaattagctaggctgcatcccacggtgttgagattcaacgtaaacatttatcaagcatccattgtaccaggctccctgttgtacaggtgcaggtgtgctctctcgctcaatcctcacaacagtgccattaggcaagaactattgacccatttcacagtgaaggcaactgagactcagagaagccaagagcccaaggagtgagttagcacataaatgacacagtcagaatatgagcccatgtcttt

SEQ ID NO: 394788 - DNA, 570 bp, Homo sapiens
attttaccatgaaggcaataggaccctttgagagatcttaaggaaggaaatgataactttgaattcacatatcaaataggttttcataataactgtgtgacaaacacagtttcaaagggatgaagtatataggcaaaggcaccagctaagaaaagacaaatggtagtgatgtattgtgagctatttggccaacagatactattcacggtagccactgaatgggaatagaatggttcataggtttatgcatataaaaaagaaggtggcattaaaaactgtctgggccaatttcattcatggagacaagaaaaaaagaaggaacagattggaggaaattagacattccatttcagacatttgctttttgaggtgactacaggatgttcaagtggaaatgatagtaaacatttggcacttatcagtctgtagcttrgaagacagttctgggagtcatcagttatataagtggtttgaagagcaggggagaagaaggaaggaggatggaagaaaaggagtacgggagaggtgatgggagggaggaagaaaggaggaggtaagttaagcaaaagt

SEQ ID NO: 394789 - DNA, 528 bp, Homo sapiens
aattaaaaaaaaaaacaaaacatcaagaaacagtcaaacctgttgactctgttgtgctttccccatgcacagaatatccatctgcaaatgatttcatagttacttcactcagtagagaccctgctgatgaataaatggagatataaagctttccatgtactgtgccatcttctccaaatatgagcttacattgctgagtaaatatccttacatgatcagtttttcatattctgagaacctcaattcctacacaattgtttgcacaattaaaattcaatatcattggtttctaactttttttctgccaatatacttgagggaaaacctatatcataaataatatatataaaacctatatatgtgtatgttatatawcatatataacctatatcatagatatatataactctgactcactttcttaaaggaaaactttaagggagttacaccaaggccaaatatggaagagcatatataaatctcataagagtacggatgaaagcctccaagtcccagatatcagtgatt

SEQ ID NO: 394790 - DNA, 626 bp, Homo sapiens
ttatgaaatgtaaagaactactgttttaaggtrgagaaaggacttctataatcgtttgtttgctgacgatactcattttaaggttgaaatggttacttaattttaactaagtttctaaaaatagtgtgtatatgtgtgtctgtgtgtatttcgagcaagaaaatgaatttctgaaatctggcttgttttaagaatacaaacattagatattttaagtctctaaccacagaagactagcagtagctttgttgtagtagctcaatagtttaaactccaccttcccgtgatcagcctaaatattgaaaacactcatacctataacaattccaactttgtaaatcaatggctaaccagtagtaaatggtttacattagaactccttttactttaatatcaggattgggatattgtgattaatcaaatacaaggttatctagagaaatactttttcagtagttgactttgtcggaaacttttaattgatcaaaactgcattctcgaaaggatgaactgataacaggaatgaattcctctgtcctcaaattcccttggatgtgaggcagtgttctaagaaatacaatgtctgttgtttaattggaagttgtatgcatttgtgcaatgcagtt

SEQ ID NO: 394791 - DNA, 574 bp, Homo sapiens
  misc_feature (1)...(574): n = A,T,C or G
tggcaataacgttttagatacaataccaaaggccaaaggagcaatccatgaaaaaataattggtaagctggatttcattataattaaaaacttctgctctgcaaaagacactgtcaaaagaatcagaagatattataggctgggagaaaatattgcaaaaaataaatctgataaagaagtattatacaaaatatacaaataactcttaaaattcagcaataggaaaacaaacagcccaattaaaaatgggcamaagaccagatatctcaccaaagaagatgtacagatggcaaatatgcatgtgaaaagatgctcaatataatatgtcattagggatctgcaaattaaagcaatgagataccactacacacctattagaatggccaaaatccaaaacactgacaacaccaaacgctgacaaggatgtggaccaatgagatctctcattcattgctggagggcaagcaaaatggtacagccactttggaagacagtttggcagtttcttaaaaaactaaacatatctattccattttaccccacaattgcagtgggtcatatatttacccannnn

SEQ ID NO: 394792 - DNA, 574 bp, Homo sapiens
  misc_feature (1)...(574): n = A,T,C or G
tggcaataacgttttagatacaataccaaaggccaaaggagcaatccatgaaaaaataattggtaagctggatttcattataattaaaaacttctgctctgcaaaagacactgtcaaaagaatcagaagatattataggctgggagaaaatattgcaaaaaataaatctgataaagaagtattatacaaaatatacaaataactcttaaaattcagcaataggaaaacaaacagcccaattaaaaatgggcacaagaccwgatatctcaccaaagaagatgtacagatggcaaatatgcatgtgaaaagatgctcaatataatatgtcattagggatctgcaaattaaagcaatgagataccactacacacctattagaatggccaaaatccaaaacactgacaacaccaaacgctgacaaggatgtggaccaatgagatctctcattcattgctggagggcaagcaaaatggtacagccactttggaagacagtttggcagtttcttaaaaaactaaacatatctattccattttaccccacaattgcagtgggtcatatatttacccannnn

SEQ ID NO: 394793 - DNA, 442 bp, Homo sapiens
cactgctgcatgctaagtgtgtcatcctgggattcaaacgtgagtaatagaaaacctgactaagcagygacttgaactgaataggaggctcgctctcctcatttaacaaaatgtccagaacagggcagtccaaagctgatacagcagctccatgtttctgtgcgggacccggcctcctccagcgtttagtttagctgtcttgtcttgtaggcttctttctttcattctcatctttgttacccggtaggtgtgagatgcctgcttcattagcatcctacccgtgctccaagcaggaggtgagccaaaggtgaactcaaatcacagatgcttgttaaggccgttcccattcaaagaactcctccagaaacaattccattccagcagtttccatttacatcatcttggccagaaccatatcatgtagccactccgatttggaaaa

SEQ ID NO: 394794 - DNA, 442 bp, Homo sapiens
cactgctgcatgctaagtgtgtcatcctgggattcaaacgtgagtaatagaaaacctgactaagcagcgrcttgaactgaataggaggctcgctctcctcatttaacaaaatgtccagaacagggcagtccaaagctgatacagcagctccatgtttctgtgcgggacccggcctcctccagcgtttagtttagctgtcttgtcttgtaggcttctttctttcattctcatctttgttacccggtaggtgtgagatgcctgcttcattagcatcctacccgtgctccaagcaggaggtgagccaaaggtgaactcaaatcacagatgcttgttaaggccgttcccattcaaagaactcctccagaaacaattccattccagcagtttccatttacatcatcttggccagaaccatatcatgtagccactccgatttggaaaa

SEQ ID NO: 394795 - DNA, 442 bp, Homo sapiens
cactgctgcatgctaagtgtgtcatcctgggattcaaacgtgagtaatagaaaacctgactaagcagcgacttgaactgaataggaggctcgctctcctcatttaacaaaatgtccagaacagggcagtccaaagctgatacagcagctccatgtttctgtgcgggacccggcctcctccagcgtttagtttagctgtcttgtcttgtaggcttctttctttcattctcatctttgttacccggtaggtgtgagatgcctgcttcattagcatcctacccgtgctccaagcaggaggygagccaaaggtgaactcaaatcacagatgcttgttaaggccgttcccattcaaagaactcctccagaaacaattccattccagcagtttccatttacatcatcttggccagaaccatatcatgtagccactccgatttggaaaa

SEQ ID NO: 394796 - DNA, 631 bp, Homo sapiens
ctagatgctaggagatgactctcacaaggttcctatccccttgggaggaagaggatagacaaattatccagtaaaaygtaacaggacctgggattgggactgagattgtgtgtcatccatagcagggcacagagggagaccacagctgactgcattgagtgattcaaagaaggcaagacttgtcttggttttgaaagggaaataactgtttgaaagataagtggaggggagggtgttcaagttcagtgtgagcaaagtacagagatgtaacatacacaggcatatctggagacataaacacgatacctaagtgagaaaggaaggtagataggtaagggcaagatcgctaaggtaaactggtgaaactccagactactcaagacaaaaggcaagaaataacaaggagctcaccttagtcagtagtagtaggaatacagaggaggggacagatatgggagatgctacagtagcttaaagcaatagtattttatgcttggcaaaatgaggggaaatacaagtaaactgttgtaaggttcttacaccatatgtgatgtggtataatattgttggaaagtagactgattgattaaagatttacattacaagccctagatcaaccacaaacaaaaca

SEQ ID NO: 394797 - DNA, 653 bp, Homo sapiens
tcaacctcccaaagtgctaggattacaggcatgagccaccgtgcccggcctggagggcttggagggcttttaaggtctgtccctgcattaagagtctctgattcaaggactccttttgcccaaaactttcccagtccagtgcaagagctgtcacagattcaaatgtgtactgtccaaacagttccacttgagcccagagggaagccacrgcctgttcgaatgcatggggatggcaagcacaggtgctctcagttcttaccagcactatttccagtttgcctgcattagaccatccgttttgcctttagtagggcagcatcagatgttaactgagaagcatgcccggtccgagggtcatcattctgaactgcatggcagattacccctcaggtccatggccgaacctccatgcagaccttcaccgtcggctgctttcgctgccaccaccccagctgcgggtatcatcatcttggactaaaacaactgcaattgccaaccactactcttctcacattctctcttttccacttacagtctgtcctccctcccccccttactctccactcctcctaggcagtagtcagggccatctttatgatgatctcactcttagcctaaaaccttataactcttacctttgcagctggatgaga

SEQ ID NO: 394798 - DNA, 653 bp, Homo sapiens
tcaacctcccaaagtgctaggattacaggcatgagccaccgtgcccggcctggagggcttggagggcttttaaggtctgtccctgcattaagagtctctgattcaaggactccttttgcccaaaactttcccagtccagtgcaagagctgtcacagattcaaatgtgtactgtccaaacagttccacttgagcccagagggaagccacagcctgttcsaatgcatggggatggcaagcacaggtgctctcagttcttaccagcactatttccagtttgcctgcattagaccatccgttttgcctttagtagggcagcatcagatgttaactgagaagcatgcccggtccgagggtcatcattctgaactgcatggcagattacccctcaggtccatggccgaacctccatgcagaccttcaccgtcggctgctttcgctgccaccaccccagctgcgggtatcatcatcttggactaaaacaactgcaattgccaaccactactcttctcacattctctcttttccacttacagtctgtcctccctcccccccttactctccactcctcctaggcagtagtcagggccatctttatgatgatctcactcttagcctaaaaccttataactcttacctttgcagctggatgaga

SEQ ID NO: 394799 - DNA, 597 bp, Homo sapiens
acctgtagggaacttctggctttatggaagggaagattttctgaacaatttggattttctagagataagagtgtgctggctcccaagtaggaacttctcccgtgattagttttaaagaaatagatggggccgggcatggtggcttacggctgtaatcctagcactttgggaggccaagacaggcgaattagttgaggtcaggagttcgagaccagtcagccaacatggtgaaaccctgcctctactaaaaatacaaaaaattagccaggtgtggtggtgcatgcctgtaatctcagctactcaggggctgaggcaggagaatcacttgaacctgggagacagaggttgcagtaagctgagatagtgccactgcactctagcctgggtgacagagtaagactccatttcaaaaagaaagaaaaaaaaagaaagaaaaaagaaagaaagaaatagatagaagtccrtttgtcagaaagttctggaaggattcctgcatttgacaggaagttggagctttaagcccttttccacactaagattctgtgattcccagatcattggcaagcagttctggtgctgtgtttctttcaatctgtt

SEQ ID NO: 394800 - DNA, 585 bp, Homo sapiens
tccacaatcccatagcccagagctaactaaccactataaagaacccagcgtggttttaactaatggatcaaaagatgctcatcaaaggctctgagctttcctgagtgctaacaggaaacatccagcatctctggtctctccaaggctgcaggtgtctttgcccatagtgcctgttttgtgtcagggaaagaatcaacctgggagccaagcccaggaatcaggatgaccaagacatactggacaaggagggaacaaacccatccaaggacactcaaggacaaatcaagcaaatgaatttaagggagacckgctcatggtctgctttgctgctcagcatggctgggaggcacagtggaagatcatgcatcctgcccctgggactcctgtgccagagcctgagagctttctcctgcccacaggctaggggtaggacagttggaattgatccatgccttctagctagactgtgggtcccctcagtcttgggcatggtgacagcccagcatcagacagaggtcagtatcaaactagaaaatttaataaatgctgtcagatttgtagacccaagaaaatataaactgccaa

SEQ ID NO: 394801 - DNA, 571 bp, Homo sapiens
aaagaccctctctggcaggtaaaattaattaaataattgatataaccagttaattccaggaacataattctgtgagatatcccaaatttgaaaagtgaaggcacctgaaaaaacctgcattttggaaatgttagtaaatttgagaaactactccttcctaaactgtagttgtatatcattgctacatattgcacccaattccctgttcccttgcacattggaaattatgggattcggaaagttcagtgacagattcaatgaatataacgtcttcaatcaggagtgagagataaatctacaggttgcaataggctggaagagtagaagatggtaaacaggtcgtttgttagacaggtagcctttgaacacatccccatatctctaatgactaaaccatattaaaggatctctgagaagagttcagaactgacatctgccttctgaaccacgaggtacaccaacagccaacagccactgaatgtggacagctttcaaaagtattaaytggggattaatatgggggaaagcatttcatgggaaaatcactgagcttcttaagataaataccaca

SEQ ID NO: 394802 - DNA, 520 bp, Homo sapiens
tcaactcccctcatgtcccagctttctgtgtaaaaactggccttaaaaatttatctgacctaccttgtttgattacataagacccccattccagagagggttcttctccatacccagaaaaaaacaaaacaaaactcaaagaggccaagaaaaatctaaactgataagccttactgggtttccccactcagtctattgagattagatcctacccattttgtccaaacatatttctacgtggctgaccacactttgttaaacctgaacataaaaatgggcagtatcycctatagctttgggtcctcattctaaaggctcccacgtcacgtaaaaccacgatcaaataaatttatatgccttttatcctaatagtatgcctcttgtcagtgaaccttcagaaggcagagaaagtgctcttggctcctacaatagaatgaatcgtgtgttcaaacttttagtcttttagagcatatttgaatgctgtttttaaaaaagttgtttcaaataattattagaagaa

SEQ ID NO: 394803 - DNA, 558 bp, Homo sapiens
tttgttggaaggatggggctgttaactaaatcttgtccttgtgcttttctgtattttttatattttaacagtcatccaaaaagaaaaagaaaccacattttaaaataaaacacaacataggaaagtgaaaggtggttatgccataaactgtctaggtcctagatggttttcaactttctcttaaaaatttttgtttttctgttttctccaagcttaacaggtggggaaaaatatattaagaaatgtatacatgtttttctgtattttgtaagctttttaaaggaaaaataaacatcataatttgtgagaattatattaccatcattcagccatatatattaaacctgtctttatccattaacaaattgtaagtgctagttaacttatgcaagtaaacagtatatgcagatagtcactaatctaaatttctgctacaaaactcaaatatgagtgcttactttggcagcaygtgtacaaaactcaaatatgatatttgaatttaagtgtgaatatccaaatgccgtttactgactgctacaactgtggaaaattagaaac

SEQ ID NO: 394804 - DNA, 573 bp, Homo sapiens
cagaacacacgcccataatcatatgctatgctgactccaacagcaggcaccgggaaactttgagaaaattgctcgtgaaattgatacccagtcaaaacacttttaaaaaatcttgtctcataaacgtacttgttagttttttcaaragaaaccaagatgccatattcctaaccaacccaaagaaaatgatcataccatcgtaaacaatgccagtaatcacagcaaaacctgttgacacaggatctgctgtgtttgttcttgtcccacatgtgaactataaattagcatttaggtcccatagtcagtttcagggggaaatctaactttacagtaaaggatcaggctgatgtcacttaaaccagtgctcaatttcagcttcatttgtggggaaaactagagcttttcatgactcctggtgaaatgcaagatgagaatacattacctgtgatgatttccagacaaaatgtttgctttgatctaatcaagcctttaaacctaaactctaattttatgaattacaagaaccagaagagtaaactaaatgacaccagaaggaaaaaaataagacaaatt

SEQ ID NO: 394805 - DNA, 573 bp, Homo sapiens
cagaacacacgcccataatcatatgctatgctgactccaacagcaggcaccgggaaactttgagaaaattgctcgtgaaattgatacccagtcaaaacacttttaaaaaatcttgtctcataaacgtacttgttagttttttcaaaagaaaccaagatgccrtattcctaaccaacccaaagaaaatgatcataccatcgtaaacaatgccagtaatcacagcaaaacctgttgacacaggatctgctgtgtttgttcttgtcccacatgtgaactataaattagcatttaggtcccatagtcagtttcagggggaaatctaactttacagtaaaggatcaggctgatgtcacttaaaccagtgctcaatttcagcttcatttgtggggaaaactagagcttttcatgactcctggtgaaatgcaagatgagaatacattacctgtgatgatttccagacaaaatgtttgctttgatctaatcaagcctttaaacctaaactctaattttatgaattacaagaaccagaagagtaaactaaatgacaccagaaggaaaaaaataagacaaatt

SEQ ID NO: 394806 - DNA, 453 bp, Homo sapiens
gcttgttataccaatgttcagaatcactaaacagagggattagaaggcctaaaattataataytccagaataatcccaactgaggcaacctggaatgttgattttcagactgctgttttcatgacataggcttcctttccaaccctacaggggaattatctcctttgtacattaataaatatcctttgttctaagcacatacctaacaaggaagtgcagttcaaaagtttagacaacatttcatgactagaagttaaatttgagttacaagctaacaaccagtttttcatcatatggaatttgattaagtcactatagtttacagtgctggttactacctgggagtaacgtaaagactaccaatgagaagtaataaaagcttagattcttagtgacataaaatcagcctaattcagacacaagcaggttaaacctacagagtacacgttaact

SEQ ID NO: 394807 - DNA, 638 bp, Homo sapiens
caagcatccccatgtaagaagttttgcaggagtcttttaatataagactttatgtagaaatgaaaaagattacatatcaattattaaaaccataataaaaggtaaatctatgtccaccttgctatgtaaataacaataataatatccagcatttacatggtgcttacaatggcataggtgtctaagaacttttgatacctgagactatgatatagagagggtggccttaaagttgggacacacagacaatggacactatattataaatggtttctagatcttgcattacagtgtatgatatgtccaatgtgctgtgcaaaattgcaatgaacatgctgcattaattcagcattrctatcaatctctgcacatgcttctgtgatgtgttgcctcagatgatatacatttctgcttttccactaaatatgtgcttttaggaaaccccaggagaagtaaatcaggggttcaaaatgtaaaaaaataaactatgatagcatagtagcatctgcttctggattttatggctattgtgtattatctccattttaaagatgacgaaactgaggctcagagaagttaggtaacttgcacaaggtcatagatctagaagtggtgaagggatgatttaaatcaaagcc

SEQ ID NO: 394808 - DNA, 632 bp, Homo sapiens
ttgcattacagtgtatgatatgtccaatgtgctgtgcaaaattgcaatgaacatgctgcattaattcagcattgctatcaatctctgcacatgcttctgtgatgtgttgcctcagatgatatacatttctgcttttccactaaatatgtgcttttaggaaaccccaggagaagtaaatcaggggttcaaaatgtaaaaaaataaactatgatagcatagtagcatctgcttctggattttatggctattgtgtattatctccattttaaagatgacgaaactgaggctcagagaagttaggtaacttgcacaaggtcatagatctagaagtggtgaagggatgatttaaatcaaagccattctatgttagagtccatggtctcattagaagaataaatgaaaaaaaaarctataaatacttacatagtagcttcatgatataaagttgtagtctctttgctggtccagtgcaatttttttgtcttctattttcccaatcacatatctgtttatttgtttcctaccctgttgtataacaggagagtcactgctttgtatcaaggtccttatttcttattattgcaagatttttcaggctttatcaatgccactgctaaggttgttcatactgc

SEQ ID NO: 394809 - DNA, 612 bp, Homo sapiens
ccaaaatgagttcatactgactactagagtatgtaattccacaggaattttatgatcattgagcaataattcttgtatatctattttacaaaattatctaggaagcaaattataatagagtatttcctcaaggctcttaataacatgatctatttttgggaattctctctccatgctggcacttgaaatttattacctcaatagttttgacaggcaaaaggatgaaagaggtagaactgtttaaagttatttttagcctaaatctaggtttattactaacaataggttcccattgtgccaccctagagcatccaaagtaatcagagtagaatagagaggcaattaaattgaaagccaacaatctgctgaatacgtattttagtatcatttcaccctaccytaaccttctttatatgttcagacatcggtaagtgtagttctcctgttcagtaacttactgtgattttttttcattttttttgtcccaagtcggttgcagaaggaggtggctattcaacataggtctcagggtggtgaaaaatgagttaatatttatttgttcctatatagatattaaagtatgcttgaccaggcacagttgctcatgcctgt

SEQ ID NO: 394810 - DNA, 535 bp, Homo sapiens
aggaaattgagacagtatgtgcagattactttttcataaagcttgtagtaaaaaggagaaagaaaggaggacacagaagtaaaggagaagacggtcaatacggtgacgttctccagggctattgcacagttctactgattacttttagacagaagaaaagacatctaagtcattgcaataggaaggaagraaaagacttagaagcagttccatttctttgtaaataataggaatttaagggagttcccatccaatggtattattcctctgtgaagtagcagtcaagctcatctgctgagagtaaggagaggtttaaaaagtatggagcagtttgaaaggactctagagaagctgtgggaatactgacccacaaagcacagggggtgctggaaacagttaataggcaaggagtgagatcacagacctcaagaccccagtaaatcactgcagtcttctccttttcctccttctgccttttaacatttgcaaactttcatatttcttgtcaacttattcctagtcttttatattttcc

SEQ ID NO: 394811 - DNA, 617 bp, Homo sapiens
attttgtacaatgcaaaggatatagagtacatactaaatgcttatattaaaagttaacttggaatataattttagatgatactggattgtctttcacataaagatgaacttttatgcttagtttactagttgagcttttaaaattatgaaaaaaattaaaattatattaataggccctacagttatatcttgaaatgatcatatggattttcttctgttacctatgtatgtgacaaattgtgtaaacagttttctaatatcaaactatcctttcattccaaaaataaatcttagttggctatgatatgtgtttttaatataactttatatttaattggcttataacctcttaggaattttgtaaatacattaacagatacattttaagaggtttttgggtttttttttttggcttgttttatttggtgtgattgtcagatatgttattaccaaarctatgctaacttgataaaaccaactagaattttttcattaaaaaacgtttggaaacagcatcaccctaaaaaaaaattttcaaataacattccaataaaaccatttgagctctgggattttggtggcgtgcatttctttgacaattttgtcaattatttctg

SEQ ID NO: 394812 - DNA, 501 bp, Homo sapiens
agcccagatgctcctgcatgtttctcctatctcctgtttaatcttgatcttgggtgttccaaaatgttctatttagaaacatcatttagaaggttctgatttttgtaattgatttctttttcccaccttttgtttctttacttactggcaaagcaccacataaccattctactgatatatgtcaaataaacaaatttgtatgcttatactgggtatatatcttctgtttgagaaaatatttggtttgcacatyttgggactaatctttggaattatttattccatgattactagtaggggtcatgcatattttatttggagggttcagaactcaagtcacctgccaaagtgttggggaaaacctgccaatgtgatggaagaatttacaatatcccgcaataccttttaaaaaaattccatctatctctgcattattaacttcctagaaaagcctagtcagtgtctccttctgaaacattgctccaagatcatttatctccc

SEQ ID NO: 394813 - DNA, 648 bp, Homo sapiens
agatattctactatgagcaacagaaaataaacaaagatactaatctaaacatatttcaccaaattatatagagagaaacctttcttaattatctttctagcacccaaacacagcacaggcctaccactgaataaaggcttaatgaagatttcctggtcttagtctcaacctctagttctttttattttattgttgttgttttaaacaaagagacaattttcttttttagatatcacaggtcaattaatcatgtaaaattggctgaaagttttgaacatataaaataatttcaaacataactgtattcattgtttcatgtcttatagaacaaaaaaatatttagacaacacaaattgattaataaaagttaaccacctgcacttgattgagtggtatgctaaacgctgtgctataacttggcaatgtatattatgtaatccatgcaaccatctcattaagtgaattttgtcatccttattttatagatgygaaagtgtcaaaggtgtgaaataacttccccatgtttagttattatacacagaggcagagtttgaacttcattctgtgggcctcaaacacctagtattccaaacagcacttccagagctgggtacccagataaacaggaaagaacctctagttaaatta

SEQ ID NO: 394814 - DNA, 593 bp, Homo sapiens
tacccagataaacaggaaagaacctctagttaaattagtgcaagaggtgcacaggtagactattcccccgcctccatttggtgacatttgaattttgattactagctagtttcaggaaatatttcaccagaaattttactgacaccatgttttatattgctttaatagatcaaaaccttctgatttggggtttcttggggggaaaatctcaataaatcactgcaaaatcctttagaaatgcctttttgatggaagtgtctttaacttgagttgagagagggaaccttgtctcttcttctgtagcttttggaaggcttctgctctctttgtggttagacaygctgttggcattttttccttccagggagaccttctgaacagcagcattcaggttgtcagaacttcctccctgcctgggactgcaatgtgagagattatagtatactgtttgctactgggcttgaatgattatagcaatacatccaatgtctattctaaacagaaatgaatcaaagaatgaataaatggaagatatctcatcaagacaggaaaataatggtagccaaatgagattcatatttggagaaaaagca

SEQ ID NO: 394815 - DNA, 582 bp, Homo sapiens
ttaatcatatattaaaatcactcactcttcctaaagtggtaaatgtatgaaattgtgacacctttacagaggtgaaaggatctcttaagaagcagtcattttgcactgtgaacatttatgtacttgattcaggtgatggccttctctggaacatggtgggcttagtcttgscaatcaaacacttgaccagtaaattacttccttcagtctctcctttaagaataaaaagtactcattactttcctcatgtttctatattggatttttgttcttctgttttttaaagctagaaaagatcaaatcaactctaaagaatctattataaaatgtcatctattaatgcccctaaaatgtttttttgcacaaaagatgaaacatttcaatcaaaagtatggccccaaagtaaccatggagaaatatgctgcccatacattaaggaaggagtgagggatactgtttgaagtctggtattttatcttataacatataagatcttagcattaactcttgtaccaagtggcccttgtccaacatgtgtgtttatattggcgtctctttagaattttttttgtaaacactgcc

SEQ ID NO: 394816 - DNA, 582 bp, Homo sapiens
ttaatcatatattaaaatcactcactcttcctaaagtggtaaatgtatgaaattgtgacacctttacagaggtgaaaggatctcttaagaagcagtcattttgcactgtgaacatttatgtacttgattcaggtgatggccttctctggaacatggtgggcttagtcttgccaatcaaacacttgaccagtaaattacttccttcagtctctcctttaagamtaaaaagtactcattactttcctcatgtttctatattggatttttgttcttctgttttttaaagctagaaaagatcaaatcaactctaaagaatctattataaaatgtcatctattaatgcccctaaaatgtttttttgcacaaaagatgaaacatttcaatcaaaagtatggccccaaagtaaccatggagaaatatgctgcccatacattaaggaaggagtgagggatactgtttgaagtctggtattttatcttataacatataagatcttagcattaactcttgtaccaagtggcccttgtccaacatgtgtgtttatattggcgtctctttagaattttttttgtaaacactgcc

SEQ ID NO: 394817 - DNA, 609 bp, Homo sapiens
tgaacgcaggagcaactaccaaacacttataaaaccatcagatctcatgagaactcactatcatgagaacagcatgggagaaaccacccccatgatccaattacctccagctggtctctcccttgacatgtggggattgtrgggaatataattcaagatgagattttggtggggaaacaaagcctaatcatataaattgtggtagcggttacatgactaaatgcattcatcaaaacctattcaaatgtacattttaaagtgttggattttattgtatgtaaactataactgaataaagctgatatttttaaagtagaaagaaggcaaaataaagacacgtttgagcaaaaaaaaaaaaaaatcctgtgaagtcagtgttattctaaatagagcatgaagagcttgagcaaatttacacagaaccacagcaatgaaggcaagcctaggaaataaggacaataaactaatatatgtattaatttttaataaattcacaaaatatttatttagtagctaccatgtctgtacagcattgagcaaactaattgagatataataattatttaatcatggcatttatcttcctgcacctcaaactgtagttaaaag

SEQ ID NO: 394818 - DNA, 609 bp, Homo sapiens
tgaacgcaggagcaactaccaaacacttataaaaccatcagatctcatgagaactcactatcatgagaacagcatgggagaaaccacccccatgatccaattacctccagctggtctctcccttgacatgtggggattgtggggaatataattcaagatgagattttggtggggaaacaaagcctaatcatataaattgtggtagcggttacatgactaaatgcattcatcaaaacctattcaaatgtacattttaaagtgttggattttattgtatgtaaactataactgaataaagctgatatttttaaagtagaaagaaggcaaaataaagacacgtttgagcaaaaaaaaaaaaaaatcctgtgaagtcagtgttattctaaatagagcatgaagagcttgagcaaatttacacagaaccacagcaatgaaggcaagcctaggaaataaggacaataaactaatatatgtattaatttttaataaattcacaaaatrtttatttagtagctaccatgtctgtacagcattgagcaaactaattgagatataataattatttaatcatggcatttatcttcctgcacctcaaactgtagttaaaag

SEQ ID NO: 394819 - DNA, 582 bp, Homo sapiens
ttgtgctgcattactgatgtctaacagggatttttcaaacatgccctaatctgcctgaaacactgtgccttcactagagccaaaagtagattaaaaatcagtcactcattaatactttgcctagctactaaattggaggtgcctaaacaagatactaatgaggtgactgagtcttaacctggttttggcctccactaaaggtattaatgaggtgaccaggttttaacctgttcttggcctcatgtatgtgttggtttttcaaagcaggtgagaatctgttttaaaaggctattaaaatatcaaatcataagtctagttcaggatttttttttttaagaaacatgaactacaaatatgaagggaagaactgaacagagaacataggaacccttaataataatctttcacataatcctagcccaattttcctgaagaactatagcagattgaatccacattgtttaagtgaatattgaggtttttccagtgaataattttcaatttaacatataatatcctaaatccrtaggtcctaaatggaatcaagtagcgagtatttattgaataaataataccaactat

SEQ ID NO: 394820 - DNA, 621 bp, Homo sapiens
agaatatctgccacagacagtgccctggagattctactttaaatctgcttgagatctctttttttcttgactctgtgtgattggtgaacatttggaagtggaagtaactcaacgtttattgagagagcttactaagtgttcaytcgttcattccctttttccaactgcctatttttataagcctgaatgaataaatgaatcttgctttcacttcactacccaacaataggacgagctcctttttgttctgaatcctcatttcccattgataatgtgtcagagtaatagctgttattatgacaatttaagagaattgtgtaaggatcaataaacaacaagatcaaattcacaaatgtatctacctctgcagagcattctgtcttgataaaaactgaaattgactggggagacagttctgctctgcaactgactacccagtgggctttgagttttcccattataagacacaaagctttaagagcataaaaacattaaaacattagaaaaagcaaaagttaaaacttgttctccagctctgaatacttgtgaagaagattataatgaacaatcccttatctttcagaaaaaaaaagaaaaaagtctgatttctttctttgcttt

SEQ ID NO: 394821 - DNA, 621 bp, Homo sapiens
agaatatctgccacagacagtgccctggagattctactttaaatctgcttgagatctctttttttcttgactctgtgtgattggtgaacatttggaagtggaagtaactcaacgtttattgagagagcttactaagtgttcactcgttcattccctttttccaactgcctatttttataagcctgaatgaataaatgaatcttgctttcacttcactacccaacaataggacgagctcctttttgttctgaatcctcatttcccattgataatgtgtcagagtaatagctgttattatgacaatttaagagaattgtgtaaggatcaataaacaacaagatcaaattcacaaatgtatctacctctgcagagcattctgtcttgataaaaactgaaattgactggggagacagttctgctctgcaactgactacccagtgggctttgagttttcccattataagacacaaagctttaagagcataaaaacattaaaacattwgaaaaagcaaaagttaaaacttgttctccagctctgaatacttgtgaagaagattataatgaacaatcccttatctttcagaaaaaaaaagaaaaaagtctgatttctttctttgcttt

SEQ ID NO: 394822 - DNA, 550 bp, Homo sapiens
agctgcaacatgcaaacctgagctatagaatttaaaggtggttacaacaaaattttatctagaaaagccatcaaggcttattctttaattgtatatttattaaagacatgttacaggatatccctcttaagctgacctgcctgtttacaatacgtgtctacttaagaatggatttataaacatgcatcatttgccaaggttgaaaatctccatcatcttttataaatacattatccaggcattattaaaaagctggaactattgtcccagtgagatgatttctggcaggtctctgcaggatttcctgttctgatatcrtttgagtaggtgatgaccgcacgtcagtcaggagcaataggggcttgcacctgtgctcagtcaaaatgcatcctatcaaatcagggcactgggctttcctttcagtagcccgtttaaagtggtgctgacctgaaaataatcttgtcttacttttgaaatttccttttaaaattgttttgagccaatctgtcaacaggtgtatgctttttccgccagatagcagcaattaaga

SEQ ID NO: 394823 - DNA, 550 bp, Homo sapiens
gaaaacacaggattattatgaggagattcactataagcagagtacctagcacttggttgaacagagcgcacacattaaattgcacctattgttaatatataacttctcagggagaaaagatctctttgtcaaggtagatgtgaggagattttctgggaaaggcagaaacaaggtgaccagaattccacgatccaccccacaccctggttcacagcgtacttctgctgcagggagccattccatcttcaaggcccagagaggcattcctacaacaccccatggttcaggctggagtgaacaaacactgggaagctgaattataaggaaatcacccaaaacttctcctggcccrccgggctttccatctcttttcaactttaaagaaaatatcacatatttattccctctaagcaggttcatagggtgtttatagatcatgcaatcccacacaaggtgtaaagtagaccctgcaatcctcagagaacattcacatggattcaactgattatgatgatgatcactcatatcacagatgtcagaatgattggtg

SEQ ID NO: 394824 - DNA, 471 bp, Homo sapiens
ttattcttttattctaaatggctaataaaacttcctagaaaaatattatggctaaggcatgactttgctgattttaatgagcatatagttcttcataatactcttaccatttttaatttctatcatggctagttgtttctccattttcactctgtattttgttaatttatcttttttaaaatcggttttaccagaggtctaccttattaaactttgcattcagttcaattaagcttctctatttttatttttctcctcattttatttattttggcccatatttttattatttctttatgtttgtactgctactttataacttcttgtgctgaatgatttgcttatttattttcaacttttatttcctaataaatatgcttaaatgaaataatatatttaaatgtagacraagctttaatttgaagccagcaaacttagaaatgattatgggtattttcatttaattttaca

SEQ ID NO: 394825 - DNA, 545 bp, Homo sapiens
ccatgcaaaagctctttagtttaattaggtcccagctatttatctttgtttttattgcatttgcttttgtggttttgtcataaaatccttgcctaagccaatgtmtagaagggtttttccaacgttatcttctagaatttttatagtttcaggtcttaggtttaagtccttaatccaccttgagttgatttttgtacaaggtgagagatgaggagccagtttcattctcctatatgtggctagccaattatcccagcaccatttgttgaaaagagtgtcttttccccactttgtgtttttgtttgctttgtcaaggagccgttggctgtaagtatttgggtttatttctgggttctctattctgttccgttggtctatgtgcctatttttgttccagtaccatgctgtttcggtgactgtggccttatagtgaagtttgagatcaggtagtgtgatgcctccagatttgttctttttgcttagtcttgctttggctatgtgggcttttttttagttccatatgaattttagaattgctttttcta

SEQ ID NO: 394826 - DNA, 593 bp, Homo sapiens
agaatgtttaggtgtcataaagagataattttaaaagctcaaattttgccatacagaaatgaatattgttagcattttaatatattttctgtgattctgggtatgtagtttyctgcttgtacgtgttactttcttttaaatttgcaatcatcctgatttgaacaaataaattttttaaatcttatgagttaactggaaacatttaatcactaaaaaaaaattgatcatatttagtaataacagttaatttttaaatgtaatagtgttattgaaattatgttttagagataaagagtgaatattagtagttggaatgatataatgccttgggtttgctttaaaataatccagagaagaataaaacgacatagattatgaattaatagctattgaagatgagtgacaaatacatggaggttcattacactattcctttaaaaaagtttaaaaatatcttaagtaagttataggttataattagtggtattatgtatacatatgtgagtgtagatatatacacattcataaacactttaacttaattttcaattaacttaaattttctatacctttatttctttttatgtcagttt

SEQ ID NO: 394827 - DNA, 593 bp, Homo sapiens
agaatgtttaggtgtcataaagagataattttaaaagctcaaattttgccatacagaaatgaatattgttagcattttaatatattttctgtgattctgggtatgtagttttctgcttgtacgtgttactttcttttaaatttgcaatcatcctgatttgaacaaataaattttttaaatcktatgagttaactggaaacatttaatcactaaaaaaaaattgatcatatttagtaataacagttaatttttaaatgtaatagtgttattgaaattatgttttagagataaagagtgaatattagtagttggaatgatataatgccttgggtttgctttaaaataatccagagaagaataaaacgacatagattatgaattaatagctattgaagatgagtgacaaatacatggaggttcattacactattcctttaaaaaagtttaaaaatatcttaagtaagttataggttataattagtggtattatgtatacatatgtgagtgtagatatatacacattcataaacactttaacttaattttcaattaacttaaattttctatacctttatttctttttatgtcagttt

SEQ ID NO: 394828 - DNA, 487 bp, Homo sapiens
gtgatacacattcagttgctccttgacttacaactgggctttatccagataagcccattgtaagttcaaaatatcctaagtaaaaagcacacttttgacttatgatattttgaacttacaatgggtttatctgaaggtaacccccattgtaacttgaggagtatttgtactcagtatcraccactgaagcatcatcgtgtttgactttttcacttttcacccagatgttcttattatgtgttggcacagccttggtactttctataaggcaaacaaatgcatcattgtagaagcaccaacaagggtactaactttataacttttatgggaactatcttttgaagatcactcatcatttctccaggaaatgttggtaaaattaatacatttttatatttaaatgatttgtctttttaaaaaataaagtaacagtatatccttttttaaaataaagggcgtgttaaagtatttcttcacttgttcaaac

SEQ ID NO: 394829 - DNA, 487 bp, Homo sapiens
gtgatacacattcagttgctccttgacttacaactgggctttatccagataagcccattgtaagttcaaaatatcctaagtaaaaagcacacttttgacttatgatattttgaacttacaatgggtttatctgaaggtaacccccattgtaacttgaggagtatttgtactcagtatcaaccactgaagcatcatcgtrtttgactttttcacttttcacccagatgttcttattatgtgttggcacagccttggtactttctataaggcaaacaaatgcatcattgtagaagcaccaacaagggtactaactttataacttttatgggaactatcttttgaagatcactcatcatttctccaggaaatgttggtaaaattaatacatttttatatttaaatgatttgtctttttaaaaaataaagtaacagtatatccttttttaaaataaagggcgtgttaaagtatttcttcacttgttcaaac

SEQ ID NO: 394830 - DNA, 613 bp, Homo sapiens
aaaaatatatttcccagcctcttttggtaactagatgtagctatgtgacacagttcttgccaagaagatacaatcagaatctgttggagattcacaaaaagtttttcatctctcagataggtcttggcccttcttttgctgctttcttcattttagactatcctggagtgcagacatgaggttagagatagaacagtgattttgaatccatgggatatcagtttgagggtgaaagacctacagtatgaaagaygtaacagaacataaaaggatccagggatgcagatggagctgctgcattggctaaggacagccaatctctgtacttctgcttaatgagatgaggaaactcttatttaatagaaatccttgtatgcaaacatttattaagaaaaaaattaccactctgactatttctcttacttccttgccaggttatgggtgttttttaaaacatgattcttatactttatccagcatcttgggcattttatgcttgaagatgtcagaatatctaatcaccattttgccaaaaaatgaagtctctttaactttgaactttaattaaatcaacacttcgcatgttagtttgaaaaaaaataatgttcatagt

SEQ ID NO: 394831 - DNA, 613 bp, Homo sapiens
aaaaatatatttcccagcctcttttggtaactagatgtagctatgtgacacagttcttgccaagaagatacaatcagaatctgttggagattcacaaaaagtttttcatctctcagataggtcttggcccttcttttgctgctttcttcattttagactatcctggagtgcagacatgaggttagagatagaacagtgattttgaatccatgggatatcagtttgagggtgaaagacctacagtatgaaagacgtaacagaacataaaaggatccagggatgcagatggagctgctgcattggctaaggacagccaatctctgtacttctgcttaatgagaygaggaaactcttatttaatagaaatccttgtatgcaaacatttattaagaaaaaaattaccactctgactatttctcttacttccttgccaggttatgggtgttttttaaaacatgattcttatactttatccagcatcttgggcattttatgcttgaagatgtcagaatatctaatcaccattttgccaaaaaatgaagtctctttaactttgaactttaattaaatcaacacttcgcatgttagtttgaaaaaaaataatgttcatagt

SEQ ID NO: 394832 - DNA, 605 bp, Homo sapiens
ataaagagtgatggaagagaaaaccaatttaactttgatgagtgccaatttatcaccttccttaacaagctatagaccaagcttggtatatctcctcatttcagttttattatacactgtggtagrtacgtttctggtcatgaactattaataatgccaatgttacttataaataatcaactattctgaaattttttttaacatgcacacatactaaggatgtttgtttgaattagtgtattcagtatttgtgatatgatagaaggatgaaaatagttcagattaatgactctctcattgcccattttgacagcccctttttcaaagcaccagtattacccacttagaaagtggattgatgccaatgcttagagcactacttcttccttcagcacaccagatggtactaaaaattcaaaatatttcctacaacagctgtatctttgacaacaaaattaataccagccaaaataccactgctatgtgaaagacataatgatcagactcttcagtgtaatacagctatccatattctagggcataataagaaacaacaacagcaaaacaaaacaaaatcatgatgtgatcaactcttgctagatgtc

SEQ ID NO: 394833 - DNA, 605 bp, Homo sapiens
ataaagagtgatggaagagaaaaccaatttaactttgatgagtgccaatttatcaccttccttaacaagctatagaccaagcttggtatatctcctcatttcagttttattatacactgtggtaggtacgtttctggtcatgaactattaataatgccaatgttacttataaataatcaactattctgaaattttttttaacatgcacacatactaaggatgtttgtttgaattagtgtattcagtatttgtgataygatagaaggatgaaaatagttcagattaatgactctctcattgcccattttgacagcccctttttcaaagcaccagtattacccacttagaaagtggattgatgccaatgcttagagcactacttcttccttcagcacaccagatggtactaaaaattcaaaatatttcctacaacagctgtatctttgacaacaaaattaataccagccaaaataccactgctatgtgaaagacataatgatcagactcttcagtgtaatacagctatccatattctagggcataataagaaacaacaacagcaaaacaaaacaaaatcatgatgtgatcaactcttgctagatgtc

SEQ ID NO: 394834 - DNA, 552 bp, Homo sapiens
gattatatcatgtaacttacaaatgtaacttaaatgattacatttaagttaaacttaattccatctataaacattattcccctttgccatgtaacctaccatattcagagttcctaggattgggattatgggrttcattattctgtctattacaaccactaaagtcatccttgatatgtaaaacctaaataattccacttcaagcaaagagaggtctaaccagcataataaagaatgttgtacacttagccagttttcatacctgactttgttgaaatgcatgaagttccttaagtaaaggggtgagctagttaccaccaaagtaggatttaggatattcagaaaattaaatagaattttgaactgagcaaaatatacattacacagtccatcatgccaagtttcactttgaaccaatactatgattcttcactcaattcttgaaggtatgtctggcaatgatatttctagtatctgtaagcctcatttgactgtgtgtgtagtaagaacttcattgaaaggaagaaccaagtggaagttcttagagcttct

SEQ ID NO: 394835 - DNA, 552 bp, Homo sapiens
gattatatcatgtaacttacaaatgtaacttaaatgattacatttaagttaaacttaattccatctataaacattattcccctttgccatgtaacctaccatattcagagttcctaggattgggattatggggttcattattctgtctattacaaccactaaagtcatccttgatatgtaaaacctaaataattccacttcaagcaaagagaggtctaaccagcataataaagaatgttgtacacttagccagttttcatacctgactttgttgaaatgcatgaagttccttaagtaaaggggtgagctagttaccaccaaagtaggatttaggatattcagaaaattaaatagaattttgaactgagcaaaatatacattacacagtccatcatgccaagtttcactttgaaccaatactatgattcttcactcaattcttgaaggtatgtctggcaatgatatttctagtatctgtaagcctcatttractgtgtgtgtagtaagaacttcattgaaaggaagaaccaagtggaagttcttagagcttct

SEQ ID NO: 394836 - DNA, 565 bp, Homo sapiens
ttttcctatcatacttcttccagcatcattatcagtaaatttcacgaatgctttatatgccgtcatcacatccctcaccacatgtcttcycctcactgtacaagtaaagattcaaggcctagagctaatgcccacaaatttactattcttatgaagactccatttcccataagtagctggccttacaaaatggttgagtgctttataaaagacttatttatcccatcatctggaaacaatgccttgtaatgttgggatgctgtccttcaggaaatggtaaatgttctaaaccaatgaccaatataatagtactatttcatctgtagacataatttaggaatctgagaatgaaaaggtagacataaggaatttctcactgtaataccaaacagcccactcacaagatgtttttgctttctatcccaagattcttggctctgttgttttatatttcaccaagtgacacaataatgattatattgaattagaaaactgccaacttatcattttgggattttttcaaaccattgaatgaatagacaaaaccagatttatgatgttcttt

SEQ ID NO: 394837 - DNA, 565 bp, Homo sapiens
ttttcctatcatacttcttccagcatcattatcagtaaatttcacgaatgctttatatgccgtcatcacatccctcaccacatgtcttctcctcactgtacaagtaaagattcaaggcctagagctaatgcccacaaatttactattcttatgaagactccatttcccataagtagctggccttacaaaatggttgagtgctttataaaagacttatttatcccatcatctggaaacaatgccttgtaatgttgggatgctgtccttcaggaaatggtaaatgttctaaaccaatgaccaatataataktactatttcatctgtagacataatttaggaatctgagaatgaaaaggtagacataaggaatttctcactgtaataccaaacagcccactcacaagatgtttttgctttctatcccaagattcttggctctgttgttttatatttcaccaagtgacacaataatgattatattgaattagaaaactgccaacttatcattttgggattttttcaaaccattgaatgaatagacaaaaccagatttatgatgttcttt

SEQ ID NO: 394838 - DNA, 565 bp, Homo sapiens
ttttcctatcatacttcttccagcatcattatcagtaaatttcacgaatgctttatatgccgtcatcacatccctcaccacatgtcttctcctcactgtacaagtaaagattcaaggcctagagctaatgcccacaaatttactattcttatgaagactccatttcccataagtagctggccttacaaaatggttgagtgctttataaaagacttatttatcccatcatctggaaacaatgccttgtaatgttgggatgctgtccttcaggaaatggtaaatgttctaaaccaatgaccaatataatagtactatttcatctgtagacataatttaggaatctgagaatgaaaaggtagacataaggaatttctcactrtaataccaaacagcccactcacaagatgtttttgctttctatcccaagattcttggctctgttgttttatatttcaccaagtgacacaataatgattatattgaattagaaaactgccaacttatcattttgggattttttcaaaccattgaatgaatagacaaaaccagatttatgatgttcttt

SEQ ID NO: 394839 - DNA, 565 bp, Homo sapiens
ttttcctatcatacttcttccagcatcattatcagtaaatttcacgaatgctttatatgccgtcatcacatccctcaccacatgtcttctcctcactgtacaagtaaagattcaaggcctagagctaatgcccacaaatttactattcttatgaagactccatttcccataagtagctggccttacaaaatggttgagtgctttataaaagacttatttatcccatcatctggaaacaatgccttgtaatgttgggatgctgtccttcaggaaatggtaaatgttctaaaccaatgaccaatataatagtactatttcatctgtagacataatttaggaatctgagaatgaaaaggtagacataaggaatttctcactgtaataccaaacagcccactcacaagatgtttttgctttctatcccaagattcttggctctgttgttttatatttcaccaagtgacacaatamtgattatattgaattagaaaactgccaacttatcattttgggattttttcaaaccattgaatgaatagacaaaaccagatttatgatgttcttt

SEQ ID NO: 394840 - DNA, 399 bp, Homo sapiens
acttgttgacattttcaatgtgcacatcaaggattagaagatatataaggtaggaagtaaatgtcaggagagaacaattgtggtttgctaaacactgcataaagcctaggttttatgctgtttatayatctttactgctttttttgagctcataaaatcatgaagtgtcctgagctgaattaatagatgttctgtgtgggtgtaaggaagtcattttaaaagtatcatcttgcaagatgtttagtttttaattatcaatgacaaagaagaacagggacaagattacctcatttaccactaggtaatctttcattttaacacatttaaaatgttttcatttgacatctacagccagactaaatggtgggcatctatacagagggcttagattcaaaggta

SEQ ID NO: 394841 - DNA, 636 bp, Homo sapiens
caacatgtggaaatacactgagaatttcaccagaaaaatggaatctataaaaagatagccaaatggaaattctagcactgaaaaagtacaattctagaattgaagaattcactgaatgtgcttagcagagactggatacagcaaaaaaaaaatagattagtaaacttaaaatgggtcaatggaaatattttaaattaaaacgagaggagaaaaaaatagggaaaacaacttgaaaatttcatccaagttttctggggccataccaagctgtctaaccttgtataaytggagaccaagaaggaaagaagagaatggatggtttagaatatttgaagaaaaaaggcttaagagtttccaaaattgaaacaaatcaacctggagattcataaaacttggccaaattcaaaacagtaaaaataaaagcaatatcacatttagacactcctcatacttctgataatgatagataaggagaaaaatcttaaaagcatccagagaagaaaaatacattacatttaggggaataagaataagaattgtggccagttttttattaaatataatgaaggtcagacaacaatggaataaaatttttaaattgcttaacaaaaatctgttaactcagaattctatacc

SEQ ID NO: 394842 - DNA, 575 bp, Homo sapiens
cttcatgattatagaaagttaattcctttaagaatgttttctagaattgttttctaacaattttaaatatgtgtgcacctaagaagaaatcaaatatttgatttaaaaatgacaaaaataaaggaagatacatgcaaatctataatcatggtagasggttttgacactcagtttcaataattgatagaacaggtagacaataaatatggttatagcatattggaacaacactattaactaacatgactaactgacttttatagggtactacatgcagtaaccacagaatacacttcttttcaagagcacacagaacattcatcaagatagaccacatgctaggccattcaacaagtcacagtacataccaaaatgtattatgaaagaaggaaaagagaaaactacaattccatccagcaatcccactactgggtatatacccaaagaaaaataaatcattatatcgaaaagatacctgcactagtatgtttatagcagcactattcacaatagcaaagatatgaaatcaacctaactgcccatcaatagatgagtggataaagaattgtggtgtt

SEQ ID NO: 394843 - DNA, 606 bp, Homo sapiens
tctacttacattgtatgctggtgtaaaaatattacatgtatcccataaacatgtacagttattatgtatcaatttatraattgaaaaatatatttatatagagaatgaatatatataaggagtttttgaaataaaaattttaagttattcttttgggaactaaatattacaactgttgtttcatctagctccaatcacttcaaaattataaatttaccttttgctataataaaacctttgtgagaaacttcagcttttaattttaaaatatgcatctaagcatttccacatgtctggagggctgtgccgctgctgtcaacacaacagccgcctggaaaggtgtgaccatgaacacacaacttcccagtgaatcagacacccaggcagcttcacctcctgtactgtctaccactgatcaatatattgtcattatttcaagagaaaaataaatgtcatatggccacatatatttaaaattgattttcagtatatgatttcatatattaattatcttccccaagaaaggaataatctaaattccataagtaaagaatttcaattgactttggaaaatgaaaatgagtctctgtttctctaagcttacaa

SEQ ID NO: 394844 - DNA, 579 bp, Homo sapiens
ttgcttatcagacctttaaagaaatgtccaactctttggaaaagacatagtaagaggaggagatgctctgcagaatgcaaatttcccccataacaggcagctttgcagggccacttcagaatacatcaaaaaaaatatttttagggtacaatatttagattttcttcagggcctattatctgtcatgttggagtatggtatcttattgctacaaagcatttgatttgtcagtctaaagatctctgttgtaatgataacactggtcagttttgtctgaactccaaagggaggagagtataatgagttacatctaaacccacctgccagtcatggcctaacctagtttttcagatttctttgacgttctctctgccaaaagagaagcccattgagtaggttggtggcttacaacttgattttttgttttaacacacagaaaaraaatcacagcgtaaattcaatctaagatacattggtaaaaaaaaaaaaattaggtgcttcctgaatatttgtacatatcaaagaaagagaaatggtaagatttcagatgagaaatacccctcatacaaaagattaatg

SEQ ID NO: 394845 - DNA, 403 bp, Homo sapiens
tatttcatttcaaattacttatccttgatggggttgctttacccaagtcttttatttgccaaaatatggtatagttcaatatttcttgattgytccaaacacatgtgggtgcattttattattaccttccctacctccaccccagatctgagtctgaggactgtatccttgcaggttgtgtgtagtagttatcacttggttgctggagaaagagtagaagacagaggatgggacagtgaacaacttaaagtggtcaagtttgtctctattttctagagccttcttaatgatcggtcatctaggtggcctaataaaaaaatgcaaatttcaccccttttacttcccacctctacttctgtcctcctccacccagagttgtaggagggggcaaagctcagggatt

SEQ ID NO: 394846 - DNA, 577 bp, Homo sapiens
actttacccatagtagtacttccttcaaaattggagtcaatcctcgagccctactgctgctttatcaactaaatttttttatactattataaatcctttgttgtcattgtaaccttgctcacagcatcttcacagcagtagattccatctcaagaaactattttatttgctcatccgtatgaagtaactcctcatccattaatgttttactgtcatattgcagcaattcagttacatcttcaagctccgcttcttttctttttctttatttcttcttaaaaatgggacacatgtgcagaacatgcaggtttgttacatagttatacttctaattctagttctcttttaattttacacatcttcatttacttactccactraagtcttgaacccctcgaaatcatccatgagggttggaatcaacttttttcaaacttctgttaatactgatcttttggccagctcccatgaatcacaaattttcttaatggcatctaaaatagtgactcctttccagaaggtttttaatttacttcgcccagatctatcagaggaatcactatctacagcagttcta

SEQ ID NO: 394847 - DNA, 577 bp, Homo sapiens
actttacccatagtagtacttccttcaaaattggagtcaatcctcgagccctactgctgctttatcaactaaatttttttatactattataaatcctttgttgtcattgtaaccttgctcacagcatcttcacagcagtagattccatctcaagaaactattttatttgctcatccgtatgaagtaactcctcatccattaatgttttactgtcatattgcagcaattcagttacatcttcaagctccgcttcttttctttttctttatttcttcttaaaaatgggacacatgtgcagaacatgcaggtttgttacatagttatacttctaattctagttctcttttaattttacacatcttcatttacttactccactgaagtcttgaacccctcgaaatcatccatgaggrttggaatcaacttttttcaaacttctgttaatactgatcttttggccagctcccatgaatcacaaattttcttaatggcatctaaaatagtgactcctttccagaaggtttttaatttacttcgcccagatctatcagaggaatcactatctacagcagttcta

SEQ ID NO: 394848 - DNA, 600 bp, Homo sapiens
tttttggctccagcagggtcccagtcattcagcaccagggagggcagagctgacagcagccagcccaggatcccagcaccagccctaaggtctgggtctctgagacttttactcttgccaggctgggggatatatgcttaatgcagctcccctgaatttgtgagcagtttccttccctgaagccctgccaggcagccmtgtggccagggcctgtggttcctcccagattctcagccctgtggctcaggagagcagctgcttcctccacagcccagggccagtgcctggcatctctcaggcactgccagcctgaccttagccctgggctaaggaccctattccaaatgtctcctcatttattgcagtatctgaaagtctgtcttgttcttaaactcaaagtccacatttccacaattgctaaagctagcatttgccatctgaaaatttagaaatgtgaattcattgtcactctcagaaactgccctcttccaactctaccagacagagttgcccatatgttctcttctctccacacaactttacttagaattatagtgaaatgtaacatgtggtaaagctcttacctcctgtacagaaacc

SEQ ID NO: 394849 - DNA, 600 bp, Homo sapiens
tttttggctccagcagggtcccagtcattcagcaccagggagggcagagctgacagcagccagcccaggatcccagcaccagccctaaggtctgggtctctgagacttttactcttgccaggctgggggatatatgcttaatgcagctcccctgaatttgtgagcagtttccttccctgaagccctgccaggcagccctgtggccagggcctgtggttcctcycagattctcagccctgtggctcaggagagcagctgcttcctccacagcccagggccagtgcctggcatctctcaggcactgccagcctgaccttagccctgggctaaggaccctattccaaatgtctcctcatttattgcagtatctgaaagtctgtcttgttcttaaactcaaagtccacatttccacaattgctaaagctagcatttgccatctgaaaatttagaaatgtgaattcattgtcactctcagaaactgccctcttccaactctaccagacagagttgcccatatgttctcttctctccacacaactttacttagaattatagtgaaatgtaacatgtggtaaagctcttacctcctgtacagaaacc

SEQ ID NO: 394850 - DNA, 605 bp, Homo sapiens
ttgtctctttcctaaagatgttaacagggaggatggtgtctgggtcaggatgatgtccctgataaaacrtaaaagaagaaagtggcattgttggtgcatgacagggacatgctccatgcagtggtcaccctcaataagagagaagaactttggaaagtaatactcaatgacagaaaagaaggtagacaatgaaggtgcccaaaacaagaataaggtgaagtgaatttagtctctgggtattaaagagacctgtagctcttgataatggtggatgtgtgagtgctgcatgcattgaggaaactcggtatcatctctctgtatctgtagtaaattgcttgatcttatagtggtaagaacaatggcataacaccattacctaatacttacaaatatgtatagcatcatgtcaataaattttatttttaatatttttagaaaggaacaatgttaaaactcacagaaatgttgaagtataggacaaagtacctccttccctaacccgaatcatatgagagtcttttgaagtcctgagaatcatactgtttaacattttactatgtatttcctacaaacaagatattccaaataatccccatgtgccaatg

SEQ ID NO: 394851 - DNA, 605 bp, Homo sapiens
ttgtctctttcctaaagatgttaacagggaggatggtgtctgggtcaggatgatgtccctgataaaacgtaaaagaagaaagtggcattgttggtgcatgacagggacatgctccatgcagtggtcaccctcaataagagagaagaactttggaaagtaatactcaatgacagaaaagaaggtagacaatgaaggtgcccaaaacaagaataaggtgaagtgaatttagtctctgggtattaaagagacctgtagctcttgataatggtggatgtgtgagtgctgcatgcattgaggaaactcggtatcatctctctgtatctgtagtaaattgcttgatcttatagtgrtaagaacaatggcataacaccattacctaatacttacaaatatgtatagcatcatgtcaataaattttatttttaatatttttagaaaggaacaatgttaaaactcacagaaatgttgaagtataggacaaagtacctccttccctaacccgaatcatatgagagtcttttgaagtcctgagaatcatactgtttaacattttactatgtatttcctacaaacaagatattccaaataatccccatgtgccaatg

SEQ ID NO: 394852 - DNA, 605 bp, Homo sapiens
ttgtctctttcctaaagatgttaacagggaggatggtgtctgggtcaggatgatgtccctgataaaacgtaaaagaagaaagtggcattgttggtgcatgacagggacatgctccatgcagtggtcaccctcaataagagagaagaactttggaaagtaatactcaatgacagaaaagaaggtagacaatgaaggtgcccaaaacaagaataaggtgaagtgaatttagtctctgggtattaaagagacctgtagctcttgataatggtggatgtgtgagtgctgcatgcattgaggaaactcggtatcatctctctgtatctgtagtaaattgcttgatcttatagtggtaagaacaatggcataacaccattacctaatacttacaaatatgtatagcatcatgtcaataaattttatttttaatatttttagaaaggaacaatgttaaarctcacagaaatgttgaagtataggacaaagtacctccttccctaacccgaatcatatgagagtcttttgaagtcctgagaatcatactgtttaacattttactatgtatttcctacaaacaagatattccaaataatccccatgtgccaatg

SEQ ID NO: 394853 - DNA, 549 bp, Homo sapiens
ccggtagccctgtaggtctcagttagttgaaagtcatattattgagycccccagagacctccataacattggttcatgatactccctgggaaagctgggaaaggtgactgactgaagtccatgtgttgaatcatcctcattattaaaagccccctgctcattaatggcattttgattaatactcacttggaaagcatttttttggattgtggctcatttttgaaacatctcatcatagctcttccagaatggctttgtctgcaatcatcctgttgtgtttcttttaagacctgatgatctgttaaaaccaaaggccaatattataaaaatcctcttctctttgcaatgggatcatcagatgtaaccttacagtttacccacggttaggatttttacatttccagggcttccttgacaatggcactgatgtgactccatccagcatctattgttgtgaggactctatctggcatatcatcattgtgggcatgaacataatggagattttcacaggatgcaatggttaatattcaacgttagtcaaaattt

SEQ ID NO: 394854 - DNA, 597 bp, Homo sapiens
tgcaaaagttctacacaggttttcatctgcacccatggtcagtgcccaaacctccatgttgttcaagggtcaactgctcattcaatctgtagctgcatctctctggaacaggatcttggcaggtgggttgcaagtaaaggaatccagaaaataacatctcaaactacgctgcactggtatgatgattatgtaaaaccaaagacatttagaaagcaccaaatgcacaaaaagacttttcctaaatgtcccttatctgcataatagcagattctccagaaggaaaccaattgtcaaaaaaattcttcctgagaatttttacatcagggaatattaacacaaaagaggaatctaaaatacaagagactgaagttgatgctttatccagacaggctatgacctgttcttttgaggatgcacttctgttctcatctattctttccaggttgcctacrcttctcaattccctcttccttagaaaagaaatataaacaactgtatcccattgagttatctgggtaatcaccctgctatgatattctgctgcacttcaaatgaattttgtttgtcttttctcttattaatctttcttttgtccat

SEQ ID NO: 394855 - DNA, 561 bp, Homo sapiens
aatggagctttcttcctttctcccaatataagcaagttcccttaaaattcaggcagcttaaaaaacagcaggaaggtttgtgcacagcctgcagcactgtgatttggctcccctagtcaggcatcagtaaaattttgtggagtcctaggtggcagcccactgatgctgatgtagttggatccactttccctgctactgagtcaggctgggacatttttgggcacattagagatatgagatataacgagtgcaaatccctgtccagtttcatctggatccaagtgatttctccatgtacataggcaactgcttgataagagattcagtgtctctttcctaaagcagttaacagggaggctgttgcctgggtcagratgatttccccaatcactgataaaaagtaaaagaggaaagtgtcattgatggtgcatggcagggacatgctccatgcagtggtcaccctcagtaagagagatgaactttgggaaataatactgaatggcagaaaagaaggtagactatgaaggtgcccaaaacaagaataaggtgcaacccatttag

SEQ ID NO: 394856 - DNA, 588 bp, Homo sapiens
atggcagggacatgctccatgcagtggtcaccctcagtaagagagatgaactttgggaaataatactgaatggcagaaaagaaggtagactatgaaggtgcccaaaacaagaataaggtgcarcccatttagtgtctgagtactatagagacctgtcgctcttgataattgtggatctgtgactgctgcatgcatcgagaaaacacggtatcatctttgtgtatctatagtacatagtttgatctcatactggtaagaacaatggcataacaccattacctgatacttacaaatgtatgtaccatcatgtcaataaattttatttttaatttttttacataggaacaatgttaaactcacagaaatgttgcatgtatacgacaaatacccccttccctagccggaatcatataagagtcttttgaagacttgagaattgtaccgtctaacattttactatgtgtttcctacaaacaacaatattctcctaaataatccccatacaccaatgaaatacattagtccatcaactcctgaggaatatttcaaatcgtcaaaaagaaaccaaaaaatgttactcacaacaaa

SEQ ID NO: 394857 - DNA, 588 bp, Homo sapiens
atggcagggacatgctccatgcagtggtcaccctcagtaagagagatgaactttgggaaataatactgaatggcagaaaagaaggtagactatgaaggtgcccaaaacaagaataaggtgcaacccatttagtgtctgagtactatagagacctgtcgctcttgataattgtggatctgtgactgytgcatgcatcgagaaaacacggtatcatctttgtgtatctatagtacatagtttgatctcatactggtaagaacaatggcataacaccattacctgatacttacaaatgtatgtaccatcatgtcaataaattttatttttaatttttttacataggaacaatgttaaactcacagaaatgttgcatgtatacgacaaatacccccttccctagccggaatcatataagagtcttttgaagacttgagaattgtaccgtctaacattttactatgtgtttcctacaaacaacaatattctcctaaataatccccatacaccaatgaaatacattagtccatcaactcctgaggaatatttcaaatcgtcaaaaagaaaccaaaaaatgttactcacaacaaa

SEQ ID NO: 394858 - DNA, 401 bp, Homo sapiens
ctcctgctgctctggttcccaggtaagaaaggagaacactaggattatactcggtcagtgtgctgagtactgctttactattcagggaacttctcttacagcatgattaattgtgtggacatttgtttttatgtttccaatctcaggttccagatgcgacatccagatgacccagtctccatcttcygtgtctgcatctgtaggagacagagtcaccatcacttgtcgggcgagtcagggtattagcagctggttagcctggtatcagcagaaaccagggaaagcccctaagctcctgatctatgctgcatccagtttgcaaagtggggtcccatcaaggttcagcggcagtggatctgggacagatttcactctcaccatcagcagcctgcagcctgaag

SEQ ID NO: 394859 - DNA, 579 bp, Homo sapiens
aattgtgtggacatttgtttttatgtttccaatctcaggttccagatgcgacatccagatgacccagtctccatcttccgtgtctgcatctgtaggagacagagtcaccatcacttgtcgggcgagtcagggtattagcagctggttagcctggtatcagcagaaaccagggaaagcccctaagctcctgatctatgctgcatccagtttgcaaagtggggtcccatcaaggttcagcggcagtggatctgggacagatttcactctcacyatcagcagcctgcagcctgaagattttgcaacttactattgtcaacaggctaacagtttccctcccacagtgttaccaacccgaacataaacccccagggaagcagatgtgtgaagctgggctgccccagctgctcctcctgatgcctccattggctgagagtgttgctcagatgcagccacactctgatggtgttggtagaggggtacgtgaaatcgcctctgcaccctaattcttttctctttctcagccccaactgcacagacatagcaatgcatctcctgatttgataaatacagagatcatga

SEQ ID NO: 394860 - DNA, 421 bp, Homo sapiens
gtctgttataccttctggcaggtccctagtaagtctgaggtacagctttgggctgcaggctcaatggttcacctaattccaaggagtaatatccagagacaascccagcatgcccaacatgcagaatctcaccatcccacagttatccagagatggcatcacacatcctgcattttgttcactcccagaccattcacagagaaatatgtagcccttgggtgcatacagccccctttctcccattttattgtttaatcacccagtcatggttatgcaggtattggtgtgttcattagccaagtctcactgatggcagagttgaaggagcaaagttttgctcagacaatattgttcatagacagagggtagcattagtcctctccttgtttttgtctttgccattggggcatttcttatctat

SEQ ID NO: 394861 - DNA, 421 bp, Homo sapiens
gtctgttataccttctggcaggtccctagtaagtctgaggtacagctttgggctgcaggctcaatggttcacctaattccaaggagtaatatccagagacaagcccagcatgcccaacatgcagaatctcaccatcccacagttatccagagatggcatcacacatcctgcattttgttcactcccagaccattcacagagaaatatgtagcccttgggtgcatacagccccytttctcccattttattgtttaatcacccagtcatggttatgcaggtattggtgtgttcattagccaagtctcactgatggcagagttgaaggagcaaagttttgctcagacaatattgttcatagacagagggtagcattagtcctctccttgtttttgtctttgccattggggcatttcttatctat

SEQ ID NO: 394862 - DNA, 539 bp, Homo sapiens
ggtctaccttcgtttccactcagcattatgttccttaacattcattatttcccttgttctggagtgcgatatttaatgcccatattgctctagtaagatggggtaccaccccattagcagactttctagatgtcctttctagatgttgctgtgtgagtccattgttctagcattcactagattcattggcctgtggatgcagggtgcatggaaagttcatcgtgttccatgagagtgtgcctaytgtcatgttgcttgggcagtgaaagatgctccttggtcagtgtgaagtgtcattgggtatccaaaaatatgatgtaagttcctttcaagggtgaccttggtagtcccggcatccaattgagcatcgtatctctttttcctgcaggtggaaagctgtggccatagtcctttcctccacaccagggattctttaaaagtccagtctctcagttgccattttcctgaacagatgttgaggctgttggcaatggcccatgatttagtgggaatgtggcatggtacgatgttggaacagc

SEQ ID NO: 394863 - DNA, 539 bp, Homo sapiens
ggtctaccttcgtttccactcagcattatgttccttaacattcattatttcccttgttctggagtgcgatatttaatgcccatattgctctagtaagatggggtaccaccccattagcagactttctagatgtcctttctagatgttgctgtgtgagtccattgttctagcattcactagattcattggcctgtggatgcagggtgcatggaaagttcatcgtgttccatgagagtgtgcctattgtcatgttgcttgggcagtgaaagatgctccttggtcagtgtgaagtgtcattgggtatccaaaaatatgatgtaagttcctytcaagggtgaccttggtagtcccggcatccaattgagcatcgtatctctttttcctgcaggtggaaagctgtggccatagtcctttcctccacaccagggattctttaaaagtccagtctctcagttgccattttcctgaacagatgttgaggctgttggcaatggcccatgatttagtgggaatgtggcatggtacgatgttggaacagc

SEQ ID NO: 394864 - DNA, 539 bp, Homo sapiens
ggtctaccttcgtttccactcagcattatgttccttaacattcattatttcccttgttctggagtgcgatatttaatgcccatattgctctagtaagatggggtaccaccccattagcagactttctagatgtcctttctagatgttgctgtgtgagtccattgttctagcattcactagattcattggcctgtggatgcagggtgcatggaaagttcatcgtgttccatgagagtgtgcctattgtcatgttgcttgggcagtgaaagatgctccttggtcagtgtgaagtgtcattgggtatccaaaaatatgatgtaagttcctttcaagggtgaccttggtagtcccggcatccaattgagcatcgtatctctttttcctgcaggtggaaagctgtggccatagtcctttcctccacaccagggattctttaaaagtccagtctctcagttgccattttcctgaacagatgttgaggctgttggcaatggcccatgatttagtggraatgtggcatggtacgatgttggaacagc

SEQ ID NO: 394865 - DNA, 595 bp, Homo sapiens
tgactgggtcagctctcacattgtagtattttagaattgtttcatcagtgatgagcaaccaggacacttagatcaaattgctatttgtctttggtttgctgtttgtcttttccaataagccaccttttcttcccagggaccacgcctggttttttactgtggtgtcccctggcatacaagaggttaagtggttatttctttcttttctttttttttttttttaatactttaagttctagggtacacatgcacaacgtgcaggtttgatacatgggtgtacatgtgccatgttcgtttgccacacctatcaactcgttatttacattaggtatttctcctaatgctatccccccccagctccccagccyctgacaggccccggtgtgcaatgttccccttcctgtgtccgagtgatctcattgttcatttcctacctgtgagtgagaacatgtggtgtttggttttctgtccttgtatagtttgctgagaatgatggtttcgagcttcatccatgtccctgcaaaggacatgaactcatccttttttatggctgcatagtattccatggtgtatatgtgccacattttcttgtggc

SEQ ID NO: 394866 - DNA, 480 bp, Homo sapiens
agaggaaacagcagcttctgcttctggggaggcctcaggaagcttccaattgtagcggaaggcagagggagcgaggcgtctcacaaggygggagcaggaggaagagaggagaggagagggaggttctgcacacttcaaccaccagatctcacaagaactcattcactatgaggaggatgctgctaacccattcgtgagaaatcgcccatgacccagtcacctcccaccaggcccaccaggcccctcttccaaccctggggattgtaattcaacgtgaggtttgggtggggacacagattcaagccatatcagtgactttgcagagttaagatcaggtccacacagcacctgggtggaagaggtgggtgttgggggagggcctgggctggtcaggtgggggacccttgtgcccaaggacaccctgtgaacctgctgatatcaagctcagggacacctgtgaacccgctgatagcaagccta

SEQ ID NO: 394867 - DNA, 480 bp, Homo sapiens
agaggaaacagcagcttctgcttctggggaggcctcaggaagcttccaattgtagcggaaggcagagggagcgaggcgtctcacaaggtgggagcaggaggaagagaggagaggagagggaggttctgcacacttcaaccaccagatctcacaagaactcaytcactatgaggaggatgctgctaacccattcgtgagaaatcgcccatgacccagtcacctcccaccaggcccaccaggcccctcttccaaccctggggattgtaattcaacgtgaggtttgggtggggacacagattcaagccatatcagtgactttgcagagttaagatcaggtccacacagcacctgggtggaagaggtgggtgttgggggagggcctgggctggtcaggtgggggacccttgtgcccaaggacaccctgtgaacctgctgatatcaagctcagggacacctgtgaacccgctgatagcaagccta

SEQ ID NO: 394868 - DNA, 587 bp, Homo sapiens
aattgtgttctaataatgtgtaaaaaataactaaatcttgaagaaaacaatgaacactgaggcccttgtgctcactgaacattttctaaatatgaaatttaaatttataaaatacataaaaagtaacatgcaaaataaaatacatattcaaatatataaatgcatggtaagactatatgaatgtgaagaatatataaatgaatgtatcaaatatataacatgagcatacatatctgtagaggataggtaaagaaatatgtaaaacttattaaaaataaaggatttctcaagtataaaatattctacatttggaagaaaatggctcaatttataaggcataaattattctgcatttggaaggaaatatgagagaattagaatataaaagtcaattcaaagagaaaaaaatagaaattttttgtggaaaaaagtaggttccttttgttaaaaataaatacagattgttttgggtctaacattgtcatgatatccgggttccattggtatctgtcagtcaygcccgtgtgggaacaaccagcactgaggttctgtgtgtggcagctgcagagtcatgcaacacaaccagg

SEQ ID NO: 394869 - DNA, 587 bp, Homo sapiens
aattgtgttctaataatgtgtaaaaaataactaaatcttgaagaaaacaatgaacactgaggcccttgtgctcactgaacattttctaaatatgaaatttaaatttataaaatacataaaaagtaacatgcaaaataaaatacatattcaaatatataaatgcatggtaagactatatgaatgtgaagaatatataaatgaatgtatcaaatatataacatgagcatacatatctgtagaggataggtaaagaaatatgtaaaacttattaaaaataaaggatttctcaagtataaaatattctacatttggaagaaaatggctcaatttataaggcataaattattctgcatttggaaggaaatatgagagaattagaatataaaagtcaattcaaagagaaaaaaatagaaattttttgtggaaaaaagtaggttccttttgttaaaaataaatacagattgttttgggtctaacattgtcatgatatccgggttccattggtatctgtcagtcacgcccgtgtgggaacaaccagcackgaggttctgtgtgtggcagctgcagagtcatgcaacacaaccagg

SEQ ID NO: 394870 - DNA, 530 bp, Homo sapiens
agcctcctgtgtggccctgacccatctctgtgttcagcacaggctgcctcttccagccggggctccgcagtcctaagatcagatcctcacacatggccaggttatgcattcctgctgtgggcttaacaaacaagctcttacagctcaaagaattgaaacaaactgccctctgataggtggtgattccaggtttcaaatccagggctgtccagttgcaaagctgttgttcttaaccatcatcatatacccaggaccccgattcctgttcattgtcrcaaagcccctgctctctgtctcaggacagggcctgtccaagccagggctctgcctgggtcccgctgatccctctctcggggggggcatcttccttctgacctcagcacacccagcagtgaggagctcgagtccctttgaggagttcttccatgctaagcacctttgctgcctgcatcggtgaacatcaagcctgcagccatcctggcgccacactattgtgacaaagcttctaggtgaccaccgggcacactgtt

SEQ ID NO: 394871 - DNA, 530 bp, Homo sapiens
agcctcctgtgtggccctgacccatctctgtgttcagcacaggctgcctcttccagccggggctccgcagtcctaagatcagatcctcacacatggccaggttatgcattcctgctgtgggcttaacaaacaagctcttacagctcaaagaattgaaacaaactgccctctgataggtggtgattccaggtttcaaatccagggctgtccagttgcaaagctgttgttcttaaccatcatcatatacccaggaccccgattcctgttcattgtcgcaaagcccctgctctctgtctcaggacagggcctgtccaagccagggctctgcctgggtcccgctgatccctctctcrgggggggcatcttccttctgacctcagcacacccagcagtgaggagctcgagtccctttgaggagttcttccatgctaagcacctttgctgcctgcatcggtgaacatcaagcctgcagccatcctggcgccacactattgtgacaaagcttctaggtgaccaccgggcacactgtt

SEQ ID NO: 394872 - DNA, 530 bp, Homo sapiens
agcctcctgtgtggccctgacccatctctgtgttcagcacaggctgcctcttccagccggggctccgcagtcctaagatcagatcctcacacatggccaggttatgcattcctgctgtgggcttaacaaacaagctcttacagctcaaagaattgaaacaaactgccctctgataggtggtgattccaggtttcaaatccagggctgtccagttgcaaagctgttgttcttaaccatcatcatatacccaggaccccgattcctgttcattgtcgcaaagcccctgctctctgtctcaggacagggcctgtccaagccagggctctgcctgggtcccgctgatccctctctcggggggggcatcttccttctgacctcagcacacccagcagtgaggagctygagtccctttgaggagttcttccatgctaagcacctttgctgcctgcatcggtgaacatcaagcctgcagccatcctggcgccacactattgtgacaaagcttctaggtgaccaccgggcacactgtt

SEQ ID NO: 394873 - DNA, 579 bp, Homo sapiens
cagttaccatcaactctcactaagcacatctccagggctcattcatcatattcgaacagtgaggcatgtgtgcctagtaatggccccagtgctttagaagacagtgaggagtagaatttatcccgaaccctaatgtagaaaaaatcttgccttgatgaagatggtacgcttatctataaaacctttcgtttttcctttgtattgatttttggttcccttgtaaatctttccagatgagacgagaacccaggaaacaatttcctgtttttcttttttttggattaattctgtcactataatttatatgttattcaacaaatcaaggtgagagtggctttattgtccattagtagaggtaatcatcgattacttctccaatatggtttatataaatctttgaggataatgccacaaaactttgattaacaagataccagtgaaattgagatattcaamagaaaaaaaagccaggaaggaatgcattccattttcagatatgagagaaacaaactagtctttcaatcatgaatgctcactaacagtccaacgggaatggctctatgggaacagttaagtaaa

SEQ ID NO: 394874 - DNA, 579 bp, Homo sapiens
cagttaccatcaactctcactaagcacatctccagggctcattcatcatattcgaacagtgaggcatgtgtgcctagtaatggccccagtgctttagaagacagtgaggagtagaatttatcccgaaccctaatgtagaaaaaatcttgccttgatgaagatggtacgcttatctataaaacctttcgtttttcctttgtattgatttttggttcccttgtaaatctttccagatgagacgagaacccaggaaacaatttcctgtttttcttttttttggattaattctgtcactataatttatatgttattcaacaaatcaaggtgagagtggctttattgtccattagtagaggtaatcatcgattacttctccaatatggtttatataaatctttgaggataatgccacaaaactttgattaacaagataccagtgaaattgagatattcaaaagaaaaaaaagccaggaaggaatgcattccattttcagatatgrgagaaacaaactagtctttcaatcatgaatgctcactaacagtccaacgggaatggctctatgggaacagttaagtaaa

SEQ ID NO: 394875 - DNA, 403 bp, Homo sapiens
agagttcttagaaacatcgttcagccatatggtttgaaagaaaggacatttcaaagtggtgaatcttagcttgctatgaaattaattaaacttcactgttaagtttaggatttgagaattctggtcaatactgatttagccaagtttgtcttattctaaaagctaagtaaccagcaccaaattgatctatagctagttagaaggaagaactcagaggccaagtagctcatggcgctgcagagaaaaaattcttgataaattaattaaaaagacatttcgcttacttgctctgcatcataggaagcaccaatatgmcttttgaatgcctgcattaccatctcagtatcttatgcccatagagtgctttagagctgaagaaatgacgacatttgctcctggttta

SEQ ID NO: 394876 - DNA, 403 bp, Homo sapiens
agagttcttagaaacatcgttcagccatatggtttgaaagaaaggacatttcaaagtggtgaatcttagcttgctatgaaattaattaaacttcactgttaagtttaggatttgagaattctggtcaatactgatttagccaagtttgtcttattctaaaagctaagtaaccagcaccaaattgatctatagctagttagaaggaagaactcagaggccaagtagctcatggcgctgcagagaaaaaattcttgataaattaattaaaaagacatttcgcttacttgctctgcatcataggaagcaccaatatgacttttgamtgcctgcattaccatctcagtatcttatgcccatagagtgctttagagctgaagaaatgacgacatttgctcctggttta

SEQ ID NO: 394877 - DNA, 564 bp, Homo sapiens
tcccacaaactgggcagttaaatggctgacartggcctaagagaggaagccaagaggccggacatccaaggagctccccagcccagtctggcctggcatgagggtgccttcctaattcaggtactgccaggtctgtagggggttctccccctccacaccatcagcctcccagccctcgcccaccccttcctggtcctctcaccgtcagccctttcccagcttctggcccctgtccttctaccttccaggtccgcactgtgagatggaggccaggggctaggtgggtcagggacagaaaagtctacacagacttttttgcctgggggtggggggaaatgggcagtgatcagaggaaggctggaggtagagaatctccctcaccctcttgtcttcccattccaggccaatcccagggcaggggctgtgcctggggagggagagcgtggatcctaccgccttcacgtcatcaaggccctggtacagcgctacacagagactgcccggcgagaattcgaggagacccggcggaaaggtttgtcacccacctccaagccctccccattc

SEQ ID NO: 394878 - DNA, 564 bp, Homo sapiens
tcccacaaactgggcagttaaatggctgacagtggcctaagagaggaagccaagaggccggacatccaaggagctccccagcccagtctggcctggcatgagggtgccttccyaattcaggtactgccaggtctgtagggggttctccccctccacaccatcagcctcccagccctcgcccaccccttcctggtcctctcaccgtcagccctttcccagcttctggcccctgtccttctaccttccaggtccgcactgtgagatggaggccaggggctaggtgggtcagggacagaaaagtctacacagacttttttgcctgggggtggggggaaatgggcagtgatcagaggaaggctggaggtagagaatctccctcaccctcttgtcttcccattccaggccaatcccagggcaggggctgtgcctggggagggagagcgtggatcctaccgccttcacgtcatcaaggccctggtacagcgctacacagagactgcccggcgagaattcgaggagacccggcggaaaggtttgtcacccacctccaagccctccccattc

SEQ ID NO: 394879 - DNA, 564 bp, Homo sapiens
tcccacaaactgggcagttaaatggctgacagtggcctaagagaggaagccaagaggccggacatccaaggagctccccagcccagtctggcctggcatgagggtgccttcctaattcaggtactgccaggtctgtagggggttctccccctccacaccatcagcctcccagccctcgcccaccccttcctggtcctctcaccgtcagccctttcccagcttctggcccctgtccttctaccttccaggtccgcactgtgagatggaggccaggggctaggtgggtcagggacagaaaagtctacacagacttttttgcctgggggtggggggaaatgggcagtgatcagaggaaggctggaggtagagaatctccctcaccctcttgtcttcccattccaggccaatcccagggcaggggctgtgcctggggagggagagcgtggatcctaccgccttcacgtcatcaaggccctggtacagcgctacacagagactgccyggcgagaattcgaggagacccggcggaaaggtttgtcacccacctccaagccctccccattc

SEQ ID NO: 394880 - DNA, 528 bp, Homo sapiens
attgcattttgagaaccactattctaattacagtgttacagtatgataattatacaaggtgctttaaatcagtttatattttcattctctacttctgcaagagaaactgaaagattaatgtggaaatttacaattttgataaagaatatgtactgagaaaaattatatttttaaaaacctagtatctcctatgacttcagcatatccaatacatctgaggctaagaagccaaatcatcttttgctcactggcatgctgctaggggatatatttctggtttcacctttgcgaatggaccaagagatggctctcgctgaggctggaggtgttggtatacactcaggagtccagytgcatcttcagtctggtgggtctatttaacctcaccatatttaatgaaccatcatctacccggacgaaaggattgcatcagtgcattctgctgcagccaaagtacaggaccctatgtgtctttctctgaacatgttacctttggaattcaaacacaactaggatcccctgtgtcac

SEQ ID NO: 394881 - DNA, 528 bp, Homo sapiens
attgcattttgagaaccactattctaattacagtgttacagtatgataattatacaaggtgctttaaatcagtttatattttcattctctacttctgcaagagaaactgaaagattaatgtggaaatttacaattttgataaagaatatgtactgagaaaaattatatttttaaaaacctagtatctcctatgacttcagcatatccaatacatctgaggctaagaagccaaatcatcttttgctcactggcatgctgctaggggatatatttctggtttcacctttgcgaatggaccaagagatggctctcgctgaggctggaggtgttggtatacactcaggagtccagctgcatcttcagtctggtgggtctatttaacctcaccatatttaatgaaccatcatctacccggacgaaaggattgcatcagtgcattctgctgcagccaaagtacaggacmctatgtgtctttctctgaacatgttacctttggaattcaaacacaactaggatcccctgtgtcac

SEQ ID NO: 394882 - DNA, 567 bp, Homo sapiens
tggttctttgtatgtctctctctttcagctagaaattgatttccttgatgctgagttcatatcgtctctgtgtcttcttcatctgtcagtgtcctggcacccacacattagtaatttggagagagtttaagaaagggactatttacaaagatgtgagctgggatttggaaaataaaagcaatcatagagtgttcccccttcccctctctcaccccccctcaccatcactgacccccacctacttaccaaccctaagacctgggcagttactggaacccttccacaatcacagaaagcaggatggatggggctctgccaactgacaggagatgagccctgatgttccacagtgaacaggtctacgcaaatctattcctacagtctaaggaagctaagaggccaaagaaaaaggctgacaaatcattcttagtaatatttactaggaacttacagacagaagccatgtttgtgtgtcaggtggcagtgagacgagatggtggattcctgtgctatcaaccttcagacccagggcttatrtaccatggggaaagagtgattcagaaggga

SEQ ID NO: 394883 - DNA, 502 bp, Homo sapiens
ttttaatgattgatgaactgattaagatttattttgagatttgatcagtttttagtaaagtttaaatgtttttgtatttttctttcatttgtacgttacattcactgtggtacaagtgtatacctgctytaacagttaaaaagtggttgaggtttctgatgctgatcataaaatatgacaggaaaaatactctattttataaagaaaacatatgaaggcaattttcattgtctgtagaactgaaataaggattaatctttatctcagaaaaagtgcaaagtggcttatcctgtctttctggcaacaatagggctggcagtgttgcacaactccagggggcgccttacacatagtgatctctgtgcttgtcccctgcccacccacagttgtacaagggccatgctatgccattttacttgacagccctgggcagcagggctcctaagcaacagtccaaaaggaaggccaaggaacacatccattaaaatgtaggctatttgtt

SEQ ID NO: 394884 - DNA, 559 bp, Homo sapiens
gtcatttttgacttgaaggtggggtttcactggggacctgaccacccctgtctacctaggatttctctgctttctgcctctatcaccctgattctttccagatttggtatttattgggtttgcagagacctctagtgtgcttcatctagtgataaggtggggtaacacccagaacagacagtgatggtgaacttgggyaaggccagtgcaaattgcagggaggaaaaaaaaacatctggggggagtttcctgaactttgaatagcaaatatttggtggaataacaacaataacacacaagtaaaagtaaaataaaatcaaagataattaaagtggaaggctctatttaccagaaacttacctgttaaagatagtttccatggttttcattttaagtaatagtgaaaaatcgtgaaaaatacatttagcaagaaactgagtcacgggcagttttgctattccatattccctcaaatgagcagccctgttgtcttatattatctgctctctaagcacaaaactgaattaccatgaatcaatatcaagatattaagataatt

SEQ ID NO: 394885 - DNA, 559 bp, Homo sapiens
gtcatttttgacttgaaggtggggtttcactggggacctgaccacccctgtctacctaggatttctctgctttctgcctctatcaccctgattctttccagatttggtatttattgggtttgcagagacctctagtgtgcttcatctagtgataaggtggggtaacacccagaacagacagtgatggtgaacttgggcaaggccartgcaaattgcagggaggaaaaaaaaacatctggggggagtttcctgaactttgaatagcaaatatttggtggaataacaacaataacacacaagtaaaagtaaaataaaatcaaagataattaaagtggaaggctctatttaccagaaacttacctgttaaagatagtttccatggttttcattttaagtaatagtgaaaaatcgtgaaaaatacatttagcaagaaactgagtcacgggcagttttgctattccatattccctcaaatgagcagccctgttgtcttatattatctgctctctaagcacaaaactgaattaccatgaatcaatatcaagatattaagataatt

SEQ ID NO: 394886 - DNA, 559 bp, Homo sapiens
gtcatttttgacttgaaggtggggtttcactggggacctgaccacccctgtctacctaggatttctctgctttctgcctctatcaccctgattctttccagatttggtatttattgggtttgcagagacctctagtgtgcttcatctagtgataaggtggggtaacacccagaacagacagtgatggtgaacttgggcaaggccagtgcaaattgcagggaggaaaaaaaaacatctggggggagtttcctgaactttgaatagcaaatatttggtggaataacaacaataacacacaagtaaaagtaaaataaaatcaaagataattaaagtggaaggctctatttaccagaaacttacctgttaaagatagtttccatggttttcattttaagtaatagtgaaaaatcgtgaaaaatacatttagcaagaaactgagtcacgggcagttttgctattccatattccctcaaatgagcagccctgttgtcttatattatctgctctctaagcacaaaacygaattaccatgaatcaatatcaagatattaagataatt

SEQ ID NO: 394887 - DNA, 521 bp, Homo sapiens
tccaaataatctttccagtctcaaggcttttgtatgtatgctctgaatcttggaaaaagaggaaacagggaaaatatttatttattgtacttttttgcccagatgaatgaayggactcagggttttaaagagaatctttgtctgcaaagataaaagaaaacagaggtacatttgaaaatgttattagcatattttaaaaatatattctctgtatttatttaaaatcttttagattccccttaattttcagtttattcttgccttctcagctgagctcctgacttctatcgccactgccacttggatgtccagtagtcatttcaaacttaacttggtcaaaacagaactacttatttccctactcccccatttccgtgtcttgtttaagtttaaatgtgcctattttaaaaaaaggtggcctggcgtggtggctcacgcctgtaatcccagcactttgggaggccgaggcgggctgatcaccaccaggtcaggagatcgagaccatcctggctaacacggtg

SEQ ID NO: 394888 - DNA, 525 bp, Homo sapiens
aatatcttaatttatcttgtcttaacaaagtctggkggttccagaggaaacagagtgcaaaatagttactgacacaaatgatccactgataaaaactcctgagctccatcattcataattagacaaggtatatagaagaagatttgattaaacagtaatgcagcttcatacaaccatgcaacattggaacgatttaaatgcattaaaattgctcttccgtatgccttaatttcagatgaatttgggatatttcttcagatttatgttcatgttaaaattcaaataataagaaagaaatagcctaggggaagctcaaactgtaaactgaaagggagaagactgacagaattgaaaatgtcacaaactctcctatatgtcacagtagaaacttgaaaaaccaaaacaaacaaacaaacaaaaactctgctggttaaaactcatgaggatacagaaaaaagttaagaatggcaagaatatataggtaatcaaaatgacacagaagaatttaaaaagatgatgatggtc

SEQ ID NO: 394889 - DNA, 584 bp, Homo sapiens
gagtgcagcctcctttttatttatgttgtagttaaaattaaatgacacatcttcatgagtataatggaatagttatttttatagggcattaaaaaaagaataacatgagtttctgaaggacattcaattccataaacaaatatacttgtctttcccacagtagaatttaaaataaagtactcagcctttatgtttgtattttttacattattattacaaagaaggccatttctatccccatccatgttgcaccctcgcttcccaacctcggcrgacctagaagcctttgagagtggccttcacaagagggctgtctatacccaatccatgtcctgtccacagccgtacaaagaggcagacccacaaataaaatctaaatctttgagccagaagcatcagcgatcaccttctattgttactgagtccaaatcaagggttttaattttggggattttggtgtgatgtctggcaatattaatgcagatgatgaacagttttatcttttagtattagttggtttttttgttgttgttgtttgctttcagagacagagtcttcctctgtcgcccaggctggagtgcaat

SEQ ID NO: 394890 - DNA, 590 bp, Homo sapiens
ataacagaatccagtcggtaggactwgagtcctggaactttctgcttacaaaatgtttcagcagagacacaagtggaatgctgggctcagtggggaaagtctgcagctctaccccaacattcaggcagccccaaggctcatgaagcatcttggaaaaggagacttcttcttcctctcacccaccactgcagacacagcggaggcttcgcccatgggagctcagcatgggtgcagctgtagacagcctttctgtaacacttcagggtgactacatccccataagaggagtgccatccaggtttaagtttgcatgaggggtacagtcacaagacccatctatgtggaacatcagcattcctgcagataaaaagaagtgcttgtttgatttgaatggctagaacactaggtaagaagtgtgactgacaggtggatcaccttcctgctggcctagtaggggaactaaagtggctcccatcctttccccaaaaaggtctcaacacatgtcactgagagcttccccagctgcctctggcaaggctggggcctctgcccaccattgggtgttatgtttacccacctgctttagccac

SEQ ID NO: 394891 - DNA, 537 bp, Homo sapiens
atgaacatctttaggcacacactagaaaatctagaagaaatgaatacatttctggaaacatacaattctcatagcttgaataatcaaggaaaaataaaatcctgagtaggtcaataacaagcagtgagactgaatcagtaataaaaaatttgccaacaacaaaaaaaagcccagggccagatggattaacagccaaattctaccaaacatacaaagaagaattggcaccaatcctactgaaatgaatccaaaagattgagaaagagagaatcctcctaattcattctatgaagccagtatcacastgataccaaagccaggaaagaacataacaaaaacggaaaactacagaccaatatccctgatgaccatggatgcaaaaaccctcaacaaaatactagcacagtgaatccaacagcacatcagagagataattcaccatgatcaagtggatttcatcttaggaatgcagggatggttcaatatacactatacaataaatatggtcccaccacataaacagaattaaaaacaaaa

SEQ ID NO: 394892 - DNA, 537 bp, Homo sapiens
atgaacatctttaggcacacactagaaaatctagaagaaatgaatacatttctggaaacatacaattctcatagcttgaataatcaaggaaaaataaaatcctgagtaggtcaataacaagcagtgagactgaatcagtaataaaaaatttgccaacaacaaaaaaaagcccagggccagatggattaacagccaaattctaccaaacatacaaagaagaattggcaccaatcctactgaaatgaatccaaaagattgagaaagagagaatcctcctaattcattctatgaagccagtatcacactgataccaaagccaggaaagaacataacaaaaacggaaaactacagaccaatatccctgatgaccatggatgcaaaaaccctcaacaaaatactagcacagtgaatccaacagcacatcaragagataattcaccatgatcaagtggatttcatcttaggaatgcagggatggttcaatatacactatacaataaatatggtcccaccacataaacagaattaaaaacaaaa

SEQ ID NO: 394893 - DNA, 508 bp, Homo sapiens
ctatccgccaggaacttacatgctactgtgatattgttagcttgctgctgaattctttgctatcgggatgaagggggaaagttttgttccacttctcctacagaaacagggaacccatgaaatagtttcctgtgtaacactgttctcttgtttaactaacgctgtcataagtattgtcatgcagcccatgctggcaagttgcttaatctctctagataatattgttgtagttcctgggggctatggtgagttttccatcaatatcttggaaattaggaagactgctcccataaatgatgagacacagatatgtcatttgaaggaaaaataactaccaggtcaacagtacttgactgatgacatggccagacctgcatcagctagtatggtggctcacgtgtarctatttaaactaaaattgagtaaatttaaacaaagttaaaaatttagttccccagtctccctggtcacattttaagtgcccaccgataatgtggctagtgggaca

SEQ ID NO: 394894 - DNA, 508 bp, Homo sapiens
ctatccgccaggaacttacatgctactgtgatattgttagcttgctgctgaattctttgctatcgggatgaagggggaaagttttgttccacttctcctacagaaacagggaacccatgaaatagtttcctgtgtaacactgttctcttgtttaactaacgctgtcataagtattgtcatgcagcccatgctggcaagttgcttaatctctctagataatattgttgtagttcctgggggctatggtgagttttccatcaatatcttggaaattaggaagactgctcccataaatgatgagacacagatatgtcatttgaaggaaaaataactaccaggtcaacagtacttgactgatgacatggccagacctgcatcagctagtatggtggctcacgtgtagctatttaaactaaaattgagtaaatttaaacaaagttaaaaatttagttccccagtctcmctggtcacattttaagtgcccaccgataatgtggctagtgggaca

SEQ ID NO: 394895 - DNA, 538 bp, Homo sapiens
caacttttacttatgttcacagaaccgaaaaactgcagattaaaatacccaggatcttcatttgtatgttatttatggtttctgatttaccccaagattaaaattttcctaggtataaagtagctgtgttaccaggccaccctcctgaaatagtgtctttctatcttccttgtcaaaacttgccagagcccttcatttttgcttctagctggagtagttcctagggtcctataacttccttgtagttattttatgcaagacttattgagttgagagctgttttgattggcttagagccgatgttggcatacaatataatatttattcattgtggatcaggtccatgggttctaatatcttgcttttgttgttttagggcatatgttttccatatgatattgatattgttatttctatgcatcccataaagctgcccagctgtgcattggctgagagatagagtatgtagggcacctaaccaggtgactgcctagccaaagagcagcaactgatktttcctttcttcctgcttccctct

SEQ ID NO: 394896 - DNA, 548 bp, Homo sapiens
caagcagaaatgagacacaaggcattccaggcaaagagattctaagaacaaaggcttagagataagaaagatggccttatatagagaactgtgattctagggtgatgaagaggagttaggaatgatatggccagtgggattctttaagattagactgaarggagccaggaaagcaggaccaaaattatatacttttctcattcactattggtgagcttttagaggggagtactgtattttagaaagattaatctggcagtacctgaacaaggagagattgaaggcaaagtgaacatgttcaaaacaagggcttaaattacagtgagaggaataaaaaggaggaagaaaattgatataatttagataatactggaggtggaggctggtttggatcatgggagcggatccctcatgacttggtgctatcttcaagatagtgagtcagttcttgcgttatctggtcatttaaaagtgcgtggtacctcccccatcaccccactctctctctcttcatcctgctttcactgccatgtaatgtgcctgtggtc

SEQ ID NO: 394897 - DNA, 541 bp, Homo sapiens
tgagtccagtaaacctctttcctttttaaattacccagtcttgagtgagtatatttttattagcagcatgagaacaggttaaaacagggggattaaaaacaatggccttcatctcatttayggttctttcttgggttcttcctataacttgtcctcttgagatataacaaacacattacatgggccagatctctttatagacactgccctcccctgagcccgctccagagccagtgcagccctgcaggttgactcactgcggtaaactgtgtacccaggcctgctctatgcaggggctgctttgagataaaatacttcttgtgtaattgttttagtttataagattaatatttttcttctcagggactgtgtccacaattaaggaaaaaggctaccaggtgagtagtgatatttggcaggccaaatatgggatgtggttagttgcgtcataaaaaataaagtacactttactaactcaattttggtctacattttacttttctcttattataacaggaaaattacagaatatttagaaagg

SEQ ID NO: 394898 - DNA, 541 bp, Homo sapiens
tgagtccagtaaacctctttcctttttaaattacccagtcttgagtgagtatatttttattagcagcatgagaacaggttaaaacagggggattaaaaacaatggccttcatctcatttacggttctttcttgggttcttcctataacttgtcctcttgagatataacaaacacattacatgggccagatctcyttatagacactgccctcccctgagcccgctccagagccagtgcagccctgcaggttgactcactgcggtaaactgtgtacccaggcctgctctatgcaggggctgctttgagataaaatacttcttgtgtaattgttttagtttataagattaatatttttcttctcagggactgtgtccacaattaaggaaaaaggctaccaggtgagtagtgatatttggcaggccaaatatgggatgtggttagttgcgtcataaaaaataaagtacactttactaactcaattttggtctacattttacttttctcttattataacaggaaaattacagaatatttagaaagg

SEQ ID NO: 394899 - DNA, 541 bp, Homo sapiens
tgagtccagtaaacctctttcctttttaaattacccagtcttgagtgagtatatttttattagcagcatgagaacaggttaaaacagggggattaaaaacaatggccttcatctcatttacggttctttcttgggttcttcctataacttgtcctcttgagatataacaaacacattacatgggccagatctctttatagacactgccctcccctgagcccgctccagagccagtgcagccctgcaggttgactmactgcggtaaactgtgtacccaggcctgctctatgcaggggctgctttgagataaaatacttcttgtgtaattgttttagtttataagattaatatttttcttctcagggactgtgtccacaattaaggaaaaaggctaccaggtgagtagtgatatttggcaggccaaatatgggatgtggttagttgcgtcataaaaaataaagtacactttactaactcaattttggtctacattttacttttctcttattataacaggaaaattacagaatatttagaaagg

SEQ ID NO: 394900 - DNA, 580 bp, Homo sapiens
aaaacataagaaaaaaaatgttctcaagtataaaaatacaaaaagttatattgaatgggagcagagtctcaagtaggattgarggggaaagatacatacaagatttctgaacttctttggttttaaaagcattgtataaacttccggccaaaaagagcagaatactctaaagaaaagtggattcaacttatcctctgtagtatcagcagctaatagatagtgagcaatcattttaggctaccaagggaacagtgcttaatccaaaagtcctatgcatgctgaagacataattcttgacatttacacattttcgagctctcagaaagcataccgtccacatatcctatgaaaagaaagcacttcaggaagtaacctaaccacaaagacacaaaaaaatcagaataaaagatcttaaatcagaaaatagagaagcaaaacagtataagaaacactggtgagaactgaattttgtagtacctgtggctacatcgaaagaaatgactgtaaaatttcttgatgttaaacatacgtattaggagagtaagaacaggagacctccagtttccagttgggcatgtaa

SEQ ID NO: 394901 - DNA, 580 bp, Homo sapiens
aaaacataagaaaaaaaatgttctcaagtataaaaatacaaaaagttatattgaatgggagcagagtctcaagtaggattgaaggggaaagatacatacaagatttctgaacttctttggttttaaaagcattgtataaacttccggccaaaaagagcagaatactctaaagaaaagtggattcaacttatcctctgtagtatcagcagctaatagatagtgagcaatcattttaggctaccaagggaacagtgcttaatcsaaaagtcctatgcatgctgaagacataattcttgacatttacacattttcgagctctcagaaagcataccgtccacatatcctatgaaaagaaagcacttcaggaagtaacctaaccacaaagacacaaaaaaatcagaataaaagatcttaaatcagaaaatagagaagcaaaacagtataagaaacactggtgagaactgaattttgtagtacctgtggctacatcgaaagaaatgactgtaaaatttcttgatgttaaacatacgtattaggagagtaagaacaggagacctccagtttccagttgggcatgtaa

SEQ ID NO: 394902 - DNA, 601 bp, Homo sapiens
gtgtaggtgctctttggaatttaacagtgcctggaaccccttatttctcagtctttgaggcaatactgaaacaaaacaggtcacatcctgataccctgtgaaaattaaaaataaaaaccactaaagagaaagggaaacagccattaaatatgatgaaatgtgctgagactccacacgctttcagaggaaaaccacatttaccatctaaaaggcgagtcaaacactaatttttcaataatcaaattacagcagcagttatgcctcattggctcagtaattcaatgccacaccwacgttcacaagtcagcttagagagctcttctttataaaaagtatataactcaatatttttattattggttactacttcaatcaaggagagagtttggtgttatttttaacatgatggaataaaataatcggaaattatatccaatggtgatgctttgggccttggcaatattaaatatcaaatgataaaattcgggttttcaaaatgtctttcaagtcccaattttctttagataaatttaattggtcagttgttcttaaaaggaacactgttttgacccacagaataatttctgtccaatgacttctt

SEQ ID NO: 394903 - DNA, 601 bp, Homo sapiens
gtgtaggtgctctttggaatttaacagtgcctggaaccccttatttctcagtctttgaggcaatactgaaacaaaacaggtcacatcctgataccctgtgaaaattaaaaataaaaaccactaaagagaaagggaaacagccattaaatatgatgaaatgtgctgagactccacacgctttcagaggaaaaccacatttaccatctaaaaggcgagtcaaacactaatttttcaataatcaaattacagcagcagttatgcctcattggctcagtaattcaatgccacacctacgttcacaagtcagcttagagagctcttctttataaaaagtatataactcaatatttttattattggttactacttcaatcaaggagagagtttggtgttatttttaacatgatggaataaaatartcggaaattatatccaatggtgatgctttgggccttggcaatattaaatatcaaatgataaaattcgggttttcaaaatgtctttcaagtcccaattttctttagataaatttaattggtcagttgttcttaaaaggaacactgttttgacccacagaataatttctgtccaatgacttctt

SEQ ID NO: 394904 - DNA, 601 bp, Homo sapiens
gtgtaggtgctctttggaatttaacagtgcctggaaccccttatttctcagtctttgaggcaatactgaaacaaaacaggtcacatcctgataccctgtgaaaattaaaaataaaaaccactaaagagaaagggaaacagccattaaatatgatgaaatgtgctgagactccacacgctttcagaggaaaaccacatttaccatctaaaaggcgagtcaaacactaatttttcaataatcaaattacagcagcagttatgcctcattggctcagtaattcaatgccacacctacgttcacaagtcagcttagagagctcttctttataaaaagtatataactcaatatttttattattggttactacttcaatcaaggagagagtttggtgttatttttaacatgatggaataaaataatcggaaattatatccaatggtgatgctttgggccttggcaatattaaatatcaaatgataaaattcgggttttcaaaatgtctttcaagtcccaattttctttagataaatttaattggtcagttgttcttaaaaggaacactgttttgacycacagaataatttctgtccaatgacttctt

SEQ ID NO: 394905 - DNA, 603 bp, Homo sapiens
tgcttttgtgtcctctatcctctcactactatattctgaatctttccccattttgacatttcttagtttacgaatatattcaaggttctcctatcctagaaatccctccctggacttcctcagtacattctcatttgcttctcaggtgaacttcttaaaataatagattcaactaacactgcccatgtcttcatctacaattcaccaccaacccattgttatcagattctgacccatgattcagtgccccaaacctgttctccactgaaactgctcttactgtggcaaacaaatgaccatcagcttgtcacacctaatgcacatggattaattcctctaactcacagctcctatstgcttgttttgaccctggagatgatgcctgtttcttgaaacttacttctccttcagctcctgtgagtgcccactctcctggtcttctgaacttttctaatcagtccttaatgcttcttcctgcaatgctcatctgcctctttacctttaaatgctggagttcctaagagtagtaccctcccttctgactcctctgattataatgactccacaaaccctgcttgggtgacttcatctgcacaccctttt

SEQ ID NO: 394906 - DNA, 527 bp, Homo sapiens
agacatggcctggaattgaaagacgggtggctgtttggaacagaacaaagaatacttgaggaatgggaagaagagtgaggatacctggaggctatcttggctctaacagagcaaacaaggggaccatggctcagtcaatcctctctccggccccmatgtccttatctacacaatgaaaaacttgcagggaaaggaatctaaaagtccaaaatttgacccttccatgaatcatgagaatcagacaacaaattagcctgagaatctgagttaagtgtgattaaaagcatattctatacgtttctaaatttcagcaaatatttatgtttataataaagaacaaatgagaaatgaaaaagagcaataaatgagaaagattttaatagtgccaacaatctggtttttccagctcctgacaaggtttatccagtcatcaatctatgccttttcttctctcacaaattaggcacctaatggtttgaggtttaagtgagaaatgactcaagactaaaaattctggttcgtcagtt

SEQ ID NO: 394907 - DNA, 609 bp, Homo sapiens
agttaaatttttgttatgagaagttgtcaaatattggctacataaattataattctttttgtccttcacctatactttcccagtttttccataagcataaattttcaaggccacagctcccatatcttcccagtgttgcttttcctagtgttgcttttttgaatgactcttctatgccttgctctggtaaaatgccttggttgtaataagaatatatagctcaaagtagtaaaaataactaattattctacatactgaatttagctgaatatactttacaaatcyaatatgaaattttaccaagctgagaacatgagcacaatgccatagtagaaaaccaacagaggacagagcaagatggctagatagaaggctccagtgatcatttcccctggaaggacaccaatataacaactatctattaaaaagcaaacaaaaaccttcataagaataaaggcgagcactcacagtacctggttttaaccctgcagtacacaaagaggcactaaaacagggtaggaaagacagtcttgaatcactaatgccactcctcactcatgccctggcagtagtcacatgctatgtagacagaatctgtacacttgggag

SEQ ID NO: 394908 - DNA, 627 bp, Homo sapiens
ttggctttgtgtttgtgcatgtgtgtgagaacggacaggtaaatgtgtgtaatggagagtgggtaggtgagtgtgtacrtgtgtgagagtgtgtatgtgagttgtgtgaatgtttgtgaagaaatgtgtgatagtggtgtttgaacttggcagtatgagtgtgtatgtggaatataactgtgtgcggatgtgtaaatatgagtgcatatgtgtgttaatgtgtgtaagtgtgtgaataagccatgtgagtgtggtgtgtgagcttgggtccatgagtgtgtgtgcgtgtctgtgtgagcatgacagagtgtgtgagtttggggtgtgtgcaggccacagccagtccctcctggggtactagatctttccaacccaagcacctcaagtcgttctccttcctcactccatcctgagcttcccagccaactgcctctcatccaaactcccacagggaaacagtccctgggactaggggctctgagcatggcacagtgccaagtctcctccctggccacctcctgagaacctgggtgtagcacaaaacagtcaaatatgttcctcttctgtcatcactaactagagctccacagcttcccagattgccctgttagctcttcaccataatta

SEQ ID NO: 394909 - DNA, 627 bp, Homo sapiens
ttggctttgtgtttgtgcatgtgtgtgagaacggacaggtaaatgtgtgtaatggagagtgggtaggtgagtgtgtacatgtgtgagagtgtgtatgtgagttgtgtgaatgtttgtgaagaaatgtgtgatagtggtgtttgaacttggcagtatgagtgtgtatgtggaatataactgtgtgcggatgtgtaaatatgagtgcatatgtgtgttaatgtgtgtaagtgtgtgaataagccatgtgagtgtggtgtgtgagcttgggtccatgagtgtgtgtgcrtgtctgtgtgagcatgacagagtgtgtgagtttggggtgtgtgcaggccacagccagtccctcctggggtactagatctttccaacccaagcacctcaagtcgttctccttcctcactccatcctgagcttcccagccaactgcctctcatccaaactcccacagggaaacagtccctgggactaggggctctgagcatggcacagtgccaagtctcctccctggccacctcctgagaacctgggtgtagcacaaaacagtcaaatatgttcctcttctgtcatcactaactagagctccacagcttcccagattgccctgttagctcttcaccataatta

SEQ ID NO: 394910 - DNA, 609 bp, Homo sapiens
agttaaatttttgttatgagaagttgtcaaatattggctacataaattataattctttttgtccttcacctatactttcccagtttttccataagcataaattttcaaggccacagctcccatatcttcccagtgttgcttttcctagtgttgcttttttgaatgactcttctatgccttgctctggtaaaatgccttggttgtaataagaatatatagctcaaagtagtaaaaataactaattattctacatactgaatttagctgaatatactttacaaatccaatatgaaattttaccaagctgagaacatgagcacaatgccatagtagaaaaccaacagaggacagagcaagatggctaratagaaggctccagtgatcatttcccctggaaggacaccaatataacaactatctattaaaaagcaaacaaaaaccttcataagaataaaggcgagcactcacagtacctggttttaaccctgcagtacacaaagaggcactaaaacagggtaggaaagacagtcttgaatcactaatgccactcctcactcatgccctggcagtagtcacatgctatgtagacagaatctgtacacttgggag

SEQ ID NO: 394911 - DNA, 609 bp, Homo sapiens
agttaaatttttgttatgagaagttgtcaaatattggctacataaattataattctttttgtccttcacctatactttcccagtttttccataagcataaattttcaaggccacagctcccatatcttcccagtgttgcttttcctagtgttgcttttttgaatgactcttctatgccttgctctggtaaaatgccttggttgtaataagaatatatagctcaaagtagtaaaaataactaattattctacatactgaatttagctgaatatactttacaaatccaatatgaaattttaccaagctgagaacatgagcacaatgccatagtagaaaaccaacagaggacagagcaagatggctagatagaaggctccagtgatcatttcccctggaaggacaccaatataacaactatctattaaaaarcaaacaaaaaccttcataagaataaaggcgagcactcacagtacctggttttaaccctgcagtacacaaagaggcactaaaacagggtaggaaagacagtcttgaatcactaatgccactcctcactcatgccctggcagtagtcacatgctatgtagacagaatctgtacacttgggag

SEQ ID NO: 394912 - DNA, 465 bp, Homo sapiens
ccctggcagtagtcacatgctatgtagacagaatctgtacacttgggagagggagagcactgggattgtgagcattgaactcagtgctgcccyatcatagcagaaagcaaaactggaatgaactcagctgatgcctgcccacagagggtgtgtttcaactggccctggacagaggggaatcaccctcccagtgattggaacttgagttctggcaagcttcaccaccatagtctaaaatgctctggggccctaaagaaacttaaaacagtctaggtcacaaggacagcaactcccaggtgtcatgctgaactgggcttagagccagtggacttgggggccacattacctactaagatacaagctggggcagctaagagagttcttataccacccctcctccaaactgaggctgcacagctcacagattcaagagaccacttccatctacttaagaagacagaaaga

SEQ ID NO: 394913 - DNA, 433 bp, Homo sapiens
gagggtctgtgctgtgggcccaagccagggttccttgtctgktgatgagcagtaaggggtgtgttgtacccgtggaagatggactgacttgttccttgtgtcaactgcagcttgttggaggtgtcaatatggcacttagggtctttgctcccttgacattctgagggtagcaagggcagttccactgcagaggcagtggcagagaggatttctgttgctcctggaagctctgtccagggagttgctgagttgctactggcttgaaggctcaagtggggggctggctggagacccaggccaggaagacctgcccatcatggcccacccctctctctgggaactctgtcccaggaaggtttcaaatctccattggccagggaacactggtgggtgtagctggaggcctcaggtgggagatcctgtccagtgacga

SEQ ID NO: 394914 - DNA, 617 bp, Homo sapiens
tggtaagtggaataatgccatgcaaaggtccccatgtctaaccaccaggttctaggcatgtattatggtatatgagaaatgggaattcaggctgcagatgawatcaaggttgataaccagctgactctaaaacaaaaacattaacttgaattacagatttgggcctaatgtaattataagcattcttaaaagtgaaagaaataataagagaaactgagtgctgtgatgtgagtcagttaaacttttttttcaactttttctttaggtgattattttcccttaacataaaatttactttagctcaactatacaaacatgtgagttattgttatgtaaccatcactcttcattaagaaatgctttgtaaaaagtgagccagtttttcatatacattcttcaaaatacattctcaacattatacatcaaattatatatacatacatgcacacatacactatatatatcaaggatttatatgagaggattaattaagaaaaaaattagtggaataaaaataatgtttatgataattttggccatagaatatataatacagatgatgtgaagtacaaaatgttttttatacttcatattttgatgtacaaagtatgtttgtc

SEQ ID NO: 394915 - DNA, 568 bp, Homo sapiens
tgctgtgatgtgagtcagttaaacttttttttcaactttttctttaggtgattattttcccttaacataaaatttactttagctcaactatacaaacatgtgagttattgttatgtaaccatcactcttcattaagaaatgctttgtaaaaagtgagccagtttttcatatacattcttcaaaatacattctcaacattatacatcaaattatatatacatacatgcacacatacactatatatatcaaggatttatatgakaggattaattaagaaaaaaattagtggaataaaaataatgtttatgataattttggccatagaatatataatacagatgatgtgaagtacaaaatgttttttatacttcatattttgatgtacaaagtatgtttgtctttgtaattcagatgattactttgcacttgtgttcccatgaaaaatgcctttcatttctaagctggtattggcatctcagccaacacttttctccttcttttctgcgtcttctccttttctgctttttctggatctcaggccagagcgcacttacctaccagtctgtca

SEQ ID NO: 394916 - DNA, 522 bp, Homo sapiens
  misc_feature (1)...(522): n = A,T,C or G
ttctgaattctgaataactatttagaaaattcagcctacatttttttgaacatgttatctctggttctacaaacacaaaattttagttttaatttacatggtgtaaaatttctaaatatattactctaaagataaacttyagatataaaagaattggagaagtaattgtttttatgtgagtgtggacctattctgagtaggaaaatatatcagaacaaagcagatgatttcatgagtgtttatgatatactagcaaactaaagcttcncagatttgaaagcaattattttcgtctgctttcattcatctctaaatctgntggtcagaatctccccatccaaaccntttgttctagcttgctttctattcatgctagaccntaatatacaattttcttctttcaaagttcatgaagtattctttacgtgacctgcctaatgattatagctctttcggtaaaatgtaatggtgctaactaaataatttgaagatctgagtaattttgcagtgagtatattatta

SEQ ID NO: 394917 - DNA, 266 bp, Homo sapiens
agtactctgcaggttctgaggacaagttagaattatttttaatgtgcctaaaaattctttgtagctggagaatttgargtcatttatagattacaaatgcaacattcttgtcacttaatttagataagataacgcagtatccatggattagatcgttggacagatagcattgttaaacattattatattataacacaaagaatggtaaatatcaaattagactaagtgaagtattaataccagtgggccatgtattattagtgcta

SEQ ID NO: 394918 - DNA, 541 bp, Homo sapiens
cactgtgctggttcttgcacatgctggtaaatatctgagtttctatgcttatgactgacaagtgaaatgacaaaaacaccacaaaaactatatattttgatactactctgctaagcttatgaataagacacagactgcttatttgaaacactaccttttcatgtttctaaattttttaaattgacagataaaattatatgtattgtcatgtaaaatgtggtttaaagcatgcatacattgtgtaatattaaattctggctaattaacaagtgctttacctcatatagttatcatttttgtgatggagaacacttaacattgactatatcagtatttttaaaacataacagtatgtcatcattaactatagtcaccaggctttacaacagrtttttttaacttattcctttaatctaactaattatatattctttgaaagacatctacccaatccccttccaaaatatcttagcctctcgttccactattttagtctctacttcaatgcgatcaattttttaaaattccacatatgagcaaa

SEQ ID NO: 394919 - DNA, 591 bp, Homo sapiens
tcatcattaactatagtcaccaggctttacaacaggtttttttaacttattcctttaatctaactaattatatattctttgaaagacatctacccaatccccttccaaaatatcttagcctctcgttccactattttagtctctacttcaatgcgatcaattttttaaaattccacatatgagcaaaatcatgaggtatttgtctttctgtgtctgsattatttcaattaacataatctccttcatgttcatccatgtaattgaaaatgacagtattttctattttaaggctgaataataatccattcgtacagaatggatgtatgccacatgttctttatcattttatttgataataaaccctgagtttgattttatatcttggctattgtgaatagtgctgcaataaacataacagcacagatgtctctttcacatacttgatttttttgatatgtgcccaataatgatattgctgtatcatatgatagttcagcttttaatgtttgagaaatctccatactgttttgtataatggctacgctgatttacattcagtgcgcaagcattccctttgctccacatctttgc

SEQ ID NO: 394920 - DNA, 517 bp, Homo sapiens
tacttccaaatattggctggagcacactgctgtaacaaacatgggagggtagatatctcttcaatgtatggatttcctttctagtaagtgaatcctcaggagtggcattcctgaattatatggtagctttatttttagttgttttgaagaattttcaaaatgttacattcctgtcaacagcatacaarggctccctttctccacttctctccagcatttgttactgcctaccttttggatataagccatttaactgagtcacataatatctcattgtagttttgatttgcatttgtctgatgatcaaaaatgttgagcaccttttcgtatgcctgtctgccctttgtacgtcttatgaaaaatgcctattcaaatattttgtttattgtttatcagattactaaattttgtacattgaaagattttactgtgaatagttgacgaaaattggttaagtccattaagacatgcttcctgcccctcacaactcacccacgctgttctagtctctccgtaa

SEQ ID NO: 394921 - DNA, 565 bp, Homo sapiens
tctggccatgatttggtaaagcagctgtgctatgccacaggatctcttctgtccctggtgagtttgtactctccaaagcccgcacgctggaatgactaagttgcccaaacaggaaagatggtggcctgcctcatcttttctctcagaatttatcctgtgtgatggagcttaatttttaggttgttaattttactgtcagcgttagagttgttcagaaagaatctcactgttatcttttaggtgagatatataagaattcattttctcctgtaaataaacctgttgatgtttgttctctggaaagaagtccctttcagctatctgactttgatcacaatcatgtagagcagtagtcagtctacaatgacatgattgaatttccatttccagtgtttcctagytgtgtcttacattctccagttcagaactgagcattctcagttgtcaaaatcctaagctgtccactgtacttaaatactggttttcgttaatgcttcttcattcagttgtatagcctttagaagtttttcttttacactttcaatttcctccaaaattttatttt

SEQ ID NO: 394922 - DNA, 654 bp, Homo sapiens
agagtaacatggccaaaaaaacacaataaatttccagatatgaaccctaaaaaattgagatatacaaattacttgaaaatattcaaaataaccatctaaatgatgytcagtgtatgaaatgggaacatagacaactaaatgaaagcagcaaaatgagaatatcacaaaaaattataaaaaccttcaaaaattatggagctgaagactacagtaagtcataaagacagaaattctcaaacaaaatacttgtaaaatatcaagaagcttaaattagtttggctaagataaacacagttactcataacaagacagattataagcaaaattttaaaagtcgtaggcaaaaggaatcttggaagcaagcagtaagataaacctgttgtgtcatctatagcatgcttcattgagatttgcagtggatttatcaacacagtccttgcaggccagaaaaaaagttaagtgatatagtcaaagtgctgaaacaaaaactttcaaagcaagaatactataggaaaagtcttcaaaaaaagttccaaagtaacaaaatgcagtaaaagtacatcactagtatatctgccttactgaaaatgcttaggggtgtctcttccactgaaaataaaattctagaaaaaacctacattatataaaaaacac

SEQ ID NO: 394923 - DNA, 654 bp, Homo sapiens
agagtaacatggccaaaaaaacacaataaatttccagatatgaaccctaaaaaattgagatatacaaattacttgaaaatattcaaaataaccatctaaatgatgctcagtgtatgaaatgggaacatagacaactraatgaaagcagcaaaatgagaatatcacaaaaaattataaaaaccttcaaaaattatggagctgaagactacagtaagtcataaagacagaaattctcaaacaaaatacttgtaaaatatcaagaagcttaaattagtttggctaagataaacacagttactcataacaagacagattataagcaaaattttaaaagtcgtaggcaaaaggaatcttggaagcaagcagtaagataaacctgttgtgtcatctatagcatgcttcattgagatttgcagtggatttatcaacacagtccttgcaggccagaaaaaaagttaagtgatatagtcaaagtgctgaaacaaaaactttcaaagcaagaatactataggaaaagtcttcaaaaaaagttccaaagtaacaaaatgcagtaaaagtacatcactagtatatctgccttactgaaaatgcttaggggtgtctcttccactgaaaataaaattctagaaaaaacctacattatataaaaaacac

SEQ ID NO: 394924 - DNA, 654 bp, Homo sapiens
agagtaacatggccaaaaaaacacaataaatttccagatatgaaccctaaaaaattgagatatacaaattacttgaaaatattcaaaataaccatctaaatgatgctcagtgtatgaaatgggaacatagacaactaaatgaaagcagcaaaatgagaatatcacaaaaaattataaaaaccttcaaaaattatggagctgaagactacagtaagtcataaagacagaaattctcaaacaaaatacttgtaaaatatcaagaagcttaaattastttggctaagataaacacagttactcataacaagacagattataagcaaaattttaaaagtcgtaggcaaaaggaatcttggaagcaagcagtaagataaacctgttgtgtcatctatagcatgcttcattgagatttgcagtggatttatcaacacagtccttgcaggccagaaaaaaagttaagtgatatagtcaaagtgctgaaacaaaaactttcaaagcaagaatactataggaaaagtcttcaaaaaaagttccaaagtaacaaaatgcagtaaaagtacatcactagtatatctgccttactgaaaatgcttaggggtgtctcttccactgaaaataaaattctagaaaaaacctacattatataaaaaacac

SEQ ID NO: 394925 - DNA, 654 bp, Homo sapiens
agagtaacatggccaaaaaaacacaataaatttccagatatgaaccctaaaaaattgagatatacaaattacttgaaaatattcaaaataaccatctaaatgatgctcagtgtatgaaatgggaacatagacaactaaatgaaagcagcaaaatgagaatatcacaaaaaattataaaaaccttcaaaaattatggagctgaagactacagtaagtcataaagacagaaattctcaaacaaaatacttgtaaaatatcaagaagcttaaattagtttggctaagataaacacagttactcataacaagacagattataagcaaaattttaaaagtcgtaggcaaaaggaatcttggaagcaagcagtaagataaacctgttgtgtcatctatagcatgcttcattgagatttgcagtggatttatcaacacagtccttgcaggccagaaaaaaagttaagtgatatagtcaaagtgctgaaacaaaaactttcaaagcaagaatactataggaaaagtcttcaaaaaaarttccaaagtaacaaaatgcagtaaaagtacatcactagtatatctgccttactgaaaatgcttaggggtgtctcttccactgaaaataaaattctagaaaaaacctacattatataaaaaacac

SEQ ID NO: 394926 - DNA, 593 bp, Homo sapiens
gttgagagcagacatactgaaaaaaactatgcatctgaatatcttaccaattcaaaatatattgtaattttaagaagatttttgtaatcttcatgataaccacaaatattagagaaatacaayatagaaattgagaaagaaatcagaccatatcaccagagaaatcagtgagacagcaagaaagatgaaaaaggaacaaaatggctacaataataaaacaatgattaatataataatagtaagttccatttcagaatactttaaaaatattaatggactaactttcccaatcaaaagacatatttcatgaagagattctaaaaattgtatcaacagcatcaactatattctgtgtacaagagaatcactggatccaatcacaaagatagactaaaagcaggatggaaaaagatattccatgcaaatgttagccaaatgagagcagaagtagtcactgtgacaaaagactttaagtcaatcattatcatattttataaaatttaattcaaaactacagcataaaaaagacattaaataatacaaaggttcattcattggaaacctataaaaattgtatatgttgtttgtgtgtg

SEQ ID NO: 394927 - DNA, 593 bp, Homo sapiens
gttgagagcagacatactgaaaaaaactatgcatctgaatatcttaccaattcaaaatatattgtaattttaagaagatttttgtaatcttcatgataaccacaaatattagagaaatacaatatagaaattgagaaagaaatcagaccatatcaccagagaaatcagtgagacagcaagaaagatgaaaaaggaacaaaatggctacaataataaaacaatgattaatataataatagtaagttccatttcagaatactttaaaaatattaatggactaactttcccaatcaaaagacatatttcatgaagagattctaaaaattgtatyaacagcatcaactatattctgtgtacaagagaatcactggatccaatcacaaagatagactaaaagcaggatggaaaaagatattccatgcaaatgttagccaaatgagagcagaagtagtcactgtgacaaaagactttaagtcaatcattatcatattttataaaatttaattcaaaactacagcataaaaaagacattaaataatacaaaggttcattcattggaaacctataaaaattgtatatgttgtttgtgtgtg

SEQ ID NO: 394928 - DNA, 593 bp, Homo sapiens
gttgagagcagacatactgaaaaaaactatgcatctgaatatcttaccaattcaaaatatattgtaattttaagaagatttttgtaatcttcatgataaccacaaatattagagaaatacaatatagaaattgagaaagaaatcagaccatatcaccagagaaatcagtgagacagcaagaaagatgaaaaaggaacaaaatggctacaataataaaacaatgattaatataataatagtaagttccatttcagaatactttaaaaatattaatggactaactttcccaatcaaaagacatatttcatgaagagattctaaaaattgtatcaacagcatcaactatattctgtgtacaagagaatcactggatccaatcacaaagatagactaaaagcaggatggaaaaagatattccatgcaaatgttagccaaatgagagcagaagtagtcactgtgacaaaagactttaagtcaatcattatcatattttataaaatttaattcaaaactacagsataaaaaagacattaaataatacaaaggttcattcattggaaacctataaaaattgtatatgttgtttgtgtgtg

SEQ ID NO: 394929 - DNA, 561 bp, Homo sapiens
tgtccactgtacttaaatactggttttcgttaatgcttcttcattcagttgtatagcctttagaagtttttcttttacactttcaatttcctccaaaattttattttcccttagctggttctgatgttttgtttcatctagttccagtcttagcatggcaatttcttcccgcaacatgctgttttcacgcaagagatcttcttctttcttatgactaagagaaagctaagtaaacaaagggaacttttagttagcactcaatagaatgacatatcatgatttcttctaaaatcaaagaatgacatttatatttgtataatgaaataattcccatagtggatatttaactggaaaaaagttggacaaaacttcaaatctaraagagtgtaaattccaaaaagttgaaatatttatctaaagaccatgaaaaataaatcactagaggatttttaagaatttcagaattgggaaagcctttctctgaattacaaaaaacccagaggcataaaatagaagattaatacatttggctacattttttaaattgggtttacactctga

SEQ ID NO: 394930 - DNA, 518 bp, Homo sapiens
atgacatatcatgatttcttctaaaatcaaagaatgacatttatatttgtataatgaaataattcccatagtggatatttaactggaaaaaagttggacaaaacttcaaatctaaaagagtgtaaattccaaaaagttgaaatatttatctaaagaccatgaaaaataaatcactagaggatttttaagaatttcagaattggraaagcctttctctgaattacaaaaaacccagaggcataaaatagaagattaatacatttggctacattttttaaattgggtttacactctgatatctaacctacaaaccacaccatcataagagccttagctatgcatatattaggacagaagcaattcctcaaagttctttaagttcctttttctgaggaatgttttatcaatatactgcttttctaatatttttacagtcagttataagaattacatttattcataactgttaaatctaagcgttgtacccttctacaatgtacacaccggcatctaagcat

SEQ ID NO: 394931 - DNA, 518 bp, Homo sapiens
atgacatatcatgatttcttctaaaatcaaagaatgacatttatatttgtataatgaaataattcccatagtggatatttaactggaaaaaagttggacaaaacttcaaatctaaaagagtgtaaattccaaaaagttgaaatatttatctaaagaccatgaaaaataaatcactagaggatttttaagaatttcagaattgggaaagcctttctctgaattacaaaaaacccagaggcataaaatagaagattaatayatttggctacattttttaaattgggtttacactctgatatctaacctacaaaccacaccatcataagagccttagctatgcatatattaggacagaagcaattcctcaaagttctttaagttcctttttctgaggaatgttttatcaatatactgcttttctaatatttttacagtcagttataagaattacatttattcataactgttaaatctaagcgttgtacccttctacaatgtacacaccggcatctaagcat

SEQ ID NO: 394932 - DNA, 518 bp, Homo sapiens
atgacatatcatgatttcttctaaaatcaaagaatgacatttatatttgtataatgaaataattcccatagtggatatttaactggaaaaaagttggacaaaacttcaaatctaaaagagtgtaaattccaaaaagttgaaatatttatctaaagaccatgaaaaataaatcactagaggatttttaagaatttcagaattgggaaagcctttctctgaattacaaaaaacccagaggcataaaatagaagattaatacatttggctacattttttaaattgggtttacactctgatatctaacctayaaaccacaccatcataagagccttagctatgcatatattaggacagaagcaattcctcaaagttctttaagttcctttttctgaggaatgttttatcaatatactgcttttctaatatttttacagtcagttataagaattacatttattcataactgttaaatctaagcgttgtacccttctacaatgtacacaccggcatctaagcat

SEQ ID NO: 394933 - DNA, 518 bp, Homo sapiens
atgacatatcatgatttcttctaaaatcaaagaatgacatttatatttgtataatgaaataattcccatagtggatatttaactggaaaaaagttggacaaaacttcaaatctaaaagagtgtaaattccaaaaagttgaaatatttatctaaagaccatgaaaaataaatcactagaggatttttaagaatttcagaattgggaaagcctttctctgaattacaaaaaacccagaggcataaaatagaagattaatacatttggctacattttttaaattgggtttacactctgatatctaacctacaaaccacaccatcataagagccttagctatgcatatattaggacagaagcaattcctcaaagttctttaagttcctttttctgaggaatgttttatcaatatactgcttttctaatatttttacagtcagttrtaagaattacatttattcataactgttaaatctaagcgttgtacccttctacaatgtacacaccggcatctaagcat

SEQ ID NO: 394934 - DNA, 528 bp, Homo sapiens
tctgaagttccatttcttagcaagaagcctcggtgacaacgggaaagggccaggggccaggggccgcaggtccgagagcaggtctggggtggcgcatctggggtgggggggcgggatttccctagcagggcttccacgccacgttgggcactgcctcattagccacgcacatggggtcttactatggtcattacataggtgtcttgtccgtccgagtgatgcagttcctgggaggtgagggtggcgttaatgacagctgggtggcagcagggccycttcaaacaacacaagcaagatggggccaaagcagcacagcccatcgtctcggggtttcggggtcttgcttcctcaggaggtgggggcctctcgactgtaacacccagtggaaaacgttcaagacttacaggaaagccaccagaacatgatggggaggtttatttacaccactgtccccttccttttgtgaaactgcattgtttatattctcttttaacagagtcatggtaagaaaaggcaaattcttaactc

SEQ ID NO: 394935 - DNA, 648 bp, Homo sapiens
tacagtcagttataagaattacatttattcataactgttaaatctaagcgttgtacccttctacaatgtacacaccggcatctaagcattgcacttctacatacaacactcaactcatttaagatcacgattcttaaaaggagagatcaaaaaatatatgcagccaggaccagtggctcacacctgtaatcccagcacttcaggaggctgaggcaggagaatcatgtgaacctgggaggcagaggttgcagtgaactgagtttgtgccattgcactccagcgtgggtgacagtgcaagactccatctagaatacacacacacacacacacacacacacatatatatatgcaacgtgcaagatttttgccaggtcttctgatgctactgytagtgatcctccacaaaatcagttgcttctgtggtgtaaatatataaatacaaaagaagccttttatttcaaaatacaaatgataaataagatataacttacaaggcttttcttagaaatcatgagattatttgccattgcaataacttttctttcctcttcataatgtttgaaacattatagtagtaagtgtgaaatacgggaaacgtactgaactattcatctgggaacaaaatacttatcaataaattatcactaa

SEQ ID NO: 394936 - DNA, 610 bp, Homo sapiens
tctattacttggctattgttaaaaatgcccaaatggacataacagtgcaggtatcttttccagatattgattttatttcctttggctatatccccaaagaaatgggattgctgggtatagagtggttgccaggggctgggggaaggagagatgggcagatgttggtcaaagggtataaaatttcagttatgcaagatgaataagttctggagatctactgttcaacattgtgaatatagctaacaacactgcgatgtatacttgacatttgctgaggaggtagatcttattgttctcaccacacacatgaaagagggcagctctgcgagatgatgggaatgtgaatgagtttgattttgatggcaaartatacatatattagtcatcaaactgaacaccttagaaaccagattttacatcaatgaatggttgaatgaatagatctgcacttctggatttctttaaaaatgggaagacactccatagctttagcaacgctgggcacccacccattcccaccctcctgcaccgcctgcattccacagatacctgacatgggtccttagaggaacgtgatctatcctttttcacactttgcctcctttgtgta

SEQ ID NO: 394937 - DNA, 648 bp, Homo sapiens
tacagtcagttataagaattacatttattcataactgttaaatctaagcgttgtacccttctacaatgtacacaccggcatctaagcattgcacttctacatacaacactcaactcatttaagatcacgattcttaaaaggagagatcaaaaaatatatgcagccaggaccagtggctcacacctgtaatcccagcacttcaggaggctgaggcaggagaatcatgtgaacctgggaggcagaggttgcagtgaactgagtttgtgccattgcactccagcgtgggtgacagtgcaagactccatctagaatacacacacacacacacacacacacacatatatatatgcaacgtgcaagatttttgccaggtcttctgatgctactgctagtgatcctccacaaaatcagttgcttctgtggtgtaaatatataaatacaaaagaagccttttatttcaaaatacaaatgrtaaataagatataacttacaaggcttttcttagaaatcatgagattatttgccattgcaataacttttctttcctcttcataatgtttgaaacattatagtagtaagtgtgaaatacgggaaacgtactgaactattcatctgggaacaaaatacttatcaataaattatcactaa

SEQ ID NO: 394938 - DNA, 624 bp, Homo sapiens
ctattttgtcttcactagtggcttatttactgtatctgtattttaccttattttattttgtgatggctctagggttacagccagcatctttaacttagtatagcctacctttattttgtttatttatttatttatttatttttgagaaagagtcttgctctgtcacccaggctggagtgcagtggtgcgatctcggctcactgcaagctccgcctgctgagttcaagccattctccccctcagcctccccagtagctgggactacaggcactcaccaccatgcccagctaatttattttattttattttattttatttttatttttatttttatttttagtagagttgggtttcaccgtgttagccaggayggtctcgatctcctgacctcatgattcacccgcctcagcctcccaaattgctgggattacaggcactagccactgcacctggctgaggacatgtctttgaaaaggtagcataactcctatttctagctgctcttgcaactaaaagtggctgtgtacagaataactctattcctctatatccagtttggacaaaccaactttccattgatttaagcacactttcagaataaagcgtaatttcttatctcaggaa

SEQ ID NO: 394939 - DNA, 624 bp, Homo sapiens
ctattttgtcttcactagtggcttatttactgtatctgtattttaccttattttattttgtgatggctctagggttacagccagcatctttaacttagtatagcctacctttattttgtttatttatttatttatttatttttgagaaagagtcttgctctgtcacccaggctggagtgcagtggtgcgatctcggctcactgcaagctccgcctgctgagttcaagccattctccccctcagcctccccagtagctgggactacaggcactcaccaccatgcccagctaatttattttattttattttattttatttttatttttatttttatttttagtagagttgggtttcaccgtgttagccaggatrgtctcgatctcctgacctcatgattcacccgcctcagcctcccaaattgctgggattacaggcactagccactgcacctggctgaggacatgtctttgaaaaggtagcataactcctatttctagctgctcttgcaactaaaagtggctgtgtacagaataactctattcctctatatccagtttggacaaaccaactttccattgatttaagcacactttcagaataaagcgtaatttcttatctcaggaa

SEQ ID NO: 394940 - DNA, 624 bp, Homo sapiens
ctattttgtcttcactagtggcttatttactgtatctgtattttaccttattttattttgtgatggctctagggttacagccagcatctttaacttagtatagcctacctttattttgtttatttatttatttatttatttttgagaaagagtcttgctctgtcacccaggctggagtgcagtggtgcgatctcggctcactgcaagctccgcctgctgagttcaagccattctccccctcagcctccccagtagctgggactacaggcactcaccaccatgcccagctaatttattttattttattttattttatttttatttttatttttatttttagtagagttgggtttcaccgtgttagccaggatggtctcgatctcctgacctcatgatycacccgcctcagcctcccaaattgctgggattacaggcactagccactgcacctggctgaggacatgtctttgaaaaggtagcataactcctatttctagctgctcttgcaactaaaagtggctgtgtacagaataactctattcctctatatccagtttggacaaaccaactttccattgatttaagcacactttcagaataaagcgtaatttcttatctcaggaa

SEQ ID NO: 394941 - DNA, 624 bp, Homo sapiens
ctattttgtcttcactagtggcttatttactgtatctgtattttaccttattttattttgtgatggctctagggttacagccagcatctttaacttagtatagcctacctttattttgtttatttatttatttatttatttttgagaaagagtcttgctctgtcacccaggctggagtgcagtggtgcgatctcggctcactgcaagctccgcctgctgagttcaagccattctccccctcagcctccccagtagctgggactacaggcactcaccaccatgcccagctaatttattttattttattttattttatttttatttttatttttatttttagtagagttgggtttcaccgtgttagccaggatggtctcgatctcctgacctcatgattcrcccgcctcagcctcccaaattgctgggattacaggcactagccactgcacctggctgaggacatgtctttgaaaaggtagcataactcctatttctagctgctcttgcaactaaaagtggctgtgtacagaataactctattcctctatatccagtttggacaaaccaactttccattgatttaagcacactttcagaataaagcgtaatttcttatctcaggaa

SEQ ID NO: 394942 - DNA, 560 bp, Homo sapiens
actaagaataagtgttagattctttgggttaaattgycataaggactaaatttatttttttaaccaattccctaaagaatcaactgatatttctgacatagttttacagcatatgtatcacctctccatccattttgccttaattctatttctttttatccttcactggtgaggatgagaaaacctggatgcatatgggtatggttgatttgaaaagtactttttaaacatttggaagtttttcaaaaccaaaaacatatttgccaagtgatctttttcccctatattttaaatccatgtgcaacttaaaagaaacttagaccatatgctagttcagattcacttatattaaaatcatgaaaattttatttaatagctctttgacacacagggagtgtttaaattaagcttctctaaattttacatttctcaaaatacactctctttcctatctaccctcaactactcctcactactctccaagaaaatatcaggtttaattcaggagatgtaagttggatgttgtcagtccatcaacaatgattaagtaatttaaaaag

SEQ ID NO: 394943 - DNA, 475 bp, Homo sapiens
tggttcatatctttgaataggaaggttcgtttttcttaagatgtgagctttttctgtgtttatcacttttacataagccaaataaaaatagcaaagtcttagtgtctttaaattgcacatgatgtattttatcattgtgataaattgattttttgtaacagaatggaaaaagacttgcttttscagatatcaaaatgtgcgtgtgttatttccacaaattgtttactaacagctgaaaagacataagtgaacagaacagaataggaaatccagaaatacccaaatatatgtaagaatttagcacttgataatggtgatgtttcatattggtaaaacaaggtgaattattcataaattaaatgcatgctgtttggagaaaactacctagatttttatgtcacaaaaataagttcctggagtatagattaaaaattttaaagatacaaaaggagaaaagtaccagaagaaaacacaa

SEQ ID NO: 394944 - DNA, 539 bp, Homo sapiens
gaagcagcacttgagctaaaatcagggagaaaactaggcaaagacacagcattcaggaggaggtagaagctggcccatgaggatggtggtgtggagaggtgaaccaatacccaggtcttggatttattgttgagctgctgaattaaccagtgctggctctctcccaacctctgcacttcttgttttgcaaggtgtttttttttttttttttatttaaaagctagtatgagttgggatctgttgcttttctgagaccccatcmtgtgaggtagacaggggacctcactgtactctgggggagctaaagatggagaagagttttagagtgcctggagaagaggccctttaatagatcatttaagaagagggtgctaccactagactgcccagattcactttctggctttgtgaccttgggctctctgtgtctgttttccaacctgaacaatggaataatgatagtatctgcctctgcctgcaagaccctgtcctatcagaccaactaccttttcactagaactctcttcctgcactgtacc

SEQ ID NO: 394945 - DNA, 565 bp, Homo sapiens
agctggcccatgaggatggtggtgtggagaggtgaaccaatacccaggtcttggatttattgttgagctgctgaattaaccagtgctggctctctcccaacctctgcacttcttgttttgcaaggtgtttttttttttttttttatttaaaagctagtatgagttgggatctgttgcttttctgagaccccatcctgtgaggtagacaggggrcctcactgtactctgggggagctaaagatggagaagagttttagagtgcctggagaagaggccctttaatagatcatttaagaagagggtgctaccactagactgcccagattcactttctggctttgtgaccttgggctctctgtgtctgttttccaacctgaacaatggaataatgatagtatctgcctctgcctgcaagaccctgtcctatcagaccaactaccttttcactagaactctcttcctgcactgtaccccaactggaccctcattaacacttaaaatgagcatgtttcccttttctagattttgctcaagacatttccctcatcagagttaactttggtcc

SEQ ID NO: 394946 - DNA, 428 bp, Homo sapiens
gggcattaggacttaatctcaattgaagcttttcctccctcctttcaaacaaaagcacttctgaaggtggaaaatagtaaaagataacccttaactgcccttttgaaaatgtataagacttgggtaaacactgttttagctgttttaagaacttaaatgtggtacataaacagcatggaatactatgtagccataaaagaaagaacaagagcctgtcctttgcagggacatggatggtgttgaaggccattatccttagcaaactaacataggaagagaaaaccaaatactgcatggtctcacttataggtgrgagctaaatgaggagaacacacagacacctagagggaagcaacacacactggggcctatcagagggtggagggtgggaggaaggaaagaagcaggaaatagaactaacgggtact

SEQ ID NO: 394947 - DNA, 539 bp, Homo sapiens
gaagcagcacttgagctaaaatcagggagaaaactaggcaaagacacagcattcaggaggaggtagaagctggcccatgaggatggtggtgtggagaggtgaaccaatacccaggtcttggatttattgttgagctgctgaattaaccagtgctggctctctcccaacctctgcacttcttgttttgcaaggtgtttttttttttttttttatttaaaagctagtatgagttgggatctgttgcttttctgagaccccatcctgtgaggtagacaggggacctcactgtactctgggggagctaaagatggagaagagttttagagtgcctggagaagaggccctttaatagatcatttaagaagagggtgctaccrctagactgcccagattcactttctggctttgtgaccttgggctctctgtgtctgttttccaacctgaacaatggaataatgatagtatctgcctctgcctgcaagaccctgtcctatcagaccaactaccttttcactagaactctcttcctgcactgtacc

SEQ ID NO: 394948 - DNA, 565 bp, Homo sapiens
agctggcccatgaggatggtggtgtggagaggtgaaccaatacccaggtcttggatttattgttgagctgctgaattaaccagtgctggctctctcccaacctctgcacttcttgttttgcaaggtgtttttttttttttttttatttaaaagctagtatgagttgggatctgttgcttttctgagaccccatcctgtgaggtagacaggggacctcactgtactctgggggagctaaagatggagaagagttttagagtgcctggagaagaggccctttaatagatcatttaagaagagggtgctaccactagactgcccagattcactttctggctttgygaccttgggctctctgtgtctgttttccaacctgaacaatggaataatgatagtatctgcctctgcctgcaagaccctgtcctatcagaccaactaccttttcactagaactctcttcctgcactgtaccccaactggaccctcattaacacttaaaatgagcatgtttcccttttctagattttgctcaagacatttccctcatcagagttaactttggtcc

SEQ ID NO: 394949 - DNA, 539 bp, Homo sapiens
gaagcagcacttgagctaaaatcagggagaaaactaggcaaagacacagcattcaggaggaggtagaagctggcccatgaggatggtggtgtggagaggtgaaccaatacccaggtcttggatttattgttgagctgctgaattaaccagtgctggctctctcccaacctctgcacttcttgttttgcaaggtgtttttttttttttttttatttaaaagctagtatgagttgggatctgttgcttttctgagaccccatcctgtgaggtagacaggggacctcactgtactctgggggagctaaagatggagaagagttttagagtgcctggagaagaggccctttaatagatcatttaagaagagggtgctaccactagactgcccagattcactttctggctttgtgaccttgggctctctgtgtctgttttccaayctgaacaatggaataatgatagtatctgcctctgcctgcaagaccctgtcctatcagaccaactaccttttcactagaactctcttcctgcactgtacc

SEQ ID NO: 394950 - DNA, 584 bp, Homo sapiens
gttcttttccattttagagaatgacagttttcagtttgggagagggagttagtgggttgtaaactgcctagagatcaattttaggaggcctctgaggaaccagattggcagtgaatatgtggtaatgtagtgggaaacccttgagtagaaggaataacaagtaattaaccaacttagtatcctattctggtagaaatggccaattagagtctcaactctgctttcaattctagaatgtcttgatgggaaggtgggagataaggggcttataagtaaaaagatcaggttggattttgagtttactagaccttgttctactcttaccrgggaaaattttgtggtgttttcagcaaatgagtctctctcctactctttcctctttttggccaaatcctcaaatgataaagggaattgtttatgtgatgagagatgagactgaaataattgtctattgcactagcttccagctagagttgtgcattccagttacctcaggaaaatttttaaataatcttcaggtctaggttttcccctgaagattttgatagagtaagtctaataaagcctggatatgtatgtttaaa

SEQ ID NO: 394951 - DNA, 585 bp, Homo sapiens
catgtttctcaggctgatcttgaactcctgggctcaagtgaatcacccacctcaggctcccaaaatgctaagattacaggtgtgagccaccattcctggcctagtctgacttatctctgtcgttgggacattaaaataaatattattggcactatctatcagcttacagaataataccttttcctttctaccatcagttattcactgccattcagaaggtctttagaaatttgcagkgagtagtcttccaataagtagaggatggctctctcaggactttgtgtccctttgttcaatcattcaagtgcttaggtcagtaagtcgtttttaagagcagagttttctcagaattgtagcaaattctaaaccttttttgtcaattgaagctatattgtgggctatccagtatgtctcttaagtttgtagagctttggcttaatcaggatggcaggtttaaacactaaaaaccatggagttattaagaatacagataggaaatctcttagtttcagtaatcctatgaactgattatctatctagttaacaatctggaaaaattaaatacaaatagattttaaatgaata

SEQ ID NO: 394952 - DNA, 585 bp, Homo sapiens
catgtttctcaggctgatcttgaactcctgggctcaagtgaatcacccacctcaggctcccaaaatgctaagattacaggtgtgagccaccattcctggcctagtctgacttatctctgtcgttgggacattaaaataaatattattggcactatctatcagcttacagaataataccttttcctttctaccatcagttattcactgccattcagaaggtctttagaaatttgcagtgagtagtcttccaataagtagaggatggctctctcaggactttgtgtccctttgttcaatcattcaagtgcttaggtcagtaagtcgtttttaagagcagagttttctcagaattgtagcaaattctaaaccttttttgtcaattgaagctatattgtgggctatccagtatgtctcttaagtttgtagagctttggcttaatcaggatggcaggtttaaacactmaaaaccatggagttattaagaatacagataggaaatctcttagtttcagtaatcctatgaactgattatctatctagttaacaatctggaaaaattaaatacaaatagattttaaatgaata

SEQ ID NO: 394953 - DNA, 486 bp, Homo sapiens
atcaaattagcttttaaaataactttattacagttyctaaaggagaaattatctctgtaattttagaactgccctcatacttgctgtatgttgtggatcagcaagtatagtcaatcttctacttgagcaaaatgttgatgtatcttctcaagatctatctggacagacggccagagagtatgctgtttctagtcatcatcatgtgtaagtgtttacatgaaaaggctagttaatgctaaattgaggtttaaaataattataacaattgcatcttacatatcaggtgagatgtcatagtttggttcaggtagttttagagtggcagtgagttagtcccctgcatcagccagaaatcagacaaaaagcaagacaagttagaagtaccaatgggtgcaggattctttacctcaggacttttaagacctttatccttagagatcccaatattgttcatttcatccaagtataacacctatgcatggcata

SEQ ID NO: 394954 - DNA, 534 bp, Homo sapiens
gcatggacaggcaagatgtcaaattggtaaagtatatcaaattagcttttaaaataactttattacagtttctaaaggagaaattatctctgtaattytagaactgccctcatacttgctgtatgttgtggatcagcaagtatagtcaatcttctacttgagcaaaatgttgatgtatcttctcaagatctatctggacagacggccagagagtatgctgtttctagtcatcatcatgtgtaagtgtttacatgaaaaggctagttaatgctaaattgaggtttaaaataattataacaattgcatcttacatatcaggtgagatgtcatagtttggttcaggtagttttagagtggcagtgagttagtcccctgcatcagccagaaatcagacaaaaagcaagacaagttagaagtaccaatgggtgcaggattctttacctcaggacttttaagacctttatccttagagatcccaatattgttcatttcatccaagtataacacctatgcatggcataaaaaagagtatca

SEQ ID NO: 394955 - DNA, 578 bp, Homo sapiens
gtagcttctgctatgcaataccccactgagataagaggtttcctttttgtcccttccttttaaccttggtggtattttacaaagatgaactcttgagcacccaagatgcttatgtcttttagcgcatgtaaatgtttgattctgcatggacaggcaagatgtcaaattggtaaagtatatcaaattagcttttaaaataactttattacagtttctaaaggagaaattatctctgtaattttagaactgccctcatacttgctgtatgttgtggatcagcaagtatagtcaatcttctacttgagcaaaatgttgatgtatcttctcaagatctatctggacagacrgccagagagtatgctgtttctagtcatcatcatgtgtaagtgtttacatgaaaaggctagttaatgctaaattgaggtttaaaataattataacaattgcatcttacatatcaggtgagatgtcatagtttggttcaggtagttttagagtggcagtgagttagtcccctgcatcagccagaaatcagacaaaaagcaagacaagttagaagtaccaatgggtgcaggatt

SEQ ID NO: 394956 - DNA, 534 bp, Homo sapiens
gcatggacaggcaagatgtcaaattggtaaagtatatcaaattagcttttaaaataactttattacagtttctaaaggagaaattatctctgtaattttagaactgccctcatacttgctgtatgttgtggatcagcaagtatagtcaatcttctacttgagcaaaatgttgatgtatcttctcaagatctatctggacagacggccagagagtatgctgtttctagtcatcatcatgtgtaagtgtttacatgaaaaggctagttaatgctaaattgaggtttaaaataattataacaattgcatcttacatatcaggtgagatgtcatagtttggttcaggtagttttagaktggcagtgagttagtcccctgcatcagccagaaatcagacaaaaagcaagacaagttagaagtaccaatgggtgcaggattctttacctcaggacttttaagacctttatccttagagatcccaatattgttcatttcatccaagtataacacctatgcatggcataaaaaagagtatca

SEQ ID NO: 394957 - DNA, 534 bp, Homo sapiens
gcatggacaggcaagatgtcaaattggtaaagtatatcaaattagcttttaaaataactttattacagtttctaaaggagaaattatctctgtaattttagaactgccctcatacttgctgtatgttgtggatcagcaagtatagtcaatcttctacttgagcaaaatgttgatgtatcttctcaagatctatctggacagacggccagagagtatgctgtttctagtcatcatcatgtgtaagtgtttacatgaaaaggctagttaatgctaaattgaggtttaaaataattataacaattgcatcttacatatcaggtgagatgtcatagtttggttcaggtagttttagagtggcmgtgagttagtcccctgcatcagccagaaatcagacaaaaagcaagacaagttagaagtaccaatgggtgcaggattctttacctcaggacttttaagacctttatccttagagatcccaatattgttcatttcatccaagtataacacctatgcatggcataaaaaagagtatca

SEQ ID NO: 394958 - DNA, 262 bp, Homo sapiens
gggttcaaataatgtggcagaaagagatcagtgtttgtttcttcttctttgctaccagatctacacwgtgaggcacctttatatcctgtgtagaaccttaggcagtagaaagtcccatatgagccttccccaagcagtggctcccagctgtggttggccccttgagtgatctgatttacatgataatgaaaatcgtccaagctacttccatctctagctcaagattttaaaatattttcaaattgtacctcacaggaagcca

SEQ ID NO: 394959 - DNA, 639 bp, Homo sapiens
  misc_feature (1)...(639): n = A,T,C or G
ttagcacggcttctgcataaggaggcagcacaactctttgaagcattccatattttgtgcagtcactggaagatcatttcactatytgctggctagctctaaggaaaacagtgtgaatcaaagcaanaatgggtgccaccaaaatcatcgaaatgtgatttgtgctgcaaaaatagtcatggaagatggtctgtgagatgatttagagctgaataatgtgttcagtgcaaaatatattataagtatgtacgtcaaaaattagagaatgtcaatttgcagcttcttcatgaaaactgaaaaaaaataaaagtagagttttggtctcccatgtcagctggaattgaacatcaatataaagcattatcctaacaaacatctgctggctcagagtttgagtctgtagagaaggatcattgctccaagccaggtcttaacatccattggtttttctgcccttagcacaacaaattggtcaactccgtaatagtggacaatcacattatctactttaatgagagatttatgaaaaaatttagttacaaactatgacacagttgagatgccctgaatgataagccataaggagtaggacaactaagaagcaaaattaggacttaataacatttcctgaaaactaca

SEQ ID NO: 394960 - DNA, 639 bp, Homo sapiens
  misc_feature (1)...(639): n = A,T,C or G
ttagcacggcttctgcataaggaggcagcacaactctttgaagcattccatattttgtgcagtcactggaagatcatttcactatttgctggctagctctaaggaaaacagtgtgaatcaaagcaanaatgggtgccaccaaaatcatcgaaatgtgatttgtgctgcaaaaatagtcatggaagatggtctgtgagatgatttagagctgaataatgtgttcrgtgcaaaatatattataagtatgtacgtcaaaaattagagaatgtcaatttgcagcttcttcatgaaaactgaaaaaaaataaaagtagagttttggtctcccatgtcagctggaattgaacatcaatataaagcattatcctaacaaacatctgctggctcagagtttgagtctgtagagaaggatcattgctccaagccaggtcttaacatccattggtttttctgcccttagcacaacaaattggtcaactccgtaatagtggacaatcacattatctactttaatgagagatttatgaaaaaatttagttacaaactatgacacagttgagatgccctgaatgataagccataaggagtaggacaactaagaagcaaaattaggacttaataacatttcctgaaaactaca

SEQ ID NO: 394961 - DNA, 531 bp, Homo sapiens
  misc_feature (1)...(531): n = A,T,C or G
tgtgaatcaaagcaanaatgggtgccaccaaaatcatcgaaatgtgatttgtgctgcaaaaatagtcatggaagatggtctgtgagatgatttagagctgaataatgtgttcagtgcaaaatatattataagtatgyacgtcaaaaattagagaatgtcaatttgcagcttcttcatgaaaactgaaaaaaaataaaagtagagttttggtctcccatgtcagctggaattgaacatcaatataaagcattatcctaacaaacatctgctggctcagagtttgagtctgtagagaaggatcattgctccaagccaggtcttaacatccattggtttttctgcccttagcacaacaaattggtcaactccgtaatagtggacaatcacattatctactttaatgagagatttatgaaaaaatttagttacaaactatgacacagttgagatgccctgaatgataagccataaggagtaggacaactaagaagcaaaattaggacttaataacatttcctgaaaactacagca

SEQ ID NO: 394962 - DNA, 639 bp, Homo sapiens
  misc_feature (1)...(639): n = A,T,C or G
ttagcacggcttctgcataaggaggcagcacaactctttgaagcattccatattttgtgcagtcactggaagatcatttcactatttgctggctagctctaaggaaaacagtgtgaatcaaagcaanaatgggtgccaccaaaatcatcgaaatgtgatttgtgctgcaaaaatagtcatggaagatggtctgtgagatgatttagagctgaataatgtgttcagtgcaaaatatattataagtatgtaygtcaaaaattagagaatgtcaatttgcagcttcttcatgaaaactgaaaaaaaataaaagtagagttttggtctcccatgtcagctggaattgaacatcaatataaagcattatcctaacaaacatctgctggctcagagtttgagtctgtagagaaggatcattgctccaagccaggtcttaacatccattggtttttctgcccttagcacaacaaattggtcaactccgtaatagtggacaatcacattatctactttaatgagagatttatgaaaaaatttagttacaaactatgacacagttgagatgccctgaatgataagccataaggagtaggacaactaagaagcaaaattaggacttaataacatttcctgaaaactaca

SEQ ID NO: 394963 - DNA, 618 bp, Homo sapiens
gataaagctttgcaaatacaaaatccaaaaatcaaatgatagaaataagttcaaatatatcactttttcctaccaaacatagagggattaacctcatatattaaaatacaaaattatcaataactaagcagcactttcaaattaaagaaattaaaaattaaatattttataaaaattttaagtaaatattcacagaaagcaagctgctatcacaaaattaattttagtttaaataaaatttaaggaagaaataataaacaacaagattgacactgcacatggagggaccatagaaccgggtaggtgaaccaacgtcaagtccaatgctggcctcacctccaggacatacaaagaaactaacaggatagagcaggtctagagagggacactggaactcrtacttctgaatttaaatgggaaatagacaaagatgttatgtgtttataaaaggttttaaatcacaacaaatgctgaatgtacatcactttctagtatatgtaatacttaccaaatgggacccatattaggttgcaaaagaaattacaaaaacccggagatagggaccaaaggactgaaagaagtcagaacaaaaaacacgccccatatattttagggaaa

SEQ ID NO: 394964 - DNA, 454 bp, Homo sapiens
taacaactcactaaaaactagagtccagaatataatttctcactaaaaactacggagtccagaatatgataggacaatatatttaaagtgtagaaagaaaaaaaaaagccaacaaagaactctattttcagcaaaactgctcttcaaagatgaaggacatccttgaagacctttgaagacactaagagctatatagattaaaacaaatttaacagcttgtcactagtagacctggtatgcattaaatgacaaaggttatcttttgggttgaaatgaaatgacaaactaggtaataatgcaaggccatatgaaaaaatraagaatgccagtaaaaatgagtacatggcaaaatataaatgccactattaaagaatattttgtaacttttatctattgttcttttttacatgtaatttaaaatactaatgcataaaataattataaatttttgtta

SEQ ID NO: 394965 - DNA, 549 bp, Homo sapiens
aacacctaatcaaaaaccttgaaatgagcaaaaattgattgcattttcasattgttttcaagcaagcaatttaaccaccttgctattttatggcatgcttatttttttaaaaaaagttatgatgaaatatgcataacatcatactcaatacaaagtttctggtatatttataattatgcaactatagccatggtataactttaaaatatttccactatcaggactagacaatcattactgatttcccttttatggacattccattttatcacctttattgtttggtttggtttcgtttttgagatggagtctctgtcatgcaggcttgagtgcagtggtgcgatctcagctcactgcaacctctgcctgcctcgcgggttcaatagattctcctgactcagcttcctgagtacctgggattacaggcgcccaccactgcacctggctaattttgtttttagtagagacatggtttcaccatgttggccaggctgctctcgaactcctaacctcaggcaatccacctgcctcagcctcccaaagtgctag

SEQ ID NO: 394966 - DNA, 549 bp, Homo sapiens
aacacctaatcaaaaaccttgaaatgagcaaaaattgattgcattttcagattgttttcaagcaagcaatttaaccaccttgctattttatggcatgcttattttttwaaaaaaagttatgatgaaatatgcataacatcatactcaatacaaagtttctggtatatttataattatgcaactatagccatggtataactttaaaatatttccactatcaggactagacaatcattactgatttcccttttatggacattccattttatcacctttattgtttggtttggtttcgtttttgagatggagtctctgtcatgcaggcttgagtgcagtggtgcgatctcagctcactgcaacctctgcctgcctcgcgggttcaatagattctcctgactcagcttcctgagtacctgggattacaggcgcccaccactgcacctggctaattttgtttttagtagagacatggtttcaccatgttggccaggctgctctcgaactcctaacctcaggcaatccacctgcctcagcctcccaaagtgctag

SEQ ID NO: 394967 - DNA, 336 bp, Homo sapiens
ttaacttttctggcctcatttctctcacctgtaaaaatgcatatttcagatgtttgtaatattttacctgtggttgaaagagttaccagcccttccttgatcacccatggtaagacccatgagcctctgaatataattatagaaaacatttggagagggatggagagaracaagatcatgcctcctttgataatgtcaaattttcagtgcacgaagccatacatagtgcagttttctagcttccctttcacacatggcgttgaagaaagtaaattaagcaactcagctaacactgggaatgcagcagaagtcatcgagttcagtgctgggagacag

SEQ ID NO: 394968 - DNA, 489 bp, Homo sapiens
ccccactctgctcagcctctgataaaccaccattctattcttaacttctatgagtgcacagttttggatttcacatataagtgatacyatgagatatttgtctttctgtgtctggcttattttacttagcataatgtcctctaaattcatccatgtttttgcaaatgacagattttcattcatttataaagataagtagtatttttgtatgcatcctacatatacttttaactttccacagctttattgagatataatttatacattgtgtaattcactcatttaaagtacaaacttcaaattcttttagtatattaactggatggacaaataatcatcataatataattttagaacattttattttccttaaaagagacttgcgcccattagcaatctttccccattttctccagtcttttttaaacccctcctagtctaggcaaccactcgtctactttctgactatgaatttgcctattctggaca

SEQ ID NO: 394969 - DNA, 598 bp, Homo sapiens
atttcacacttaaatttgatcatatatacagaactataaccgtataattttaagatgtaattatcatgtcattagtatatcactgaaatttttgtagtttgcttgattccagctgtttgactgaataaaacagaattttccaaaattcaaaaagggccctccttcattttgtgcttttattcccaaaaactcttcagaatcttatatatgaatttaccccatttgactcgtgggaacacaaaaataaaacgacatagacacaaaatgtgtcttctgtctttaccacctagattttacattaaacactcagatgtagaggatgagacactggggggcttcaggaatagaaaggaagatggcccttttctgcactaagatattctcctcycccactgcctttgatcgttcttttttcatttggttcctggatatcaaaaacatgatggtgctcactgaaacatgaaaaccaaagtttgccacaacacaaggagcagagtgaaactgctgaggtgcaagcatggaattccagaaaattagatgctccccaaatttcacattcaatagctatacaattttccagctggaaattacaaagaat

SEQ ID NO: 394970 - DNA, 556 bp, Homo sapiens
ttgatcatatatacagaactataaccgtataattttaagatgtaattatcatgtcattagtatatcactgaaatttttgtagtttgcttgattccagctgtttgactgaataaaacagaattttccaaaattcaaaaagggccctccttcattttgtgcttttattcccaaaaactcttcagaatcttatatatgaatttaccccatttgactcgtgggaacacaaaaataaaacgacatagacacaaaatgtgtcttctgtctttaccacctagattttacattaaacactcagatgtagaggatgagacactggggggcttcaggaatagaaaggaagatggcccttttctgcactaagatattctcctctcccactgcctttgatcgttcttttttcatttggttcctggatatcaaaaacatgatggtgctcactgaaacatgaaaaccaaagtttgccacaacacaaggagcagagtgaaactgctgaggtgcaagcatggaattccagaaaattagatgctycccaaatttcacattcaatagctataca

SEQ ID NO: 394971 - DNA, 595 bp, Homo sapiens
taactttgtcaccatttgtttggactaaacttaatttgttatgtgttaaatctaccaaaaatgaattagcagatgatttgtagtgttccaagggcttcctcacttgaaaagagtatatctcatgaaaccctaactagtgagcccctatagtgcactgaagtgctttttaaaaagattcctaattggattgtaggcacgctttaaattattaggagctgaaatcaacaccaaasaggaagaaatgcaaattcttaaattttaattgaaattatatgctgtaatatgatagtgttatgtatctagatgatctgcttaagtccagttctaatatattctaaggtgtactaattacagtggataaaaattttttaataatctgtactgattttctgcaactgaaataaggtagaaggttattgtgtttgtgcactaacaccaaatgtcccattctgcaagatatgattcttgtaataggcagttgggttgcttttatgacctggttccctccctgaacagaaatgctgaggtcagtgagagaccacaaggcagaatatgtctttaaccttggtatctgtgactgacaatataaaactgc

SEQ ID NO: 394972 - DNA, 565 bp, Homo sapiens
aatgtcccattctgcaagatatgattcttgtaataggcagttgggttgcttttatgacctggttccctccctgaacagaaatgctgaggtcagtgagagaccacaaggcagaatatgtctttaaccttggtatctgtgactgacaatataaaactgcagattttcaatcactggccgtgattattctttaaccatgaatccagctcagggaccttcagtgttacattgttcacagttctattgcttaataatataatccaataattgatggtactttatcatgttagggtgttgtaaaaataaaagaacaaacaaaggtctggaatatgtttttgcctctattccaaaaggaaagattagctataagctaatcaaaaaggcagataagaatattttaaataagaataccataaaataagagtattttaaattttatagtggttacgtttttaagctaaatatcaaatgtyaagttagaatttattaattcttctgttaatgagattgctgaatttattaaaataaattttaagaatctattaaaaaattcttaaaaaaagaatct

SEQ ID NO: 394973 - DNA, 599 bp, Homo sapiens
tgtttagtctttcatgaaatagttacttaggaaataattctccaaaacttcaacaaaccacttggggagacacctgatgtgattcactcacaaattcatccacccaacataaatgaacaaaaccaccagaaacacaacttyaaaatacagtagaaacatataaggtaactcagtatgttgttcacttcctaatagtgaagcagtaaatgtaaagaaaaggaaatttagttttaaagagaaacaagttttcctgcacttagctagtctgactctaaggatagtaacaagcaggcccaggaaaggtcatggtgaccctgtctgagaagccagagcccacaggtatgggctccagacatcccagagcaaggttaagaaaacaaattcctttaccatctcccctccccctcagcatttattcatagctatttttacaaatgcatatattttgcaaattcttgttttccctcaatgcagctgcaaggtcgcaagctatgcagtggttgcaaaactgtcactatatgattaactgcctttgttctgcttctataagtttgcctatataagccaagccctgtctttgttcagggctcagctttttg

SEQ ID NO: 394974 - DNA, 522 bp, Homo sapiens
gtctttcatgaaatagttacttaggaaataattctccaaaacttcaacaaaccacttggggagacacctgatgtgattcactcacaaattcatccacccaacataaatgaacaaaaccaccagaaacacaactttaaaatacagtagaaacatataasgtaactcagtatgttgttcacttcctaatagtgaagcagtaaatgtaaagaaaaggaaatttagttttaaagagaaacaagttttcctgcacttagctagtctgactctaaggatagtaacaagcaggcccaggaaaggtcatggtgaccctgtctgagaagccagagcccacaggtatgggctccagacatcccagagcaaggttaagaaaacaaattcctttaccatctcccctccccctcagcatttattcatagctatttttacaaatgcatatattttgcaaattcttgttttccctcaatgcagctgcaaggtcgcaagctatgcagtggttgcaaaactgtcactatatgattaact

SEQ ID NO: 394975 - DNA, 522 bp, Homo sapiens
gtctttcatgaaatagttacttaggaaataattctccaaaacttcaacaaaccacttggggagacacctgatgtgattcactcacaaattcatccacccaacataaatgaacaaaaccaccagaaacacaactttaaaatacagtagaaacatataagrtaactcagtatgttgttcacttcctaatagtgaagcagtaaatgtaaagaaaaggaaatttagttttaaagagaaacaagttttcctgcacttagctagtctgactctaaggatagtaacaagcaggcccaggaaaggtcatggtgaccctgtctgagaagccagagcccacaggtatgggctccagacatcccagagcaaggttaagaaaacaaattcctttaccatctcccctccccctcagcatttattcatagctatttttacaaatgcatatattttgcaaattcttgttttccctcaatgcagctgcaaggtcgcaagctatgcagtggttgcaaaactgtcactatatgattaact

SEQ ID NO: 394976 - DNA, 522 bp, Homo sapiens
gtctttcatgaaatagttacttaggaaataattctccaaaacttcaacaaaccacttggggagacacctgatgtgattcactcacaaattcatccacccaacataaatgaacaaaaccaccagaaacacaactttaaaatacagtagaaacatataaggtaactcagtatgttgttcacttcctaatagtgaagcagtaaatgtaaagaaaaggaaatttagttttaaagagaaacaagttttcctgcacttagctagtctgactctaaggatagtaacaagcaggccsaggaaaggtcatggtgaccctgtctgagaagccagagcccacaggtatgggctccagacatcccagagcaaggttaagaaaacaaattcctttaccatctcccctccccctcagcatttattcatagctatttttacaaatgcatatattttgcaaattcttgttttccctcaatgcagctgcaaggtcgcaagctatgcagtggttgcaaaactgtcactatatgattaact

SEQ ID NO: 394977 - DNA, 599 bp, Homo sapiens
tgtttagtctttcatgaaatagttacttaggaaataattctccaaaacttcaacaaaccacttggggagacacctgatgtgattcactcacaaattcatccacccaacataaatgaacaaaaccaccagaaacacaactttaaaatacagtagaaacatataaggtaactcagtatgttgttcacttcctaatagtgaagcagtaaatgtaaagaaaaggaaatttagttttaaagagaaacaagttttcctgcacttagctagtctgactctaaggatagtaacaagcaggcccaggaaaggtcatggtgaccctgtctgagaagccagagcccacaggtatgggctccagacatcccagagcaaggttaagaaaacaaattcctttaccatctcccctccccctcagcatttattcatagctatttttacaaatgcatatattttgcaaattcttgttttccytcaatgcagctgcaaggtcgcaagctatgcagtggttgcaaaactgtcactatatgattaactgcctttgttctgcttctataagtttgcctatataagccaagccctgtctttgttcagggctcagctttttg

SEQ ID NO: 394978 - DNA, 599 bp, Homo sapiens
tgtttagtctttcatgaaatagttacttaggaaataattctccaaaacttcaacaaaccacttggggagacacctgatgtgattcactcacaaattcatccacccaacataaatgaacaaaaccaccagaaacacaactttaaaatacagtagaaacatataaggtaactcagtatgttgttcacttcctaatagtgaagcagtaaatgtaaagaaaaggaaatttagttttaaagagaaacaagttttcctgcacttagctagtctgactctaaggatagtaacaagcaggcccaggaaaggtcatggtgaccctgtctgagaagccagagcccacaggtatgggctccagacatcccagagcaaggttaagaaaacaaattcctttaccatctcccctccccctcagcatttattcatagctatttttacaaatgcatatattttgcaaattcttgttttccctcaatgcagctgcaaggtcrcaagctatgcagtggttgcaaaactgtcactatatgattaactgcctttgttctgcttctataagtttgcctatataagccaagccctgtctttgttcagggctcagctttttg

SEQ ID NO: 394979 - DNA, 484 bp, Homo sapiens
ctttgttctgcttctataagtttgcctatataagccaagccctgtctttgttcagggctcagctttttgatgcaaatccgctgagctggtgtgcacctaaacaaaatcctcttgtttgacccactgggtctctcctgcctcctsttttctgcaaaaatagtaccttacaaacgatttccaaaattactactgacacctttattagtgtacaatgtcttcttaacatctaaaatgtttccatccactattatgacaaatttattttcatttttcttttttttttgttttagctggggtcttgctctgtcaccaggctggagtgcagtggcacaatctcagctcactgcaacctctgactccctggttcaaatgattctcctgtctcagtctcctgagaagctgtgattacaggcacacaccatcatgcccagctaatttttgtatttttagtagagatggggtttcaccattggccaggatggtc

SEQ ID NO: 394980 - DNA, 522 bp, Homo sapiens
ttttaaaacaatgctatgggaagtcttccttgattctgcagatctttccccagataaacaggtaactccttccttgaggttgccttaggacctcactgatttttctactgcacctttaccacctgaactgtacactattcctccacatgtctgtcccctctgctccaagactgcagaggacagtcttgcacatcatctttgtaaaaacagtctttattttactcagaaatttcttattgagtcctgctacatacatgctaggtgttagggtttaaaaagaatgaaaataaagcctgtcagggatsgcttttctagaacacctgcccaagcagagacttaaatattgaggctagctagattaaaagtggtagagggcaagaaagggtgacagcatgccacacagcagcaagagcaggagcgaggcctgaaagagtgaaagtatttgcctgcaatacaaggaagagtgagtagggcattaagagccactcagtaatgccagagaaagggcacacagggaaaagg

SEQ ID NO: 394981 - DNA, 549 bp, Homo sapiens
tccaaactttatttcaccatgggcaggtgaaaaccttagaatacattgatactagtccaaggatgtgtgacatggaaactatagmtgactactgcaaaagcttcctttgtctcctggtttctttacatggttatcttccatcaatcccagcaaactataggccacaggacaaatccaatctgccttttggctttgtaaataaagttttataggagctcagtcatgcctgtttgcttacatataatcatggtggctttcacactacaacaacagacaacagcctggttaagtagatatgacagagaccacatagtctaaaatatttcccacctggtcctttacagaaaaagcttgctaacccattttacaccataagcagaatatgccttaatattcaaatttaatcttgtaactcccctgctcaaatttctccaatgagcccctgcagcacacattgttggctcctatcaatagccattccttattctttcttgcagaagaaacacaagtctattgggatatttattatcccaatccccctcctcagcc

SEQ ID NO: 394982 - DNA, 507 bp, Homo sapiens
cctgggcaacatagcaagactccatctctacaaataataagatattaaccaggtgtggtggtgcgtacctgtggtcccagctacctgggaggctgaggtgggaggtttgctcaaggctgaagtgaactgtgaatgcaccactgcattccagcctaggctacagaatgagacttgtctataaataaagaaataagtaaaaatataaattaaaagaagtaaaaaaaataagtaaatagaaatacatataaagatgagtacatcaaaacaaacaatttttaaatttaacatcactgaggrcatcctggccatttttctatttttctaggaaaatgtttttattactcctttttttctaagatcctacctttccttacaaagcagtcttttgtgcttttgaagattatgtgatctaatatatatagtatacttaggacagtatctggtacttgtaaagtgtttaataaatgttagatcttatttttgttctaaattcccactgatgctttt

SEQ ID NO: 394983 - DNA, 578 bp, Homo sapiens
aatgatataaactgatttgcttcaaaggaatgagagagactttgatttgatcagggtggtgacatcagaagcaaaaagaagtgcagaaatcaatagtgrgttctcacagaaaagaacattggaaatagaaatttacagtcagccaaactatcactgaaaccaacctaagacagaatttattcagaagtatatactactgactacctgtaaactctgtgaggggaaaaaaaaccaaaaaaacaaaactggaggatgcactccataaagaagagaaaatgaattcaaagaaatgcattaaaaatactaatcaggctgggtgtggtggctcacacctgtaatcccagcactttgggaggccgaggtgggtggatcacctgaggtcaggagtttgagaccagcgtggccaacatggtgaaactctgtctatactaaaaatacaaaaattagccaggtgtggtggtgtgcacctgcaatcccagctactcgggagactgaggcaggagaatcacttgaaccgaggaggcagaggttatagtgagctgagattgtgccactgcactcaagcctgggccacagag

SEQ ID NO: 394984 - DNA, 560 bp, Homo sapiens
aaatagaaatttacagtcagccaaactatcactgaaaccaacctaagacagaatttattcagaagtatatactactgactacctgtaaactctgtgaggggaaaaaaaaccaaaaaaacaaaactggaggatgcactccataaagaagagaaaatgaattcaaagaaatgcattaaaaatactaatcaggctgggtgtggtggctcacacctgtaatcccagcactttggraggccgaggtgggtggatcacctgaggtcaggagtttgagaccagcgtggccaacatggtgaaactctgtctatactaaaaatacaaaaattagccaggtgtggtggtgtgcacctgcaatcccagctactcgggagactgaggcaggagaatcacttgaaccgaggaggcagaggttatagtgagctgagattgtgccactgcactcaagcctgggccacagagtgagactgtcttaaaaaaataataataataatcaatagtcggcaaaaacaaagaagtaaaaataatagtaaaatttgattaaatctgaattggtgcaaatattt

SEQ ID NO: 394985 - DNA, 515 bp, Homo sapiens
aacctaagacagaatttattcagaagtatatactactgactacctgtaaactctgtgaggggaaaaaaaaccaaaaaaacaaaactggaggatgcactccataaagaagagaaaatgaattcaaagaaatgcattaaaaatactaatcaggctgggtgtggtggctcacacctgtaatcccagcactttgggaggccgaggtgggtggatcacctgaggtcaggagtttgagaccagcgtggccaacatggtgaaactcygtctatactaaaaatacaaaaattagccaggtgtggtggtgtgcacctgcaatcccagctactcgggagactgaggcaggagaatcacttgaaccgaggaggcagaggttatagtgagctgagattgtgccactgcactcaagcctgggccacagagtgagactgtcttaaaaaaataataataataatcaatagtcggcaaaaacaaagaagtaaaaataatagtaaaatttgattaaatctgaattggtgcaa

SEQ ID NO: 394986 - DNA, 560 bp, Homo sapiens
aaatagaaatttacagtcagccaaactatcactgaaaccaacctaagacagaatttattcagaagtatatactactgactacctgtaaactctgtgaggggaaaaaaaaccaaaaaaacaaaactggaggatgcactccataaagaagagaaaatgaattcaaagaaatgcattaaaaatactaatcaggctgggtgtggtggctcacacctgtaatcccagcactttgggaggccgaggtgggtggatcacctgaggtcaggagtttgagaccagcgtggccaacatggtgaaactctgtctatactaaaaatacaaaaattagccaggtgtggtggtgtgcacctgcaatcccagctactygggagactgaggcaggagaatcacttgaaccgaggaggcagaggttatagtgagctgagattgtgccactgcactcaagcctgggccacagagtgagactgtcttaaaaaaataataataataatcaatagtcggcaaaaacaaagaagtaaaaataatagtaaaatttgattaaatctgaattggtgcaaatattt

SEQ ID NO: 394987 - DNA, 569 bp, Homo sapiens
taatagtgttttgtacagttaagctaacagctagtcagttacatttggattttctacctacacagtcacctcttatggaggtaatgacagttgcttttttgttttcattgaattattttgcttttattcatttttaaawtttctcctgtgtactggtaggacttgcagtgagcagagggatgactgaatagaatgagaagcagatttgccctaagcagttcccaacttgacttttccctttagcttagtgattttggggtccaaagatttgttttcctttcacacagcattgtttacattagccaagatttagaagcaacatgtcaacagatgaatggataaagcaaatgtacatacacacccccaggagtacttttcacttataaagaataagatcctgttatttgcaacaacatggatggaactggagatcatatggtaagacaaataagccaggcacataaaggcaaaattttttcttacaagaactttggctattctgagtctttcgtggttctgtctgcattataggattgtttttcctgtttctgtgaagagtatcgatgttt

SEQ ID NO: 394988 - DNA, 525 bp, Homo sapiens
ggttaatatagacactaaaaatactgattcttattcatgaacataaaatacatatttttgtctttttaaatttcttgcatcaatgttttatagtattcattgtagagatctttaacgtctttggttaattcctaggtatttaattttaatttgaggctatcgtaaatgggaccactctcttgatttctttttcacattgttcactgttggcatatagaaatgctgctaactttttaatcctatatcttgactaaaattgtgagttctmatagtgttttagtgaattaggattttccaaatataagaccacatcatctgcaaacaaacataatttgacttcttcctttccaatttgcttgccctttattttttctcttgctaattgctctagctgccatgtgttgaataacagtagtgaaagtgtgcatctctgtcatgttgtcaatcttagaggaaaagcttttcatttttccccatttagtatcatactatatgtgatatctatatatctatatataactttta

SEQ ID NO: 394989 - DNA, 535 bp, Homo sapiens
gttcactgttggcatatagaaatgctgctaactttttaatcctatatcttgactaaaattgtgagttctaatagtgttttagtgaattaggattttccaaatataagaccacatcatctgcaaacaaacataatttgacttcttcctttccaatttgcttgccctttattttttctcttgctaattgctctagctgccatgtgttgaataacagtagtgaaagtgtgcatctctgtcatgttgtcaatcttagaggaaaagcttttcatttttccccatttagtatcatactatatgtgatatmtatatatctatatataacttttatatgctgaggtatgtttctttttttattatactttaagttttagggtacatgtgcacaatgtgcaggttagttacatatgtatacatgtggtatgctggtgtgctgcacccattaactcgtcatttagcattaggtatatctcctaaagctatccctcccccctccccccaccccacaacagtccccagagtgtgatgttccccttcc

SEQ ID NO: 394990 - DNA, 530 bp, Homo sapiens
tccctcacccgcctcccagccttccccctcaagtccccaaagtcttttacattattcttatgcctttgcatcctcatagattagctcccacttatatgtaaraacatacgatatctagttttccatttctgagttatttcacttagaataatgaccttcggctccatccaagttgctgcaaatgacattattttgttaagtgttcccatttcaccacatccaatgccaacatctgttgttttcttgactttttttggcctacaaaaaatggccatttttgtaggagttatttgatatctaactgtggttttcatttgtatttccttgattattgatgttgagcatttttaggttgttattagctgtttgtatatcttcttttgaaaaaatatatattcattttctttgcctactttttgatggaattattattttgctaatttctttgagttccttatagattctggatactagctttttgtcagatctgtagtttgcaaatatattctgctactctgtgggttgtctgt

SEQ ID NO: 394991 - DNA, 481 bp, Homo sapiens
tgactttttttggcctacaaaaaatggccatttttgtaggagttatttgatatctaactgtggttttcatttgtatttccttgattattgatgttgagcatttttaggttgttattagctgtttgtatatcttcttttgaaaaaatatatattcattttctttgcctactttttgatggaattattattttgctaatttctttgagttccttatagattctggatactagctttttgtcagatstgtagtttgcaaatatattctgctactctgtgggttgtctgtgtactctgctgcttatttcctttgctgtgcagaagctttttagttaaattaggtcccatttatttatgtttgtttttgttgcatttgcttttggggtcttagtcatgaattctttgcctaaatcaatgtcgagaagagttttttttcttatgttatcatttagaattcgtatgctttcaggccttagattgaaat

SEQ ID NO: 394992 - DNA, 508 bp, Homo sapiens
attgacccactggcctttcaggagcatattgtttaaattctatgtgtttgtatagtttcaaaaatttgtcttgttattgatttctaggtttttttattgtagtcacaaaagatgcttgatattattttaatttttaaaatgtgttaagacttgttttgtgacctaacatayggtctatccatgagaatgattcatgcactgcagagcaaaatgtgtattctgaagccattggataaaatgttctgtaaatatccattgtgtccatttggtttatagtgcagattaggcctgagatttctttgttggttttctgtctggaagatttatccaatgctgaaagtgtgatgttgcattctccaggtattattatattggagcctgtctctctctttagctctaataatactggcttaatatatctgagtacttcagtgttggatgcatatgtatgtaacattcttacatcctcatgctgaattaaactcattattattatagagtgaccatc

SEQ ID NO: 394993 - DNA, 542 bp, Homo sapiens
gcccaatattgtggttattcactatttattcttttactagtaaacataattgtaattatggtaaactgagtcagaggaattgyaaactttactggtattttattttattttgagatggagtcttgctgtatcccccaggctggagttcagtggtatgatctcagttcactgcaacctccgccttctggttcatgcatttctcctccctcagccgcccaaggagctgggattacgggggcatgccaccacgcctggctaatatttgtatttttaatagagatggggtttcaccctgttggtcaggctggtctcaaactctgtacctcaggtgatccacccacttcggcctttcaaagtgctgggattacaggcatgagccactgcgcctggccactagtattttatttaaaaaaaaattagggtggcacatttaatggacttacaaattcttttcaagggattatgaacctttggtatttgaaataaagatacagagttggaattttttgcttcctatagtaagaggaatactggtcaggcac

SEQ ID NO: 394994 - DNA, 542 bp, Homo sapiens
gcccaatattgtggttattcactatttattcttttactagtaaacataattgtaattatggtaaactgagtcagaggaattgcaaactttactggtattttattttattttgagatggagtcttgctgtatcccccaggctggagttcagtggtatgatctcagttcactgcaacctccgccttctggttcatgcatttctcctccctcagccgcccaaggagctgggattacgggggcatgccaccacgcctggctaatatttgtatttttaatagagatggggtttcaccctgttggtcaggctggtctcaaactctgtacctcaggtgatccacccacttcggcctttcaaagtgctgggattacaggcatgagccactgygcctggccactagtattttatttaaaaaaaaattagggtggcacatttaatggacttacaaattcttttcaagggattatgaacctttggtatttgaaataaagatacagagttggaattttttgcttcctatagtaagaggaatactggtcaggcac

SEQ ID NO: 394995 - DNA, 522 bp, Homo sapiens
aattgtaattcccaggtgttgagagaaagaccagctgggaggtattggatcatggggtcggtttcctccatgctgttctcttgatagtgagttctcacaagagcagataattctataatgggctctttccctttcacttctctctctcctgccaccttttgaagaagttgcctgcttcccctttaccttctgccatgattgtaagtttcctgaggccttcccagccatgtgtaactgtgaatcaattaagcctctttcctttatgaattacccagtctcaggtatacatacatacatacatayatatatatatatatatatatatatatatatatatatatatatatataattttctttattccactcatcagttgatggacactggctgataacatatctttgcatatgtgaattgtgctgcagtgaacatatgtatataggtgtctttttgagagtatgatttcttttattttgggtaggtatccagaaatgagaatgctggatagaatggtaagatcta

SEQ ID NO: 394996 - DNA, 562 bp, Homo sapiens
cttctggtcttaggtttaggccattaatccatcttgaattaattttttacatggtgagagatagagatccaattttattcttctatatgtgactatctttttttcccagcaccatttgttgaataaygtgtactttctccagtgtatgtttttgtatcctttctcagagatcatttggttgtaagtggccttttttctgagttgtctattctgttccattgatctgtgtatctacttttataccagtaccatgatgtttgttactgtggccttagagttgaagtcaggtaatttgatgccaacatgtttgttcctttttcttggtatgtctgttgctattcaggctcttttgtggttctacatgaatgacagctttttaaaataactctgtgaagaatgacattggtactttggtagaaactgtattgactctgtagactactttgggcactatggcattttcacaatatcaatgctttcagtccaggaacatagaatgtatgttcatttatttgtatgatctatgattttcttcagtggcgttttccagttatcctttgat

SEQ ID NO: 394997 - DNA, 562 bp, Homo sapiens
cttctggtcttaggtttaggccattaatccatcttgaattaattttttacatggtgagagatagagatccaattttattcttctatatgtgactatctttttttcccagcaccatttgttgaataatgtgtactttctcmagtgtatgtttttgtatcctttctcagagatcatttggttgtaagtggccttttttctgagttgtctattctgttccattgatctgtgtatctacttttataccagtaccatgatgtttgttactgtggccttagagttgaagtcaggtaatttgatgccaacatgtttgttcctttttcttggtatgtctgttgctattcaggctcttttgtggttctacatgaatgacagctttttaaaataactctgtgaagaatgacattggtactttggtagaaactgtattgactctgtagactactttgggcactatggcattttcacaatatcaatgctttcagtccaggaacatagaatgtatgttcatttatttgtatgatctatgattttcttcagtggcgttttccagttatcctttgat

SEQ ID NO: 394998 - DNA, 559 bp, Homo sapiens
ttcttcttaataagcatgaaataaaagtgaaattgaaagcgattaatgatcagtttatttcacatctctctctcatacacagataaaattaattcaaagttctatgttaaaaacacaatawtagaccctgtcttgttccaaagggaatttctaatttgtctataaattacagaggaatcaagaatataagtggaaactgtttccaaaaaataaacataaaaagtttgagttaacacaggggtttccaatccccaggccacagaccagtaccagtccctggcctgttaggacctgggccacacagcaagaagttagtggtagatgagcaagtgaagcttcatctgtttacagccactctctgtcacattaccacctgagctcctcctcctgtcagatcagcggtgacattagattctcataagagtgtgacttgaaccctattgcaagctgctcatgcatgggatctaggttgttcactcctgatgagaatctaatgctttatgatctgtcaccatctcctgtcacccctagatgagaccatctagttgcaggaaaataa

SEQ ID NO: 394999 - DNA, 559 bp, Homo sapiens
ttcttcttaataagcatgaaataaaagtgaaattgaaagcgattaatgatcagtttatttcacatctctctctcatacacagataaaattaattcaaagttctatgttaaaaacacaatattagaccctgtcttgttccaaagggaatttctaatttgtctataaattacagaggaatmaagaatataagtggaaactgtttccaaaaaataaacataaaaagtttgagttaacacaggggtttccaatccccaggccacagaccagtaccagtccctggcctgttaggacctgggccacacagcaagaagttagtggtagatgagcaagtgaagcttcatctgtttacagccactctctgtcacattaccacctgagctcctcctcctgtcagatcagcggtgacattagattctcataagagtgtgacttgaaccctattgcaagctgctcatgcatgggatctaggttgttcactcctgatgagaatctaatgctttatgatctgtcaccatctcctgtcacccctagatgagaccatctagttgcaggaaaataa

SEQ ID NO: 395000 - DNA, 559 bp, Homo sapiens
ttcttcttaataagcatgaaataaaagtgaaattgaaagcgattaatgatcagtttatttcacatctctctctcatacacagataaaattaattcaaagttctatgttaaaaacacaatattagaccctgtcttgttccaaagggaatttctaatttgtctataaattacagaggaatcaagaatataagtggaaactgtttccaaaaaataaacataaaaagtttgagttaacacaggggtttccaatccccaggccacagaccagtaccagtccctggcctgttaggacctgggccacacagcaagaagttagtggtagatgagcaagtgaagcttcatctgtttacagccactctctgtcacattaccacctgagctsctcctcctgtcagatcagcggtgacattagattctcataagagtgtgacttgaaccctattgcaagctgctcatgcatgggatctaggttgttcactcctgatgagaatctaatgctttatgatctgtcaccatctcctgtcacccctagatgagaccatctagttgcaggaaaataa

SEQ ID NO: 395001 - DNA, 557 bp, Homo sapiens
caaacattctatcatgccacttctatgagttacttagtgaaatttgtagagacagaaagtagaatggtgattgctagggggaaggagagggagaggaatgggaagttggtgttcaatgagtaaagcattttagttggagaagaagacaagttttggaggtctatggtggtgactgttgcacaatagtgcaaatatacttaatgccacaaaactgtgcacttaaagtgattaaaaaggtaaattttatgttgtgtatatctttccagaattataaacctgccatcacagtatagaaatagaatatattatatagcgttaggtgatgatattttacacatttgcacataattagaatttcaaagccttaatttcagatamggtagtctaagacataacaatattgatgtaagaaagccgtaagaaatgtttattttcaatcagatttactaaaaaaatttattgaactggtcaattttctttgccaatattactgtattcttatttctagtaatagaggtgtgagaaagcatcaaggaaactaaaattgcattctcata

SEQ ID NO: 395002 - DNA, 557 bp, Homo sapiens
caaacattctatcatgccacttctatgagttacttagtgaaatttgtagagacagaaagtagaatggtgattgctagggggaaggagagggagaggaatgggaagttggtgttcaatgagtaaagcattttagttggagaagaagacaagttttggaggtctatggtggtgactgttgcacaatagtgcaaatatacttaatgccacaaaactgtgcacttaaagtgattaaaaaggtaaattttatgttgtgtatatctttccagaattataaacctgccatcacagtatagaaatagaatatattatatagcgttaggtgatgatattttacacatttgcacataattagaatttcaaagccttaatttcagatacggtagtctaagacataacaatattgatgtaagaaagccgtaagaaatgtttattttcaatcagatttactaaaaaawtttattgaactggtcaattttctttgccaatattactgtattcttatttctagtaatagaggtgtgagaaagcatcaaggaaactaaaattgcattctcata

SEQ ID NO: 395003 - DNA, 585 bp, Homo sapiens
attcagtaaagttgcaggatacaaaatcagcatacaaaatcagtagcagttttacatgccagtagtgaacaatctgaaaaagaaatcragaaagcaatcccatttatggtagctataaaataaataaaatgcttaggaataaatgtaaccaaagaggtgaaagatttccacaatgaaaactgtaaaacattgatgaaaaaaattgaagaggacaccaaaaattttttttaaaatcctatgttcatagattgcaacaattaatattgctaaaatatccataccacccaaagcaatctacagattcaatgcaattactattaaaacaccaatgatgctcttcacagaaatagaaacaaatcctaaaatttgtacagaacttgaatagccaagcaatcctaagcaaaaagaataaagctggaggcatcacactacatgacttcaaaatatactacaaagctatagtaatcaaatcagcatggtgctggtataaaagtagacacatagaccaatggaacagaatagaaaatgaagaaataaatccacacatttactgctaactgattttcaacaaaggagccaagaaca

SEQ ID NO: 395004 - DNA, 544 bp, Homo sapiens
aggctattagaaaatatgtatcaaaatgaaacaaggtgggggtaaggacagctcaaaaatcttgatgccttttaccagtttgcacrggaagagagggacgaaaagccgactggttaaaaaaaagaaaaaaagaaaaactttattcttttgccagcatgtcagccttctgggttcccttcccctgagcccaatcctaagccgaccagtttaaggtttgggaaattgactcttcccagtttggaggatgtatccaatgggagtgtcctgtagtatagagacacaatttcctatctgtgaagaggggatagaaaaggagaaaggaaaatataagacttttttttcaaaggagtcccaggggttcaggatgcattcaaaagggatacagattgaagatgaatggctacccatctagaaagaggggagcaggtatcactggttcccttctcttcctagcaaatacttgtggtacgtgaaggaagaaaagtgaggcattcctttttctttcctccttccttgaatacttacatcctggcaaccccaacag

SEQ ID NO: 395005 - DNA, 594 bp, Homo sapiens
aaatagactttagtcttatacttggcttgattatttgcataaagtgcagcaagaataattatttctacataggtyttttagattggctttgatggaactctgttccacaaggaatctcagataggatctttgaaagcagagcccagccatgggtttgtatcctcaaatacctgtgagttgggtgatactcccctcttaaggtcccaagataaacttggagctcctgggcctgttagaaagtaacattctttactgaccacaggtcaggaaccctgtacaagaactctgtagacaagagtatgaggccagttttttttcttaaggggcttttatcagctctccaagttgagcttgactccttaaagggaagcatatcctttcagtcaaagccttggtaaaacaaccagtttctccaattgtgttctgttgcaaaagaaaattgattttattgcactgatgcaaacaactatatcgccacaggttgagagtattcgcagatagtttccaaattctagaggaaccaggtagagagaaaccaacatgctccaaattttcttcacaggagtataccttactcaattatgaaaggctata

SEQ ID NO: 395006 - DNA, 594 bp, Homo sapiens
aaatagactttagtcttatacttggcttgattatttgcataaagtgcagcaagaataattatttctacataggttttttagattggctttgatggaactctgttccacaaggaatctcagataggatctttgaaagcagagcccagccatgggtttgtatcctcaaatacctgtgagttgggtgatactcccctcttaaggtcccaagataaacttggagctcctgggcctgttagaaagtaacattctttactgaccacaggtcaggaaccctgtacaagaactctgtagacaagagtatgaggccagttttttttcttaaggggcttttatcagctctscaagttgagcttgactccttaaagggaagcatatcctttcagtcaaagccttggtaaaacaaccagtttctccaattgtgttctgttgcaaaagaaaattgattttattgcactgatgcaaacaactatatcgccacaggttgagagtattcgcagatagtttccaaattctagaggaaccaggtagagagaaaccaacatgctccaaattttcttcacaggagtataccttactcaattatgaaaggctata

SEQ ID NO: 395007 - DNA, 601 bp, Homo sapiens
agtagctgttgaacactgcacacacatgtggcagacatggccatgcaccccaggcagcagggaagggggaacagggagctgycccacccaaccatcccatgcatgcacccacctgtggctgctgggacgggtgtggaccacctccagtattgtaaaaggaaagataggtgccattactctcctgaaaaaaaataagaggaatgtcataggaccaaaaggctcagaagcaaaagtaaaaggttttgggtctccattttactcacccttcctcaggtcccacattctgggtaccaaaaactataaagcaataaatccccattctccccttccccaagaccctggaaaccagcattctactttctgtctctatgcatttgcttactctaggtacctcatataagtgaaaccatacaatatttgtctttctgtgatgggcttacttcacttaccgtactgttcacaaatttcatacatatggtggcatgtatccaaatttcattcctttttaagacaaattaatattccactgcatgtttataccaaactttattcattcatgtatcggtgagcgtttgggtatttctacttttaagttaaatta

SEQ ID NO: 395008 - DNA, 601 bp, Homo sapiens
agtagctgttgaacactgcacacacatgtggcagacatggccatgcaccccaggcagcagggaagggggaacagggagctgtcccacccaaccatcccatgcatgcacccacctgtggctgctgggaygggtgtggaccacctccagtattgtaaaaggaaagataggtgccattactctcctgaaaaaaaataagaggaatgtcataggaccaaaaggctcagaagcaaaagtaaaaggttttgggtctccattttactcacccttcctcaggtcccacattctgggtaccaaaaactataaagcaataaatccccattctccccttccccaagaccctggaaaccagcattctactttctgtctctatgcatttgcttactctaggtacctcatataagtgaaaccatacaatatttgtctttctgtgatgggcttacttcacttaccgtactgttcacaaatttcatacatatggtggcatgtatccaaatttcattcctttttaagacaaattaatattccactgcatgtttataccaaactttattcattcatgtatcggtgagcgtttgggtatttctacttttaagttaaatta

SEQ ID NO: 395009 - DNA, 479 bp, Homo sapiens
taagtcacagttataagtcactcttctcacttttttttttatcakatacggctatgtttgaatgtttgtcccttcccaaactcattttgaaatgtaattgctattgtaaaagtattaagagctgagatcttcaagaggtgagtaaaccatacaggctctgcccttgtgggtgggattaatggcattataaaaatgcaagactggcccctgttgcctctctttcccttctgctttctaccacctgaggacagagaactcttcccctagcagcaagaaggcccttgccaaaagatggcaccttgatcttggacttcccaacttttagaactgtaagaaatacatttctgttctttataaattaccctgtggtaatttatgtctgtggtattctgctatggccgcacaaaatggactaagacaaatactgacttagtaaaaagattacccatttttaaaagacaacttcatacagccggaga

SEQ ID NO: 395010 - DNA, 509 bp, Homo sapiens
gaggggtcctttccaagagtttttcttaaataggaaatagagaaatggggtatcagcttcaaggaaagatgagatcaagaggggtgtttttctaaaatgagagacgtcatgatgcatggacaatgcaaggtcaacaataacaaagataaatcttgtaccatttattatactgcattaatgtgtacatatcacacacacacacacacacacaaacacacacatgcactcacacacgcatattcaatttcccaaatatcracttgtttaataatgctagttcagctcttcaactttctatccatcttttttctttaccctataccctaacctatagcattaattgcttccctagaatactgtattaaccacataaattattatagaaattatcaaaatacatatcttgtggagaaacttcaaaataaggtaaaaattatcatttcagtcacaaattgtacatgattgactgcttttataatttgagattctatcagactataactgatttt

SEQ ID NO: 395011 - DNA, 605 bp, Homo sapiens
caaacacttgaaagaaaatgtcacaggatagaggaaaacaagctgactttatgctaattgaaaggctcacagatgtgagtatctatatcttaagagtttgatcaccaccattaggtgtctccattcatcatttctgccaaaggtctagtatattccacatttatagtttctagtttaagctaaccacccaaatgtacaattttaaaaaagaaatgttattctaaaataggaggtaagcttaatakttttccttccagccatggctgaaattcagctcctaggatggctattgtattatcattaacaaattacctacatgaacaaacatatgtggaaaagaagattttcagctcttcgttaatgttttttctcttagagaaatttactttttcccttcccacatcacattctgaagcaatactctcctgtgcctattgcaaagtgacaggctaagacacagcagaagagattcaaagggaggatctactttgaatttcaaaaacaatgaaattgtttgtatttcaaaaacaatgaatttaggagaaccaaaaaataaaaataaaaagtgttaaaaattaggagcttaaacaggtaaggtttttaag

SEQ ID NO: 395012 - DNA, 563 bp, Homo sapiens
gtttagctctggatacaaatcagatttaaagaaccacagggaaatgagctgtgcttttgttcatcttcatcattgtcttgcttgtgtgaacagggaaagcaggagtgtgtggkctgaaacagagtgggagaaaaaggtcccagagacattcttgacccccttccactggaaatgtgattatagaatgcctttttaaaataagtatttatttatttttttaattaaacttcaagctctgggatacacatgcagaacatgcaggtttgttacataggtatacacgtaccatggtggtctgctgtacccatcaacctgtcatctacattagctatttttcctaatgctggtcattagagaaatgcaaatcaaaaccacaatgagatactatctcatgccagttagaatggtgatcattaaaaagtcaggaaacaacagatgctagagaggatatggacaaataggaatgcttttacactgttggtgggagtgtaaattagttcaaccattgcagaagacagtgtggtgattcctcaaggatctagaaccagaaataccatttgaca

SEQ ID NO: 395013 - DNA, 590 bp, Homo sapiens
tgtctctagaactttgcatctgtttctacacgttcaactctggtgggagtttttgaattagtggagttaaggcgtgatgtcacactctgtttgtggttggaggagtatctgtggtacccttcagtctttgtagacttaaataaaggagttattcctcaatagtgagatctaaataatgtggagcaaaaaatatgtgtgtatatgcttatcaactactacctctaatttttccccaacacatccatatgccactctgtaccactccctaatgaatatttttattcacaatccacttacycatattctccatttattctgtttatcaattttctcactaatgattccacgatccactttttttgcatttttccttctatttcttttcctagtggtattttgtttccatttgcctgaatgccagtacaaaacttccatgtataatctgctatccctttataaatgatgaatcttcaaggccagatcacaaaagattatttcatcatagaaagtatgatcataaaaagctgatctcagccagaattctatacccagttcctgcatctttacttgaagatcctatttgatattct

SEQ ID NO: 395014 - DNA, 590 bp, Homo sapiens
tgtctctagaactttgcatctgtttctacacgttcaactctggtgggagtttttgaattagtggagttaaggcgtgatgtcacactctgtttgtggttggaggagtatctgtggtacccttcagtctttgtagacttaaataaaggagttattcctcaatagtgagatctaaataatgtggagcaaaaaatatgtgtgtatatgcttatcaactactacctctaatttttccccaacacatccatatgccactctgtaccactccctaatgaatatttttattcacaatccacttacccatattctccatttattctgtttatcaattttctcactaatgattccacgatccaytttttttgcatttttccttctatttcttttcctagtggtattttgtttccatttgcctgaatgccagtacaaaacttccatgtataatctgctatccctttataaatgatgaatcttcaaggccagatcacaaaagattatttcatcatagaaagtatgatcataaaaagctgatctcagccagaattctatacccagttcctgcatctttacttgaagatcctatttgatattct

SEQ ID NO: 395015 - DNA, 588 bp, Homo sapiens
atattagacttaagtgttttataatgatattgggcttatgttgttattttttgtttcgtaaaatgtgtaattcaactactgtttttattktaccatgtggatgcattaagtagccatgctgacagatgcaataaaatgagtaaaataaacaaatattttgatttttttaagatataaatttagcctttttttcactgcagttttcataccacacataagtaatttggcagatattctattatttattgttatttccttaggaaaaattggcatgttgatggcacaaattaaaatttggataataattaggagtaaataagataattcaatttggtcttgcctacaataaagatattctcaatagcttaggaatataatgaataccactttaaaatgcattccaaaagaaagaaggaaaggtacaatgtgttttagcagaaacttacttgtgtccctttggttagtggctgatacatagcacagaaattagaaggtaaacaattgccagatgaaaggattaaattataactaatagcaaaaattttgaagatagatataatttgaatattctgagaaactgttgatgtc

SEQ ID NO: 395016 - DNA, 588 bp, Homo sapiens
atattagacttaagtgttttataatgatattgggcttatgttgttattttttgtttcgtaaaatgtgtaattcaactactgtttttattgtacyatgtggatgcattaagtagccatgctgacagatgcaataaaatgagtaaaataaacaaatattttgatttttttaagatataaatttagcctttttttcactgcagttttcataccacacataagtaatttggcagatattctattatttattgttatttccttaggaaaaattggcatgttgatggcacaaattaaaatttggataataattaggagtaaataagataattcaatttggtcttgcctacaataaagatattctcaatagcttaggaatataatgaataccactttaaaatgcattccaaaagaaagaaggaaaggtacaatgtgttttagcagaaacttacttgtgtccctttggttagtggctgatacatagcacagaaattagaaggtaaacaattgccagatgaaaggattaaattataactaatagcaaaaattttgaagatagatataatttgaatattctgagaaactgttgatgtc

SEQ ID NO: 395017 - DNA, 534 bp, Homo sapiens
gttaagcaataaaaatgatgcttaactttacgtgaccatagagcctggattcaggaattagtaatgtgtagtaacacacagtttgctccctattgtataaaatgaagtgtgtagaaaaaaagatgcagtaaatatagaattatcaatcttcaactctggggatggatcayactattttaagaaaaattttctgtagtttctataatgaccacttatttctatttttaaaacaatgtttatttttaataaagcagaaaagagaattgggggcattagaagcaatgcagtctaattaggaggctgtctgggaggatcaaaccccagttttgccactctctagctatgtgagaccttgagccagttattttgtgtccaaatatcttatttataaaatgacaacagcaactacttcttcattaggttcttataaggttaaacaagttaataaatgaaaagtgtctacaatagcacatagtaacccatatgtaactgttgattattatttttatagatgcaagatctccaagttcaatg

SEQ ID NO: 395018 - DNA, 599 bp, Homo sapiens
catgtgcagaacattcaggtttgttacctaggtatacctgtgccatggcggtttgctgcacccatcaacccatcatatacattagacatttcttctaatgctatccctccccagccccccactccctgacaggccccggtgggtgatgttcccctccctgtgtccatgtgttctcattgttcaactcccacttacgagtgagagcatgaagtgtttggttttctgttcctgtgttagtttgctgagaatgatggtttccagcttcatccatgtccctgcaaagaacatgaacccatactctttcatggttgcatagtatcccatggtgtatatgtgccacgttttctttatccagtctatcattgatgggcatttaggttggttccaagtctttggtgttgtgaattattaataatattgtgttagctattattattaatggtcattgctatgattttttacctacttaccaaagatttcaatattacactctatgcaasacaaataaacagtttttagactgaaaatctatgctaaacttaataattttgtgtatgtcatttggttcaataatgctacttaagaaacacagtattaac

SEQ ID NO: 395019 - DNA, 572 bp, Homo sapiens
ttcacattattgcttactgttctttgtgaattttctcactcatacgttgtatctcaggttgggatccctagaagcagacgttgagacaggatttcagttgcccatatttattgayggtattttctcaagataaagggagtgagggaagtgagaaagttcaggggaattcactaaagcaagaaggtggttttcactgcagtctagattcagccatatctcatggggataagaaggagcatgacttttaccatataattgtccccaccttgaggcaaaggggctggcattttgtacctccatgtattctttatcgatgttggaaaagcaggttagcaatctgttaggggaaagaacttctggtaggcaaagggaaattctccaaagaagggggcaactatgaactatcagcagccaacactcacagcagctggatcaaataaagagagtgtggccagaacacttaaactgttcagtagatattattggttaatcaagaccatagacatatttaatttaatttcacaatgttcaatcattaaactgtcactgagtacctgttagctactgaaaag

SEQ ID NO: 395020 - DNA, 572 bp, Homo sapiens
ttcacattattgcttactgttctttgtgaattttctcactcatacgttgtatctcaggttgggatccctagaagcagacgttgagacaggatttcagttgcccatatttattgacggtattttctcaagataaagggagtgagggaagtgagaaagttcagsggaattcactaaagcaagaaggtggttttcactgcagtctagattcagccatatctcatggggataagaaggagcatgacttttaccatataattgtccccaccttgaggcaaaggggctggcattttgtacctccatgtattctttatcgatgttggaaaagcaggttagcaatctgttaggggaaagaacttctggtaggcaaagggaaattctccaaagaagggggcaactatgaactatcagcagccaacactcacagcagctggatcaaataaagagagtgtggccagaacacttaaactgttcagtagatattattggttaatcaagaccatagacatatttaatttaatttcacaatgttcaatcattaaactgtcactgagtacctgttagctactgaaaag

SEQ ID NO: 395021 - DNA, 573 bp, Homo sapiens
atgtattctttatcgatgttggaaaagcaggttagcaatctgttaggggaaagaacttctggtaggcaaagggaaattctccaaagaagggggcaactatgaactatcagcagccaacactcacagcagctggatcaaataaagagagtgtggccagaacacttaaactgttcagtagatattattggttaatcaagaccatagacatatttaatttaatttcacaatgttcaatcattaaactgtcactgagtacctgttagctactgaaaagtaatagtgaactattattaatatatttwaaaaaaatacatgccctcctcctttatccaggaagaggtcaaaatctctgggggcaagagtcaagtataccaatacagtcataccttagagatactgagaatttggttccagatgccacagcaaagcaaatatcttaataaagtgagttacacacaatgtttggtttcccagtacatgtaaaaattatgtttatagtatgctgcagcctattaagtctgttataaaattatgtctaagaaaccatgtacatatcttaattaaaaatacttt

SEQ ID NO: 395022 - DNA, 573 bp, Homo sapiens
atgtattctttatcgatgttggaaaagcaggttagcaatctgttaggggaaagaacttctggtaggcaaagggaaattctccaaagaagggggcaactatgaactatcagcagccaacactcacagcagctggatcaaataaagagagtgtggccagaacacttaaactgttcagtagatattattggttaatcaagaccatagacatatttaatttaatttcacaatgttcaatcattaaactgtcactgagtacctgttagctactgaaaagtaatagtgaactattattaatatatttaaaaaaaatacatgccctcctcctttatcyaggaagaggtcaaaatctctgggggcaagagtcaagtataccaatacagtcataccttagagatactgagaatttggttccagatgccacagcaaagcaaatatcttaataaagtgagttacacacaatgtttggtttcccagtacatgtaaaaattatgtttatagtatgctgcagcctattaagtctgttataaaattatgtctaagaaaccatgtacatatcttaattaaaaatacttt

SEQ ID NO: 395023 - DNA, 573 bp, Homo sapiens
atgtattctttatcgatgttggaaaagcaggttagcaatctgttaggggaaagaacttctggtaggcaaagggaaattctccaaagaagggggcaactatgaactatcagcagccaacactcacagcagctggatcaaataaagagagtgtggccagaacacttaaactgttcagtagatattattggttaatcaagaccatagacatatttaatttaatttcacaatgttcaatcattaaactgtcactgagtacctgttagctactgaaaagtaatagtgaactattattaatatatttaaaaaaaatacatgccctcctcctttatccaggragaggtcaaaatctctgggggcaagagtcaagtataccaatacagtcataccttagagatactgagaatttggttccagatgccacagcaaagcaaatatcttaataaagtgagttacacacaatgtttggtttcccagtacatgtaaaaattatgtttatagtatgctgcagcctattaagtctgttataaaattatgtctaagaaaccatgtacatatcttaattaaaaatacttt

SEQ ID NO: 395024 - DNA, 533 bp, Homo sapiens
catgtaagaaaatgtgcacattttctgcacatgagtggtactggtttttataagtattacaggaggggaacacattgttgagttcattggtgatttcacccccaagaaacaaagaccctcctgacccaggaggaaagtagagcagttgcattttataatgaaaatattattgtgtcacattattatgactatttttcagtgggtgattcagtaaatgcagcatatgcttagtaaatatggatgcacagtgtctgaaaccagactgccagggttcaaatcacagcatggccatttactatcatcattgtgaccttgaacaagttacytcatcctttctcatttcattttcgtcattgatgaatagtgattattaatagtgctttacctcataagactgtgacgaggataaaaggagttttcagagagacagaaaaagtgaaagagaagatctgtcaaaatagtcaataaatatcaactattatttataaacaattacttacagttgcaaggcttatttcaatctagaaataata

SEQ ID NO: 395025 - DNA, 533 bp, Homo sapiens
catgtaagaaaatgtgcacattttctgcacatgagtggtactggtttttataagtattacaggaggggaacacattgttgagttcattggtgatttcacccccaagaaacaaagaccctcctgacccaggaggaaagtagagcagttgcattttataatgaaaatattattgtgtcacattattatgactatttttcagtgggtgattcagtaaatgcagcatatgcttagtaaatatggatgcacagtgtctgaaaccagactgccagggttcaaatcacagcatggccatttactatcatcattgtgaccttgaacaagttacctcatcctttctcatttcattttcstcattgatgaatagtgattattaatagtgctttacctcataagactgtgacgaggataaaaggagttttcagagagacagaaaaagtgaaagagaagatctgtcaaaatagtcaataaatatcaactattatttataaacaattacttacagttgcaaggcttatttcaatctagaaataata

SEQ ID NO: 395026 - DNA, 554 bp, Homo sapiens
ccaccacagctgtgaatgtgctgggtcacacctgaagccagcatagctctgagtctcactcaaggcaagtggcaagtactgcctgcctgctactgctcattatttagagcccaagggctgtttagtcagcaggttatgcatcctgccaggactgggtccttccctttagggcagtgggttccctttggcccatggtatatctggagttgtcatccaggagctaggacctgaaaggggggcctcaggtctctgcctgttgccctattctattgtggctgttccaatacccaagttggaagacaaactcctctttactttccccctcctctccttaagcagagagaagtctctcccagagctgcaagctgtgctacctggagttgggggaggggtgatgcagaaactcccttggctgccccagcttgtgtctcattgggtcaygtgcatcttagcttcatgggctccaagtttagcaccaggacttgcccaggaattgcagtccttgtgggctagactgcatttcaagtttatttagtacccccaagctctttagc

SEQ ID NO: 395027 - DNA, 546 bp, Homo sapiens
ttaatgataccaacaaatacattcacaaagaagttgccttttaagttcacaaggccagagcaattacctcgtttagttcagtatgtgcaacctggaattcaattgatatctagtgagaaaaaggtcaaaggtaattttcaaagtagagcaactaactgtttaaaccaatggcattatttatatcatcagtgaaattgcaaatccaaagtgtaagtgcagtcacattatgctgcctttcatgaaaaaaaaaattgctctacatttgcacttgcttcttttagaactgtgaatggttgcactactgctaaattctttattttacctaaaaaaaagaacaaacttaraaacacatacaagcaggacaatgaatctgttatgccatatctttttttaaatgtccttctatggaatcaagccggaaggctttgttggcaaacactgtgattttaagataatgactatgatataaatgtttccaagtttgaatgatacacagggtgtatgtgagatagctgggcactgttctttcatcagataagtgacatt

SEQ ID NO: 395028 - DNA, 589 bp, Homo sapiens
aagtataacttactctttattcctgcagttctctattacttctctattaccacactatgagtatttgtttgctccctgtatatgccaaaaaacagaaagcttcatgcatacagagactttgttggccgtatttgtttttgtaacctcagcatcaaactaactcataagtgagagattacataaattaaaaaacttacctgtagtcccataacaagaaacagagcatagattcaacttagatctatttctaaaacctgtatttttaatcactagactatttggttccttaatgatatagaacatttctatttgtttaaactgagtatttttcatacattgaaagtctgaaattttttactagtattattatcataaactaattaataacagcttattcaaaatgattgttctatgtcctaataaattataaataktattattggatttactttttgttatttgttcaaatattaataaggaacaatatttttacaattatgatattaagtgctgtaaaagatctaaaatgacaagataaaattaacattactgaagaagacttcagattttatatgacaggaaaatacaa

SEQ ID NO: 395029 - DNA, 589 bp, Homo sapiens
cttattttaaataggcaataattattgcttacaagactgttttaacttggtatattttcttcatagtgaaactaaaaaattcctaaagaaatccataaagcttcttagtgaaatatttatacttcatttataatattttacaatattaaaatgtaataattttaaagaaaatattcatattaagtagttttatacagctgttttaactatatgtatacaattttctgtaagtcaaattctaacattttgtaaattttttgaaattaataattttgctcttgatttggtcatttttaaaaagtacatctctgtggtatatatgtggtgaagacgaaagaaattatcagaaagaattaaatcaattttgtgtatacatatttcagtatcagatcgtgaaaaccacagtgggatactacaagggacaaacaattttctagttcttcrtgagttcttcactggagttgccttgcactagcttacaagagctgattgggctcatcttttcccaactccaagttcagagacacgacttggtagcttgaaattggccatggtgcaacaataacaacatagaaatttacaaagtcta

SEQ ID NO: 395030 - DNA, 649 bp, Homo sapiens
tttgtcctattcccaatatctttaaagaactcaattttctagttatcctctccatttggtgagatttattgaaaaatcagattcagagataaataaaacgtcattcttgccttcagattaattacagtctattagagaaacacataagaaatcattccaatgctgtgtcataattgagcttatttggagggttacagaggattaacataaaagaaagatatctactacttgggaggaagcgttggtgtctagaaatacggctaagagaatttaataatggatcttygaatttaggatgactaaaggtcatatggatggcttagaaggaggtgcaagatgttccagtaagaagacaaaagggaggtttagagaaaacagactggaaggagtgtatagggtgttactaaaagaacataacagaatgggaaaaattcaaatacaatagcatgaaatattattaaatcccttctccccttagacagattatcccctttagccatcaccatgagatatacaaacttctgtcagtttgctattttaaccatcctactacactatttttgtgttatttttctattcaacatactatattttaatatcctcaagaacagtagctatatctttctcattttatcattctttgcagaat

SEQ ID NO: 395031 - DNA, 604 bp, Homo sapiens
tggaataaagtacacataagcctcctctgtgttccttatctcattattttaacctaacattctgctatactttcaagaagtacttcatgaaacttaagaaatactttgttcaataagtacttaataaaaatctaaaatatgcaaggcacttagctagatattttagaagatgcagtaaagtatatgtatacggttcttgtctcctggtaattcacaatttgtcataacaagaactaggaatataatttttatatcttgccaagtcttctaaaaaattgtaagagaattgataggtgtgtgtcacaaatatatcaaaattaaaattagaggctatttggcatatgacacaaggctgtcagtaataatcagacatattatatattgtcataaaacacaaatctatagtgagcttagaaactaagacmccgaagaaagactttcttactggctaacttcaatttaaaaacttaaataggctattttgatttttaggaatgattcctcaagaaacattcctaaaaatgttgaaaagttgtttgtattatttttgcattaagagttgaatatggagaggaaagttatgtttatgaaacttactacaaag

SEQ ID NO: 395032 - DNA, 595 bp, Homo sapiens
gattctcctgtctctgcctcccgagtagctggggctacaggcatgtgccaccacatccagctaatttttgtaattttagtggagacggggtttcaccatattggccaggctggtctcaaactcctgaccttgttatcctcccacctcggcctcccaaagtgctgggattacaggcgtgagccaccacgcccggccaggactcttaataattccacctcaatatgacaatcattactgaaaagtgctttttctaagatattcatgaagtrgtcttctggctaaaagataatagtgctgtcattgttgatccaaataacttattatagtttatggcattttgttgcttgaaatattagtcaacaatatttatataacagtttatgtaacttttatgtaaaataaatcctatatagtattttaattaaaaataaaaatacccattcagaaaaaaaagttctaaattttattgttgttatataccagaataaactcataacaattttgcattgttatttttcattatatttttcaaaagaaaataaaactaaataaacaatgtcctgattagttaaacagtattaggcatacattgcta

SEQ ID NO: 395033 - DNA, 616 bp, Homo sapiens
gtacttaaaggtctccatcatgtgttttaggaacataggttggactcatgaagtaaaattacaaactcacctttattgaacatttatatgggaattccaccatgctatctgacctgagtttaccctttatttttgtactctctcacactgaaggagataaaggcttctttatatgcctacaaaggaagctctctagttttcacacttaggctttagctgcatcttaaccactctcagtttcaatttatttttacgcatggaatatttacaacttagcaattatcagccaactgatagaagtccctcctttccaactttccttarctccctatatctttcagaatcaaagtcattttcccaggtcactgcaggtgtagtttattactgagctcccctgcacctactaataagtacaggtaaacttgcacacaataatgtggagttagaaacactaatgtgaaggtctgggtatttgagatatatgggaagagtagtgccaacagtgacaatggagttgacttgttataactaagttgtataaatcctttgcaaaagaataaagtgaaactgagattggttaataagcagctaaggcctccatgtgaaagtaagataa

SEQ ID NO: 395034 - DNA, 637 bp, Homo sapiens
actgcccatagctgccttgggactctgctccccacattccagcacatctcctctcagccacaccttctgtggcccaagcagccccagttgtgttatgctgctgccatggaaggtacaagtggtaagccttggtggtgtccacatagtgttaagtctattagacctgcagaatataagagcggtaggggcatgactacctcctcctaggtttcaaaggatatctcaaaccacctggagacccagacagagatttattgcagggrcacagctgccaaagagtcccaactaaggcaatgcctagtggagccacgtgcagcccctgagaccacagaactgtagcactaactgggagaactacacagatgaaactctgttagacatgagttctaattttcttttcaaagaatcaatatgtcagtatgttcaattctttgccttctacttttaaacttaacttcctcataaagaagccttttatgattacctacttcaccctgactcgttctgattacctgctccaccctgactcattcagattacctgctccaccctgactcattcagattacctgctccaccctgattcattttcatatggtaaagaaaaattgtgaaatttacatgcaaaagagatatta

SEQ ID NO: 395035 - DNA, 594 bp, Homo sapiens
ttaaataagtgtataagataaacttttgtgttaacgcatgcaaaaaagcttggtttttgggaacaggacaaagagtatgtactgtttaaagaaaaatgcatatamgctaagcattaggattaaagagatatacagactaattgttggtagacaaaagtgttaagcaatcggaaactgtcactataaatttttatttcaaggaaactgagatttttatccttacagctgtgaactacttcaataattaaataaccatgaactgtgtatgctaaacaaattgttctttgcaacaggtaagtagaaaaggttattaagagatagttaaattatttttgttaatgcaacttgcacacttttagcctcttaaatgtattcaaatatataataaataaggaatgaaaaatcaaataaaatttgttttcaaatttgtaatttgtaatcaaataaaataaaaatttgtaatcaaataaaattttataatcaaataaaatcaaatcaattttgtaatcaaataaaatcaaaatcaaataaaataaaatcaaataaaaatttgtaatcaaataaaaattgttttcattatcaaactccagggca

SEQ ID NO: 395036 - DNA, 594 bp, Homo sapiens
ttaaataagtgtataagataaacttttgtgttaacgcatgcaaaaaagcttggtttttgggaacaggacaaagagtatgtactgtttaaagaaaaatgcatatacgctaagcattaggattaaagagatatacagactaattgttggtagacaaaagtgttaagcaatyggaaactgtcactataaatttttatttcaaggaaactgagatttttatccttacagctgtgaactacttcaataattaaataaccatgaactgtgtatgctaaacaaattgttctttgcaacaggtaagtagaaaaggttattaagagatagttaaattatttttgttaatgcaacttgcacacttttagcctcttaaatgtattcaaatatataataaataaggaatgaaaaatcaaataaaatttgttttcaaatttgtaatttgtaatcaaataaaataaaaatttgtaatcaaataaaattttataatcaaataaaatcaaatcaattttgtaatcaaataaaatcaaaatcaaataaaataaaatcaaataaaaatttgtaatcaaataaaaattgttttcattatcaaactccagggca

SEQ ID NO: 395037 - DNA, 480 bp, Homo sapiens
ccatgggacatactcaaggcaacaccatgggtttgtggcagagccaagactggacccaggtctcctgatttccagctctttccccctgcatagtccctgcccttccactcaagaactgcagtgggatttggccattccaaacatcagactcctccacactgaaaaaagaggttctttttttttggactaagacctaaattataaggtggcaaccagaggaagatgtaaaggaagggcatctgaggcagacagcattgccactacgaatgtcctgagacacccataccatgtcatgttaaggaacagacagaaaagtcagtggtcaaagaygagggtggagaattaggcccaggactgaccacacaggggctcacagatcatagcaaaaggtttgaatttcattctaagtgcagtgggaatttaactgggaaattttaaggaaaggaatgtcacaacgtgatatgattttaaaaggccacc

SEQ ID NO: 395038 - DNA, 548 bp, Homo sapiens
cctggctctgaagcaaagcatttttggttcygagatgaaaggcagtgaaaatggttggtggccaggcctccctctgctctgcagcagcccccaggccatgggcaagtgcagctcacaccttcctgcacacagggagaagcaggtgacctattttcccagagaagctcttgtctggggctgctgatgtagaaaactccctacagggagggggcctgtaggaaacataggacatgccactggccgtgctggtcgtgtgtgtgtgtgtgtgtgtatgtgtgtgtatatgtgtgtatgcatacatatgtgctgtgtgcatgtgtggtgtgtgtgatgtgtgtgttggggggtatgtgtgtggtatgtgggtggtgtatatatgtgtgtggtatgtgtgcatgtgtggtgtgtgtatgagtgcgtcttgtgtgtgtatggtatgtgtggtgtgtgcaagtgtgctgtatctgtggtgtgtatgtatatggtgtggtgtgtggtatgtatatgtgtgtgtgtttgtggtatgtgtgtgatgtgtgtgtgggtgg

SEQ ID NO: 395039 - DNA, 577 bp, Homo sapiens
aatgctgcatgatctcattttcatgggaatctaaaaaagctgaactcagaagctgagagcggaatggcagtcaccagatgctaggggttgggggcacctgaggggatgtggatcaaaaggtacagaacttcaggtagagagggggactaagttcaagaaatctatcgtacatcatggtgactatagttactgacatattttgtctacttgaaaattgccaagtgattagattttaagtgttctcaccacamaaaaaaaatgataaatatgtgaggaaatgcatatgttaattagcttgatttagccattccacaatgtatacatataccaaaatgccattccatatgcaataaatatatataattttatttgtcatttttagaaaaataaaagtatgcatttctgtgctctatgtgagaccagctgtgaatcggtaactctggaggtgggtggaactagataaatctagtgttttataagttcctgaggtgattcttttaatcaggtaaggctggcaagtaccagtctaattcaatacatctgaacctcccgggaagcttttcaaaccaggcaaacc

SEQ ID NO: 395040 - DNA, 577 bp, Homo sapiens
aatgctgcatgatctcattttcatgggaatctaaaaaagctgaactcagaagctgagagcggaatggcagtcaccagatgctaggggttgggggcacctgaggggatgtggatcaaaaggtacagaacttcaggtagagagggggactaagttcaagaaatctatcgtacatcatggtgactatagttactgacatattttgtctacttgaaaattgccaagtgattagattttaagtgttctcaccacacaaaaaaaatgataaatatgtgaggaaatgcatatgttaattagcttgatttagccattccacaatgtatacatataccaaaatgccattccatatgcaataaatatatataattttatttgtcatttttagaaaaataaaagtatgcatttctgtgctctatgtgagaccagctgtgaatcggtaactctggaggtgggtggaaytagataaatctagtgttttataagttcctgaggtgattcttttaatcaggtaaggctggcaagtaccagtctaattcaatacatctgaacctcccgggaagcttttcaaaccaggcaaacc

SEQ ID NO: 395041 - DNA, 449 bp, Homo sapiens
aatatgacctacgggagactatctatcactatgggttactcttagcctgatcacaaagacaaatctttattaattattttataaagttgggcaaattgaagaagaaaacccatgttagtgtttttaagaagatcgaatgctstctatataactgagacaaaaactaacagtaaagagtcaaacctcattttgaattcaaagactatgagaactagtaggacctttgagagtgtctagggtgactcccttattttgcagatgtggagactaaggtctaggaagagtaatttgacaagaatcaaaatgtgagctggtggcagaggactttaatgtagatccctagagtctacctctctaccagaccacacagctctctgatggttcagttacaagcctggctactaagtagagggacacaaatcaagtcaaagatatggctgtagcttata

SEQ ID NO: 395042 - DNA, 503 bp, Homo sapiens
ttgttaaaattctatttatgcaagggctaatggagcacaccacatgttaaagaccacactgaagacgtattgctgcatatgagcagactgaaaaggatgtttctgtcctaaggaacttatactctacttgagaagttcagactaatagacatgacatgttttagcatgcaaccatgctaaaaaatataatcgtcaactagtacattgtatggattagagaaaaattaactctcattttcagaaaacttcaacctggagacagtacatcattaaatggaagtaaattttatgggattggggttataaattcattcttcaaacaaaatgtttcttgacaagtaagatctgattctcagttttgggaagtcaaaaygaaaaaacaagcaagcaaaaactactaaccaactttgggtttccagtgatttctgtcctataaaggaaaacccatttatttctgtctattttccacttaattggagaataataaaaagataaaggcattg

SEQ ID NO: 395043 - DNA, 560 bp, Homo sapiens
taaattgtttgagtttattaaaaagatatatgtggcaaacaagggaggcaagaccccataggaacccaggaactgatgaacaaatgtttgatgctcgtggaaatggaacataagtagtggaattgtccacacagtattggggttccattgatttggttgtcttcttgactgagtgcatcattcctgggcaattatggaactcatcttttgatcttgccttcccccaatcagctcattcttctcccttgcagcttcagcttcttcatatctttacctccctcatggcttccacaggtctcgccaccacatgcctcctggagttcctctcagcttctgctaccacackccctgctcttgcaaattctgtttcccggtttaaattctagagaaggaatctggctgacatagctacttacttgtgtttagagcacttcctgtcaggccactttgggtggttgcccttgagataggtatccatcttgcatgcctaagggatcaggaaatagagaacttacttaccctggtttggaaccaatgtcttaaagacattttacgttaaa

SEQ ID NO: 395044 - DNA, 560 bp, Homo sapiens
taaattgtttgagtttattaaaaagatatatgtggcaaacaagggaggcaagaccccataggaacccaggaactgatgaacaaatgtttgatgctcgtggaaatggaacataagtagtggaattgtccacacagtattggggttccattgatttggttgtcttcttgactgagtgcatcattcctgggcaattatggaactcatcttttgatcttgccttcccccaatcagctcattcttctcccttgcagcttcagcttcttcatatctttacctccctcatggcttccacaggtctcgccaccacatgcctcctggagttcctctcagcttctgctaccacacgccctgctcttgcaaattctgtttcccggtttaaattctagagaaggaatctggctgacatagctacttacttgtgtttagagcacttcctgtcaggccactttgggtggttgcccttgagataggtatccatcttscatgcctaagggatcaggaaatagagaacttacttaccctggtttggaaccaatgtcttaaagacattttacgttaaa

SEQ ID NO: 395045 - DNA, 569 bp, Homo sapiens
aatcaaccaaaacaaaggggatccaggccccatgcaagtctgaaacccagcagagcagtcattaaatctaaaagctccaaaataatctcctttgagtccatgtctcacatccaggccacactgatgcaaggggtgggttcccaaggccttgggaagccctgcccctgtggctttacagggtttagctgccacagctgctctcattggctggcattgagtgtctgtggctttttcaggagtgtagtgcaagttgttggtggctgtgtcattctgggacctggaggacagtggccctcttctcacagctacattargcaatgctccagtgaggactctgtgtgtgcactccaaccccacattttccctccacattgccctagtagaagttcttcctgagggctctccccttgtagcagccttctgcctggacatccaggtgttttcatacatcttctgaaatctaggcagaggctctgaagcctcaactcctgcactctgtacaactgcaggcttaacgctgcatggaagccaccaagcttatggtttgcaccttgtggagcagtggccca

SEQ ID NO: 395046 - DNA, 537 bp, Homo sapiens
tgatattagctcaatatctggggagcataaaggggtcagagatttggtttaatcacatggacagtgattcaatcaatcttgcctatgtgatgatactccaacaaaaactctggacaaacctcaggtgagtcccctggttagcaagtctctatgcactgtcatacatcaatatgctggaagggtatcctgactccatggggaacaaaatggaagctttgcttttcagacccttcgaaacctcattctatgcctcattccctttggctaattatatttttgtatccttttactataataaagctataatcataagtatagcactttcytgagttgtgtgagctgttctagtaaataattaagcctgaggggttcgggggaatccagtaattgtagccagctggtcagagtacgagtgtcctggggacctctgaatttacagctattatataaggtaagggcaatcttgtgccctcaatctatgaaatttggctactatggttaattggcaccagcagtcactgaagtctctgttttcaa

SEQ ID NO: 395047 - DNA, 537 bp, Homo sapiens
tgatattagctcaatatctggggagcataaaggggtcagagatttggtttaatcacatggacagtgattcaatcaatcttgcctatgtgatgatactccaacaaaaactctggacaaacctcaggtgagtcccctggttagcaagtctctatgcactgtcatacatcaatatgctggaagggtatcctgactccatggggaacaaaatggaagctttgcttttcagacccttcgaaacctcattctatgcctcattccctttggctaattatatttttgtatccttttactataataaagctataatcataagtatagcactttcctgagttgtgtgagctgttctagtaaataattaagcytgaggggttcgggggaatccagtaattgtagccagctggtcagagtacgagtgtcctggggacctctgaatttacagctattatataaggtaagggcaatcttgtgccctcaatctatgaaatttggctactatggttaattggcaccagcagtcactgaagtctctgttttcaa

SEQ ID NO: 395048 - DNA, 624 bp, Homo sapiens
ccctctttctttattctgttctatccctttacatcctcctccgcttatctcagcagtacgtgttaggcttttaggaaaaagagaaccrtaggatttcagaattggaagagatagaagaagttattagattatagatttctagcacaatttctagtgctcctggggccacgcaacactacaattcatggacttgctgtggcttctgatgtcttagagagcacaatccctgtctaaagaggatgagcagtaaagactcagctccagctaattgttgccaagggagaatgtaggccagatctaccaatgtttaaaagagaatccagaaatgggcttttatataaacattctaatttttaaatgttggccacagatgcatacaaaaaagcactgccggtcaaataaaacatatctgcaggacaaaattagccaatgagataacagtttcccaagaatggttagaccaaactcttatttcacagatgaaggaactaaagttcaaactgacataaaagcttgcctaaaatcatcctggatatcaaacaaacatttcagtgctcttcaatcttagatgtttgtgatttgatgtagctatttccttaacaagtcaggagggaagtttgaaag

SEQ ID NO: 395049 - DNA, 609 bp, Homo sapiens
ttttgacacaattctggctaaatctgctatttaaagactatcgagtccacaacagattcatcatagaaacagtgagatacccagaattaaataagtcacttaaaaagaacagactggttcctggtagattttaggtacttgctctttagggttatgtttcttttgatttttaggacataatgatttccatacaatttagactccttttgtttgaaaagaaaatgttatgacctagtgaagtgtttatgttatacacaacacttaaaaagaaatcttgtttgcgatctttgtgagaagacacagactattggatataaataaataaggtcaatataatatttcctgtataarcctagctgtaagataaatatagttatatagagtagtttggacaattcaaattcaaatcatatttactggatactttcccatgtgtcagatagtagtattgccatttaatcctcagagtatcttggagaggtatatgttactaatcttattttacaattgagaagactgaggagagatgaaataatagttaagatcctactattagtaagtggcagaaatgggaatccaatcatgttaagacccccaatcccatgatat

SEQ ID NO: 395050 - DNA, 525 bp, Homo sapiens
aaacctctttaacaagtgatgaaaacatattctttccctttttctttctttcacaaaagctttctttaaaaaggtagtgtggagagtaattataaaacatttaatgtccacttacgctttcgagtactgtttatcttttttcaaaattacctgcttcttatttcaagtattagtcactgtgaataacataatagtatttctcacagtaactctatttatttctcctgtaaagaacttgtcaatggtaagcataacacctacctcaaaaactgctacccaagagcaaatgcctccacacctttgaacatgcagttttctctgcaaagaatattctctctcctttttctgataggcaaaaccttaccattccatttaagctccagctaaaaatttacctcctgtctatggcctttcactcttccccatatgcaarttaaattatgcctctgttctcccctgtgatttatacataccctactacagtatcttacaacacttatcacaacagattttagatcttaattt

SEQ ID NO: 395051 - DNA, 599 bp, Homo sapiens
aaattacctgaggtaaattatcattcaaatattacatttcacttgaaatgactaattgtattttcctggatctatttctctctttaagatcagcaatgtttattatttaatttaaaaagtaatacatattcatttttctaaatttaagaaacacaaataaaagggaagaaaataaaatattcccatcaccaaatcggttagcaaatatttattaaatatctatttaatgggccagaactcatcctaggcaccaggtacacagagtaaataagacagatatggcccacatccccatggcccctgttaagaattcataaccttgaaataagtgacaataacccagatacctctctacatattttccatctccaccagaattttggactttttgaactgttcataatgaccctgtcaaggtcaatgtatattacaaatttatttaatatgctccttgcccctctgtgccaaatccaatcctaacttgcctgctcggggacactgggccagcaattcttttactttcctgcatcattaatttttcactctctactggattattctcaacctaggcakgctgttatttttcccacttataatat

SEQ ID NO: 395052 - DNA, 570 bp, Homo sapiens
gcaaactagtttcccagagaaggaaatgctaggaatattaggatgtgctaggtaagtgaggaygaagtatcaaaagttctggaagtcaatgcacagtttgaaaaaccatgtttgaaaattctaatgattcctcaaaggttgtgacagtacatttagttactgttcagcatggacagtgctgtggtgaacagagtttcaatttctagacctggctaagattagtttcctcattaataagaaggcaattttggtctctacctatgtgatcttatttttaggacatgataaaaataattagaaaactataaactctgtagaagggaattgttggctgtataccccattaccttagcaagtatgagcagtcaccctacactggggtgatcaaggcttgtgccttcattaagtgtatgacaggagagatagaaacaactgctcagatcttgacaccaggttctaacagtggaatgagctgatcatgggtgtgaggtctacagtggtcacatgagagtttaggagatattgtataattgcatttagatttgtgttctctataggcagagattatct

SEQ ID NO: 395053 - DNA, 563 bp, Homo sapiens
tctgatcttagttatttcttgccttctgctagcttttgaatgtgtttgctcttgcttttctagttcttttaattgtgatgttagggtgtcacaccatgaaatactatgcagccataaaaaataatgagttcatgtcctttgtagggacatagatgaaactggaaaccatcattctcagcaaaatatcacaaggacaaaaaaccaaacaccgcatgttctctctcactcatagagaatctgaaacatgcagatgaagaatgacctacttgaaaatttaccagccaagcctgtaagctgtgtagagtagtgtcaacacaaaggaaataacaattcaagtggattccaatgtgcaaccgcagtcattagtatggattggtgtcaaactttcaagcatttgccttatttattgaacaacctaataattcaaaatggtaatgggaagagggtggagtrggaagataaggatagactctgaaaccaaggtccttagggcttctatctgaatttcagaattactgtcaaataaatatttattggtatcctttctcttgtatgtagacaat

SEQ ID NO: 395054 - DNA, 615 bp, Homo sapiens
gggctgctctcatgctgcccactgaacttacctagagctgagtgttaaatggaaaactgatcttggggatgccattataatccattttcagagatcttcccacaacatacaggcagggccaaggagagaagccgtgggcctgtcctgtgctccctgccagagcttcttggtgtgtggtcatgacagccactttgtgatctctcagtaccctttcgctcactatctaaattatagctcttgatgacaaggagtttccttcatctctgcatcaatgcctaatacaatgcctgatacacagtatgtgcccccagattgttttgccgattgaataattaagcaaattgtyttgtcagatagtcatctagcctcctcttacatcctctcaatggcagacactccttacattctaagacggtctcttccttccatgttcttctctgttaatgctattcagtgtgacaatgtccatgtcacctaaatgtcattaagccatgcaaggttttgtcttgcagactttttattgtccaaacgctatctgtgctctcctacattaacgggattttatctgcatgtagttcccatttcatgcttccctgctctgtttcattataatac

SEQ ID NO: 395055 - DNA, 568 bp, Homo sapiens
agcattatttatttggctgtagttaaaaaaagtcaggaaatagaattcaaggaatttcagaaggattgctgattagctatccttctaaactacatgtatatgtgtgcattttgcagccaaagatacaaaagaaatgaaaaagtcactaaataggtttatatttaacaatcagaaagaaaaatttatagaaatgtcaaatgtttattyttatgctaatagtgctaccctttaaaatgaagcaaattataagaaccagtagttctctattaagacaactttttattgtccctaatgaaactaaatactgtatgtctgatataaatggattttttaaaatcttgaggagacttcgtttaaaacacatattttaagtaagaccatttccaattacacattagaaacttgaaacagatgcacagattatatcccaaatctgtaaaagcatgagaataataatgtataaactgctaaccttgagatctcaggaactccagtattttcctgaagattctatgcctctgaaaacatattttcagtctgttgatatttcctcattttttccttaaaa

SEQ ID NO: 395056 - DNA, 589 bp, Homo sapiens
tattttatttaaaatatcttattattaagataagttttgtctcttctaaattataatatccaaaagtaacaggataaattacaatttgacatttgataaattattttaaattacaaaaataatttttctgattttagcagatatattgaaaataaataaatgtatacataaaatacatattcacacaataaaatatgcaaacttttgaaaaagtaccatttaatactttcacataacatgctcagcacatttttttaattttaagctaaagagactatgatcttcttgagaacagtgtatatttcatttttatatccctagcaactctctcagagcttggtacatggtatcttctcaataaatgtttgttaaattgaattgaattagtcctggattttgaggttgacgtagccaatttattgacttctctgaatgtgttgtgaaggrgaagaaaatatagcaagaaaatccagcctcatcaagggagaatctaatagtagcaagtggtatacataccagttaatatggttccaggaaacacaggtgatggtgttagtaaatctttcttcatgcagtagaatgttcaaga

SEQ ID NO: 395057 - DNA, 621 bp, Homo sapiens
accattgttcattgtgtaatttgagaatctctggggctatcctcttgccatctcactgattccagagttttgattagaagggtgggcatattttgtaatttgtttttatcctgaggcaattttatgagatttcacattatagtacttcttaagtttaattctattttttctgcatgtattagaaaaaaaaaatcacctcttacttccaaaaatcctatctacttattatacttgtttgtctgtgttgttagaataatttatttaaaaattcttytaagcaatcattagattttatatcatatctttccattttattaatattagttgacaatacttggttaaagccaatttaaagaactgaagtacaaattattgctataggtttccatgacatactttccaaagacttttctgttcctggtgtgcagacttgaaaactaaggcataagatactggaataactcaccaaggtcatctatgagaatagccgacctggagagattattaccatcccgtgattcattctatctctttctagttctgatatccacctttaaatatctttttcaacatgaataaattgtcagcttcttatatttaaaaccatacactatagacttc

SEQ ID NO: 395058 - DNA, 621 bp, Homo sapiens
ctttccaactagttaatggactctttacatgagattgactgttttaagcaatgatcagtgaccttttggggagctttttttgttttgttttgacaggctgattctggctgcttagtttcaggaccaagaatttgaagcaacggaaaagagactttcagagctgtttgaacttgaactattttgtgtagatatgggaaagagtggtaaaatctgatgactaattttgaggcctcatggagatgggagctgaagctgagaaaattgtgtattggggaggcacaagagtaaaattccatttcttaattattttgtaactgaacaagacattgctgtttatttcctctcaacatgtcttccttgtgctgatttcttgcagacttctcaaatgagaagcatttgataccctggggttttggcttgctctcgacttcctccttcacttccagcctctggtgatagacttgtcttcctccacagcctctgctcagrcctcccactccttcctgttgctgtggccccagctggctacagtggcctctgtggcccaaattgtatgggaacaattgcggactccaccacaagcatctttctttccagtctcttctcagtcttattgtggac

SEQ ID NO: 395059 - DNA, 636 bp, Homo sapiens
ttagctccttaaagcttaattattttgccttttcatatgcagttgtataatacacctgaaatcaacttttgtgaatggtgcaagattgagggctctgagttttttcagtaatttcattggacgctcaaatgtgggaaatgtttttatagcatttctttcatcatctatttccccttgttttcttagtttctgggactcctattaattgaatattaactcttctgaactaattcactagttttcctgttccttctaatagtctacatctttgtgttctygtttactttatgggatagttcttcttctgatccttccattaaattttcaatttccacaattatattttaattccaagcattcttttttagtttccaaatgtttctttctttatagcctcctcttcttgttttatttatgcattatgttttcttgacctctctgaagatatttactgtagtttttttctttgaatttttctttcatgtccttgtatgttctttcatgccctgaattgtccatgtttcctctgaatttatttctttctcttcctaaagcccccatcccacttcttatgttaattgttataataattattagttatgttaataatttcctaattatttggtaatttcttaa

SEQ ID NO: 395060 - DNA, 545 bp, Homo sapiens
gtctgtatctgaactttctattccgttccactaatataatgtgccaatatcacactgttttgattactctggttttagaacaagtcttgaaatcagttaatgtaagtcttcaacctttgttctttcttttaaaaatattttggcttttctaggtcatttgcagttccatatarattttagaatcagcttgtcagtttccattaaaaaaaaaaaaagactgctgaggccaggtgtagtgacttatgcctgtaatcccagcactttgggaggccgaagcaggagaatcgcttgagcccaaaagtttgagaccagcctgagaaacatagtgaaacctcatctctacaaaaaaatacaaaaattggttagatgtggtggtatgtgcctgtagtcccagctgtttgggttgctgaggtggtagaatcacttgagcccaggaggtcaaacctgcagtgagccatgatagcgccactgcactctggcccaggtgacagagtgagatcctgtctcaagaaaataataaaaaagaaaaaaatttaaaagaaaaa

SEQ ID NO: 395061 - DNA, 545 bp, Homo sapiens
gtctgtatctgaactttctattccgttccactaatataatgtgccaatatcacactgttttgattactctggttttagaacaagtcttgaaatcagttaatgtaagtcttcaacctttgttctttcttttaaaaatattttggcttttctaggtcatttgcagttccatataaattttagaatcagcttgtcagtttccattaaaaaaaaaaaaagactgctgaggccaggtgtagtgacttatgcctgtaatcccagcactttgggaggccgaagcaggagaatcgcttgagcccaaaagtttgagaccagcctgagaaacatagtgaaacctcatctctacaaaaaaatacaaaaattggttagatgtggtggtatgtgcctgtagtcccagctgtttgggttgcygaggtggtagaatcacttgagcccaggaggtcaaacctgcagtgagccatgatagcgccactgcactctggcccaggtgacagagtgagatcctgtctcaagaaaataataaaaaagaaaaaaatttaaaagaaaaa

SEQ ID NO: 395062 - DNA, 424 bp, Homo sapiens
tattatgtaaacaaagagtaaagttaattagagtttactgagagtgcttacctrtaccagttaacttacatattagggaagatgtagttagtagtcactctggtttaaaagacagatatcagtaattcaacatcctgattttattaatgaggaaatagcagcaggaaggaagtgattcatacagggtcactgggactcagcccaaatgcccacccttggtatttttccatcatactctatctcttttgtggctacagacaaatttataaggtgagaatacagctaaaggtgaaggaaatagaaggagtcaaggaaggaaagaacaagggaaagccaatgttgggggccttccaaaacaagtggttctaggaatactcttccctttgttctagttgcttactgactataagaaatttgtaggtgt

SEQ ID NO: 395063 - DNA, 404 bp, Homo sapiens
acaccccaattgctgatgggaatttggctgatgactgctctagctactttctgctggataggggcgaagaaggggccctgtaggtgtagtgtcctccagaggggaactctttaggccagtggaagggccagcaggtcagtccaggggtcctcggtagaagttgttagttgaactcatttggggttccatttgtaagaccatctgtagcttgagggcctcaattctagaggaaacaaatttgacaagaaggttaaaaacacagggcccaaagrcaagtaacagcaagatggctgccacaggacctagaaaggggagaagccatgttgcccaactccagaggttggtataagagtttgaaaggtgttgtctgatttcagaagccttttcctgtaaacaccgggtgg

SEQ ID NO: 395064 - DNA, 584 bp, Homo sapiens
gcagtatcaatccttaaaggtctcccagggttgtcagaataacaacagcaaaatgcacaaatatataggtaaagttcttaacacaatgcctgtcatataatgccctctttaagtgattaatgtatatgacatcttcctaagatattgatttcagatagaaccaaaataaagtgtgtatgtgtgtgtgtgtgtgcaatgtgtacttctctgtgtgtgtaaccataaaacctgaggttcagaatggttgggtaatgagttcaaatgggtccaaagatatacaattcattaagcagttgtactggaagcagaaagaactttgagggacctcagagatcagtccagtctcttatatttcaaggacactgagttaagaaggaataattgacttgccatagctagtggaagcaacaagactagcccattagacttcataagttcaattcaatattatctcattaaaacacacttttcccagagygtcacacagtcttttttccacctgcctgccttcagcttatctttgcttcatgtacccaggttattgggcttctcttttacaaatgaaatatatatgcaaccctaaa

SEQ ID NO: 395065 - DNA, 180 bp, Homo sapiens
cagtttctccttgactctgtccattctgctattcagtctatctcttctctggttcctgttattcttttcattatataaccatgtcaatttcattactaagacctcctgctkcttcttttacacaacctcttaattttgtttcgtagaagctctacttacctattttgttgataatgttaa

SEQ ID NO: 395066 - DNA, 502 bp, Homo sapiens
taattatttgtattttagtagagacggggtttcactgtgttagacaggatggtctcgatctcctgacctcgtgatccacccgcctcagccttccaatatgctgggattacaggcgtgagccacygcgcctggtcccaaattaagttttaacattctgcatttaacattataatagaaaacatcaagatgtggtgtgacaaacacaaatctcattgtccaatgacatgagcacttaacaaagtccaaactgccataatcattttacaaataaacttccactctttttgagtttctggaacagaaatcacctcccaacttgagatacagttgagacaatcacgtttcctgagggagtaaaccactccaggaagaagttgagtaagactggaggcctgttaacacttgtgaactagggaaagtttcttcattaatgctggcagcggaggggaccttatatctggaaagagtcaataatgcattacactacttaggctgtagaaag

SEQ ID NO: 395067 - DNA, 556 bp, Homo sapiens
tatctgtccttttatgaagctggaataaaaagctgtgttattagaatgtgcccagaattttagatgcatgggtttgtaaggcaagggaatgtatttgggctgatgtcagagagtgaggcttagttttttttktttgtttgtttgtttgtttgttgtttttatgtaggggggtgttgtgtgttttttgttagtttgtttgttttgaatgtttctccacaaattcatgaaacctgattggaattagaatgaacagtaatggctaatgagataatatgaaggcatgtgagaatcatcattcctctcttcatcaacccacccctatttaatcctcctaactgaatgctattcttctgtagtttgtacttatcagggcctagccaaataatgctgtgaagcccagaacaagatcatactttgtgagtgggctatattatatatattatacatatactgtcactttgccatttgatgctcactgcagacattagcaatccattacagcatgctttcctactgactccaaataaatcctcagtatccttttcaacagagggtc

SEQ ID NO: 395068 - DNA, 556 bp, Homo sapiens
tatctgtccttttatgaagctggaataaaaagctgtgttattagaatgtgcccagaattttagatgcatgggtttgtaaggcaagggaatgtatttgggctgatgtcagagagtgaggcttagttttttttgtttgtttgtttgtttgtttgttgtttttatgkaggggggtgttgtgtgttttttgttagtttgtttgttttgaatgtttctccacaaattcatgaaacctgattggaattagaatgaacagtaatggctaatgagataatatgaaggcatgtgagaatcatcattcctctcttcatcaacccacccctatttaatcctcctaactgaatgctattcttctgtagtttgtacttatcagggcctagccaaataatgctgtgaagcccagaacaagatcatactttgtgagtgggctatattatatatattatacatatactgtcactttgccatttgatgctcactgcagacattagcaatccattacagcatgctttcctactgactccaaataaatcctcagtatccttttcaacagagggtc

SEQ ID NO: 395069 - DNA, 556 bp, Homo sapiens
tatctgtccttttatgaagctggaataaaaagctgtgttattagaatgtgcccagaattttagatgcatgggtttgtaaggcaagggaatgtatttgggctgatgtcagagagtgaggcttagttttttttgtttgtttgtttgtttgtttgttgtttttatgtaggggggtgttgtgtgttttttgttagtttgtttgttttgaatgtttctccacaaattcatgaaacctgattggaattagaatgaacagtaatggctaatgagataataygaaggcatgtgagaatcatcattcctctcttcatcaacccacccctatttaatcctcctaactgaatgctattcttctgtagtttgtacttatcagggcctagccaaataatgctgtgaagcccagaacaagatcatactttgtgagtgggctatattatatatattatacatatactgtcactttgccatttgatgctcactgcagacattagcaatccattacagcatgctttcctactgactccaaataaatcctcagtatccttttcaacagagggtc

SEQ ID NO: 395070 - DNA, 546 bp, Homo sapiens
tctctatcctaccccaaaggcacacacctacacacraatgcacctgcacacagaaggagagttgcattgtctgattggcatctcaaactaaggacccatcatttcaaatcatcctctctccctctcctctgcatagctgatatttctgaagattccattgatgtttcaagttagtgacaacttcccttagacccacataatcctcactttcggtacgtatctcaatttcttgtaattcaacacatatgtataattaaatgagttgtagcttctctactacaccaaagacattttccctccctctttccaagcccacaacagttacttcagatacatgtggaggacttacctgttggtgtctcccatctctccatagctagctctatttttgacaaatatcatgagagccaaatgacccttctttttgtcctaatgtgcttccttccttcagtaaaatctgaggccactgtcgtgcctgatgctggctctccataagtgccttcgtggctgagagcacctagagggaggactcaataatttgctatt

SEQ ID NO: 395071 - DNA, 579 bp, Homo sapiens
attgctctttgtttaggttttttgtctcttatctttctttttactgtaacatttcccaagtgttttccatgagacactggtcccatgagatacatgaccaaagaagtcccatgacaaaattatgcaatcttacttattctcttccctcttggggatacaccaagcatatcagtttgctagattttctagaaaatcctagagctaaacaatcaaaaccaacaaaaacagtaagaaaatttttatttagcttgcttgaacataaaatatactaatcctaactcacacattctttcaacaaatgactgtttgtacgattaccatgagtgatggccagttgtgtgagtgtatragtgtgtagatatgtgtgtgtgtgacatcttttaagcaccagttgaacctgtgccttaagcaaacactttgggtgtcacttttacattgcatttcacacagctgatcaagtaattttttaaatactagatataattatatatttttggaaaaattatccagtaaagtagacattctgaatgactacagtggcattcaagatcctttagagtttcccttagtcataatgtt

SEQ ID NO: 395072 - DNA, 608 bp, Homo sapiens
ccatcaacagagtaaacagacagcctccacaatgggagaaaatattagcaaactatgcatctgacaaaggtttaatatcaaggatcaataaggaacttcagcaactcaacaaccaaaatacaaataactccattaaaaagtgggcaaaggacatgactagacacttctccaaagaaaacacacatgcagccaacaaacatgaaaaaatattccgcatcactaattattatagaaatgcaaatcaaaaccacaatgagataccctttcacaccagtcagaatggctattactaaaaagtcaaaaaataacagatgctggcaaggccckggagaagagagaatgtttacatactgttggtagggaattagttcaaccactgtagaaagtagtttggagattttgcacagaacttagaactaccattcaactagcaatcatattattggacaggtacccaaaggaaaataaattctaccaaaaatacacatgtatgttcatgtgtatgttcatcacaccactattcacaatagcaaagacatggactcaacctgggttcccatcaacagtggattgaataaataaaatgcggtgcatagataccatggaat

SEQ ID NO: 395073 - DNA, 612 bp, Homo sapiens
agcccttcctcctggtagttcagccttaaattgtatgtcacaatttaaatgtcagtatgcttgagtttatgtgcccctcatctaccttcctagtgtccagtgcttgctcttctcatagccctcatcacagagcatttaacccctctctgcccactctattatcagtgctgagcagaggctctatcttgttcacttatacatacctaacacctagatgagtgcttggcacatagtaattacattggttttgaagcacaacatacacatttttgaaaagaacaaatgcatcaatcaagtcttattcctttaaatcaatagggcgtatcttacatgatcaattcgtcaatgagagggtgagagagataagtaggattgttttgaggactatctctggagaatcagattgctgggaaataggtgtgtctaatccagcttcacaagaaaccagggaaccccttgtgtctagcagctcaaatctaaagtattttaaggtcatgagtgctagaggttgccagtcctgacaagttcttgcatarctggcatttaccccaagatgcctggtaaggaactcttactcaaagttgtcctcactcttgcaagaatagcaaggga

SEQ ID NO: 395074 - DNA, 499 bp, Homo sapiens
atatataagccctaaccaagtgccagggatccagcagtgaacaaaacagcaaaatcttgaccttcasagagctgaatattctagtgggagaggcatgcaataacagcaaataagtaaaaattgtagtatgttagatagtgtcagtgccatgaagaaaaataaggcataaagtgctgagagacagatgctgccataaggaatttaaaaattttaaagtttaacagatttaggttcaaaacaggaaaactcttttatagagattatacactattgagtatccaacttaaactctgtgactttcccttgctgtcaaatgagtaaaaattaatatctacttacccattgaatgttgcattaaaacatataacatgtttgacatattgtaggcatgcagtatactgcgccaaatacatgactatataaaaacctgcagaggtggatatcctcacatttatggttaactgtattcacctctttgatctctgcattctaaaataca

SEQ ID NO: 395075 - DNA, 499 bp, Homo sapiens
atatataagccctaaccaagtgccagggatccagcagtgaacaaaacagcaaaatcttgaccttcagagagctgaatattctagtgggagaggcatgcaataacagcaaataagtaaaaattgtagtatgttagatagtgtcagtgccatgaagaaaaataaggcataaagtgctgagagacagatgctgccataaggaatttaaaaattttaaagtttaacagatttaggttcaaaacaggaaaactcwtttatagagattatacactattgagtatccaacttaaactctgtgactttcccttgctgtcaaatgagtaaaaattaatatctacttacccattgaatgttgcattaaaacatataacatgtttgacatattgtaggcatgcagtatactgcgccaaatacatgactatataaaaacctgcagaggtggatatcctcacatttatggttaactgtattcacctctttgatctctgcattctaaaataca

SEQ ID NO: 395076 - DNA, 499 bp, Homo sapiens
atatataagccctaaccaagtgccagggatccagcagtgaacaaaacagcaaaatcttgaccttcagagagctgaatattctagtgggagaggcatgcaataacagcaaataagtaaaaattgtagtatgttagatagtgtcagtgccatgaagaaaaataaggcataaagtgctgagagacagatgctgccataaggaatttaaaaattttaaagtttaacagatttaggttcaaaacaggaaaactcttttatagagattatacactattgagtatccaacttaaactctgtgactttcccttgctgtcaaatgagtaaaaattaatatctacttacccattgaatgttgcattaaaacatataacatgtttgacatattgtargcatgcagtatactgcgccaaatacatgactatataaaaacctgcagaggtggatatcctcacatttatggttaactgtattcacctctttgatctctgcattctaaaataca

SEQ ID NO: 395077 - DNA, 574 bp, Homo sapiens
aaggaccagaaaaatatgccagtaggagttcacagaagtctgtgctcacccagatataggagggcgaattcaaagccacccaaaacaacaagaaactggaataaggttctgctctctccttattatgttaagttcttcttcaagtatttagatgactgacaaggaaaagatgtcaccacagttaaaactttgyccatttatctgtctgcttctgtctgcaatgggcccccggtttggacaacttcaggtggctaggccctttaatcagaacaaagccaatttaaatgaatggtgacttaaaccactagttctcattctgaacattaaatcactgcagaagattattttttaaatactcagtgctattttgtttgtttgtttgtttgttttttatttcccctaatgtgcacgctaagtttgaatgtctttggcttaaggggaaaaaaattaaattcagggtaatctcagtcagaaccaatatcagattatcccatgcagctgtatctagaacatgagccaggcactgaaacaaacaggtatgaggattaggattagaggagtgtcctgacaactc

SEQ ID NO: 395078 - DNA, 647 bp, Homo sapiens
ttttaaaatcaaaaaactgttttcattttcctatctcttgactatttcaagggagagtcctacctggaagtacacagaagaagataataaagtaaaaaccgatttcagcctagagctcctatgaatcatttagttttgaatttccaaatgctaatcaccttgaggaatctaccgaagcccaacaaaagctaatctttgatatactatgctcctttttacataagaagacaatgaatggggatgagacctcgaactcttacccttgtgtttggtccatgttaggtaccaagtgattgctctccaaatgagaaaatggctcaatcaagagatatgcttaagttggggctgaagtagaatataaaacaggtcaagttttaaacaataagcatgtyaagacagaaaatatttgagttagaaactaaattaaaggtttcatcacaaatggtgaaatcacaaagggtttaatttatttggacatttgagtagccattataagcaattgtccagacagaatcagtataaaatgttagatgtatttccatcaatgactggaatttaaaaccacagaactaagcaggttaaacgccaaggttggttttcagtcagcaccacaaacagctgcaataggccttactaaggcccttgcc

SEQ ID NO: 395079 - DNA, 566 bp, Homo sapiens
atcattccctcctctgtgatatacttctaatatctacttgttataatagcctgttgacatgtttatgactattttctctattagactataagctccttgaggcatgagctgtaatttaatatcttattcatcagtatctactatagtacatgtgatgtaatggatacccaaagcttatttggataatgtaaattgatatgtttaactatttttgaggtgtcagccaaaggtcactggtattctggggcagagatacatggcagatttaattggggtaattcaaacatttaatattgcttcaatatgtcttgatatccttaaattgaaaataagatcagcttgttctagctatagatttaaaaattacttaaaatcatttcccactttttcaggaagagaaacgtaatattgcaagttgtgagttcaaaacaatgatcagtaagtataagtcaaagaaagccttgaaataagagtaataggcatgtaaatatctctcaataatatttgttatcaattcagaggtgataaagttttttttttttwaaaaaaaagagctgcccaggaca

SEQ ID NO: 395080 - DNA, 651 bp, Homo sapiens
agttcttttcattatgaatgcaacactttcttttcccctcccacttttatagctctattgtctgtaatcactrtcaaggttgtatcaccatgaggcctgttcttcccgaaaagtctctatcattctccatgaccattagcaagttttgagagtaagcactaatgtattactgtcttagtccattttctgctgctgtagcagaataccatagtctggacactgtacaaagcaaaggaattgatttaaatcatggttctggaggctgggaagtccaagattcaggaagtccatctagtgaaggccttcttgctgcattgtaacatggtggaagtacatcctatgatagaaaaagagaggaaattgggccaaattcctccttttttatcaataacccactcctgaagtaacagcattaatccattcatggacctaagcacctcttataggtctggattctcaacactgttacaatggaaattaaatttcaacaggagttttagagggggcattacaaccatagcagttaccatgaaacacaaacttaggctggaagtaaaggctcttcattgttgaactccagtataattcaccacaattatcattgttgcctttattgcattttctgatccagataagtgcaattgctagttc

SEQ ID NO: 395081 - DNA, 630 bp, Homo sapiens
aagctgggccatcactggaggcaattgtccagggctttacaatacaagcgtgcatttgttcaaagtcacagaccctaagctgttaaaaggtacagcttataattcttggttcttgaacaaggaaatttcctttccaattgtcaactgtgaagcagtcaattttaagttctcttttgcaatctttgcaatatatacagcttcattgttcctgcctggaagaaaaaaggcagcagctggaggaagagacttgttcttaattctgagccgaaattctgttcagttgccatttgctgatagacccatgtgtacccaaacctacggtcaaaaaatatgtctacggcaaattgtgatagttcccaagttyacaggatgtgaaaaacagggcagataagaatctagtgcttcatggtgccacagatgtccaaaagcagaacagatactgctgtttagcagaatgcatgggtcaccagctataacaactacctaattaactcttacatcctactttaagtttctgcttattatgtttatcagcatcatgcaaaatctttttgggtagtggattcacttataccattttatgctgccctatttatcttctctatttcatctactacttggaacaaacac

SEQ ID NO: 395082 - DNA, 541 bp, Homo sapiens
tcctcctttttttgcatgtggatatccagttttcctaccaccattggttgaaaacactgtccttccccattaaataatcttagtagccttgtcaaaattgtttgaccacatatatgagagtttattcgtgggctctccattctatttcactggtctgtacatctgtcttaagtcactactatactgttttkattactatagctttatattaagttttaaaattaacatgtctgagtcctccaggtgtgttctttattccttttcttttattaatacatatttgcacatgtttatggaatacaggtgatactgtgatacattcatagaatgtataataatcaactcagtatttaagttattcatcaccttgaatatttaccatttctttgtgttaggaatattgcaaatctgcttttctaactattttgaaatatacaatatattatctttaactatagtcaccctactgtgctatcaatcatcagaacttattccttctctctaatagtattttttgtacctattaacctacctgtctcca

SEQ ID NO: 395083 - DNA, 541 bp, Homo sapiens
tcctcctttttttgcatgtggatatccagttttcctaccaccattggttgaaaacactgtccttccccattaaataatcttagtagccttgtcaaaattgtttgaccacatatatgagagtttattcgtgggctctccattctatttcactggtctgtacatctgtcttaagtcactactatactgtttttattactatagctttatattaagttttaaaattaacatgtctgagtcctccaggtgtgttctttattccttttcttttattaatacatatttgcacatgtttatggaatacaggtgatactgtgatacattcatagaatgtataataatcaactcagtatttaagttattcatcaccttgaatawttaccatttctttgtgttaggaatattgcaaatctgcttttctaactattttgaaatatacaatatattatctttaactatagtcaccctactgtgctatcaatcatcagaacttattccttctctctaatagtattttttgtacctattaacctacctgtctcca

SEQ ID NO: 395084 - DNA, 589 bp, Homo sapiens
cttaagttgtaaagttaggttgttgatttgaaatctttctagttttacaatgtaagtgtttatagctgtaaatttccacattagaactgcttgtgctgcatcccataagttttggtctgttgtgttttcattttcatttgcctgtaagtacttcttaatttctcttgtaatttcttctttgatccattggttgtttaacagtgtgttgtttaattttcacaatttttcaagtttctcagttttacttctgttatttatttctaaatttttttctgtagtgatcagagaagatactttgtgtgatatttatattttcaaaaaaaatctgttgataatctgtggsctaacatatggagtatcctagaaaatggctcatatgcacttgaaaaaaaatgtatatgctgttgattagagtgtgatgtatatgtctatcaggtttatttattgttatgttgttggttatgttctttgttttcttacttattctgtctggttgttatatatattattaagagagagatattgatgtctccaactattattatagaactgcttgtttctctctgcaattttatcagttttagcttcc

SEQ ID NO: 395085 - DNA, 589 bp, Homo sapiens
cttaagttgtaaagttaggttgttgatttgaaatctttctagttttacaatgtaagtgtttatagctgtaaatttccacattagaactgcttgtgctgcatcccataagttttggtctgttgtgttttcattttcatttgcctgtaagtacttcttaatttctcttgtaatttcttctttgatccattggttgtttaacagtgtgttgtttaattttcacaatttttcaagtttctcagttttacttctgttatttatttctaaatttttttctgtagtgatcagagaagatactttgtgtgatatttatattttcaaaaaaaatctgttgataatctgtggcctaacatatggagtatcctagaaaatggctcatatgcacttgaaaaaaaatgtatatgctgttgattagagtgtgatgtatatgtctatcaggtttatttattgttatgttgttggttatgttctttgttttcttacttattctgtctggttgttatatatattattaagagagagataytgatgtctccaactattattatagaactgcttgtttctctctgcaattttatcagttttagcttcc

SEQ ID NO: 395086 - DNA, 529 bp, Homo sapiens
gtgttccacaggttctgttcatttttcatcaatattttttattttgttcttcaaattcaatagtttccattgttttgccttcaagttcactgatccttccttctgcctgctcaaatatgccttctaattcccctgatatggtttggctctgtgtccccacccaaatttcatctcgaattctaattttaatgcccacatatcggaggaggaacctggtgggaggttattgaataatgagggcagasaatctggttgtttgaaagtgtgtggcccctcccgcttcaagctctctctctcctgtcactgtgtgaagaaggtgttactttccccttcgctttagttatgattgtaagttttccaaggcctcccagtcatgcttcctgttaaacctgcagaactgtgagtcaattaaacctcttcataaattactcagtctgaggtagttctgtacagcaatgtgagaatggactaatacatccccccagtagatttttaataatattttagctattgtactttttagtttaga

SEQ ID NO: 395087 - DNA, 607 bp, Homo sapiens
tcatagccatagcaatcactcaagagaaagagataaagcgcatccaaatttgtaaagaggaattcaaaatggtcactgtttgctgatgatgtaaccgtttaccttgaaaaccctaaggacacacccagaaagctcctagaactgataaaagaattcagcaaagtttccagatacaaaattaatgtacacaacagtagctctcttatacaccaaacagcraccaagtggagaatcaaatcaagaactcaacctcttttacaatagctgcaaagaaaaaaaaaaagaaagaaaagaaaaccactattacttcaaaagcttttctcctagttgatgtgccatcaggccttgttcagaaacaatttctgttaatttctttttttttcttttgatgagccatactttcctgtttctctgtatgccttgtgactttttgttgaaaagtggacacttgaatctaataatatggcaactgaaaatcagatttcagatttttgggggtggtgatattattttcatatatttattcttattgtttttattgttgtatgttgtctctgggccaaggagtattctgacacgctaacttaaagtcttctcaggtctcttc

SEQ ID NO: 395088 - DNA, 678 bp, Homo sapiens
taattttaagatgtacttgtcttcccataatactacttacaaacatagaaaataaactatatatatatatgattggagggtattaaaacatacatcttggaaatattctaacaaaagtttttgaagactccatgggaattttaaaaagccaagaaaaagttaaggaaaaatttattcttctcgatatcaagacttcttatattatttaaaacaatatttggaaatagaaaggcaaattgaccastaacacaatggacagttttaaaacagatttacacatatgtgaaacaccaatgtatgtgtggcatatcagatcagtggagagaaaaggaattattcccaaaatggaacttaataaaataattattcttgtataaaataaaaatattggacctctctgtcactttatatacaaatatcaaattgagacaaataaagggcttaaatttcaaaatctacatagtaaaatgtttggaaaaactatagatgattatctcttagaatatgggctgggcagtcttttcataaacaagttacaaaaagcactagctatgtaagaaaaggatgatcatttgagttctaataaaactaaaaacttttccttttttcaacacatatcttgaaccaaatgaaaagaatggagaaacagttaagagatatttgcagtatatgtaacta

SEQ ID NO: 395089 - DNA, 621 bp, Homo sapiens
taaggggtggctgagcgacccatattcaaataggtttggaaatgccaagtaaatacatttcggcattcatttcctgcaggaccgaatagatgaatcatgaatgccacaactctaaaaaggggtggaggggcgatgttggggcacagaagccttctctggggtatcttatagaaatacattgaggctgttcttggaggtgccagcaggtcctaccttcagggaaaaatgtgtcccaagcagaagtgtttttggtttggagggatccattggagccagggaggcagccaaaaaggagatgttgaagagagggaagaagagggtgattggctccatttgggcctgcagtcaccattcacagaaaccacagtgtgaacagcgtccctcaaagttgtgcaactacagaccccaaacttccctcctctgtctgctgtctccctggccctgcsctcatcagcccagcccctctgatctgctcgtgcccttaccacccctttctcctctcttctgtaggctacctgacagtcaacattgagcctctcccccctgtggtggctggagacgccgtgactttgaagtgtaacttcaagacagatgggcgcatgcgggagatcgtgtggtacc

SEQ ID NO: 395090 - DNA, 565 bp, Homo sapiens
tagtgtcaaacagacctagaatgaaatcttgggtaattaatttctagctgggtggcaaagcgcaagtttcctcatctgtaaaatggagaaataacagtaacttgctcatagagttctgattaagtaaaataatgtatgcagggagtcaagagcagctggcaggcaataagtgcaaaataagcataagctgtagctattatcttcacttttcttttctgatctctaagtcactgcccaacattctagaatcaagaaagttttgaaaggaaatggaaaggagaagaaggattcaaccaaaagaaaaatggcacggctcactcttctactttcgaccaaagtaaccagtgtttaaggttgagtgagcataacaaggagaaagtctcactttgattttcagcakcactctaacacttgcttagcatgttctccaaacagcaaagagtagacttttaccatgcattttcaatttgcacttatttcttttaaaaatagattaatataaatctttaaaaagtaattcgattgtactatcaagtgcataatagtacaggtgctacaaaaacaa

SEQ ID NO: 395091 - DNA, 561 bp, Homo sapiens
gcaacaattttggtggcagtattttgaaaagactccaagagcaaaagtacaaagagccgtggcaattgccaagtgcaaagtgatgacctgaaggaaggtattcttacctactggaattaaaacaaaaaggctagattttacagaagagcctgaatatccatttaatcctttaagaaccacctagagttaaatgataaaatcatgtaactagtgggaaaacttgagactatgaatgagattaatgaacattgtgggttytagagtcagtatccagattaaacagtctattccaacccctggacacattatttcttctctatgtggctttgtttcctcatatgtaaaatgagaataataaaggcacctatattataacattatatgagcattcaattatttaatacatgagaaagtatttatataacaggacctaccacatagaacgtgttcaattagtgttacctttttttttttttttttttttttttttttgagacagagttttgcccttgcttttattgcccaggctggagtgcaattgtgtgatctcagctcactgca

SEQ ID NO: 395092 - DNA, 563 bp, Homo sapiens
gaccttggtttgaaactaaactctgctgcttattaggtgggtacttcagagaaattactttttatctctcaatcctcagttttyttatcattaaatgagtttaataacttctatcccataaagttattgtgaagattcctgggaaatatgtatatacatatttaataaccatcagcacaaagaatggcatgcaatagttgctctatagaagttaattcctttccactttcatgtcaatatttttaacctagctgttagatgatctcagatctcagtcctagtggaggaatttgaactggactttttcctcccttaacatagtacaatgtgtatgtaaatcactagtaggaattctgtcattagaatttttaaagtgtaagttaaagttaatattttgctttatgaataagatatttttgttacttctgggtggatgtcaaggaagaaatcagtacaaggtaatcccttaatatttccttgaaatgtatgtttgtagtattatgcctgattgtaatagcatgggcaaaatcagttaaaatatagtgagctgcacacaaaacctt

SEQ ID NO: 395093 - DNA, 563 bp, Homo sapiens
gaccttggtttgaaactaaactctgctgcttattaggtgggtacttcagagaaattactttttatctctcaatcctcagttttcttawcattaaatgagtttaataacttctatcccataaagttattgtgaagattcctgggaaatatgtatatacatatttaataaccatcagcacaaagaatggcatgcaatagttgctctatagaagttaattcctttccactttcatgtcaatatttttaacctagctgttagatgatctcagatctcagtcctagtggaggaatttgaactggactttttcctcccttaacatagtacaatgtgtatgtaaatcactagtaggaattctgtcattagaatttttaaagtgtaagttaaagttaatattttgctttatgaataagatatttttgttacttctgggtggatgtcaaggaagaaatcagtacaaggtaatcccttaatatttccttgaaatgtatgtttgtagtattatgcctgattgtaatagcatgggcaaaatcagttaaaatatagtgagctgcacacaaaacctt

SEQ ID NO: 395094 - DNA, 636 bp, Homo sapiens
acagtcgacatttagtttagttgctatttctggtggcacgtgtcttgcatgggcctcatgagtatgttgacacttgcgtattgtgcatttaagaagtacctggagaggactcctcccctgtcaaaaagttttctccatcagttttcctatagacatttgctacaattccaggttaatttcttttgattttctgtttttgaacaggttattttatgagtgaagtcactcaatgagtatytcttgtgttcctattatataacaagtcccgtgtagggtctatagtcaatcacttccacctgtggaaaaataattagcttgtttggatggggatagggagaaagaaaacaatttggggagggcactgggctcctcagtgtggtaacacaaggctgatggagaggaaaagagtgtatgaaactttgactgtaggagatgcttaatatgtatttattacataaaatgtattaaaataaacttgtggttctagcttcattaggttgtgataaggtggaagggccagtgtcctgagtgtcagaaaacatgggttttgcatggctagccctgccacccagccacttagctgtgaccctttgaacaagccatttcacttttctgggctgtgacttctttattagt

SEQ ID NO: 395095 - DNA, 533 bp, Homo sapiens
ttctgacatgaaaaagaagtccttaaaccaaaaataataataataataataacaataaagggaccactgtcttagaaaacattagttacccgttctctttccttctcaaggaggaatgacttcagtgcaattaacaatccrtgtctttgtgtcccagtttgatcttgcccagtttgaaacagcttgcactactagattggttcttgtaagtgttgaaagttcttaattacaaattaaatcttgatcctgtaacttggtagtaatcctaccatctatatataactttacgattttcagaggactttctttattgaaggcagtatgaagcaggaagggcaggcattgtgccactttacggttggggaaactgagacacagagagagtaaatgacttgtttgggtcatagcagttagtagtaaatgtcagaggagggatggaacctagattgggtgactccttgttcagtgctcttttatttttacttctcctgttcatattgaattgtttcagaggttggaattaggaacaaaat

SEQ ID NO: 395096 - DNA, 533 bp, Homo sapiens
ttctgacatgaaaaagaagtccttaaaccaaaaataataataataataataacaataaagggaccactgtcttagaaaacattagttacccgttctctttccttctcaaggaggaatgacttcagtgcaattaacaatccgtgtctttstgtcccagtttgatcttgcccagtttgaaacagcttgcactactagattggttcttgtaagtgttgaaagttcttaattacaaattaaatcttgatcctgtaacttggtagtaatcctaccatctatatataactttacgattttcagaggactttctttattgaaggcagtatgaagcaggaagggcaggcattgtgccactttacggttggggaaactgagacacagagagagtaaatgacttgtttgggtcatagcagttagtagtaaatgtcagaggagggatggaacctagattgggtgactccttgttcagtgctcttttatttttacttctcctgttcatattgaattgtttcagaggttggaattaggaacaaaat

SEQ ID NO: 395097 - DNA, 533 bp, Homo sapiens
ttctgacatgaaaaagaagtccttaaaccaaaaataataataataataataacaataaagggaccactgtcttagaaaacattagttacccgttctctttccttctcaaggaggaatgacttcagtgcaattaacaatccgtgtctttgtgtcccagtttgatcttgcccagtttgaaacagcttgcactactrgattggttcttgtaagtgttgaaagttcttaattacaaattaaatcttgatcctgtaacttggtagtaatcctaccatctatatataactttacgattttcagaggactttctttattgaaggcagtatgaagcaggaagggcaggcattgtgccactttacggttggggaaactgagacacagagagagtaaatgacttgtttgggtcatagcagttagtagtaaatgtcagaggagggatggaacctagattgggtgactccttgttcagtgctcttttatttttacttctcctgttcatattgaattgtttcagaggttggaattaggaacaaaat

SEQ ID NO: 395098 - DNA, 632 bp, Homo sapiens
atttaacttatgcattatggttaggttattttcttctctccactcattgtttttagctgcctatttttatattcactttctgacaattctatgataaaccaccatcttgagggtttttttcctcctagataaaagcagcttttgaaataattggagtactgtgaacaaaagttataatgaagcatttacttctggaattgatttaaagaaaagtactacggacatcaaagcccattagtatttttctcaagactaaagttgtcagaatttagaggwacatgggatggaaatggatctgtccctcacttaactctgagaggagcagtttggggtgttctgagaggatgggagcttggagtatagggaactccaaccccgggagcagagaaatggtgggatcacccatgagcagagctcattcagagaagagacgggagtgaattagaaagtgaacatgcaaaaattgagcaaggaatttctctttgggaggaagggaggtagggaggataaaaccagtgagataaatgtcagtgaataaacaacatttacaagaacaaattctgcccaatatagaacatctgagtgagctggttagtggaaatggtgcctcgagataaaaaacaatatttagg

SEQ ID NO: 395099 - DNA, 613 bp, Homo sapiens
taaagttgtcagaatttagaggaacatgggatggaaatggatctgtccctcacttaactctgagaggagcagtttggggtgttctgagaggatgggagcttggagtatagggaactccaaccccgggagcagagaaatggtgggatcacccatgagcagagctcattcagagaagagacgggagtgaattagaaagtgaacatgcaaaaattgagcaaggaatttctctttgggaggaagggaggtagggaggataaaaccagtgagataaatgtcagtgaataaacaacatttacaagaacaaattctgcccaatatagaacatctgagtgagctggttagtggaaatggtgcctcgagataaaaaacaatatttagggatttcccaatattcccatcctatattttgtgggatctttaattcagcatcartgttccattttactgcaagcaagcctttagtcaatactttctaccttgcttctaaaataattaggatttaaaggaaaatgtctcctagcggtggagtgcctgggctctggggcagacattgtacccatccttactctgccacttactcacctttggaccttgggcaagtgagctggtctcc

SEQ ID NO: 395100 - DNA, 583 bp, Homo sapiens
aattaaaatgcaaaatcaattctatttctggtcctggtaatcaactatggaaaacagtttcaatgataagaatgcctgcagaagtatgaggttatatttatactaacagaaacaatttcttccctcagttacatgattatggtttcaacatttggagtttggttactaaaagaaaagctgtaatcatctcttcattaattgttgtacatttttcactgtctgagtttgtctgtgtacatgtaggcatgttcacatatataaaatggcaaaagtgaagaagagagaaagcagaaggcaagaggactttaaaakggagacttggtttataatttaagctgcaagtttcaaattaaaccaccaccaaaagaaacagtgaaagcacagttttgatgatagttgtaattaaagagtgtaaaaaaaaaaagaataactgcatcaactgcatctacaccaatctaggtgtttccagacccattttaaataacttcaatttgctaagtctgcaagcaaaatcagttgcaaggcatagcagcaaaataaatacacacaaaatgttgcagtgacttcatcacaccaagaggct

SEQ ID NO: 395101 - DNA, 601 bp, Homo sapiens
cttttattcaaagtgccttgagcaaaagaaaattccttcaggcacggtttgatccagggarctcgaacagtgtcatcagagctcctccaaattattccaatctgttttccatctgttttcctctgggttggcttccttctacagcaggctgtctacttttagttgcaagatgactgacagtgactccagccatccaaatgcctttctccaggtcactgcagcagaagtcccaaaatatgactctaacaatgtcgtatgcccgtacttgaaccaatcacagtggccacaggaatgcaatattctaattggcctttgaaagtcaatattctaattctgacaggcttgggtcacttgcccccatttggagctgggtatggggtaggtccattttacacgaattacatggaagtagaggaggaaaggcaggcccccaagaaaaattaagattgctgttagcagaaaaagaggagatagatatgggatattcaagctacatccatgtactacaagcaattatttctgattcctatccagaattctgtcctaaaagtgttcccacttggtaaatcaggtacatagatatgaagttctcacccccgca

SEQ ID NO: 395102 - DNA, 507 bp, Homo sapiens
aaggaaatgctgaaaaatgcactctcccaattcaaagaaattcttaaaggcattatctggaagtggggtctaggaagtggggaaatccttaccaaaaaaaaaaaaaagccagttaaagcaatatctgaggaattttccttctgttctccaaatgggcatgctacaacaattttttaagtatatacaattgacacagtacaaacaacagtacatttgtgtacacgcttgtatatgtgtgtrtatatatatatatacacacacatatatataaacaattgcacatatatatacaattctgattgcataggtacacaatctgtttagcaaaataaaggaaacctaaataatgttttttctcaaggctaaagttgctactaattaaaatgaaatatgttctaaatgattctgaaattgcctgcagtgagaaatactgagtctatttccatgacacccaagctgattctaacactttccatcttaatgagtatcctcagttgagttaccagg

SEQ ID NO: 395103 - DNA, 502 bp, Homo sapiens
tccctgtggtttgtttcatttaccttatttctgatagttaaatgccgccaaccagttggtctcccttactcttgggttcctttatctccattgataacaaagacacwgattccatttcagccacccccatcccattttccaggctgcagaagaaagccaccacacccagggcagccaccacaagctttccaagaatactcctcctcccccttgtgggagttgtggttagagaatggctgttgctcatcctaggtccacttcaccactcccatttctgagacttcagatttcttcctctccagcagggatcagctcaggaccagatcataaatattttaggctttgtgagccaagaggcaaaattcaacaggtattcttgccaaaggctgatagttttgtttgtttgtttaacatttaaaaattgtaaaaaccattcttacctttcaggccatacagaaacagacagcaggccagatgtggcccacagtctgtagtttgccaa

SEQ ID NO: 395104 - DNA, 561 bp, Homo sapiens
tatagaggcctaacccagtgatgatgaggagcagttactgggacttggagacaggcataactgtggaaagggttgctggaaagaagctgggatcctaagttaagcaacacagtcatcacttttgacattttcctctaatattttgtgcagttatgcagcaaattstatttcaaaggtaaaccttatttaaaaccccatagcatcatatgactcctatttttaaaagtctgcaaaataattacatccctttctttagttatccttatcatattactacagctgatggaattcagttaagcagcattggttgtctattcaaaactaaattaatatagtgaggatttattttaagttttcattatttttttttacatcatagcccttgaaacatgacagtttgtcattccatgtatttgcaggatttttttttaagaaaaccatcctgattctctattttcttactttcaaataccatcacagtataatttattttaatcccttatcctgtgggtcacttttatctgatgattgctttcatttaaattttaattggggtttgaa

SEQ ID NO: 395105 - DNA, 586 bp, Homo sapiens
ttaaatgttctaatcacaaaaaaagataagtgtatgaggtgctggatatactaattagcttgatttaatcattctataatatatgatattatatatatatatcaaatcatcacattttatagcataaatatatataatttttattttccaaatataccttaatttttaagaaacagagaaagcagagtctatgggttccagaaggttggcaatttggggttggttctagaccacgtgcttttttttttttcttaatggaatatgaggtgaggtcagcagctgaggtggtgggaggagtcatgagtttggtaagagtaacttcagagaactgaaaggttaatttactagaagatggtaagattgctgggcaatcctgtgctgagttgccatttgagattttgtgaatgtccatttgctgtcaacatcgtcgagtgatgtttttttctccrgcatctttcagctgctcaggtgcaagtacagagtagagggatagttgagtttagacatgattggttctgttatggctcttattttacagatgaagggactagggttcagagaagaaagtaacttgctagtaatggac

SEQ ID NO: 395106 - DNA, 588 bp, Homo sapiens
cttttgctaaataagtagggggtaaattattttaaatggggaaaatggaacacaatttttaaatattttaaggcatttcaaatgggccttaaaatacaacggttgtcctctggagggattttcattaattattaaccatatcagaaatgtaattaagtcagtgctgaaattagtcaagatcagctttataactcaaatcacttaaataacatatatgggytctatgaattaatcattgtagatttgattaaaaagttccatttcaaagttcatgcaatttaatgtcatgttgtttctgtttttcaaacatttgttaaaccaactgtctatagaggcacattatatggctaaagatctaattgcaccattgttagcatagaactgtagtcagtaaataattagtggcttgcattgtgaagttttgataaatttttaggcttctctgaattaacatttgtcttatggtcagttaaggaaattaaatatcgattaaggaaattcagacagggcagcttcacagtctccctcctccacagggccccccatgaccactgccttggaggctgtgctgactttggggaaggccta

SEQ ID NO: 395107 - DNA, 592 bp, Homo sapiens
gttgttggggacaatagattgcctgtaaaaaaattttttaaactacattttgctcacttggctaagtgacmaaaatcttatataaagcagtgttccctttagggggttagtgcttatcatttgatgtttctggtagtaaaccatttcatgtttcacttcgagaagcgcttttttgactgccaagataagctgcaaaattgagtccaaggatcttaagaaataatattcctaagccatttaagcagctcacttggtgatctcatttaataagtggtccactgaaatttaggattgcagagtatactttttcattatgcatgggtttcaccatgtgaggtagatatctagttcctactcagctatttttgttgactgcctagggtatgataatatttgaccatgctactctcttatgaaaaatgccaaatagttaaatttgttttaggaaaaccagagattcctctcttgctcctaaaggagaaaccaaatgaccctgggtttctttcttttttttttttctttctaaaacccaagaagtattgatgtcatgtcctcctgcgaagtgcattagctgtccttgcctttgctgctt

SEQ ID NO: 395108 - DNA, 242 bp, Homo sapiens
tcttaagtaaattacttttcaaaacactgaaaaactatgttttgaatgtcaccaccacacacaaaacataagactcatctattcttaattaaaaaaaaaaacctgtagaagggaatatttatttcgagtttcctctttaactgcaaagtggagggtaaatccagtgcttcrccttcctggaacattgaccagaaggaaggtgggaactctcttggttactctcaggtctgaatttacttttc

SEQ ID NO: 395109 - DNA, 246 bp, Homo sapiens
tatggaatctaagtatctatcaatggaaaaattgacagagaaaatgtgtggtggatatattcaaagacattctattcaaccttaaaaagaaaaacaaggaaaatcctgtcatttgcaataatatggatgaacctggaggacaytaagtaaaataagccaggcacaggaagacaaactccacatgatctcagttatttgtggaattttgaactcataagtaccagagagtagaatggcggttaccaa

SEQ ID NO: 395110 - DNA, 569 bp, Homo sapiens
tttttagggcaataaaactactctgtttaatgctataatggtgcatacatattgtaataaatttgtcaaaacccacagaatgtacaacaccaacagtgaacgctaatacacactatggactctgggtgatgatgtgtcaatgtaggttcatcaattgtaataattgtaccactctggtgtgggaaggtcataatagaggaggctatgcacatgtaggggcaggagatacacaaggaatgtctgtattttgcagtcaattttgctgtgaacctaaaactgctctaaaaaatacagsctattaaaaaagatgctcttcactgctggtaacataagaaaatgggggctctcagacatggctatctcaccattcgcaatcagatcatttgacaaaactaaaaatttcatacccatataaggtttctctcacagatatttaatatgtttcaaattgcaactaaatgttatttcttactacttaaaaataggatcatctctttggacccaagaattctacttctaggaagttatctcaagaaaatgataagacatactaacagttacgtaagaaa

SEQ ID NO: 395111 - DNA, 242 bp, Homo sapiens
caagacagaaaatgttctactattttaatgttcttcagattaaaccaatccatgaggctggactttagcctcaaagctctgaattagcctagttagatgtttgtyataaccgaagccattcaggaaatataaatgcacaaataatttctgaaatcgaattaatatatgagaaggttctttaactgaatgtttgtttttatctgcattaacggcttctgacactgtaaaagcatgggcagcat

SEQ ID NO: 395112 - DNA, 463 bp, Homo sapiens
tgacagtccatctgcatgtccccartggagtaacccatctccaagttttggcaccgatcacacagtagcataactgtcttactatgtgtttccttcagagaagtccccaccctgagttttattcatctttgtatcccaagagataaactctctctggagacactcaaatacgtgattataaaaagactggatgtctctgtgtgtctggctctcttactagactatatgtttcctcagggatgggagagtgtttttacctatctttctaacctctcagcttattgtgatgcctggtacatatggatcctcagtgtatatctgtagaattatttagagtatgattggctaaaaagaaaaaattcttcagtacaaagaattttaaaaatccctctgaactgatttctaattagctcatttattaaaatttaaatctaaaacatctccttctccttgagattataaa

SEQ ID NO: 395113 - DNA, 463 bp, Homo sapiens
tgacagtccatctgcatgtccccaatggagtaacccatctccaagtttyggcaccgatcacacagtagcataactgtcttactatgtgtttccttcagagaagtccccaccctgagttttattcatctttgtatcccaagagataaactctctctggagacactcaaatacgtgattataaaaagactggatgtctctgtgtgtctggctctcttactagactatatgtttcctcagggatgggagagtgtttttacctatctttctaacctctcagcttattgtgatgcctggtacatatggatcctcagtgtatatctgtagaattatttagagtatgattggctaaaaagaaaaaattcttcagtacaaagaattttaaaaatccctctgaactgatttctaattagctcatttattaaaatttaaatctaaaacatctccttctccttgagattataaa

SEQ ID NO: 395114 - DNA, 583 bp, Homo sapiens
tgatacagcatgtaaggaagaggggtctatgcattgcttgtagttgtaagaaaaatctgcctggatacctgaagcctctaacctcaagaaccagcaaaacagctctgtggttgatagtggaaatgctcccactgcagtgagtaaatgtctactgagccagggagcgctccaatactgttataaataaaatctttcttatcaatattttaatgtytgatattaaaagtgtttataatatttaagagagtttggcacattagagtatctaataaatgagcattgtgactaatgtaaattgagtgattgagtagctgagacttgtgagttcaagttaaaagctatgacagaattttgctaaatttgttacaaaatcggaatgtttaagagaatctaagtttcactgtgttcatatatttaatttactagatttatgagaattagattttgtttgctaggcaggcaaatgaagtttaaaagacagaatattaaaattattaatgccttaaaataattaggataattttattaaataaatgaagccaaacaatgaccaacagattccttgtgactattaacacctaaa

SEQ ID NO: 395115 - DNA, 562 bp, Homo sapiens
taaaagtaggtataaatacagctagccagcaatccacgagtgctattggctgctactctgtctatgagatagccctgctctgtctgtggagcagccattttgctgcaccccgttgctctaataaacttgctttctttcactgtcagcttgctcttgaattctttcctgagtgaagctaagaaacctcctgagctaagcctcaatttgggggttttcctgcattagtgagacctcatctgtctaagaaattttaaaattagctaggcgtggtatcatgcttctgctactcgggggaggctaaggcaagaggattgcattagtccaggatttcgaggctgcagtgagctatgattgtgtcactgcactccagcctggatgacagggtaataycctgtcttaaaaaaaacaaattgaaaattggaaaataaagtttgtaagttaaaagctttaagaaaaactaggtttttgaatttgtaacattaatgaaataaatattaattttttaatggctgggaaatacaaagtatttttggagcatgaaagccctatcaaggataccaaa

SEQ ID NO: 395116 - DNA, 533 bp, Homo sapiens
atacagctagccagcaatccacgagtgctattggctgctactctgtctatgagatagccctgctctgtctgtggagcagccattttgctgcaccccgttgctctaataaacttgctttctttcactgtcagcttgctcttgaattctttcctgagtgaagctaagaaacctcctgagctaagcctcaatttgggggttttcctgcattagtgagacctcatctgtctaagaaattttaaaattagctaggcgtggtatcatgcttctgctactcgggggaggctaaggcaagaggattgcattagtccaggatttcgaggctgcagtgagctatgattgtgtcactgcactccagcctggatgacagggtaataccctgtcttaaaaaaaacaaattgaaaattggaaaataaagtttgtaagttaaaagctttaagaaaaactasgtttttgaatttgtaacattaatgaaataaatattaattttttaatggctgggaaatacaaagtatttttggagcatgaaagcccta

SEQ ID NO: 395117 - DNA, 627 bp, Homo sapiens
gatcataggcaatgacaaaggctttgcctagaagaactcacagggaatgctgccctccccacaccagacttggtgcacaaatgatgtatggcagtctctgcagggagctgcagtcaaggactcaggccctcctgcctgaccacactcacgtatacccgcattcctagcctaggcatcttcatgcagaagccgatttatctatggccactggtcacccaggccttcctcaggtccttctaacaagacctccttgtcaggggtagggaaaactttgaagatgcttttctccattctgactcagtactcagtagcttttcactcctatcccttcccctctcccttctcctagcccctgggtccataaaactgcaraaatcttttattcagggttccatcagcagtgagatagccctcatgtctgcactgataaacctgaccctggacaagtataccagtccatgggggaaaatggaactggggtggggggtggtgctttctctagcttagctgcttgcttacactattgcagtaagtagttaaaggcttgactgttgctttcattttggcttgttaacttaatcagctaccctgacacctgacagctcagctatctccagctcagttaag

SEQ ID NO: 395118 - DNA, 627 bp, Homo sapiens
gatcataggcaatgacaaaggctttgcctagaagaactcacagggaatgctgccctccccacaccagacttggtgcacaaatgatgtatggcagtctctgcagggagctgcagtcaaggactcaggccctcctgcctgaccacactcacgtatacccgcattcctagcctaggcatcttcatgcagaagccgatttatctatggccactggtcacccaggccttcctcaggtccttctaacaagacctccttgtcaggggtagggaaaactttgaagatgcttttctccattctgactcagtactcagtagcttttcactcctatcccttcccctctcccttctcctagcccctgggtccataaaactgcagaartcttttattcagggttccatcagcagtgagatagccctcatgtctgcactgataaacctgaccctggacaagtataccagtccatgggggaaaatggaactggggtggggggtggtgctttctctagcttagctgcttgcttacactattgcagtaagtagttaaaggcttgactgttgctttcattttggcttgttaacttaatcagctaccctgacacctgacagctcagctatctccagctcagttaag

SEQ ID NO: 395119 - DNA, 589 bp, Homo sapiens
acatttaaaatggtatcttcaatttcttcctgaatcttcactaatctgcttattatgtaggaaggctccaaagtaaagtggcatttcaggacacacaatattgaaatattggcccttttaaagctttcaaaaacattttaacagcccttactatgttgtaattcgacaccagcagtatagatggataatataaagcatttaaaagcacttcaatataacttttagaattytgtaattgcattttaattaataagaaaaatgtatctgacacttgaaaaaataataaacgtaattaaaataatgacatgtgaagactccctgacttgagattaaagaaggaaaactactttatttctcctagtgataactattcagaatctctttgcaaactatgtcatcctaagacccaaagatcctctaacaaaacagtggaagactcgtcctctgtcacattccccctagcacagagaaagtggttaaatgttaaggtttcaagggactttggatagcaaagggagaggagagaacatcagctgcactgttagcaaacttgaaaacaggtgaaagctaagtgagtgctcaaactgcc

SEQ ID NO: 395120 - DNA, 626 bp, Homo sapiens
agttttgatagtatgggatatatccgggttgaaagttccagtaggcacttataaatacacatgtaaaacttgtcagagaaatcagacatgaaaatatggctttgggggcatcagtatgcagctggggattggatagaaaggaatggagtgattgaggatcagctggggatataggaatgactagaaagagaagttgtgaggcggaggtggtagtggtgatggaagttacaaatcttggttatcaaaaattgcatgttaacatggacacacagaagggaacaacagacaccaaggcctacttgagggtggaggttgggaggagggtgaggattaaaaaactacctatgaggtactgtgctcactacctgggtgattaaataatttgtayaacaaacccaagcgaaatgcaatttggccatgtagcaaacctgcacgtgtactcccaaacctaaaataaaaattggaaggaaataaagtgacaatagttttactctttttctatgacacttactaagcaagaaggagttatttccattttaatttttaaaatacctttcatgccttatttttgtcctcaaaatatttcttgatttaaccagaattcttacagtatatcccaaagtcca

SEQ ID NO: 395121 - DNA, 333 bp, Homo sapiens
gatgggagggttggtctgccttgtacgtatggatttttccagtgggtaagcccaattgccacaggccccrcaacgtcataacctggtgagataaacatattaggtgagtggcagcaatcaaagccatatagtgtgcttattttcatacttccccaaaatcttagctgttagtcaaaccaaataccatttgagctaagaatgcatgttcataataaacaggcaggcatcatccctcttgatggctcttgttcacttaatcaacttatgtttattaagcgcatgctaagtgcccactctgccttcaaggagctcagagtccaatcaataaaggaa

SEQ ID NO: 395122 - DNA, 631 bp, Homo sapiens
aacaagtgtctgctatggactctccttactggtagagattggagccaaaattgtaacaaacctgcacgttctgcacatgtatcccaaaaattaaagtaaaatgtttaaaaaaagtgtaaaaaaaaccaagactaagtccttaaggagctcatggtctagcagttgatacaaaggaagggacagtcatcctaaaagtcttcctaagagaaatgacacctaagctgaaacccaaaggatgcgggtagtcttatcttttctgatagtaaagtctaagtgacagcagttgtcatgagaaaagattttggggcctggcatggtggctcatgcctgtaatcccagcactttgggaggcctaggtggcttgaccggtcaagctgagaagttcgacaccaggctaggcaacatggtgaaactccatctccacaaaaaatacaaaaattagrcaggcatgagggtgcacacctgtaatctcagctaagtcttaggctggacgattgcctcagcccaggaggcagagtttgcattgagcagggattgtgccactgactctagtctgggtgacagagtgagaccctgtctcacacacacacacacaaaatattagttctgttctcttcctgggttgatatcc

SEQ ID NO: 395123 - DNA, 611 bp, Homo sapiens
tacctgttgataaaacagtatactgtttactagttgcccaaatgatatggaagagaaacacaagggcactctacaattctaacattgaatatttctaatttaacaatytgaaccagccacttgtcaactaaacttccacattcaatcaactctaaagactagtatggccaggcgcagtggctcaagcctgtaaccccagcattttgggaggccaaggttggcggatcacgaggttaggagttcgagactagcctggaaagcatggtgaaaccccgtctctactaaaaatacaaaaaattagccgggcatggtggcacgtgtctgttgtcccaggtgctcaggaggctgaggcaggagaattgcttgaacccggcaggcagaggtcacagtgagctgagatcgtgccacgccctgcaatccaggctgggatacaaagcaaggctccatcctttaaaaaataaataaataaataaaatggaaaagactagtttatgaaatatgtattaattaataatatttgacttcgaacaaataacctaagaggtaagtggttcgatgctacaacagtaacaacgattaagtaaccacagcaatcatgcttggtaataaag

SEQ ID NO: 395124 - DNA, 611 bp, Homo sapiens
tacctgttgataaaacagtatactgtttactagttgcccaaatgatatggaagagaaacacaagggcactctacaattctaacattgaatatttctaatttaacaatctgaaccagccacttgtcaactaaacttccacattcaatcaactctaaagactagtatggccaggcgcagtggctcaagcctgtaaccccagcattttgggaggccaaggttggcggatcacgaggttaggagttcgagactagcctggaaagcatggtkaaaccccgtctctactaaaaatacaaaaaattagccgggcatggtggcacgtgtctgttgtcccaggtgctcaggaggctgaggcaggagaattgcttgaacccggcaggcagaggtcacagtgagctgagatcgtgccacgccctgcaatccaggctgggatacaaagcaaggctccatcctttaaaaaataaataaataaataaaatggaaaagactagtttatgaaatatgtattaattaataatatttgacttcgaacaaataacctaagaggtaagtggttcgatgctacaacagtaacaacgattaagtaaccacagcaatcatgcttggtaataaag

SEQ ID NO: 395125 - DNA, 629 bp, Homo sapiens
tcctaacaccctttgattccaacatttttccagacagaagtttctttctaatcttgacctgtgttttctagtgagaatctctttcttatctgaacataagaatttataaactgcttttcaatggatcattctcttttttctacagtggaaatttccttcacttgggaagtaaccaattacaatatcaggctgtttgaggatgcgagaagtttgatgttgagacgtgaatctttgcgttctgacagatctgactattttgctgcatggggagactgggtcttctcctctggcaaacactactgggagctggatgtggagaactcttgggactgggctctgggagtctgtaaggactcctggataaggaagaatagcacaatggttaaatctaaggatatatttcttcttttatgtgcctgctgtcctgacccayatttccagggataacctggcatacgtagacactatgtaaagcccacatccattagaagtttataacactatgttttcgtgtgactgttttcttgttcctgcagtgcatatttcctgggataataaaataaccacttggtacattccccttgtttgaagttctgagacagctactctttggttctgattatctcaac

SEQ ID NO: 395126 - DNA, 556 bp, Homo sapiens
aatatggccaataatgtaaacttcagtttaattggctgttcttataagtttttgagagaaatatgtttctcttctaattgtgaggactggatgagataatgcacatacaacctccactgatagggtagaatctccaccccggaacagcaggtctagggttgctatgcccaagtttcccactggctgtatcttccatccctcaagggataagacaaaacaccgggagacaccatccccctacctaccccagcacagacttgtagagcgtgtgtgagtgctggagaagccccwgtcaactcctttgcagtgatgcagagattcatctaggaggactgacaggctgtaaaaactgagagctttgctcaatgcctcacagtaatgattgattttgaatcggtcatgaagaggtacattcccaagggcgttgtcaaaaacaatggagaccttggttgggaacattaaagaggagcttggaatctttagcatgctttgtagcaagaaataaacttctgacagccagccagaagtttaccagagaaaaccaggcaaagagaaa

SEQ ID NO: 395127 - DNA, 590 bp, Homo sapiens
tgttttgacatgcacatttttctaggccgttgactcttcccaagtcatctactttgattattgcttatttcctcattttaatatttagtttacaaaattttgtaaatagtattcaaacaaaaaaggcaaaaacgtgggaaaataataaagagtaattttaaatgaaaaactcacttcccaactctaccaaaactgaataatgaaatctggatgccttcctattctgaagtgtttcttacctagatacagctctagccatgaagagtttttggaagaaatgcctttctaagctttccacaatatgagtgtatatattccaggtagaccctattaaggtgctgttaattttttaccactgtgctttttaaaaacgagcttagattytaaaacgcaactaatctctcctgtggcaaatgatttcaaaaacattaacaagatttcttttatcagtttttagcagcatagtatcctcagtaaagtgcataaatgtgtgcttattaataatacacattacccaaaattatttataactattctctaggatgatgggtagagtagacagaaaatagttggcacagcagtaggaaata

SEQ ID NO: 395128 - DNA, 521 bp, Homo sapiens
ctggctgggcactgtggcgcgtgcctataatcccagcactttgcaaagccaaggcaggcagatcacttgaggccagaagttcaagtgcagcctggccaagatggcaaaaccccatctctactaaaaaaatacaaaaattagccaggcctagtgtcacgttcctgtaatcccaggtacttgggaacctgatgcaggagaatcgctctgaacctggaggcggaggttacagtgagccgagatcacgccactgcatttcagcctgcgtgacagaaggatactctgtctcaaaaaaaaaaamaaaaaaaaaaactaaaaacacctgacatatttctcagaacatacatctgtccacaagctatacatgattctacatgggacagaattcatcaggaaaattaatttgcttgattatggagtctagagagttccaatataggctgtctctaagctggtgtcctgagaataccggtatcctggctaagctcaagtctgaaagcttcagaacaagtttcaggagagag

SEQ ID NO: 395129 - DNA, 521 bp, Homo sapiens
ctggctgggcactgtggcgcgtgcctataatcccagcactttgcaaagccaaggcaggcagatcacttgaggccagaagttcaagtgcagcctggccaagatggcaaaaccccatctctactaaaaaaatacaaaaattagccaggcctagtgtcacgttcctgtaatcccaggtacttgggaacctgatgcaggagaatcgctctgaacctggaggcggaggttacagtgagccgagatcacgccactgcatttcagcctgcgtgacagaaggatactctgtctcaaaaaaaaaaacamaaaaaaaaactaaaaacacctgacatatttctcagaacatacatctgtccacaagctatacatgattctacatgggacagaattcatcaggaaaattaatttgcttgattatggagtctagagagttccaatataggctgtctctaagctggtgtcctgagaataccggtatcctggctaagctcaagtctgaaagcttcagaacaagtttcaggagagag

SEQ ID NO: 395130 - DNA, 521 bp, Homo sapiens
ctggctgggcactgtggcgcgtgcctataatcccagcactttgcaaagccaaggcaggcagatcacttgaggccagaagttcaagtgcagcctggccaagatggcaaaaccccatctctactaaaaaaatacaaaaattagccaggcctagtgtcacgttcctgtaatcccaggtacttgggaacctgatgcaggagaatcgctctgaacctggaggcggaggttacagtgagccgagatcacgccactgcatttcagcctgcgtgacagaaggatactctgtctcaaaaaaaaaaacaaaaaaaaaaactaaaaacacctgacatatttctcagaacatacatctgtccacaagctatacatgattctacatgggacagaattcatcaggaaaattaatttgcttgattatggagtctagagagttccaatataggctgtctctaagctggtgtcctgagaatacyggtatcctggctaagctcaagtctgaaagcttcagaacaagtttcaggagagag

SEQ ID NO: 395131 - DNA, 545 bp, Homo sapiens
ggagattaggtaaagccaactctgagtccctttaagcagctctgtttgggctttcttagcttccaacctctgggctttgacaaacatgaagggaaacaaaggaaatgccatttactaggggcttatttgtctctcattctgggccccctccctatgtcatggtctgcactggtgcttcaatttatggctcttttgcaggagaagcttttacagaaaatgcagtctttgtgggaaaaagcttgtgaaaatcacagaaacctgaatgtggaaaccaccagaaccagatgctggaaggttagtcctgtactactctaccttctccaggaacttatggtgggcaaatgggtgactcttaaaataggaacttgatatcaaactgtaatgtttctgggatacagtaaaaaaaaaaaggcgagagaaaacaytgagaaaaagtggcctcatttttatacagaatagtatgcctgttaggtaggatttctaagaaaactactgatgtcacccaaagcatgctggtttgtttcatacaaacctatagttataca

SEQ ID NO: 395132 - DNA, 545 bp, Homo sapiens
ggagattaggtaaagccaactctgagtccctttaagcagctctgtttgggctttcttagcttccaacctctgggctttgacaaacatgaagggaaacaaaggaaatgccatttactaggggcttatttgtctctcattctgggccccctccctatgtcatggtctgcactggtgcttcaatttatggctcttttgcaggagaagcttttacagaaaatgcagtctttgtgggaaaaagcttgtgaaaatcacagaaacctgaatgtggaaaccaccagaaccagatgctggaaggttagtcctgtactactctaccttctccaggaacttatggtgggcaaatgggtgactcttaaaataggaacttgatatcaaactgtaatgtttctgggatacagtaaaaaaaaaaaggcgagagaaaacattgagaaaaagtggcctcatttttatayagaatagtatgcctgttaggtaggatttctaagaaaactactgatgtcacccaaagcatgctggtttgtttcatacaaacctatagttataca

SEQ ID NO: 395133 - DNA, 470 bp, Homo sapiens
ccatctccctacttttatttccatgatgtgtttccaaaaacacattcacataactaatgctactttgttgggagagtatagccccactaagggattctaccaggscaaaggtccctcctactttatccaccagccacaaaactttgtggaatggtcaaggtaacagccccaagaaatattccccatctaattcaataatatactttgggttgttaaacatgtatagaatagtgagtgattcatttacatttaggttaatttgtaaacatggcaagatcagaagttttgggaatctaggtttgcattaacattattttggggtccactcatttgggtaacaggttcagttaaagatgactgagtaggtttttcatggttaccacagaccatagaccttctgggcctcttctcccttcacttctttagagaatgtcttcaagactcagactttcccaggacgttaattaata

SEQ ID NO: 395134 - DNA, 470 bp, Homo sapiens
ccatctccctacttttatttccatgatgtgtttccaaaaacacattcacataactaatgctactttgttgggagagtatagccccactaagggattctaccagggcaaaggtccctcctactttatccaccagccacaaaactttgtggaatggtcaaggtaacagccccaagaaatattccccatctaattcaataatatactttgggttgttaaacatgtatagaatagtgagtgattcatttacatttaggttaatttgtaaacatggcaagatcagaagttttgggaatctaggtttgcattaacrttattttggggtccactcatttgggtaacaggttcagttaaagatgactgagtaggtttttcatggttaccacagaccatagaccttctgggcctcttctcccttcacttctttagagaatgtcttcaagactcagactttcccaggacgttaattaata

SEQ ID NO: 395135 - DNA, 470 bp, Homo sapiens
ccatctccctacttttatttccatgatgtgtttccaaaaacacattcacataactaatgctactttgttgggagagtatagccccactaagggattctaccagggcaaaggtccctcctactttatccaccagccacaaaactttgtggaatggtcaaggtaacagccccaagaaatattccccatctaattcaataatatactttgggttgttaaacatgtatagaatagtgagtgattcatttacatttaggttaatttgtaaacatggcaagatcagaagttttgggaatctaggtttgcattaacattattttggggtccactcatttgggtaacaggttcagttaaagatgactgagtaggtttttcatggttaccacagascatagaccttctgggcctcttctcccttcacttctttagagaatgtcttcaagactcagactttcccaggacgttaattaata

SEQ ID NO: 395136 - DNA, 470 bp, Homo sapiens
ccatctccctacttttatttccatgatgtgtttccaaaaacacattcacataactaatgctactttgttgggagagtatagccccactaagggattctaccagggcaaaggtccctcctactttatccaccagccacaaaactttgtggaatggtcaaggtaacagccccaagaaatattccccatctaattcaataatatactttgggttgttaaacatgtatagaatagtgagtgattcatttacatttaggttaatttgtaaacatggcaagatcagaagttttgggaatctaggtttgcattaacattattttggggtccactcatttgggtaacaggttcagttaaagatgactgagtaggtttttcatggttaccacagaccatagaccttctgggcctcttctcccttcacttstttagagaatgtcttcaagactcagactttcccaggacgttaattaata

SEQ ID NO: 395137 - DNA, 562 bp, Homo sapiens
taatatactttgggttgttaaacatgtatagaatagtgagtgattcatttacatttaggttaatttgtaaacatggcaagatcagaagttttgggaatctaggtttgcattaacattattttggggtccactcatttgggtaacaggttcagttaaagatgactgagtaggtttttcatggttaccacagaccatagaccttctgggcctcttctcccttcacttctttagagaatgtcttcaagactcagactttcccaggacgttaattaataacaatacaactgactgggtttttcattacagaagaaatagaaaatactttccagaagagaagatggtagggaaataatatcttcagaaactgagtacaaatctcacactgaacttagtgaaagatgcatcttgtgaamtgcactaaatctttcttctttttttttttttcaggcttttggagacatattacacaggtgagtgtgtacctagattttagcatatgttctttaagattccacgactatcaaagcaggctctattaaagtcatggcataaataattaaga

SEQ ID NO: 395138 - DNA, 534 bp, Homo sapiens
aggattattcctggattgtgaggctaagactgtgagctttgttgatgttaatcaaagctccctaatatacaccatccctaattgctctttctcacctcctctcaggcctatcttttgctgtattcacttctgaccagagacaaatcagaaatgtgttcacatgctgtgggaacccctttatcccaggaagtcctcttccttgtgccttaacatacaggacaaataggctctattttatgtcttgaattgccttctaatgttatcaaaactcatttattgtgttactattaaatatgctgaaaacgctaaaagtatacgtattggttctttattaaataatttttgaaaaatcattattcatgatcatggcatacagtatattctcttttttttctttatttatgactgtcactgagtgaaataatagatgacwgacatgtctgaatgaagtaaaaatcaatggaagacagtcgggatcttttgcttcatgcaaaaaacttggagtgaagtctcaatgataactgggaaatgttt

SEQ ID NO: 395139 - DNA, 534 bp, Homo sapiens
aggattattcctggattgtgaggctaagactgtgagctttgttgatgttaatcaaagctccctaatatacaccatccctaattgctctttctcacctcctctcaggcctatcttttgctgtattcacttctgaccagagacaaatcagaaatgtgttcacatgctgtgggaacccctttatcccaggaagtcctcttccttgtgccttaacatacaggacaaataggctctattttatgtcttgaattgccttctaatgttatcaaaactcatttattgtgttactattaaatatgctgaaaacgctaaaagtatacgtattggttctttattaaataatttttgaaaaatcattattcatgatcatggcatacagtatattctcttttttttctttatttatgactgtcactgagtgaaataatagatgacagacatgtctgaatgaagtaaaaatcaatggaagasagtcgggatcttttgcttcatgcaaaaaacttggagtgaagtctcaatgataactgggaaatgttt

SEQ ID NO: 395140 - DNA, 534 bp, Homo sapiens
aggattattcctggattgtgaggctaagactgtgagctttgttgatgttaatcaaagctccctaatatacaccatccctaattgctctttctcacctcctctcaggcctatcttttgctgtattcacttctgaccagagacaaatcagaaatgtgttcacatgctgtgggaacccctttatcccaggaagtcctcttccttgtgccttaacatacaggacaaataggctctattttatgtcttgaattgccttctaatgttatcaaaactcatttattgtgttactattaaatatgctgaaaacgctaaaagtatacgtattggttctttattaaataatttttgaaaaatcattattcatgatcatggcatacagtatattctcttttttttctttatttatgactgtcactgagtgaaataatagatgacagacatgtctgaatgaagtaaaaatcaatggaagacagtcgggatcttttgcttcatgcaaaaaacttggagtgaagtctcartgataactgggaaatgttt

SEQ ID NO: 395141 - DNA, 535 bp, Homo sapiens
acacttatccatcaggtttcattgtattaawctatcctttgaggtaatactatttgaccttctatgctgggctttattttgcaattctcaccacagatataaataatccttcattattagtgtgctcgtctacattgaaatacacaatgtgatcagaacaatgctggattaattgaaattttttttaaaaagtaactaaatattgactcctacctcaaaccatacacagtcatttccagatagattgaagtcctgaaaggaaggggaacctgatacaatattctcataaggatttcttaaccagggcacaaattaataattaaaacaattagttcatttatattgataatgatgacttctgtgtttcaaaaaacattatgcaaaccagtagtggagaaagatattcaccccaacatacataaagtaaaatataatacatgtatatgatgaatacttaaattgtaataaataaaagacagtgaactcaacagaagattggctaaaatatctgaacagacactttacagaattggat

SEQ ID NO: 395142 - DNA, 535 bp, Homo sapiens
acacttatccatcaggtttcattgtattaatctatcctktgaggtaatactatttgaccttctatgctgggctttattttgcaattctcaccacagatataaataatccttcattattagtgtgctcgtctacattgaaatacacaatgtgatcagaacaatgctggattaattgaaattttttttaaaaagtaactaaatattgactcctacctcaaaccatacacagtcatttccagatagattgaagtcctgaaaggaaggggaacctgatacaatattctcataaggatttcttaaccagggcacaaattaataattaaaacaattagttcatttatattgataatgatgacttctgtgtttcaaaaaacattatgcaaaccagtagtggagaaagatattcaccccaacatacataaagtaaaatataatacatgtatatgatgaatacttaaattgtaataaataaaagacagtgaactcaacagaagattggctaaaatatctgaacagacactttacagaattggat

SEQ ID NO: 395143 - DNA, 535 bp, Homo sapiens
acacttatccatcaggtttcattgtattaatctatcctttgaggtaatactatttgaccttctatgctgggctttattttgcaattctcaccacagatataaataatccttcattattagtgtgctcgtctacattgaaatacacaatgtgatcagamcaatgctggattaattgaaattttttttaaaaagtaactaaatattgactcctacctcaaaccatacacagtcatttccagatagattgaagtcctgaaaggaaggggaacctgatacaatattctcataaggatttcttaaccagggcacaaattaataattaaaacaattagttcatttatattgataatgatgacttctgtgtttcaaaaaacattatgcaaaccagtagtggagaaagatattcaccccaacatacataaagtaaaatataatacatgtatatgatgaatacttaaattgtaataaataaaagacagtgaactcaacagaagattggctaaaatatctgaacagacactttacagaattggat

SEQ ID NO: 395144 - DNA, 567 bp, Homo sapiens
attctcataaggatttcttaaccagggcacaaattaataattaaaacaattagttcatttatattgataatgatgacttctgtgtttcaaaaaacattatgcaaacyagtagtggagaaagatattcaccccaacatacataaagtaaaatataatacatgtatatgatgaatacttaaattgtaataaataaaagacagtgaactcaacagaagattggctaaaatatctgaacagacactttacagaattggatacataaataactagccaaatataaaaaagtgctcactttcattagtcttacaaaagtaagaattaatccaccagttgtaccacaggccctcataaaaaaataccaaaatttaaagacacaatattgtgtgttgtcaaagatacagaataaatgaaatttattcatggctggagagatgtaaatggaaatcccttttgggaaactgactattagcatttcttatgggctagatattctaattctaaaatatagtcaactgattgcctacatatacttcaacatacacaatattgttcactgcatcaattttt

SEQ ID NO: 395145 - DNA, 558 bp, Homo sapiens
cacggtatatccacaaagtcgtggtatcaggcgacattaaggccrgtccagccattgtggtcagtctcccgcgccttcttaaagctcaccccacaccgcaccagcgtccgcctctgccccgcgcctccaggacgccctcctccggtacgctctccacgccctcgacgccgtgctcctcctcgtcctggaaagggtacaaagagtcgtcagaggcgacgctgcgagtgtcgggcagactggagaagtcctggaactctttgaattcagtgcggtcctcctcgacctgtgcgcctaggagtggggatggcggtggcgggatcatgcagcgcgccccgccaccctgcggccgagtcccagccagcagcaccatgccggaggcgtgggcgggggatcgcggcaccgtccgggaaagcctagtgcccgccaaggtccctgcttctcactactgagaccccagagaagccctagctcccgccccaagcccggcggaaacctcccttcttttacattattaagtttgtttttactttaattttcttaggacattgataaaatcac

SEQ ID NO: 395146 - DNA, 558 bp, Homo sapiens
cacggtatatccacaaagtcgtggtatcaggcgacattaaggccagtccagccattgtggtcagtctcccgcgccttcttaaagctcaccccacaccgcaccagcgtccgcctctgccccgcgcctccaggacgccctcctccggtacgctctccacgccctcgacgccgtgctcctcctcgtcctggaaagggtacaaagagtcgtcagaggcgacgctgcgagtgtcgggcagactggagaagtcctggaactctttgaattcagtgcggtcctcctcgacctgtgcgcctaggagtggggatggcggtggcgggatcatgcagcgcgccccgccaccctgcggccgagtcccagccagcagcaccatgccggaggcgtgggcgggggatcgcggcaccgtccgggaaagcctagtgcccgccaaggtccctgcytctcactactgagaccccagagaagccctagctcccgccccaagcccggcggaaacctcccttcttttacattattaagtttgtttttactttaattttcttaggacattgataaaatcac

SEQ ID NO: 395147 - DNA, 635 bp, Homo sapiens
ggaatgccaagcagctggctcttacctctgaagttgttgagcatgtctaggactccagttatgcaccatgaagtgagctctgggttcactggctggggcttttgcatctgtgccaaatcagtcctgcaaaaaaaatggcctcagttatatttccaggcccagagctaatcacacagtcatacaaagatatcacattttcatataagatgtttcctcagaattctgccagttttggttaactgggtatacactttattccacactctaggggcaataaggatgttactttttctaaattttacttgcataaaaacccagtttccccagatatgttattctcagacattatacaacttctaaagtcattaaaagtcattgcctccctctgcccatcacaccccttgagggtatgcagaaatcctggaaatatttcagagagcagaaaactcagacaaaaacctttgggacctcagcctgcagttgtcactaatgctagtcagtgtctaacagagaatgttcactgaggcaaaagkctttaatcttttgtgcaaaacaaaggagtctaattccagcctgagaaccttgctgctgaggggcccgaggtaaccattttcctgaggtctttcctagaactg

SEQ ID NO: 395148 - DNA, 663 bp, Homo sapiens
tcttggtgctggccaccagctccacagctccattctatatgtttgaacaatgtttttaaggaaacctcctttagcgaagtctcaacacagctgtgattagagtgccaaattagccagcaacattgaaaggacacattcatgtgttatgattgacatggaataatcaccacctccatcatctgcattctcatcaccatcattrtcacaggccctcatcattcttatttgggattctgtataattcaaactgccttagaggcatcacgtaccctgcattcctcagcagcccatcctattgggctgtggctgtgagccatgtgctctggtgactcagagcagggcccacagagcaatctcttgtcagcctcacagaagagctccttagtctccgcatggagcacacagatattgtctgagctgttgatgttctgaggtctggtctgtctggctagggaagacagctttttgagtaccacattggtgttgaagttgggcttctctgagatttttctgcatgaagggcagcgcattggtgctctgccttcttctgagcagaggcagaggcagggcctgcaaaagctgtgcccacagtcaatggtgaccggtctatgaagtagttcacgcaaatgcagcaaatgagctcattctggaagactcgcaggg

SEQ ID NO: 395149 - DNA, 663 bp, Homo sapiens
tcttggtgctggccaccagctccacagctccattctatatgtttgaacaatgtttttaaggaaacctcctttagcgaagtctcaacacagctgtgattagagtgccaaattagccagcaacattgaaaggacacattcatgtgttatgattgacatggaataatcaccacctccatcatctgcattctcatcaccatcattgtcacaggccctcatcattcttatttgggattctgtataattcaaactgccttagaggcatcacgtaccctgcattcctcagcagcccatcctattgggctgtggctgtgagccatgtgctctggtgactcagagcagggcccacagagcaatctcttgtcagcctcacagaagagctccttagtctccgcatggagcacacagatattgtctgagctgttgatgttctgaggtctggtctgtctggctagggaagmcagctttttgagtaccacattggtgttgaagttgggcttctctgagatttttctgcatgaagggcagcgcattggtgctctgccttcttctgagcagaggcagaggcagggcctgcaaaagctgtgcccacagtcaatggtgaccggtctatgaagtagttcacgcaaatgcagcaaatgagctcattctggaagactcgcaggg

SEQ ID NO: 395150 - DNA, 584 bp, Homo sapiens
aataacgttttaaagctaaatgaagtcaatatgattttcagttacaaagcaacacaaaataaaaaataaacatatccaaataaaaattaaacaraaacaataaaatatctttaaaagaacagtatttctataattttccttcttaatttttaaacaacagagtaaaacagatcaacttcacaatttaactgaaagatgatttacaaattgtctgaaaacactaactaaagccaataaaactttctctagccacagatatgacagccgtgaacactttagggtaaccaacaattgttttgtctattctcaggttagagcagaaggaccctcagctgccgaccagtgggacatgacaatgccaagaaatctgggccacaaaccaggccattcccctgaaaatttgctgtagcttccttggagctaaaaagccaagattcccaacagtacccatgggcagagggcttaggtacctggtcagttacctctctaaccactcactgctgcatcaagcaagaaaataaccaagaatctcagtcacaggagagctgttgtgtatagatgtctgtttgtggcagggggtcaag

SEQ ID NO: 395151 - DNA, 386 bp, Homo sapiens
tatttgtgaattagcctacgtcctaaaacttgtttataatccccaaattaattactatattgcatttctagtcatggcagaayatcatgcaccatgtggagaaaagcattaaaataataactcgtatttcacccacgagattggcaaaggtttgtaaattcagtaagagacctcaaattagtagagttatttggttagtcagtgatttctcttagagtggtagaaaacaaaaaaagttttatcttcctgttggacttctcttcgaatatcctataaatgtactaaagcagcatttaaggctggatgaggtggtttatgcctgtactcccaagcattttggaagtccaagaccagaggattacttgaagacaggagttggagaacag

SEQ ID NO: 395152 - DNA, 386 bp, Homo sapiens
tatttgtgaattagcctacgtcctaaaacttgtttataatccccaaattaattactatattgcatttctagtcatggcagaacatcatgcaccatgtggagaaaagcattaaaataataactcgtatttcacccacgagattggcaaagktttgtaaattcagtaagagacctcaaattagtagagttatttggttagtcagtgatttctcttagagtggtagaaaacaaaaaaagttttatcttcctgttggacttctcttcgaatatcctataaatgtactaaagcagcatttaaggctggatgaggtggtttatgcctgtactcccaagcattttggaagtccaagaccagaggattacttgaagacaggagttggagaacag

SEQ ID NO: 395153 - DNA, 386 bp, Homo sapiens
tatttgtgaattagcctacgtcctaaaacttgtttataatccccaaattaattactatattgcatttctagtcatggcagaacatcatgcaccatgtggagaaaagcattaaaataataactcgtatttcacccacgagattggcaaaggtttgtaaattcartaagagacctcaaattagtagagttatttggttagtcagtgatttctcttagagtggtagaaaacaaaaaaagttttatcttcctgttggacttctcttcgaatatcctataaatgtactaaagcagcatttaaggctggatgaggtggtttatgcctgtactcccaagcattttggaagtccaagaccagaggattacttgaagacaggagttggagaacag

SEQ ID NO: 395154 - DNA, 386 bp, Homo sapiens
tatttgtgaattagcctacgtcctaaaacttgtttataatccccaaattaattactatattgcatttctagtcatggcagaacatcatgcaccatgtggagaaaagcattaaaataataactcgtatttcacccacgagattggcaaaggtttgtaaattcagtaagagacctcaaattagtagagttatttggttagtcagtgatttctcttagagtggtagaaaacaaaaaaagttttatcttcctgttggacttctcttcgaatatcctataaatgtactaaagcagcatttaaggctggaygaggtggtttatgcctgtactcccaagcattttggaagtccaagaccagaggattacttgaagacaggagttggagaacag

SEQ ID NO: 395155 - DNA, 419 bp, Homo sapiens
cattcatgagccaattcagtcaaccataaaccacacatggtggtcacataagattataataccagtgtgtttactgtaccttttctgtatttaaatatgtttacatactaaataattaccactgtgttacaattgcctagagtatacagtacagaacatgctgtacagttttgtagtctaggagcaacaggctgtactgtataccataggtgtgtagcaggctgtaccatctaggtttgtataagtatattctatcatgtcaaaacaatacaaccgcccggctaggcacagtggctcatgcctgtaatcccagcacttttggaggccgtggygggcagatcacttgaggccaggagttcaagtccagcctggccaacatggcgaaacctcatctctactggaaaaaaaaaaatgagaaa

SEQ ID NO: 395156 - DNA, 552 bp, Homo sapiens
agtcagactgatacctaaaattcaccatcacaccatagaaatataattacacctctttaagtttaacaaaaatcctactatatgttagttcagagcctgggtatccctaggagaagttaatttaacccacgagaaaataaaaaggcccaatatctttaatgattttttctcttctattcaacctaaattggtttaattgctgttttttatttgtttatttggttggttgattggtttttctatttcgttttggttttggttttttattttactttaattttatattattttaagtcctgagataaatgtgcaggacgtgcaggcttgttacacaggtaaacatgtgccatggtggtttgctgccccactgttgtgtctctcaaaatatatcataggaccctctagccatcttctcgtatttctttggccaagrcagtttttcccaccctttcatactcattcggcagttacatgaaagaagaataggaacaactacaatttattctaggccacttagaatcaaacccaatttccagatccacattcagaaaa

SEQ ID NO: 395157 - DNA, 482 bp, Homo sapiens
aaatctaaaaaaggagcaaatggaacaatgctcagaatgaaggtgagttatttaatgttaaatacaaaattttacatttctttggtgtattcatttgaacagctaagaactgttcttttggggaatatagttcrctggagattcttggggttttttaatttttttaatggatatatattatgtatttccaagaaaattagttaatgggtaaaaataaaaagaaatcattttgtgaatacaagtaaaattacaaacaaaaagaagttcagtttaattgcaatatgaaaagctacatgttaagtctaaaatccagcttcagccccaagctagcatggagggccaacagagagactggtaaaagattttgcagaaatctgctttaaatgatcacttatgacatgtacttatggatttttacccagttatctagagcagttcttgagtaactgaacatcttcacattctttccaaaatgatagcac

SEQ ID NO: 395158 - DNA, 482 bp, Homo sapiens
aaatctaaaaaaggagcaaatggaacaatgctcagaatgaaggtgagttatttaatgttaaatacaaaattttacatttctttggtgtattcatttgaacagctaagaactgttcttttggggaatatagttcactggagattcttggggttttttaattttttwaatggatatatattatgtatttccaagaaaattagttaatgggtaaaaataaaaagaaatcattttgtgaatacaagtaaaattacaaacaaaaagaagttcagtttaattgcaatatgaaaagctacatgttaagtctaaaatccagcttcagccccaagctagcatggagggccaacagagagactggtaaaagattttgcagaaatctgctttaaatgatcacttatgacatgtacttatggatttttacccagttatctagagcagttcttgagtaactgaacatcttcacattctttccaaaatgatagcac

SEQ ID NO: 395159 - DNA, 482 bp, Homo sapiens
aaatctaaaaaaggagcaaatggaacaatgctcagaatgaaggtgagttatttaatgttaaatacaaaattttacatttctttggtgtattcatttgaacagctaagaactgttcttttggggaatatagttcactggagattcttggggttttttaatttttttaatggatatatattatgtatttccaagaaaattagttaatgggtaaaaataaaaagaaatcattttgtgaatacaagtaaaattacaaacaaaaagaagttcagtttaattgcaatatgaaaagctacatgttaagtctaaaatccagcttcagccccaagctarcatggagggccaacagagagactggtaaaagattttgcagaaatctgctttaaatgatcacttatgacatgtacttatggatttttacccagttatctagagcagttcttgagtaactgaacatcttcacattctttccaaaatgatagcac

SEQ ID NO: 395160 - DNA, 482 bp, Homo sapiens
aaatctaaaaaaggagcaaatggaacaatgctcagaatgaaggtgagttatttaatgttaaatacaaaattttacatttctttggtgtattcatttgaacagctaagaactgttcttttggggaatatagttcactggagattcttggggttttttaatttttttaatggatatatattatgtatttccaagaaaattagttaatgggtaaaaataaaaagaaatcattttgtgaatacaagtaaaattacaaacaaaaagaagttcagtttaattgcaatatgaaaagctacatgttaagtctaaaatccagcttcagccccaagctagcatggagggccaacagagagactggtaaaagattttgcagaaatctgcttyaaatgatcacttatgacatgtacttatggatttttacccagttatctagagcagttcttgagtaactgaacatcttcacattctttccaaaatgatagcac

SEQ ID NO: 395161 - DNA, 583 bp, Homo sapiens
gcttcagccccaagctagcatggagggccaacagagagactggtaaaagattttgcagaaatctgctttaaatgatcacttatgacatgtacttatggatttttacccagttatctagagcagttcttgagtaactgaacatcttcacattctttccaaaatgatagcactagtttttaagaataagaaacatttctaaataatgatcttgataacagcatagcatttagggcacataatgtgcwaattttgctttgaaaattggattgaaagaagttggtcttacatttggctctcagtatgtaagttttcaaaacatctttaatatctgtggttagcgttttgtctgtcttgtagataatattaatcatctctatactttattagaagttacaagcaaaagtgtccttgtgactttacgtttcctggtaaattaactgcttgatagaacaatttttgcttatctacacatgcctatgcatgttttctttctttctttctttctttttatttatttatttatttatttatttatttatttattttgcagtggatattactctgcctcataatgaagccaaca

SEQ ID NO: 395162 - DNA, 583 bp, Homo sapiens
gcttcagccccaagctagcatggagggccaacagagagactggtaaaagattttgcagaaatctgctttaaatgatcacttatgacatgtacttatggatttttacccagttatctagagcagttcttgagtaactgaacatcttcacattctttccaaaatgatagcactagtttttaagaataagaaacatttctaaataatgatcttgataacagcatagcatttagggcacataatgtgctaattttgctttgaaaattggattgaaagaagttggtcttacatttggctctcagtatgtaagttttcaaaacatctttaatatctgtggttagcgttttgtctgtcttgtagataatattaatcatctctatactttattagaagttacaagcaaaagtgtccttgtgactttacgtttcctggtaaattaactgcttgatagaacaatttttgcttatctacacatgcctatgcatgttttctttctttctttctttctttytatttatttatttatttatttatttatttatttattttgcagtggatattactctgcctcataatgaagccaaca

SEQ ID NO: 395163 - DNA, 226 bp, Homo sapiens
ggtaagtgatgcctctgaagatctatttctataaatgacacatgaaattcctgtgggtctattttcytggagattgggtaaagccaaacctgagtccctttaagcagctcacttttgggctttcttagcttcaaacctctgagatttgacgaagaagaagggaaatagaagaaatgccatttcctagggacttacttgtctctcattctcagcccgctccctatga

SEQ ID NO: 395164 - DNA, 591 bp, Homo sapiens
gggaactagtatctaaatataaggaaaactctaaggacttcagagaaatattaaaaatgattttctctttgtggatgtatactttgagggtatgatagctaatattagtgttttgaaaagtatttcataagaacctagtctatgttgaatattaaattagaaaatttgmcagtatagaagaaagaaagcatctttgtcctcgacaaatcgtacaatccaaatgagagaggcaaaaatggtcaacatgcaaatatgtgcaatacatgatgtgttcgagtgtggtaggttctttgttggagaataatcaagcagggaagtagaaaaggacaatagaggccagaaactggagattagtgtctgatttttaaatagggtggtcagaaaaaagactcactgaaaaattcaatttgaacgaaattttgaagaggagagggaacacgaatgtgtgtatgtatatacatatatgtggaccatgaacgtgtatatatgtatatgtgtgtgtgtgtgtgtgtgtgtgtgtgtgaaattctagttggagagaacagcatatgcagtaattttgagtttgtgtatatttggaggcctgaggaa

SEQ ID NO: 395165 - DNA, 558 bp, Homo sapiens
tggtcttacatttggctctcaataagtaagttttcaaaacatttttaatacctgtggttagtgttttgtttgtcttgtagttaatcatctctatgctttattagaagttagaagcaaaagtgtccttgtgactctacatttcctggtaaattaacttcttgatagaacaatttttgcttattgacacatgtctatgcatgttttgtttctttctcttttatttatttatttatttattttgcagtggatattactctgcctcataatgaagccaacagtcatatcttccgawgtggagatttgagaagcatgtgtattggatgtgaccgtcaaaatgtgccccatatcactgcaacacctacaagttttcttgcatggggtgctcagactttcacctctggcaaatattactgggaggtccatgtgggggactcttggaattgggcctttggtgtctgtaataagtattggaaagggaagaatcagaatgacaatatatatggagaggagggactctttagtcttggatgtgtcaagaatgacattcagtgcagtctc

SEQ ID NO: 395166 - DNA, 574 bp, Homo sapiens
tatctagtgtttgctgcaatagatttgtatgcatcatgaatatatggaattcacattaaaacatatatatgtgtactgcatgtactaatattggtacacttaattaagtaaaaaaggataattattgaatactgtaaatgttgtgctttcataaccttaagcttttagacatgattttaagttactgaggcaatggtgagttaaaaatggtgatactaaaggaaataagaatgctctccaaaatgccctagcttagaaatcaaaacacaattgtttagcagataactgtataaggaatgatttgatacttgatactagttgtcattttaattgaggcttacctcagatgaaactatgaaaaattccttgaaatggctcagamgacctctgaaaaatatttgcaagtcttaaattttcactgttggcacttaaattcaacagtgtttagtaaaagagagtaaggtaaaggacttcaaacggccaaggcaaagattacagtttgtattggtcagggttctccagagagacagaaccataggatgtgtacataactatatatatataccaaaaatac

SEQ ID NO: 395167 - DNA, 567 bp, Homo sapiens
aatatatatatacacacacacagatacacgtatatattcctcatatatccatatatacctatatttgagaaatatatatatgagtacatatatgagaaatatatatatatatgtatatatgaaaataattctaggtatagaaaacagcatgtgcagtaatatttaatttgcatttatttgggggtttgaggaaccacaaaraagtccatgttgctgattagtgtgagtttggaagagaataaatgaaaccttattagaatatgttatgctgggtgaaatgcattgagttgacaatgctagtctgggtcatgtcatcatttgtcgtataatggttttacataacttgccccaattctccaaaatagaaataatggtttcttacctagtcaatataactcgatagtttgattcttaagcaagaactgtgttttctttctataaatgtggtgtggaagagagaaatccatttttatataactatcttagaaagcattttatcattaatcaagtaaatgtaactgggcagaaacaactatgttgatattagtacagaaaaaaaaggaaagg

SEQ ID NO: 395168 - DNA, 585 bp, Homo sapiens
ccacaaatatcaagcaggaactttgatattgaaggtataatggattcagatagtgacactgccttgtgctggttgtactttctccatcccccacccccatgtagtcatctattttgttgccatactcagtgactttattaagcagctcaatgaaagttctgcaaaaccaaawaaataaataaataaataaataaataaaacaaaaaataaataaatgaaagaaaaatcaaggaagtgagcatctctattcctaatttcctttttattgctcaaaagccttcatatttgaaagagaaaatattacatttactacatggctacaaagtcaaccaggggaagccagagagaagaggggaaagtatcttagcagtgaaaagtgttgatgatttctagtttatatttaaatatataattctgaaaaatggatgaaacaaactatttggaatgtttgaaccgtgtaggcctccagagaacctcaactataaaaggcagatctccctgcctggagcaagtttcaacaccctggccttgagaaggaagcaacagatgcagcagtcttaaaaataaccccacttttccagacag

SEQ ID NO: 395169 - DNA, 522 bp, Homo sapiens
tgttcctgttccccatcatcttatataggaaccttcctctttccatagtttatatgaaaaaacctaagacaattgaaatcaaccctgtaaaaattatgctacaattattttaaaccccaacataatagtgttatctttgatatgaatctgaaaatcaatttatttcttatcttttgatagatattcattagtatgttctgtcctattttgttacttatattttggaaaagtttcttaatgttagaatagtatttatacatgttaactcctctacttatccatttactcatcttatttactgtgtaatctattctaaaaattgcattgaataattgtaatatattagcaaagaagacaaatactgccattgcccccttggacttttcaatctggtagtaataagtataagagttttcttaatattataacctgatataatatattcagagaagatgtaayagcagagcaacccagcactgaaaaactgttgtatgagctgaaatgtgattaataactaggttg

SEQ ID NO: 395170 - DNA, 574 bp, Homo sapiens
tgatggctgctcaagtgtgatatactaacaatatctgaattaaatacattagaacatgacttttacagtaaatgaatgaatctcaacaaaactagtacraaaaaaccattattgatgttctagtaaagattccacaataacttattaattaaaataatttaattaacaaaagtacacattcaaggtggttatcccattcataaccacatagtaattacattccatgaagttacaatgagctcacaggctctcgcacatagtgtcttaggacagtatttgcctcatatgtgggaggtcacaataaatcatcgtgaaaccaacttttcatgtacaaccaaagcaaaagaaaggcctcagaggggaagagaaggaggaaggaggaaaaccatagataagagaacctttagaaacatcaaaaaaactcacagatccattatcataatccagaaacaccccaacttgacccagaggcctttgcacatactgaattaaaggtggagagttggtggagagactatagtgattgctcctctttgaggaaattaaaaaaaatctttcatcagaatcaataacg

SEQ ID NO: 395171 - DNA, 574 bp, Homo sapiens
tgatggctgctcaagtgtgatatactaacaatatctgaattaaatacattagaacatgacttttacagtaaatgaatgaatctcaacaaaactagtacgaaaaaaccattattgatgttctagtaaagattccacaataacttattaattaaaataatttaattaacaaaagtacacattcaaggtggttatcccattcataaccacatagtaattacattccatgaagttacaatgagctcacaggctctcgcacatagtgtcttaggacagtatttgcctcatatgtgggaggtcacaataaatcatcgtgaaaccaacttttcatgtacaaccaaagcaaaagaaaggcctcagaggggaagagaaggaggaaggaggaaaaccatagataagagaacctttagaaacatcaaaaaaactcacagatccattatcataatccagaaacaccccaactygacccagaggcctttgcacatactgaattaaaggtggagagttggtggagagactatagtgattgctcctctttgaggaaattaaaaaaaatctttcatcagaatcaataacg

SEQ ID NO: 395172 - DNA, 597 bp, Homo sapiens
agaatcaataacgaaattggcatctgcagtcctggaatcttgacagactcccagaatccagttggaggagagggtcacatccacctcccagtaatgcttgccggaggtgaatgcttgcgctccccacacagcaaagctgtccactccctggggatccgtgggagcactgagatggtcatctccaaatatcacatatctcacatcctcagaaaggcttatatagcaaggaatcatttccgtgctcagagcactatccactgacaagaaaaaaatattatattagtgagtgttatgagggacagaggctctgtggcccaattattcacttcatttgctcttcttccaagaaaatacagaaaaaaggaagccaagaggggtcagccccatgcatycatgaagatgaaatgttattacacctctacagcacatacaattatgtattattccttaagtaatagagaaaaaacgtgaccataccacaggggaaataatgatttaatgtctacatctgcatagttggtttcagggcatatgcaaaatgttttttttttcttcaatagaaaactctccttgtattatttgtttttaagatcatca

SEQ ID NO: 395173 - DNA, 567 bp, Homo sapiens
aatgttctagtttcctgatttagattgtttcttgtctcttgattgatttcccataaatagtccatttcctttataagtttctcctgcaaaagaagcaagaagcttagcaataatgaagacagtatagtagatttcatacccttatcaattaaaaaaaaaggctgtaattgaaagaaacataaattaagttggagtgaagtggtcagatttttccaagttaaacacatttggttctaataatttggatgtgaaaagtgatagaaacataatagagagttttaagggacccttcagataatatcatcaatattctgagaaactggctttcagataacctgactttgaaaagtgttcttggtgctggccaccagctccacagctccattctacacgtttgaacaatgtttctaaggaracctcctttagcgaagtctcaacacagctatgattagagtgccaaattagccagcaacattgaaaggacacatttatgtgttatgattgacatggaataatcaccacctccaccatctgcattctcatcaccatcattatcacaggccctca

SEQ ID NO: 395174 - DNA, 567 bp, Homo sapiens
aatgttctagtttcctgatttagattgtttcttgtctcttgattgatttcccataaatagtccatttcctttataagtttctcctgcaaaagaagcaagaagcttagcaataatgaagacagtatagtagatttcatacccttatcaattaaaaaaaaaggctgtaattgaaagaaacataaattaagttggagtgaagtggtcagatttttccaagttaaacacatttggttctaataatttggatgtgaaaagtgatagaaacataatagagagttttaagggacccttcagataatatcatcaatattctgagaaactggctttcagataacctgactttgaaaagtgttcttggtgctggccaccagctccacagctccattctacacgtttgaacaatgtttctaaggaaacctcctttagygaagtctcaacacagctatgattagagtgccaaattagccagcaacattgaaaggacacatttatgtgttatgattgacatggaataatcaccacctccaccatctgcattctcatcaccatcattatcacaggccctca

SEQ ID NO: 395175 - DNA, 577 bp, Homo sapiens
gtttctaaggaaacctcctttagcgaagtctcaacacagctatgattagagtgccaaattagccagcaacattgaaaggacacattyatgtgttatgattgacatggaataatcaccacctccaccatctgcattctcatcaccatcattatcacaggccctcatcattcttatttgggattctgtataattcaaactgccttagaggcatcacgtaccctgcattcctcagcagcccatcctattgggctgtggctgtgagccatgtgctctggtgactcagagcagggcccacagagcaatctcttgtcagcctcacagaagagctccttagtctcctcatggagcacacagatattgtctgagctgttgatgttctgaggtctggtctgtctggctagggaagacagctttttgagtaccacattggtgttgaagttgggcttctctgagatttttctgcacgaagggcagcgcattggtgctctgccttcttctgagcagaggcagaggcagggcctgcaaaagctgtgcccacagtcaatggtgaccggatctatgaagtagttcacgcaaa

SEQ ID NO: 395176 - DNA, 577 bp, Homo sapiens
gtttctaaggaaacctcctttagcgaagtctcaacacagctatgattagagtgccaaattagccagcaacattgaaaggacacatttatgtgttatgattgacatggaataatcaccacctccaccatctgcattctcatcaccatcattatcacaggccctcatcattcttatttgggattctgtataattcaaactgccttagaggcatcacgtaccctgcattcctcagcagcccatcctattgggctgtggctgtgagccatgtgctctggtgactcagagcagggcccacagagcaatctcttgtcagcctcacagaagagctccttagtctcctcatggagcacacagatattgtctgagctgttgatgttctgaggtctggtctgtctggctagggaagacagctttttgagtaccasattggtgttgaagttgggcttctctgagatttttctgcacgaagggcagcgcattggtgctctgccttcttctgagcagaggcagaggcagggcctgcaaaagctgtgcccacagtcaatggtgaccggatctatgaagtagttcacgcaaa

SEQ ID NO: 395177 - DNA, 577 bp, Homo sapiens
gtttctaaggaaacctcctttagcgaagtctcaacacagctatgattagagtgccaaattagccagcaacattgaaaggacacatttatgtgttatgattgacatggaataatcaccacctccaccatctgcattctcatcaccatcattatcacaggccctcatcattcttatttgggattctgtataattcaaactgccttagaggcatcacgtaccctgcattcctcagcagcccatcctattgggctgtggctgtgagccatgtgctctggtgactcagagcagggcccacagagcaatctcttgtcagcctcacagaagagctccttagtctcctcatggagcacacagatattgtctgagctgttgatgttctgaggtctggtctgtctggctagggaagacagctttttgagtaccacattggtgttgaagttgggcttctctgagrtttttctgcacgaagggcagcgcattggtgctctgccttcttctgagcagaggcagaggcagggcctgcaaaagctgtgcccacagtcaatggtgaccggatctatgaagtagttcacgcaaa

SEQ ID NO: 395178 - DNA, 515 bp, Homo sapiens
gtacataaaaccacaggacacagcaatctgtggtatcaaaagcaaaccatataagatgcataactcacttacagaatttgtatgatggaggctggagaatgaaaatgcaatttatagctcatttatactattctgaatttcactgtaaaacacaaattttgtgggcagaasgaagccagccacgattagcatttagcccagccacagcccatgacaattgtttgtttctgctgtgatctgtaagactttgctttagaatgaaaacttaattggatatactgaaggaaagagctgccattggtgagtaaaattttataatctccatccaagttacacacttgcaaaattatgaaacagagtagatatttaccctgcaaatgaatacaagtctgaatgataaaagctgacagaattaagctacgttagtaacacacagggaaaaaattgcaaaagattcactcaggtattttattactattattacatttgaaacaaattatgagttttatggccat

SEQ ID NO: 395179 - DNA, 564 bp, Homo sapiens
atcaatgtatctcaaatttgaccattaagctcaaagtagaataagattcattctgtgggtttctatttctgtagaataaaagatatgcctgtcaatattggggaattgcatgggtgttagcacaaaaagaaagggaagttttctgtctttaatatgtatagtcaggacccaagcttcaagagttatgaatgcccttattctcctcttcatttgtcaccwattgatggcagcagatttaacaagtaggccaaacacctcaggagcattttaaaagctattttgttattccaggatttcgggcaagaatccctgcggacttgcaagatcaggaaggagaaaaatggtctgaagtcatagaggatgggtgttgtaaactgtcactgttaaatctaagatccgtacttcatttagacactgagtttgaaagcttttttacatcatgacaaaaacatgtttcctatatattaagtgtctgtcgatgaagagtgttgaatgcagatgcgattttgacccttgtttgggctttctaatgactacagcacaattggaagaaggaggtgaaaa

SEQ ID NO: 395180 - DNA, 618 bp, Homo sapiens
aatttgaactcattataaggaaaaatgttctaatgtcaggatcatctatacatacctcaagagtaagcagagaggtacaggaaataaaccactgaacccagagagagggatcagccactaatgattatgcagccataagctggtcatttatcctctcttggccttggttttcttcttttgcaaaagtgtggtgttggaaaagctctttagggtcacttcctggtctaaaattttaatcataaatataataattaaggtgtttgcacaaagggcagattatgacatgtcagaagtattataggggatttaaccatcaaatgcaccatggaattaaaattaatttaagtttttttataactctggaattaagttgatataacccaaaccgaaactagatccgtaacccctactttaatgagatattaactaaagcataaytgaccatttcatatttatcatctaaatcttaacagttaaaatgtttaatgagagaggggaaggaagaggaagagagcagaaagaacgggaaattttgctttctttgagcagaatattagatgcaattatattcatgtgttaatacgctctattattcttgaggcagagtcaattaagata

SEQ ID NO: 395181 - DNA, 618 bp, Homo sapiens
aatttgaactcattataaggaaaaatgttctaatgtcaggatcatctatacatacctcaagagtaagcagagaggtacaggaaataaaccactgaacccagagagagggatcagccactaatgattatgcagccataagctggtcatttatcctctcttggccttggttttcttcttttgcaaaagtgtggtgttggaaaagctctttagggtcacttcctggtctaaaattttaatcataaatataataattaaggtgtttgcacaaagggcagattatgacatgtcagaagtattataggggatttaaccatcaaatgcaccatggaattaaaattaatttaagtttttttataactctggaattaagttgatataacccaaaccgaaactagatccgtaacccctactttaatgagatattaactaaagcataactgaccatttcatatttatcatctaaatcttaacagttaaaatgtttaatgagaraggggaaggaagaggaagagagcagaaagaacgggaaattttgctttctttgagcagaatattagatgcaattatattcatgtgttaatacgctctattattcttgaggcagagtcaattaagata

SEQ ID NO: 395182 - DNA, 618 bp, Homo sapiens
aatttgaactcattataaggaaaaatgttctaatgtcaggatcatctatacatacctcaagagtaagcagagaggtacaggaaataaaccactgaacccagagagagggatcagccactaatgattatgcagccataagctggtcatttatcctctcttggccttggttttcttcttttgcaaaagtgtggtgttggaaaagctctttagggtcacttcctggtctaaaattttaatcataaatataataattaaggtgtttgcacaaagggcagattatgacatgtcagaagtattataggggatttaaccatcaaatgcaccatggaattaaaattaatttaagtttttttataactctggaattaagttgatataacccaaaccgaaactagatccgtaacccctactttaatgagatattaactaaagcataactgaccatttcatatttatcatctaaatcttaacagttaaaatgtttaatgagagaggggaaggaagaggaagagagcagaaagaaygggaaattttgctttctttgagcagaatattagatgcaattatattcatgtgttaatacgctctattattcttgaggcagagtcaattaagata

SEQ ID NO: 395183 - DNA, 606 bp, Homo sapiens
gatgccatatgttctgactttactgagagttacaagttataactctcaagattaaggccaaatgcatgcaactatttggaaagccaagtggaactctgttgcttatcctatcaacttttccatcatctaaggtcttggcttagaatgttctagtgataatgtaagaaaaacgtagcaagaatatagcatggtctgtcatcatctacaaggaattgacagaaatattgctttgtctgtcatcagatcttctgtactgagaggattaaagcttataaattgacccatataaaattgcccatatttaggccaaaattatcaaatgtcaacctatgattcaacctaacatggaggcaaataatctatatatctaaatttatataggcaaataaraagctatcaaattacatgaatatagaggacacagtaaaaatagatgtaacttttaaaatcctgtgttgtttattctcatgtttagcttaaccaaccctctcttcgttgatagtactagtaaactttagctcaagcacagctgaagtatcacaaatatttaattagtgtgacccaaattaacgagattgtggttctgctatattgcctgcttaaact

SEQ ID NO: 395184 - DNA, 525 bp, Homo sapiens
ggaagaaatttctaaagattttccctttcactccattttgacaggtcctattgatgatgataaatgatttgtgtgtcagttttctttgtacaactgcattgcctgctaacactagcacattttttttgctatcttttttacttggtggcaaagagcaatgtccttggtatgagyacaattgcttcagatttgaagtactaaacaagataatgagaccccatgagtcactgatgatgggaggagattagatggagtgatggctctgcctctagagacttccagtagttaaaaagctgcttaaaccttcattccataatgagtctgacttcccagggtctcaactgtgagccaaaagcaagtttggcactttgcaaaatctattaagaggcagggtatgtttccattgagagaaactaacacgttctctttgaatgaaaattggtcaacaattggtgtctggtagagtgacaaaagccatagaggaaaaaaaattacagttttgccatagtagaatgaacagtcaag

SEQ ID NO: 395185 - DNA, 591 bp, Homo sapiens
ttttgtatgagtttcctattgctgctattataaatttagttactgcaaacttagtagctgaaacaatacaaatgtattgtcttacaattctgggggtgagaatctggcagtggtctcaccggggttatggtcaaggcattttcagggttgtgttccttctcaaggctctactagagaatccgctctctctttacagcttccagaggccgctcacttttctaggctcatgccttcttcctctatcttcaaagccagtaacatcaggctgagtccctcttctgtttccatctctctggtttttacattttattccctcttcctcttttaaagatccttgtgattacactggtccacatatataacccagtataatctgtctgttttagtcagcttatgagaaccttaactccatctgcaactttaattcccctttgccttgtaatgtcacacatcacagattccrgagattaggatgtggatatctttggggagcattacattgcctgctacagcttttacattgtacaaccttttctcactaggattgccttaatagtattagctgtctcttagagaccaggttaggtgtct

SEQ ID NO: 395186 - DNA, 530 bp, Homo sapiens
aagtcttctttcaaataatactaaaatgctttgcaagtagtaaaagtcctttataataaaaaaaatcttaattcttctctcttgttccttgttttgttgctgccatttatttcactattacataagcatgcctaagtgtatgtatatatacttaggtatgcaaatgtgtgcaaatacacacatacacttaggtatgcttatgcaattatacatatatacacaaactatatatatgtataatttattttactgttgctattattattttgaacaaactattacctgtcagatcrattaagaataaaaagtttttcttttaccttcacttattccttctgttatgtttttcctttattaatgtatattcaaatttcaaacctaaatcatttttcttcttctaaagaacttttaacatttcttgcaatgcaagtctaccagcaacaaattctgtttatttttgtctgagaaactctttatttctcattcacttttgaaggataatctcacaaggtatacaattctaagttggt

SEQ ID NO: 395187 - DNA, 560 bp, Homo sapiens
agataatctcatgatatattataaagtaaaaaaagaartaaaaaagcttcagagcaatataataatatgtgacttttatgtatgaaaagacagaaaataaaaatagaaaatatatgcatatatctattttggcctaataaacaataaagtaataaatgaaaacagcttatatagggatgggtgtgagtaaaatggataggaaggagctgagactagaattatttggaatttaaagtactgttgacctttgaaacaagtaaatatttcacataatcaaaacataaaaataaaattttaaagaaaatatagtaagccttaatattgaatccaaatagcaacatataaacatacaatgacaacataaatacataggggcagcaatcatttcagaacctgtgaaacacgactctgactatatatccttaataagatatttcgtaggggcaaaaaaaaaaagagtctgaaaagaatttagattttacttactaggattattgccagttgcaacttttattttgtaatttgagttttttatgtatgtcgtaaaattgagaaaataa

SEQ ID NO: 395188 - DNA, 560 bp, Homo sapiens
agataatctcatgatatattataaagtaaaaaaagaaataaaaaagcttcagagcaatataataatatgtgacttttatgtatgaaaagacagaaaataaaaatagaaaatatatgcatatatctattttggcctaataaacaataaagtaataaatgaaaacagcttatatagggatgggtgtgagtaaaatggataggaaggagctgagactagaattatttggaatttaaagtactgttgacctttgaaacaagtaaatatttcacataatcaaaacataaaaataaaattttaaagaaaatatagtaagccttaatattgaatccaaatagcaacatataaacatacaatgacaacataaatacatargggcagcaatcatttcagaacctgtgaaacacgactctgactatatatccttaataagatatttcgtaggggcaaaaaaaaaaagagtctgaaaagaatttagattttacttactaggattattgccagttgcaacttttattttgtaatttgagttttttatgtatgtcgtaaaattgagaaaataa

SEQ ID NO: 395189 - DNA, 400 bp, Homo sapiens
ctagaattatttggaatttaaagtactgttgacctttgaaacaagtaaatatttcacataatcaaaacataaaaataaaattttaaagaaaatatagtaagccttaatattgaatccaaatagcaacatataaacatacaatgacaacataaatacataggggcagcaatcatttcagaacctgtgaaacacgactctgactatatatccttaataagatatttcgtaggggcaaaaaaaaaaagagtctgaaaagaatttagattttacttactaggattattgccagttgcaayttttattttgtaatttgagttttttatgtatgtcgtaaaattgagaaaataatttaatatttttataccattaagaacagtggaaagaatacaaaacataaaat

SEQ ID NO: 395190 - DNA, 635 bp, Homo sapiens
tagaattctccgagcttcctgttactatagtttaatatctgacattaatttggaggatattctcagtcattattgttttaaatatttatttagctccttcctctcttctccttttggtacagcaatttacaggtgagtcccatggtttttggatattctactccttttaatttttgcagktttttattctcttttaatttctgttttggaggtttctattgtcataccctgaagctcacagattctttctcagttctgttcagtttactgataagcccatcaaatacatttttcttttttgttacagtgtttttatttctagcatttaaaaaatattcttaggatttccatctctctgcttacattgtccccctgtacttgcatgctgtattctttatccattggcatccttagtatattaattattgttgttttgaactcctggtctgataattccaacatccctgccatatctgagtctgaatctgaagcctgttgaatcttttcaagctgtgttgttttgttttgttttgactttgagtatgctttgcaatgttttcatgatggctggacataatagactggatacaaataacagtggtaaataggcctttaataatgtgatggtaagttgt

SEQ ID NO: 395191 - DNA, 635 bp, Homo sapiens
tagaattctccgagcttcctgttactatagtttaatatctgacattaatttggaggatattctcagtcattattgttttaaatatttatttagctccttcctctcttctccttttggtacagcaatttacaggtgagtcccatggtttttggatattctactccttttaatttttgcaggtttttattctcttttaatttctgttttggaggtttctattgwcataccctgaagctcacagattctttctcagttctgttcagtttactgataagcccatcaaatacatttttcttttttgttacagtgtttttatttctagcatttaaaaaatattcttaggatttccatctctctgcttacattgtccccctgtacttgcatgctgtattctttatccattggcatccttagtatattaattattgttgttttgaactcctggtctgataattccaacatccctgccatatctgagtctgaatctgaagcctgttgaatcttttcaagctgtgttgttttgttttgttttgactttgagtatgctttgcaatgttttcatgatggctggacataatagactggatacaaataacagtggtaaataggcctttaataatgtgatggtaagttgt

SEQ ID NO: 395192 - DNA, 635 bp, Homo sapiens
tagaattctccgagcttcctgttactatagtttaatatctgacattaatttggaggatattctcagtcattattgttttaaatatttatttagctccttcctctcttctccttttggtacagcaatttacaggtgagtcccatggtttttggatattctactccttttaatttttgcaggtttttattctcttttaatttctgttttggaggtttctattgtcataccctgaagctcacagattctttctcagttctgttcagtttactgataagcccatcaaatacatttttcttttttgttacagtgtttttatttctagcatttaaaaaatattcttaggatttccatctctctgcttacattgtccccctgtacttgcatgctgtrttctttatccattggcatccttagtatattaattattgttgttttgaactcctggtctgataattccaacatccctgccatatctgagtctgaatctgaagcctgttgaatcttttcaagctgtgttgttttgttttgttttgactttgagtatgctttgcaatgttttcatgatggctggacataatagactggatacaaataacagtggtaaataggcctttaataatgtgatggtaagttgt

SEQ ID NO: 395193 - DNA, 476 bp, Homo sapiens
ttaaataatcaggcacctggtcaggcagggcagcctgaagcacactgattaaagtgcctggcacctaatgattggatagcagatgggaacaggcttccataaacaaaaaawatatatatataccttttttctctactgctggattctttcataatcacagtttattgaatgcttttgtgtcaggtaattaacatttttctaataatagtagacaatattttagtaacataagtaacaatataggtaatatactgctaatagtataggtaatattttcctattttataaatagggaaaatgaaagatataattagtgtattaacatcttcaatatttcgggacagcaaatatttgttgggtacatataatagcaagctccaaaccaagactattttattactttaagaaaataacctgaggaaaaaggaatttttaaccttaattcaattgtgttggttccctttgatacaaaatca

SEQ ID NO: 395194 - DNA, 617 bp, Homo sapiens
ggctgttctcctaatggggttccctttgtaggtatcctgcctcttttctctaactgcctttaacaaytttttctgtcagttcaaccttggagaagctgatgattatgtgtgttggggattctcttcttgtttagtatctcatagggattctctacatttccagaatttgaatgttggcctctctagcaagcttagggaagttttcatgaacaatatcctgaaatatgtttcccaagttgcttgctttctccccatctctttcagggatgtcagtgagtcataaatttggtgcctttacataatcccatatttcttggaggttttgttcattcttatttattcatctttctttagttttgtctgattgaattagtttggaggaccagtcccaggctctgatatgtttttcctcagtttgttctagtctgctgttaatattgcaattgcattatgcaattcttgtagattatttttcaactctctcagatcagtttggttctttcttataatggccattttgtctatcagctctagtattgtcttattgtaactcttagattccttgaatcaggtttcagctttgttctgaatcttgatgactttttttacctatccat

SEQ ID NO: 395195 - DNA, 641 bp, Homo sapiens
attctacaggtttggacaaacgtgtaatgccatgtatacaccactatagcatcctacagagtgtttcaaatgctgtgaaaatcctctgggctatgctttgtccatcctctgtccccaatccctggaaaccactgatctttttatttcctttatagttttgccttttctaaaaacgcatataaatggaattatacattattatatgtattctttttggatttgcttctttccttttgtaatatgcatttaacattcctttatgtttttaatggctttgtagcttatttatttttagcaatgactatttcattgtctatatatacaacagtttatccattcacataatgcttcaaagcatcttgtttgttccaagttgtgacagttatgaacaaagcttctgtaaagaatcccatgcaagtttttgtgtggtcataggttttctacttttttggatacacattaaaaagcatgattgctagatattatgctaagagtatgttcagttttgtaagaaacttccaaagtggctgcacatttttgcattgccactggcaatgaatgagttttcctgttcctccacatcctcaccagcrcttgctgttgtcagtgttgtatattttggccattttaataagtatgta

SEQ ID NO: 395196 - DNA, 626 bp, Homo sapiens
tttgttgcataatgattaagactgaatttggcaagaactcaaatatgaagggttattcttagaaaaacaagttcagtgacgggactttaaaacttctaataatctataccaaatgaacacataaggaagtccacaatatgacttgtagatatcaatttaaagccatatatacctgaaataagaatcttgtgcattcactcacagatactatctcagcactgtgaaagaatatgagtgattccatttttctcccttttggggagtggattctgcaactagtatcaatcactactttgtgcatattccatcaaaatgcatgctaccaagatatgcaatgaattttgaccacttaaacatctttgcgggaattttctcaataagtgggagcaatgaaattctactgctcctaatatgtgcagaaaataggtaataagcggattctttagaaaatatcactgggtaattctgatggccagaagcccagcatgatgcaattcaaaaacaaccaaagatctaactcatccttcctatttgttgtagttccagaayaccagaattgaattttttgtttgtttgtttgttttagagacagggtctcactctgttgcccaagctagagtgcagtg

SEQ ID NO: 395197 - DNA, 567 bp, Homo sapiens
tcaacatgagtcttgggcagggacacaaatccaaaccatatcgggcatccttgattcttaacaaagtcgtggttgagtaagctgctgtttccyagaacacaatgggtggcaggatttctttaatcatggctgtttttcaggatcacagggctcaggtaaatttcaacactgtcataaccttaaaaggaatctgcttgccctgtccttctttccccttctagtggttcgaacttaaacacagtggccatgagacatcctaaaggatgatataacctaaagatgggaggagcctgggtccctgggtccctggatgacaggaaaagagctgtctacttgccctggacagctcacctacctctggactattaagtaagagaaaaataaacatttttctagtttatacctctttatttgaggtcttcaagttatagccacttagctagtaccctaatgaacacaaatagtctctgcaaacaggaaagtttcttttttatttggcatcatggtcaagctgtcaagcatcatcttcaaatatgagagataatattaaatgcagagctccttcct

SEQ ID NO: 395198 - DNA, 583 bp, Homo sapiens
agtgaaggaaatacaagatttattgctacattaagttcatataaaagagcgtttcaatctacagtgtatgttgaggggatgtgaacacttttaaatagctgcaccacattgggcaagttttataatttcactgagatcattttcttttttataaaatgaaattaatataaattatggagtttaaatcaggcaatatatacatygtacctatctgtgtaccaagcacatgctagatacccattagatggtaagaattatttcatttctcatgagtaaaagggaaagtttattctatctgatgacactggtctgattctaaggaaaagtagtaaatattttataatatgcatgaaattttcattgtatatataaataaacgttccgtctctctcttttttggaagactagaatagaaaagagcctaatacctggccagaaaacagctgaatccttagcttgaccttacagatgttaaagtaaattaaaatggacagactgaaaaaatccctgagcagacaaagccagataggcctcataagtgagctaagccttgcttgatttgcaaacataagcaaaacttaac

SEQ ID NO: 395199 - DNA, 601 bp, Homo sapiens
ttgtacaacttgaattggggagaaactggttgctatcaactttgaccacaacagatgcaaaataatagactccaatattctctcagaagctttggcaatttttttttctggaaactataaaaagaagtcttttttgttgctgctattttgctttgttaggtagtttgtactgcttccattcagtcttgttttaagagaaaagctttatccagcatgcctaccagcaaagctacataaaagaattctatggtggtgccctgccatagtttgcatttgttcctggtttctcaggtgacctatctcataacaaaccttttgaaaagattaggaggtacatgttgggattaacaaagaattttaaagctcactgaatccaataacctgagaagtttaaaagaaaaaaaaaatcaaacatacaaagagattgaatggctccctaaaataaacrgactactttattaagaatctgccttaataaagtagttgacagcttctccctctctattgcaaacactgtccctaacaaagaaaaggcttcgtttgcacagctggtgccttaagaaccgactaccaaaggactgaaactttaaattgaatttga

SEQ ID NO: 395200 - DNA, 424 bp, Homo sapiens
atcttatctggctttaacttaacatcattagacattgctggggcatatgaaatccttcagggcaaagcttgtcatttctctgtactcacaagactcacagactgtaattagaaggcactcagtgtggtctgatgcckttataaaagataacattatattttaaatcacaaaaaggccaatataaatatgttactagtagattccagtttttaaatctaaaagacacaccaaacattctgcttccatcaatgaatacaaacaagtaaacacaaaaagtgaaaggcatttaattagcatatttaaccattctcactaataagagatgagtcacctttattccaattacttcttccaaaattatgaaggccttttattgggcattttcccgaataatttctcactcaatttgtagtacatactgaaa

SEQ ID NO: 395201 - DNA, 539 bp, Homo sapiens
accttggctgttaaggactttctcccatcagctgtcctactgcattctctcaaagaacagatatttattccccattcccccaaggtccttcaactacctgagccatccattctcttaatcccagaaccttgtcatacccataacctggcacatctaaaatcatgacttcaatgatcacactgcaacaccaaatctccaaccttgcagtatacatgtttaactacttccctgtgggagttctctggtcttggaagaatctctatcccaatctatcagatcactttttgctctacttccctccttcccagcctgaagtctaacagttcaacatttcaacaaatctatcataccctaactctcctgctcrtctgtctttcactggattaatctagaaaaaccctttgtggcttcaagctttcattctccttgagctcctactgaccacggccctccctcaagattccataaatacccaacaagtgtctgcaatgcaccagtgacatagcatttaaacacactgtattttaacaaactgctga

SEQ ID NO: 395202 - DNA, 557 bp, Homo sapiens
ctctttttttctgtcaacctccttgctcagcaagactcctaaggcctgtcagctcgtctttaacatctttgatcaatggcctttcctttccattcccgctgccacaaacttagttcaagtaactacccaattatggcaacagactcagaaatggtctccttgattcccactttgctcctgtccaatccatgctgcctgtattraaatctccctaaaaccttcatgttgcataattaacgctatactaaaaaacatctgcaaaggcttgcccggaaaataaaaacctcagcctgacattcaaagaccggacacagtatggttccaaacagcattcctagactcacctcccatcatcctagcattttctacagaaccatcactaacaagcctagttagtattactcatcacacatattcacatattatacgtgttcccagccccatgaatgtatcctcccagtcttatcaactcatctgaaagtgaatcccatctataccctcaggcctagctcaactcccacctcttcaagtcgttccagggcagcccagcctaggct

SEQ ID NO: 395203 - DNA, 526 bp, Homo sapiens
ttttctgctcctctccctcctctcaccctcctccctcaagtagacctcagtgtctattgttttcttctttgtgttcatgagttcttatcatttagctcccacttataagtgagaacatgtggtatttggttctctgtttctgtgttagtttgctaagggtaatagcctccagctccacccatcttctcacaaaacacatgatcttgttctttttttgtttcctttttgagacggagtcttgctctgtcacccaggctagagtgcagtggcgcgatctcggcccactgcaacctccacttacttccaggttcaggcaattctcctgcctcagcctcccaagtagctgggactacaggcatgcaccactatgcccagctaatttttgtatttctagtagagacggggtttcactatgttggccaggatggtctcgctctctygacctcgtgatttgcctgcctcagcctcccaaagtggatcttgttctttttatggctgcatagtattccatggtgtatatgtacca

SEQ ID NO: 395204 - DNA, 566 bp, Homo sapiens
gtcttaacagcctcctcagagctttacaaatatcagcaagacatgggagtagaatgtgactcccaagatccctagaaaggcatgaaagtagctgagagcccagaggatttcattcagacgggaatgaagaatgcacccatgacaatgtacactgtgttggtcagctttggctgccataacaaaataccatagactgggtggcttaaacaataagaattcatttctcacagttctggagccttgaagtccaagatcaagatgccagcagggtcagtatctggtgagggttctctccttgggttgggaatggccaccytctcactacatcttcacatggtggagagagaaagagagtgagcttcagtttctcttattcttcttgtaaggacattaacccatcatggggcccactctcataacatcatctaaatctaattacctcccaaaggctccacctctaaataccatcacattgggttagggcttcagcatgagaatttgaggataacacaaatattcaattcataacatacatggacaagacgggacaataggtgtctagagat

SEQ ID NO: 395205 - DNA, 566 bp, Homo sapiens
gtcttaacagcctcctcagagctttacaaatatcagcaagacatgggagtagaatgtgactcccaagatccctagaaaggcatgaaagtagctgagagcccagaggatttcattcagacgggaatgaagaatgcacccatgacaatgtacactgtgttggtcagctttggctgccataacaaaataccatagactgggtggcttaaacaataagaattcatttctcacagttctggagccttgaagtccaagatcaagatgccagcagggtcagtatctggtgagggttctctccttgggttgggaatggccaccttctcactacatcttcacatggtggagagagaaagagagtgagcttcagtttctcttattcttcttgtaaggacattaacccatcatggggcccactctcataacatcatctaaatctaattacctcccaaaggctccacctctaaataccatcacattgggttagggcttcagcatgagaatttgaggataacacaaatattcaattcataacatacayggacaagacgggacaataggtgtctagagat

SEQ ID NO: 395206 - DNA, 634 bp, Homo sapiens
aaacacaaagcatcaaaacatgttaacaactttattacaaaggtaaggtaacaatcatacaaaacaaaaaataaccatttaaatatactgccatatgcattctcaagaggagacacagaaattggttacttagggcaatatcactgatgattatgtagtgaacgaaagcaggccagttagatgtgtgtttgtcttgcttgtcatttctttggtgacagaccatacattcatytgtatagtttcctgtgaatgggcagaggcaggaggatcacttgagcctgggaggcagaggttgcattgagccgagattgcaccactgcactccatcctgggtgacagagtgagaccctgtctcaaaaaataaataaacaaaaaatcaaacagtaatcttgttcttataatatactacacctcctagaactaaaaataactgaattttcctagcaagtttgtgcacgcatacacacacacgtataatctcacagaataacatgaaatactacaaagagaatgcattgccattaacattcccttcaaccaacatggagcaaatcctcctcttggtgcctttagcagctttaagttcttaagttaaataaatcacggtgaagaactcttgctgacataaattttc

SEQ ID NO: 395207 - DNA, 586 bp, Homo sapiens
ccaaggtgggtggatcgcttgagctcaggagtttgagaccagcgtgggcaacatgatgaaaccatgtctctacaaaaaatacaaaattagcggggcatggtggtacatgcctgtagttccagctacttgagggactgaggcagaaggattgcttgagtccgagaggtcgaggctgcagtaagctgagattgcaccactgcactccagaaaaaaaaaraaaaaagagatttgaaataaacacaaggttctgaagttttttgtatgattggatagatttcattgttctataggccccctttctgcttatcatcttccacttagtgagcatcatttatccctgaaaaagttctccttaattttaagtggaaaaataatattaatttattgagtctactttgagctgccacttccaaaacaaaacagcaacaagttttaaagcaaatttcttttcttctatattctctagatccatggtttaaaaagagggatttggcaaaattcaccagcagtccttaggattacattggtactgaagtaaagcgagggaaaaaaaaagtaaaattggagatgagataaaactatacta

SEQ ID NO: 395208 - DNA, 586 bp, Homo sapiens
ccaaggtgggtggatcgcttgagctcaggagtttgagaccagcgtgggcaacatgatgaaaccatgtctctacaaaaaatacaaaattagcggggcatggtggtacatgcctgtagttccagctacttgagggactgaggcagaaggattgcttgagtccgagaggtcgaggctgcagtaagctgagattgcaccactgcactccagaaaaaaaaaaaaaaragagatttgaaataaacacaaggttctgaagttttttgtatgattggatagatttcattgttctataggccccctttctgcttatcatcttccacttagtgagcatcatttatccctgaaaaagttctccttaattttaagtggaaaaataatattaatttattgagtctactttgagctgccacttccaaaacaaaacagcaacaagttttaaagcaaatttcttttcttctatattctctagatccatggtttaaaaagagggatttggcaaaattcaccagcagtccttaggattacattggtactgaagtaaagcgagggaaaaaaaaagtaaaattggagatgagataaaactatacta

SEQ ID NO: 395209 - DNA, 586 bp, Homo sapiens
ccaaggtgggtggatcgcttgagctcaggagtttgagaccagcgtgggcaacatgatgaaaccatgtctctacaaaaaatacaaaattagcggggcatggtggtacatgcctgtagttccagctacttgagggactgaggcagaaggattgcttgagtccgagaggtcgaggctgcagtaagctgagattgcaccactgcactccagaaaaaaaaaaaaaaaagagatttgaaataaacacaaggttctgaagttttttgtatgattggatagatttcattgttctataggccccctttctgcttatcatcttccacttagtgagcatcatttatccctgaaaaagttctccttaattttaagtggaaaaataayattaatttattgagtctactttgagctgccacttccaaaacaaaacagcaacaagttttaaagcaaatttcttttcttctatattctctagatccatggtttaaaaagagggatttggcaaaattcaccagcagtccttaggattacattggtactgaagtaaagcgagggaaaaaaaaagtaaaattggagatgagataaaactatacta

SEQ ID NO: 395210 - DNA, 591 bp, Homo sapiens
ccatgaccattgacagcaggtgatcaaattatgcctctcaatcatcatgataatctaagacattataaaagcagcrggtataaaatgccatgtgctatctgagtaaccagagaatcagggttaagaaaatagtgctgccaggaagagccattgttcttttctttcctcctttcttctatgttttaagtgttggttccttcccaaactactagaaaaatgcctactgtacattctgagcactgtgcgtctgacacttctttccctccccaggtagcacgaatcttgagaaatgaagtagagaaaatggcataacactttggaatagcacaaggatatggatcagggagcatcgtcgcatttagaaatgaatggactgataggaggagggatgagggagggaagtaagtaatggacaatgaccactcatgttaaaacacagcacatacaaatatgagacaaaataaatgtaaagggttttcgcttaaaattacttgtaatatgtcagaaaacatttatcaatttgtcaaacaaaagattaaaggtaatgcacttattaatgcatttaatcaaaaagaatttatcaaatgttca

SEQ ID NO: 395211 - DNA, 591 bp, Homo sapiens
ccatgaccattgacagcaggtgatcaaattatgcctctcaatcatcatgataatctaagacattataaaagcagcgggtataaaatgccatgtgctatctgagtaaccagagaatcagggttaagaaaatagtgctgccaggaagagccattgttcttttctttcctcctttcttctatgttttaagtgttggttccttcccaaactactagaaaaatgcctactgtacattctgagcactgtgcgtctgacacttctttccctccccaggtagcacgaatcttgagaaatgaagtagagaaaatggcataacactttggaatagcacaaggatatggatcagggagcatygtcgcatttagaaatgaatggactgataggaggagggatgagggagggaagtaagtaatggacaatgaccactcatgttaaaacacagcacatacaaatatgagacaaaataaatgtaaagggttttcgcttaaaattacttgtaatatgtcagaaaacatttatcaatttgtcaaacaaaagattaaaggtaatgcacttattaatgcatttaatcaaaaagaatttatcaaatgttca

SEQ ID NO: 395212 - DNA, 581 bp, Homo sapiens
tgctgctttatcagctaagttcatgcaatcttctaaaccttttattgtcatttcaataatgttcacatatcttcaccaggagtagattcatctctagaaatcmctttctttgctcatccataagaagcaactcctcatccattcaagttttatcatgaaattgcaataatacagtcacatctcaggctccacttctaattctagttctcttgctatttccaccacatctgtagttacttcctccacttgtcttgaatacctcgaactcatctatgaggactgtaataaacttcttctaaactccttttaatgttgatttttttgactttgttccttgcatcacgaatgttgttaatggcatcctagaatgatgaatcatttccaaaatgctttcaatttactttgttcacatccattagaggaatcactaactatggcagctatgggcttatgacacatatttctttcttttttaaaaaaatttccaacttttattttaagttcaggggtacatgtgcaggatgtgcaggtttgttacataggtaaacctgtgccatggtggtttgctgcacaaattatcc

SEQ ID NO: 395213 - DNA, 581 bp, Homo sapiens
tgctgctttatcagctaagttcatgcaatcttctaaaccttttattgtcatttcaataatgttcacatatcttcaccaggagtagattcatctctagaaatccctttctttgctcatccataagaagcaactcctcatccattcaagttttatcatgaaattgcaataatacagtcacatctcaggctccacttctaattctagttctcttgctatttccaccacatctgtagttacttcctccacttgtcttgaatacctcgaactcatctatgaggactgtaataaacttcttctaaactccttttaatgttgatttttttgactttsttccttgcatcacgaatgttgttaatggcatcctagaatgatgaatcatttccaaaatgctttcaatttactttgttcacatccattagaggaatcactaactatggcagctatgggcttatgacacatatttctttcttttttaaaaaaatttccaacttttattttaagttcaggggtacatgtgcaggatgtgcaggtttgttacataggtaaacctgtgccatggtggtttgctgcacaaattatcc

SEQ ID NO: 395214 - DNA, 562 bp, Homo sapiens
gaaacctgctccttctcctctctcaggttcatcttgtttgagaaagacgttgtgtggccctctgagcaactaaaaaaaagtaggtttctgcttgttattttctcttcatttttctcataatacttaccatggtttagaaatatagaaatgatcattgatgatgcacataatctataattgttatttttggtagctgggtttttatttgccagtttgacttcaaattctgcaacacattcctagaatgctctctcatttcttagtgtgtttcaaaatactgccactccctccagatcctggtgccctgaggagaaatcagcctggagtctgaaatttaggactatctttttgaagacacagtttaaaaccggagaagaggaagagatcacctaggaagaaagtgtaagtggcaagagaattcatgctatagttragggtcatatagactctggtggaagatggtgagccccagcttgggtatgaccagcttagaccctaagtcataaaaacttctgatgtgatgatctgatctcccctctgcgcctcagaccaggacatcaaa

SEQ ID NO: 395215 - DNA, 562 bp, Homo sapiens
gaaacctgctccttctcctctctcaggttcatcttgtttgagaaagacgttgtgtggccctctgagcaactaaaaaaaagtaggtttctgcttgttattttctcttcatttttctcataatacttaccatggtttagaaatatagaaatgatcattgatgatgcacataatctataattgttatttttggtagctgggtttttatttgccagtttgacttcaaattctgcaacacattcctagaatgctctctcatttcttagtgtgtttcaaaatactgccactccctccagatcctggtgccctgaggagaaatcagcctggagtctgaaatttaggactatctttttgaagacacagtttaaaaccggagaagaggaagagatcacctaggaagaaagtgtaagtggcaagagaattcatgctatagttgagggtcatatagactctggtggaagatggtgagccccagcttgggtatgaccagcttagaccctaagtcrtaaaaacttctgatgtgatgatctgatctcccctctgcgcctcagaccaggacatcaaa

SEQ ID NO: 395216 - DNA, 562 bp, Homo sapiens
aagacatcttccatgttgcctccaaaatacattgttttctgattttaaaattatgaaaaaatacagaatgtattctctgacagtcattgcaggaggcatttgtaaaacacatttccattccacagaaattactcaggattgtcatayctcttgtggttccagcattgtacagatttcctaattgttgtaattagaaataacagcaaaaggcagtatcaaaagaagcagaaatagaaaacaagagctattgatggctaaggaagaaagcatatacttaagcattggacatagaacaatttcagacaaatgataacatgttggcttagtacaaggaagtggttagtttgctgtggaggagctaagcatgaagacggagacaacgagagacagagatcagccagacccatgctgtagaaagaagaggatcatgctgagatgttaccttctcattccaggggaagactctgactgctgagcttgggtgagagaaaccagtcattaaccacagaacttcattggacttattctcatgtactacttattattaaaaatagcagtatat

SEQ ID NO: 395217 - DNA, 436 bp, Homo sapiens
aattgagccatataaattgatgcccattattatttctgctttttacagctaccccagttttttaatcccygaaagtttcatagagatctcttattgaatctagggcagttctgatcctggtgtttccttgctccaaggtctttgatggtttccagttgctatggcaacaagacataaatttctgtcaggaatgtgtgactgtggttcagagaaagacatcattcaaaccttgctgccccctctccccaactttcctgcgtgctccaggtgggtcagaggacttctcttctcccaaacacacctttcacattcccatgatccagctctcgttaaatagttttacttaaacttcatgggtctccttaaattcaaggtcttcttataagtcttttctaagctctacaataagatgctgttttgctcacctttgaattac

SEQ ID NO: 395218 - DNA, 443 bp, Homo sapiens
atcatttgtacaccaaaccccagtgacacacagtttacccatgcaacaaacctgcacatgtactccctgaacttaaaataaaagttgagagaagagaactaaaaataaaataaaaatagatgtctcttatttaaagatgagaaagcccagctcaaggctgactaacagagaggaggaaaagagctagctcactttcaggctcatatagaaagagatgacattttgttactttctctgtgggaaaatttttatttatagccataccttccagtgaaaatttgtcctgtctgaacatctacatcactgccaagtgaataggattcagatatcgctccaagcctttagtttctatatttacaacaaaatctgcccatagctgcctgtttacattactttcatcctakctgggctttacaaatgctgtaaattaggatttgaaaaaa

SEQ ID NO: 395219 - DNA, 515 bp, Homo sapiens
tatttcaaattgttaaaaatatttgcctcctaaacttcccaagttcaagtgcagcctacctgggtccatggcattaccattgggtttcattgatgagaatcctcagcattgacttcatgttccccagcttctcttgcagtgctcaactctgagcatgctcccctgccactgcttagtccgcccttcagatccctcaccttaatggctgtaataaactcataactggtctaggaatcttaattttagttcttatattcatccaaaccatacttagtttttttctaaaaactcagcttggagaggttggatctccacratgccgttcaatgcttctgcataaagtaaaacttctaagttattctaggaactcctggatgtggccttaacatatttttgccatattttaaactatgtttctgcacagctatctttgagcacatctgtttctcaacattttctaaagggatcagatgggacttcatggttgcatgcccttcacttcattgctgggccat

SEQ ID NO: 395220 - DNA, 595 bp, Homo sapiens
gtctgtttttgtaaataaagttttattggaacatagccacatgcatttgttttcatatggtctagggtagttttatgcttcaatgccagagttgaatggttatgacagagttgacttaacccacaaagcctaaaatatttacttctggacctttatagaaaaaaaaagttccagctcttgacttgtagtaatatgaacagttttggttggcatatttaagaaatattaataaactagagttagctattatgagaatgaaatgtgtgaaaactatgctacacagtaaagtacggagaatttttagtctggaaaaaagrgcttttaaggagtttataaaattcaaaaaaagcagattaggttgatgcatactacttccactgacaactggtttactaaagattggagaaaaaaaggggaatatatttagaaaggcaacttggagttcattggaaatatgaatacttttggactcaataattacactatgaaattaatctgagagggatatttctatacatgtagaaagaaacacctttgaggatgttgactggggcttttgtttatgataaccagagctgtgaaacaagcttaacag

SEQ ID NO: 395221 - DNA, 489 bp, Homo sapiens
atgcatttgttttcatatggtctagggtagttttatgcttcaatgccagagttgaatggttatgacagagttgacttaacccacaaagcctaaaatatttacttctggacctttatagaaaaaaaaagttccagctcttgacttgtagtaatatgaacagttttggttggcatatttaagaaatattaataaactagagttagctattatgagaatgaaatgtgtgaaaactatgctacacagtaaagtacggagaatttttagtctggaaaaaagggcttttaaggagtttataaaattcaaaaaaagcagatwaggttgatgcatactacttccactgacaactggtttactaaagattggagaaaaaaaggggaatatatttagaaaggcaacttggagttcattggaaatatgaatacttttggactcaataattacactatgaaattaatctgagagggatatttctatacatgtagaaagaaa

SEQ ID NO: 395222 - DNA, 567 bp, Homo sapiens
gcatatgttgttaagactaaattaaactacatgtgacagcaaaatctcaaattatagtggcatcagcaagatagaatttattgttctgtcgaagtccagtcagggaatccagggttagggtagtgagagcatcatggcctgaaggwgccaagctccttatttcatttcttgttgcttggccttggttggcatctgtgttccacacagcacaatgaggagctgggtagtgttcaaggagatggttgattataagtcacttgtggatttaaaggttcccattgtgcaaaagaaaagcataacttggtcactgtggaagctaaaagacgaagacaaggtaagaaggtcatttgttaaggagggtttttctaacaggaagtggtgggccacagaatttgagaaataataagtaaaaaaaggctactagagattcatagactaaagactaaagctagaaggaatgtctgaaattatctgatttgaatcagttgttttatatcttttattacaatcttcaaaggctaataagagaaaaaagaaaaaaagttaatattctaaaacttgtgaaag

SEQ ID NO: 395223 - DNA, 567 bp, Homo sapiens
gcatatgttgttaagactaaattaaactacatgtgacagcaaaatctcaaattatagtggcatcagcaagatagaatttattgttctgtcgaagtccagtcagggaatccagggttagggtagtgagagcatcatggcctgaaggagccaagctccttatttcatttcttgttgcttggccttggttggcatctgtgttccacacagcacaatgaggagctgggtagtgttcaaggagatggttgattataagtcacttgtggatttaawggttcccattgtgcaaaagaaaagcataacttggtcactgtggaagctaaaagacgaagacaaggtaagaaggtcatttgttaaggagggtttttctaacaggaagtggtgggccacagaatttgagaaataataagtaaaaaaaggctactagagattcatagactaaagactaaagctagaaggaatgtctgaaattatctgatttgaatcagttgttttatatcttttattacaatcttcaaaggctaataagagaaaaaagaaaaaaagttaatattctaaaacttgtgaaag

SEQ ID NO: 395224 - DNA, 571 bp, Homo sapiens
acatttctctttaaaaatagagctcattttgtaacaaacctttaggttcttgccaaaattgggcagaaggaacataggtccccaatatcctctcaccacacatatgcatagcccccttcactatgaactttctgccccagagtggtacgttgtctacaacctttcaacctacatggacacatcactgtgactccaactccatcgctctccttaggattcacttgagtgttgtatattccatggattcaagcaaaggcataattgcatgtatccaccattattgtattctatggactagtttcacttccatgcaatcgtactctgtccagtctcyccacttctctccttcactctcggtcccttgcaaccactcaactattgacttgtgtattcatatttaaagtgtggacacatcttgttgtatatatttcttatgtacaaaatgctgttttaaagtatgtacacattgtctaatatctaaatctaggtagttgacattcattacctcacatatatattactgtggtgagaacactgcacatccatgttaatgagatttttcaaaaatacg

SEQ ID NO: 395225 - DNA, 571 bp, Homo sapiens
acatttctctttaaaaatagagctcattttgtaacaaacctttaggttcttgccaaaattgggcagaaggaacataggtccccaatatcctctcaccacacatatgcatagcccccttcactatgaactttctgccccagagtggtacgttgtctacaacctttcaacctacatggacacatcactgtgactccaactccatcgctctccttaggattcacttgagtgttgtatattccatggattcaagcaaaggcataattgcatgtatccaccattattgtattctatggactagtttcacttccatgcaatcgtactctgtccagtctccscacttctctccttcactctcggtcccttgcaaccactcaactattgacttgtgtattcatatttaaagtgtggacacatcttgttgtatatatttcttatgtacaaaatgctgttttaaagtatgtacacattgtctaatatctaaatctaggtagttgacattcattacctcacatatatattactgtggtgagaacactgcacatccatgttaatgagatttttcaaaaatacg

SEQ ID NO: 395226 - DNA, 579 bp, Homo sapiens
cagatcccatgaggatgaagtgaactgggaaggggaatatggaaacctgaaatggccactcctctatgaaggattctcctggggcatttctctcttcaaaggtgatgctcctgcaaatctgctggtagcctcctggggaaggcaaagctgttgtgagaaaacagtgacatgtgactgtcggctgatgccccctttggcttcttttccactttgaatgtggatttgatgcctgaacagagctatcctgttgttgcccaggatgaaaacaccatgaggtcctgagaagtcagccccgacctctctgaattgctgaaccgaggtcacagcttagctaagtaaatattgaaaacatttcattatttgaatagctttagcagtaccaaattgttttgggcaccatagatgaattgtacrgtggtcaagtctatttcagtttactcttaatgaacttttgtgatacttgtaacataaattattgttcaattcaatgcagatttcatgcacagaatgacaaattttatgatatcaatattacaaaatacattcctgttagcatttttttaattagagcttagtatt

SEQ ID NO: 395227 - DNA, 579 bp, Homo sapiens
cagatcccatgaggatgaagtgaactgggaaggggaatatggaaacctgaaatggccactcctctatgaaggattctcctggggcatttctctcttcaaaggtgatgctcctgcaaatctgctggtagcctcctggggaaggcaaagctgttgtgagaaaacagtgacatgtgactgtcggctgatgccccctttggcttcttttccactttgaatgtggatttgatgcctgaacagagctatcctgttgttgcccaggatgaaaacaccatgaggtcctgagaagtcagccccgacctctctgaattgctgaaccgaggtcacagcttagctaagtaaatattgaaaacatttcattatttgaatagctttagcagtaccaaattgttttgggcaccatagatgaattgtacggtggtsaagtctatttcagtttactcttaatgaacttttgtgatacttgtaacataaattattgttcaattcaatgcagatttcatgcacagaatgacaaattttatgatatcaatattacaaaatacattcctgttagcatttttttaattagagcttagtatt

SEQ ID NO: 395228 - DNA, 510 bp, Homo sapiens
atttatgcaggtctgtatgtgcatgcttatgcagaaagaacacttggcaatctacttggcacattaaaatacacagagaatttatggtttatattatgaagaacacaaacattaaaaagaataatctgtgagtcgcagcagaaaatagaaaaataatttattagaaaattatctgagggtaaaaggggtaaagataatgcaaattgtagacttcagtttttcaaatgtgaaaaatggtaaaaaaaattgttctatttcataggctgaataagctgaaaatgacattattctgaaccatcwatatctcccgatttaaaaatgtcttccctccgtcttctcttttttcatctctactcccatcaccatctcactgaagttgtacaacatcatgcagtcatttatattcacctatttaaaataaaaacctaatcataccaagcagaagaaaaatgagtcttattatgcttttaagagagtgccaaatgcctgatcagcatctaaagaggatca

SEQ ID NO: 395229 - DNA, 588 bp, Homo sapiens
cccttcccaggagatctgcatggtttcctgctgaagcctggtgtagctgtgtcttagcttgtatgcttatgtctgggttccagtaattggagcttgcagaaatgtttccccgattgttcttctgtacattttcaatgctcatatgtatttttgtgagtcatcttgaaaacagttaaactgttcaactggtttccaaactgcagaaatcaaaatgaaatcacaaaacacttttttttccccaagttgactcttctattcctgcctgctgtgctttatgycagcaagtgaccctttcctgtattataatgcaatatagtatagatgcatcatgtaagactagagagaaaccaattccaaaaccacctttcctcaagccgccatttgtaacgatcatatgggcggtttaaaggacacagagagggcctattgatacttcactttggctatacgtggtgatttttgcagtgcttccggagacactgaaatttagttccaaacattgccttagaggattcttgatattattcattctgccgatgatccactcagaaaatgaaacctgagtacggcgacattggagaagtcgtt

SEQ ID NO: 395230 - DNA, 481 bp, Homo sapiens
tgtatggtttcatgctgaagcctggtgttgctgtgtcttagcttgtatgcttatgtytgggtttcagtaagtgaagcctccagaaatgttccccaattgttgtccttctctgtattttcaatgctcttttgtatttttgtgagtcatcacaaaaacagttaaactgttttccaaactgcagaaataaaaataaaatcacaaagcatttttttctctaagttgactcttctcctattcctgcctactgtgctttatgtcagcaagtgaccctttactttattaaatgtgatacagtatagatgcatcacgtaagactagagagaaaccaattccaaagccacctttcctcaagccgccatttgtaatgaacatatatgtagtttaaaaggcacagagagagcctactgatacttcatgtttgctacacatggtgatattaccagggcttccagagacactaaaatttagttccaaacattgc

SEQ ID NO: 395231 - DNA, 607 bp, Homo sapiens
agaaagccataatctcatcagtaatgcctttttaaaaaatccagcagaaaatatgaactagcaactcatcatgacaaaaaagtaaaactcaggaaaaatcctaaggcagagcagcttccggcttcagtgtgaaaccatcatagtcccttagaaggagattctctcttagagcagttcactgtccagaagatgctcaaggaccatatacttttcttcttccaactatgaagatgtagaaaaatgacaattcactcaaggaggaaaaaatatttagggaaagttattatgaaaaaggctgcttcaacgatctaggtgagatgaatgtcagaatttgagraagatgttaaaatcgagggtgattccagggtagactgagatacagaagttccagcacacaaagtcttctgtcaccctgcctgtcactgaggcaccctggctccttttttaccttgatgccagggctgagccttgtttccattgcccattttgaaaatggcatgaagccctgtgaaggccctgagttcactgaacttctgaacccaggtcacagctgctaccttcatacctctggctgcatgagaaaaagtaaagcagacaaaaacaaaca

SEQ ID NO: 395232 - DNA, 538 bp, Homo sapiens
tttattactgtttatattatataatgggtatttggcaattacatgtcagtacaattacaaataggcttcaattacacaaaatatttaatgctcaaatcctacagtaagaggacgttatattttttaatacaataatctgaaaaataaactaaaaataaaacatcatctagtataacaatatattgttattgtatgcagttctgttttagacaagcacaaaacacacaccaatctgttatttcagccattaatatagtttacattgggaacaggtctttggaggtgaaggcgtggaaatgaatgaagagattagacagggtctctggggtttgtgtttctctgtgtagtttttcatgcagctcctagagtgtgttaccaccctaacrtcatgaaagatcactccgtgaattaaaacaatcttggtccaaatgtgaatatcccattttataggaaaaactaatttttaacttcatttttattttgcaagctgaaaaacagttggttgatttcccaggaaaattatggaaaagcattaaat

SEQ ID NO: 395233 - DNA, 523 bp, Homo sapiens
cgaggagaagcagagagcagtcgaattgctcagcgttcctctaaaaaggacaccatcaaaagaggtgaaggaccaggacttgaatatgttcattgaagactcttgtcaatcaaagagatcgagattgctgagaggcttattctcagggacgtgggtcacccccaaatccacatccttttggtgattgcaggctgcattgcccaatcttgatgtgcctccagctcaaaaggctcatggtttcctcagccytgctgtttatttctctcccttgttacatactttgtgtctctattctgtcatacttcttttcctcctcagcaccgatttttaatagactgttactcctttctaggatacatttgagtgaccaaattcaggtatgaaacatatttcttccattgccaacttctgttttctcaaatcctcctttcacatttacaacttagctgaaattttctgtctacattctcttttcttgcctttgaacacttctcctcctctgctcccctccccagtagaatcc

SEQ ID NO: 395234 - DNA, 555 bp, Homo sapiens
gtttttcagctctttcatctttaaaaacaaaaacctgatgcggaatcatctcgttttaccaaacactagtatgctcccttgaatatgtgcctaagaaaaatgaattaaaaacaaaaaaacttcatctacctcattaataggttcatataaaagaaaatattttcttataaaatagactrctagatattcctatactcggcactaactcgaaattatatgacgtgtctctccaatattcatgatagttattaaactattacaaagatctgactccattcattttgtgagagcatggcccccttctccgccatatatgaaagttaccactctactttgtatccttcttcatagaaaacataacaccatcaaattattatttaaacttgtctaattggggtacaagtttgtttagttgtacttttgaagatcagaccctagatactacacacttggaaacagtgcagctagattgtttaaactttatttgggcacagactaagtacttttggggggcaaaggcaggcagggcggatgttaaggttatttcagagtgat

SEQ ID NO: 395235 - DNA, 555 bp, Homo sapiens
gtttttcagctctttcatctttaaaaacaaaaacctgatgcggaatcatctcgttttaccaaacactagtatgctcccttgaatatgtgcctaagaaaaatgaattaaaaacaaaaaaacttcatctacctcattaataggttcatataaaagaaaatattttcttataaaatagactgctagatattcctatactcggcactaactcgaaattatatgacgtgtctctccaatattcatgatagttattaaactattacaaagatctgactccattcattttgtgagagcatggcccccttctccgccatatatgaaagttaccactctactttgtatccttcttcatagaaaacataacaccatcaaattattatttaaacttgtctaattggggtacaagtttgtttagttgtacttttgaagatcagaccctagatactacacacttggaaacagtgcagctagattgtttaaactttatttgggcacagactawgtacttttggggggcaaaggcaggcagggcggatgttaaggttatttcagagtgat

SEQ ID NO: 395236 - DNA, 635 bp, Homo sapiens
atagatttattgaacatctacaatccatgaacactcattttgattgatgaggatacatttgtggataaaacagagaagcagttctagttctcatgatcctctgcccttcaccctgtggaaaaagtaggcaataaaaaggcagatgataagtaaaatatgtaatatgtcagaygcttataaatgataagaaccgacagagagtctttgatgtctgctggaggaggtggtggctagtgaagtcttcctgaggaggggatttttagtagaaacgttaagaaagtgaagaagcaagccatacaggcatacaaggaagaacattccaggctgagggaatggcaagaacctacaatttgtgtttggagaaattctggcatcttcaaggctgaaaaatggggcttgtctgattgaaggacaaggtacaaggaagaagttagtaggagaaagggccagagaatgtgtatgagtatacacataacagaaaggcttctccctttattcagcataagattgaggcgtttgagaatttctgagtgaaagagtcccatgatccgattgtgttctacaagcactgaattgagaagagactgaagagaggaaagtgcagaggcagaaaactccatgaggaaatgtgtatc

SEQ ID NO: 395237 - DNA, 576 bp, Homo sapiens
cctgttgggcttaagcaatcctcccacctcagcctcccaagtagctgggactacaggtgcatgtgtgatcacatctggctaatttatttttttttaattttctttgtagagatgaggtctcactatgtcgtgcaggtcagtctcaaactcctgatctmaagtgatcctcccacctctgcctcccaaagttctaggattgtaggcgtgagctactgcactcagctgggattgctttatgatagactacatgaaatagataaagaaagagtggaatagccattactgatgagagcaaaggctgagggtgagttggtttgagaaggaaaaccaggagatcagctatgaacgtattaagtaggagatgtcccctatatactcaaatggataggtcaggtaggtagctggatatataagtttgggtctggattttggagacgagtctgagcaggagattttaacatgggactcatcagaatgtaggtggtgttttatgccatgggactggctgaagtccctaagggagtgagtgaagacagcatagggaagagatacaaagattgaggctcagaaatgcca

SEQ ID NO: 395238 - DNA, 576 bp, Homo sapiens
cctgttgggcttaagcaatcctcccacctcagcctcccaagtagctgggactacaggtgcatgtgtgatcacatctggctaatttatttttttttaattttctttgtagagatgaggtctcactatgtcgtgcaggtcagtctcaaactcctgatctaaagtgatcctcccacctctgcctcccaaagttctaggattgtaggcgtgagctactgcactcagctgggattgctttatgatagactacatgaaatagataaagaaagagtggaatagccattactgatgagagcaaaggctgagggtgagttggtttgagaaggaaaaccaggagatcagctatgaacgtattaagtaggagatgycccctatatactcaaatggataggtcaggtaggtagctggatatataagtttgggtctggattttggagacgagtctgagcaggagattttaacatgggactcatcagaatgtaggtggtgttttatgccatgggactggctgaagtccctaagggagtgagtgaagacagcatagggaagagatacaaagattgaggctcagaaatgcca

SEQ ID NO: 395239 - DNA, 512 bp, Homo sapiens
ttggctgttcatagtacatattgattctcaaggtggtactttagaaaagtaagagatggtggtgaaattacctggataatggaaaccacaatgacattgaagkctatgttagagtctttttgtaatacaagtccggctcatgctgtagatctaagctgtggatctagtttaaaaatactaattttataaaagactctctcagttaaatgaatgagtggcctttggtgtgctccaagaatggattttcctgtgttatataaaatgtatactatgttgttgcgtggttcgttgtttttattttgatgaacccgctttaaatatgaaaagtataagtactgtcacttctgttataacatgacaaatgtgttcctataagtcacactgttgtggaaaattacataacataaaagggcttgtgagaaaaatggggctatgggtataataccgccaaactaagtcactgacacataaataagataggaacatactaaaacaagtagcacagtcttaca

SEQ ID NO: 395240 - DNA, 549 bp, Homo sapiens
ccggctcatgctgtagatctaagctgtggatctagtttaaaaatactaattttataaaagactctctcagttaaatgaatgagtggcctttggtgtgctccaagaatggattttcctgtgttatataaaatgtatactatgttgttgcgtgrttcgttgtttttattttgatgaacccgctttaaatatgaaaagtataagtactgtcacttctgttataacatgacaaatgtgttcctataagtcacactgttgtggaaaattacataacataaaagggcttgtgagaaaaatggggctatgggtataataccgccaaactaagtcactgacacataaataagataggaacatactaaaacaagtagcacagtcttacatatgttatgtggttaagaaataaataatagaataaatgtagccttttatcttgaaaaatacttgaagtttggttgtagaagagttgcagcttgccagttattgtgaagtagaggaaggacagttattttcaagtcatgggaaagttgtaacactagaagggtatggctc

SEQ ID NO: 395241 - DNA, 549 bp, Homo sapiens
ccggctcatgctgtagatctaagctgtggatctagtttaaaaatactaattttataaaagactctctcagttaaatgaatgagtggcctttggtgtgctccaagaatggattttcctgtgttatataaaatgtatactatgttgttgcgtggttcgttgtttttattttgatgaacccgctttaaatatgaaaagtataagtactgtcacttctgttataacatgacaaatgtrttcctataagtcacactgttgtggaaaattacataacataaaagggcttgtgagaaaaatggggctatgggtataataccgccaaactaagtcactgacacataaataagataggaacatactaaaacaagtagcacagtcttacatatgttatgtggttaagaaataaataatagaataaatgtagccttttatcttgaaaaatacttgaagtttggttgtagaagagttgcagcttgccagttattgtgaagtagaggaaggacagttattttcaagtcatgggaaagttgtaacactagaagggtatggctc

SEQ ID NO: 395242 - DNA, 549 bp, Homo sapiens
ccggctcatgctgtagatctaagctgtggatctagtttaaaaatactaattttataaaagactctctcagttaaatgaatgagtggcctttggtgtgctccaagaatggattttcctgtgttatataaaatgtatactatgttgttgcgtggttcgttgtttttattttgatgaacccgctttaaatatgaaaagtataagtactgtcacttctgttataacatgacaaatgtgttcctataagtcacactgttgtggaaaattacataacataaaagggcttgtgagaaaaatggggctatgggtataataccgccaaactaagtcacygacacataaataagataggaacatactaaaacaagtagcacagtcttacatatgttatgtggttaagaaataaataatagaataaatgtagccttttatcttgaaaaatacttgaagtttggttgtagaagagttgcagcttgccagttattgtgaagtagaggaaggacagttattttcaagtcatgggaaagttgtaacactagaagggtatggctc

SEQ ID NO: 395243 - DNA, 521 bp, Homo sapiens
ttaaaaagacccaaagaattttaaaaatgattgtgaatggaaaaacaacactttaaacttaaaaattgaacatatttctaatttgccatatattcaatcttatgaattctataaagattaaatacagcatacccacatgagaaaaatagcaaaatatacatggaggaagcaggtctaagacctgggacctgggaaaaaacgacctaaggagggtggagagcagaracttacctaaatagatactttcttgtggtgggccaagcaaaacattccatcatgctttccggaaggaggtgaaccctatcacacaatatatggaaaccaggacctagaggaagtggccttgccattttgggataatggatggatggtgcttcccagtggtgaggggaaggtcttagtttccccccccaaaaaaaaaaaaaaaaaagctcagggaaatggtcctgtagtgagtgctacagagcgaatccacacagagccaaactgcccagaattatctcatgagggcgtggtggcat

SEQ ID NO: 395244 - DNA, 521 bp, Homo sapiens
ttaaaaagacccaaagaattttaaaaatgattgtgaatggaaaaacaacactttaaacttaaaaattgaacatatttctaatttgccatatattcaatcttatgaattctataaagattaaatacagcatacccacatgagaaaaatagcaaaatatacatggaggaagcaggtctaagacctgggacctgggaaaaaacgacctaaggagggtggagagcagagacttacctaaatagatactttcttgtggtgggccaagcaaaacattccatcatgctttccggaaggaggtgaaccctatcacacamtatatggaaaccaggacctagaggaagtggccttgccattttgggataatggatggatggtgcttcccagtggtgaggggaaggtcttagtttccccccccaaaaaaaaaaaaaaaaaagctcagggaaatggtcctgtagtgagtgctacagagcgaatccacacagagccaaactgcccagaattatctcatgagggcgtggtggcat

SEQ ID NO: 395245 - DNA, 521 bp, Homo sapiens
ttaaaaagacccaaagaattttaaaaatgattgtgaatggaaaaacaacactttaaacttaaaaattgaacatatttctaatttgccatatattcaatcttatgaattctataaagattaaatacagcatacccacatgagaaaaatagcaaaatatacatggaggaagcaggtctaagacctgggacctgggaaaaaacgacctaaggagggtggagagcagagacttacctaaatagatactttcttgtggtgggccaagcaaaacattccatcatgctttccggaaggaggtgaaccctatcacacaawatatggaaaccaggacctagaggaagtggccttgccattttgggataatggatggatggtgcttcccagtggtgaggggaaggtcttagtttccccccccaaaaaaaaaaaaaaaaaagctcagggaaatggtcctgtagtgagtgctacagagcgaatccacacagagccaaactgcccagaattatctcatgagggcgtggtggcat

SEQ ID NO: 395246 - DNA, 591 bp, Homo sapiens
actagtctagtcctacaggataatgagaagaaatttactttcttcccttaaggagtttaaaatctagggagaagagtgtactatgcaataaactttttgccataataatattgtgttgtctttaaaaaatcatttttgaaaattgcccttaaaaagacccaaagaattttaaaaatgattgtgaatggaaaaacaacactttaaacttaaaaattgaacatatttctaatttgccatatattcaatcttatgaattctataaagattaaatacagcatacccacatgagaaaaatagcaaaatatacatggaggaagcaggtctaagacctgggacctgggaaaaaacgacctaaggagggtggagagcagagacttacctaaatagatactttcttgtggtgggccaagcaaaacattccatcatgctttccggaaggaggtgaaccctatcacacaatatatggaaaccaggacctagaggaagtggccttgccattttgggataatggatggatggtgcttcccagtggtgaggggaaggtcttagtttccccccmcaaaaaaaaaaaaaaaaaagctcagggaaatg

SEQ ID NO: 395247 - DNA, 583 bp, Homo sapiens
tggggtggtctggatacctggactgggagaagaaaggattgaggaactaaagtagagctctattatgggatgtagactttgctccagctgggtgctgtaaaatcttgagaatgaatcagctgcaaggattcaaagccagagcgcaatgcaaaggctcttcattgatgagtgactaagagacagcatatagctgtgtaggatttgtcagagtctcgctttctgttactttggaatcctggaaaaactagaatctctacagctcaaagttagtctggaaagtttgggcaatggaaacatgctttacattgagttctgaaggttagaacatgtatgaattgttgaagttaagctatggggggtccttgtaaatgagaattaggcacagataaacaggtggcaatcawctggcttgtttggctaaaatagagcagaccagtctggctgtgacactaggagaaatcaatttgatttgaatgttgggggaatcaatagaaagaaatcataaaatggccagtggtgtatttatataaagttgatgagtttatattctattatcagagaaattgtaaacggtttttccctg

SEQ ID NO: 395248 - DNA, 583 bp, Homo sapiens
tggggtggtctggatacctggactgggagaagaaaggattgaggaactaaagtagagctctattatgggatgtagactttgctccagctgggtgctgtaaaatcttgagaatgaatcagctgcaaggattcaaagccagagcgcaatgcaaaggctcttcattgatgagtgactaagagacagcatatagctgtgtaggatttgtcagagtctcgctttctgttactttggaatcctggaaaaactagaatctctacagctcaaagttagtctggaaagtttgggcaatggaaacatgctttacattgagttctgaaggttagaacatgtatgaattgttgaagttaagctatggggggtccttgtaaatgagaattaggcacagataaacaggtggcaatcatctggcttgtttggctaaaatagagcagacmagtctggctgtgacactaggagaaatcaatttgatttgaatgttgggggaatcaatagaaagaaatcataaaatggccagtggtgtatttatataaagttgatgagtttatattctattatcagagaaattgtaaacggtttttccctg

SEQ ID NO: 395249 - DNA, 577 bp, Homo sapiens
ccatctgttttatctgcttcactaaggttttgttgttcatggcttcacacttacagtagtgcacagaacactgagtcatattgttgtgcttttgggcgtgagactacagagctaagcatagagartattctttccagtttgtggcatgtgatgagcttgatgaatctggcaatttccatgatgaagtaggttgtgcctggggcacagttgggctgatgcagcgtgcatgtgatgagcgggctcagagctctgtcttacaggagcaaataccacagcaccatgtccctttattttggcacaaactgaattttatgtttattttgagggctgaatttaggcaaaactgactagctttgagggagttgaagatgtttcttactgaacccaaaagcaccacttagcccctttgcagtgggtgcattttgtgccacgaggatgggacccagcaccatgcaaagtatctaatcatcttccagtgtgaattgcagacaccatgatattcctttctaggatagttgaatgtaaactcttatctaaatgttgagtaaaggcttttccttctatcgagagaatttta

SEQ ID NO: 395250 - DNA, 420 bp, Homo sapiens
ttttcttggtgtggatgatttgctcatgttatcgctgttggttactgtttttgtaaatttcaaattgtccatttttaaagataattttatttacttaaagatgaagaggaactttgattgtatgagattgcctgcagcggccttaatagtcaaagagatggtttagttcttttggaaaaggaaatgtgaccctaggattacgcccttgagagatgatacttcaattcaaattgggattcacagggtaattgcagcctgtggtaatgcatcttcaacrtcttaaaatagctgttagacagtagagctttccccttgaggagggcagtgttcactaggagatgtcttttgtctctttcaaaccagcagagcagcctcttaacaatgcaaagaaacaatatataatattttccggagtgattt

SEQ ID NO: 395251 - DNA, 543 bp, Homo sapiens
cttccagtcacactgaaggttgtaaagcagagaaacatgttaagatgaagtggaccatggcagctgggagaccaaaccacacctaacagataagaggctgcaggggacaatgcagaaggtgcacaggttcccttttcatgtccagaactactggttggctgcgccagggaagactgtagggaggggaggacagattgagttgggacaccttggctgtgagggtgattatgaaaatgccagccccagagggaaggcaaaagtcaggttaagaaagcaaatsagatggctgagaatcacaagagaatgggttttaagtcaacagaaaaaataagaatgtaaataacagacaggtagcaaggtcaggtgatttggaagatgggacaatatgacaaggaacaaggtgtgctgcagattgagctgatcaattcaggaactaaatccataagtgctgagaggcagctagacagttgatctaaaaattctttaacacaatgggggttaaagaaaaaccctgtgtttcaacagactacaggcagggacttg

SEQ ID NO: 395252 - DNA, 543 bp, Homo sapiens
cttccagtcacactgaaggttgtaaagcagagaaacatgttaagatgaagtggaccatggcagctgggagaccaaaccacacctaacagataagaggctgcaggggacaatgcagaaggtgcacaggttcccttttcatgtccagaactactggttggctgcgccagggaagactgtagggaggggaggacagattgagttgggacaccttggctgtgagggtgattatgaaaatgccagccccagagggaaggcaaaagtcaggttaagaaagcaaatcagatggctgagaatcacaagagaatgggttttaagtcaacagaaaaaataagaatgtaaataacagacaggtagcaaggtcaggtgatttggaagatgggacaatatgacaaggaacaaggtgtgytgcagattgagctgatcaattcaggaactaaatccataagtgctgagaggcagctagacagttgatctaaaaattctttaacacaatgggggttaaagaaaaaccctgtgtttcaacagactacaggcagggacttg

SEQ ID NO: 395253 - DNA, 527 bp, Homo sapiens
tactttctaccatgggatgatgcagcaagaagaccctcaccagatgccagaccctcagccttggattttcttaatccccagaactctaagaagtaaatctctttttctttctttttttttttttaaataaattgcttagtctgtggtattttgttatagcaacacaagatggactaagacaagctccttattcatagccatatcctgggatcaaacacatatggatatagttttgagttggcaaattttggrctgaatagtcaggtctcaccatgggccctttaaggctaaacctaaagtcactctcctatcttcatttcagtgttcccaacttgttaattcatattctctttctccctctccctctctctctctttctaaagaaatgcagacatattcttgaaatcatcagaaatttttatgtgaagcattttttgaaaagatatgagaattaggaaaaatgtactttcttaaaactcaaaaatttgacttttgttagaataaacacaggtattatcactgatatt

SEQ ID NO: 395254 - DNA, 492 bp, Homo sapiens
gaattaggaaaaatgtactttcttaaaactcaaaaatttgacttttgttagaataaacacaggtattatcactgatattgaatgagtgctcatgttgacccttataaaatggagcatgtcatgcttctagtacgtgcagaggttacctgtagggtgtaacatcaaggatgagtgatgggaaaactcaggctctgtgggatatctcttttctgtgaatcytgactgtgcctaggagatcctattccccgtaagaaacacacattgaagatagaaccttgtgtttaaggagtgggtgggagagatcaaagagaggggcatgaagtgaaagtaagtgaactctaaagcgaaatcatattttgcttagggcaaagatggcatcggttgctttagtcatgaagcaatctggattaattattcaaacttgagaagaaaaactgcattgttttgtattaaccatgagccatttgagttttgtttgtttggtatttggct

SEQ ID NO: 395255 - DNA, 492 bp, Homo sapiens
gaattaggaaaaatgtactttcttaaaactcaaaaatttgacttttgttagaataaacacaggtattatcactgatattgaatgagtgctcatgttgacccttataaaatggagcatgtcatgcttctagtacgtgcagaggttacctgtagggtgtaacatcaaggatgagtgatgggaaaactcaggctctgtgggatatctcttttctgtgaatcttgactgtgcctaggagatcctattccccgtaagaaacacacaytgaagatagaaccttgtgtttaaggagtgggtgggagagatcaaagagaggggcatgaagtgaaagtaagtgaactctaaagcgaaatcatattttgcttagggcaaagatggcatcggttgctttagtcatgaagcaatctggattaattattcaaacttgagaagaaaaactgcattgttttgtattaaccatgagccatttgagttttgtttgtttggtatttggct

SEQ ID NO: 395256 - DNA, 587 bp, Homo sapiens
tgcagccagcctcctaatgttctgctaaaatcatttccttttctcttcttattcgcrtttttttgtttaagagaataaaagtatttccatttttacataaaaataggaacaaagagcacatgttaaatatactggtgagtttgaaaaactgggatgcatatttaaaaagacagtatcatatctttggtaataaataatgacaactatttttgtatcccactttccctacagttttagcacgtgagtacctgttccagcatattaaaaagtggaaattctagattttcctaagcatcaacaatataaaatgacttgtgaagatatcagagaagtgtcagaagagatgcagggagaaagaaagtgcaaggaaacatgaagtctctttcttggaggattttccagggaaggctttctgtggagactgattcagctagtttagcctttttgttagggtccctgtctttttctctcacctccatatgcaactcataagcaaacactgtaggttctacttttagagtggatctcaaacttgacagcatctcactgttttcttagctccatcacatatcaaagaacaatcggag

SEQ ID NO: 395257 - DNA, 558 bp, Homo sapiens
aagacaaaacctggagtaaataaaaaaggcgcataaaacatgtatactaccctgtttatcctgttgagctcttagtggtttcagaggacatatgtgcaataagtcagactctccctggaagagctaatatcgtatccatgctgtgagttcagagtacagcaatttgttattgatgcccaaacattaaaaatgtgcagccagcctcctaatgttctgctaaaatcatttccttttctcttcttattcgcatttttttgtttaagagaataaaagtatttccatttttacataaaaataggaacaaagagcacatgttaaatatactggtgagtttgaaaaactgggatgcatatttaaaaagacartatcatatctttggtaataaataatgacaactatttttgtatcccactttccctacagttttagcacgtgagtacctgttccagcatattaaaaagtggaaattctagattttcctaagcatcaacaatataaaatgacttgtgaagatatcagagaagtgtcagaagagatgcagggagaaagaaagtgcaa

SEQ ID NO: 395258 - DNA, 587 bp, Homo sapiens
tgcagccagcctcctaatgttctgctaaaatcatttccttttctcttcttattcgcatttttttgtttaagagaataaaagtatttccatttttacataaaaataggaacaaagagcacatgttaaatatactggtgagtttgaaaaactgggatgcatatttaaaaagacagtatcatatctttggtaataaataatgrcaactatttttgtatcccactttccctacagttttagcacgtgagtacctgttccagcatattaaaaagtggaaattctagattttcctaagcatcaacaatataaaatgacttgtgaagatatcagagaagtgtcagaagagatgcagggagaaagaaagtgcaaggaaacatgaagtctctttcttggaggattttccagggaaggctttctgtggagactgattcagctagtttagcctttttgttagggtccctgtctttttctctcacctccatatgcaactcataagcaaacactgtaggttctacttttagagtggatctcaaacttgacagcatctcactgttttcttagctccatcacatatcaaagaacaatcggag

SEQ ID NO: 395259 - DNA, 588 bp, Homo sapiens
gcccttaaaatgtggctagtgtgactggacaaacaaatttcaaattttatttttattttattatagagacagggtctcactctgtcatccaggctggagtgcagtggtacaatcctagctcactgaagcctcaaacttctgagctcaagccatcctcccaccttagcctcctgagtagctggtacaggtgcatgccactatgcccacctaattttttaatttttgtagagatggggtcttgctatgctgcccgggctagccttgaattcctcgcctcatataatcctcccacctttgcctccccaagtgctggggtgatggttacagtcatgagctactgctccccatctcaaattttattaatttaaatttaaagrgccattttagattctaaagtttgtaattgcttgttggcactatgattgtactttcacagtcttatcctccatgaaaggtcagggcatgttaggctggcacagccatgcaggtagttttacttcagagacagagacagctgatggacaggagaggggacattctctatgtactcaccatagatttatgactaaaatgcaaattagaaaaaaa

SEQ ID NO: 395260 - DNA, 588 bp, Homo sapiens
gcccttaaaatgtggctagtgtgactggacaaacaaatttcaaattttatttttattttattatagagacagggtctcactctgtcatccaggctggagtgcagtggtacaatcctagctcactgaagcctcaaacttctgagctcaagccatcctcccaccttagcctcctgagtagctggtacaggtgcatgccactatgcccacctaattttttaatttttgtagagatggggtcttgctatgctgcccgggctagccttgaattcctcgcctcatataatcctcccacctttgcctccccaagtgctggggtgatggttacagtcatgagctactgctccccatctcaaattttattaatttaaatttaaagagccattttagattctaaagtttgtaattgcttgttggcactatgattgtactttcacagtcttatcctccaygaaaggtcagggcatgttaggctggcacagccatgcaggtagttttacttcagagacagagacagctgatggacaggagaggggacattctctatgtactcaccatagatttatgactaaaatgcaaattagaaaaaaa

SEQ ID NO: 395261 - DNA, 531 bp, Homo sapiens
tgcagtgtatgaattaacctggacagtaaaatgaaagacaacatgaaccagaaacaaaagaacaatttgaaatcacaaacaagaacgatagaaagggaaagcaaataaaagtaaaaccaagaaactgcccctgtcagtactggcttagtgctgtaataatatcctggtgaagaattggcaaaaagcatagtgcatcacagcaatggctatataacatatgacattcacacctttttattaataatcactacaacttatcatgtatttcttttcagttcatagttttctgactttattctcaaaaccatcctatgtggtagatattaatatccctatttcagagcctaaagagtttaaataactttttcagaatcatacatagatgcctatccaacctcaaagtctgtgctgttattctccrtatttgttgccaaatactgttgatatctttatcaaaatccaagttaaagcttttctccagataccaataaggagatgcaccaaaacaaagtggatataccttttattttc

SEQ ID NO: 395262 - DNA, 456 bp, Homo sapiens
catgaaaaattttagaaagtactatgtaaaacttgatcaagacaaatttcaaaatcagtgaaatgatcatttttctgggtaatacataaattttctaaattacttaactaaaataaatatttagaatatgtagatgatcttcaacaatttatcagaaattcaccttctattgtcctgaatgatcagtgttcatgagattttgagaaattatttttcttaagtaggcatttaattctcatgctgtgtatgctagataaattgagtatacaaacattaaaatctgtcaaattatgttatgatgtttatgtagccttcttaaaagtaaaacaaaaaagtaaataaaattttaaaaataaagcttttgttggggagaaaacaggaggacaaatactaccgtgtatcygtacatatgcatctagaaaaattatgaaaatttgatactagtaaaagtatcta

SEQ ID NO: 395263 - DNA, 499 bp, Homo sapiens
actatttgtcaattaccatttacatttcttagggacgtgctgattaatgataacacatgttaaaagcatcagagggaaagagaggttttgactccccactagatctcctgtgatacctcctcgctgggaagtgaccggagtgctttactattgctccagaggtgacctctattggacagggatgaaagcccrgtctctccatgaagttttctgactccaccctagtgaggaaatggagaggtgcctagttactgctgggtggagacggaatcctaggcagcctgtgtggtctccactggcaccacgggatggggtcttattattacctagaggggatggaagtccctattctctacccagccttctgtgacacgacactggccaatgggttgtggtgcctcattatagactggcatgaatggaagtctaggtacttcaatctagaatatagtggttattgtctaaaagccttcattttgtgaggctgccccgttcttag

SEQ ID NO: 395264 - DNA, 499 bp, Homo sapiens
actatttgtcaattaccatttacatttcttagggacgtgctgattaatgataacacatgttaaaagcatcagagggaaagagaggttttgactccccactagatctcctgtgatacctcctcgctgggaagtgaccggagtgctttactattgctccagaggtgacctctattggacagggatgaaagcccggtctctccatgaagttttctgactccaccctagtgaggaaatggagaggtgcctagttactgctgggtggagayggaatcctaggcagcctgtgtggtctccactggcaccacgggatggggtcttattattacctagaggggatggaagtccctattctctacccagccttctgtgacacgacactggccaatgggttgtggtgcctcattatagactggcatgaatggaagtctaggtacttcaatctagaatatagtggttattgtctaaaagccttcattttgtgaggctgccccgttcttag

SEQ ID NO: 395265 - DNA, 499 bp, Homo sapiens
actatttgtcaattaccatttacatttcttagggacgtgctgattaatgataacacatgttaaaagcatcagagggaaagagaggttttgactccccactagatctcctgtgatacctcctcgctgggaagtgaccggagtgctttactattgctccagaggtgacctctattggacagggatgaaagcccggtctctccatgaagttttctgactccaccctagtgaggaaatggagaggtgcctagttactgctgggtggagacggaatcctaggcagcctgtgtggtctccactggcaccacgggatggggtcttattattacctagaggggatggaagtccctattctctacccagccttctgtgacacsacactggccaatgggttgtggtgcctcattatagactggcatgaatggaagtctaggtacttcaatctagaatatagtggttattgtctaaaagccttcattttgtgaggctgccccgttcttag

SEQ ID NO: 395266 - DNA, 459 bp, Homo sapiens
ttgctgtgacctgcaaaataacaaaggaagttacttgaagtctctcatcctgagatgtttcccaatagtaagtataagaaaagacgtcttgaagtacagagcaatcattactgagagaatggttaaacaaatattaatgaattaggcttatctttgttgcccactgtaaatgtaggtactggaaatatagctgagagcagattagaggactgcttctcataatttagtgtgcacaaaaattggacggcaaacttattaaaacacaggttcctgggtcccacacagaaattctgtttcaggagatctggagtggagccgggtgatcctgacattattgggccctggaccacactcttaagcggtgctggccaaacatcgctgttctsctgatgtcattctggtggactcttaagaattactgttactacttcatgatatggcatatattacctttactta

SEQ ID NO: 395267 - DNA, 408 bp, Homo sapiens
acagtataaattattttacttttaataaactatagttttagcaaggtaaaacttgataaaaattttacataaaatatatttttacttgtcaccaataaattatgatactaatagtacatgggcttagacattatccatgtcactctattatcagtttttacttattctaaattaataggtggagacttttttaaggttttttaargtttatgatactatatgtagttaatttatttttaacatgttcttcgtccttattatattagtttgataattatcttaagcccctcaactttgtacaacacttaaaatttaaggcatagagcaaattaaagaaattgtattggtgtcaggtctctataaagaactttcaaggggagaaaatttatttgtggaatacattgtctg

SEQ ID NO: 395268 - DNA, 547 bp, Homo sapiens
tcatcaataacaaatgaatgacctattgatacatgcgacaacataaatagatctcatcaagttccttatgctacatgaaagaaggcaggctggaaagtgcattatttgatttatgtgacatttttgcaaagataaaactaacgagatttaaaacaaaaacgcaaagaccagtggttgctaggggtgcggaggaggaaggtgttgttgacttgttgacttgaaaaggacatgggggcctgrgtatggtggcttatgcctgtaatccaagcactttgaaaggctaaggcaggaggatcacttgaggtcagcagttcaagaccagcctggccaacattgtgaaacctcatctctactaaaaatacaaaaattagccgggcatggtggcacgtgtctgtaatcccagctactctggaggctgaggcaggagaatcacttgaacccgagaggtgaaggttgcagtgacctgacatcataccactgcactccagcctgagtgacaaagcaagactctgtcaaaaaaaaaaaaaaaaaagcgaggggggaaatt

SEQ ID NO: 395269 - DNA, 622 bp, Homo sapiens
attgaatgcctttccaaaaattactaagctgacaatataagattataatttgatttttctcagttgatcctgctagactctagactgtaagcttcatcagggcaggatcataatacttgtttcatttaatagtatttctagtgcctagaataatgccttcatggagaaagcacacaacacaacaaacatttgtaatcaattaagaacagaggtcacaattttacatattaatagttttcttgatattaaacaattgtattccaatctattgtataatagtaaaatattctttaagtatattatcaatttttacttatttagaattttcccatctctggttgttaatttcttgtgtctctcatgtcaagttttgataagtatttttaatgcttcttagatttttctatttttattccttctcttttctwtggagatttaaaatggatacactctgtttctaatttgattagtaacaaacttgcaattcccagaaatagacactaaactttccttccaactgaaaatcactggtgcctatagggcatacagagaagtagaaatggggaataacatgttagaggggagagagacgtaactggctttagccaactcagaaaataat

SEQ ID NO: 395270 - DNA, 527 bp, Homo sapiens
actgggaatcctgtattttatctggtacacctaggttcaggccaatggtaatcaagataaattgtatgcatggtgctttagtgagtaaattaaataggtctaattgtwtattattttatctttagataaaacaatcatttgaaatacatgataattgagagagagaatgatacagctgagctatatttgtgtttcacttattcttccaggaaacactaatggagatcattgtgcaaccctcttgaagttaggtaaagctatatgactgaattctacacaagagactgtgagcaaaagtgatgttcccctcttctagtcccctctctccctttccttttccttgtctgacagtttgaggtaaggcctccagtggaagaccctgagcctttatgataacagtatcaaaatatggaagggggctgggtacctgagtgactacatggaacagagaaccaactccccatttcttcctgccaccactaacacacagtagatggtgaagtgcatgacaaaggaacaaactctca

SEQ ID NO: 395271 - DNA, 533 bp, Homo sapiens
ctttgtatttagcacaatatgtgtgggcaacattgggataagaagtaaaagcaaaccatatcgttgcattcagatggttacaaataatgcacaaaaatgaacacgacttccccatttatagattttgatgttagattcagatggaaaaagttgtgaagaaaacttctgacaaatgttcatgcttatccagagaagtttactatataccagctatgcttttgtaaaagtaatctctttctaatttgatcttatcayttctatgatacaagttatctaataaccacatgcaactgattataaaaccacaatttaaagaactacaaaccactgctcaatgaaataaaagaggataaaaacaaatggaagaacattccaagctcatggataggaagaatcaatattgtgaaaatggccatactgcccaaggtaattgatagattcaatgacattcccatcaagctaccaatgactttcttcacagaattggaaaaaactactttaaagttcatatggaaccaaaaaagggcccacat

SEQ ID NO: 395272 - DNA, 574 bp, Homo sapiens
gcatccacgtttctgacctatattatttttcttctctctaaagaacttatgttaacatttcttgcatgatgtgtctactggtaccaaattccttcatttttgtttgtgtgataaagtctctttttctccttgccttttgcgggataattttgcagggtgcagaattctagattagtggggaatttttgtgctctgaacactttaaatattttacatcactctattcttgtttgaatggcttctgagaagtgagatatacttttctttgctcttctataaataagaagtcccccaaaccatggctgaattgggaattaattcataagtacgtactatgtgatctcctaagtaaatttttcccagtcactaagtctttgtgtttastacggagttaattttattattaaatgtttttggttgttatttttccccaatatttctaattgattttcttatatatcttacttttctagtttcactttgtctattgtgcagtcttttgtaaagggaagatagccctttgcttatctcattaagcaattttaacatatattttgaagtctttatcacatat

SEQ ID NO: 395273 - DNA, 538 bp, Homo sapiens
ggaaattaccttaacatgtctctgccttttcctgtccataaaatggatataacaatagtactgacctcacaggagcattaattcagtagcactaggttcataataagagatcaaagaatagcaactcttatatatttggttgcttgtaaacatgacggtgtttatttgtrtagagtattttacttgaaaatgggtatatgtctaggcctatatcattgaagaactctacattaagtattctatttagccttgtcaggcaatacaaaaatatatcatgaaaatatattttgctttaatggaaatactagcttattcttattctatgagactgtgcatgaatagagatgctagatataatatgaaataatctactcaactaaagatggttagttctttagttttcaggtgtagaaagaacaaacaatgtagtcattttaacgtgacctagatgaaatttcaggagaggtcttgaaaggtgatagatgtttaattctggataatattcaccttattggtttatttgaaagcaaaaggacag

SEQ ID NO: 395274 - DNA, 566 bp, Homo sapiens
tgaggtagagaggtaggaaatacaggcaggatctgtaaagtaaaactatttgtaatggatctgaaagtacgtaaattagcatgaagaccactgatagtccaatctaccttaacctgagaagtagggatcaaagacagttctaaaaaaagtggcaataaatgtatgaaaaataggataatgagagagatcatttggaagtaaaataaattgtcatttagattaaacaggggttggaagaagtagaggagatagagatcaattaaacataaattccaaatgttggtttgagatgataaagaaaatatccttaacgtatccagagtgatgaaaagaagacactattctgtgaggggcaagatggttcattcatattttaacctcacttaaaatgtaggtgtaaataattaatttattcatctgtttttcagaaagtaattgtgtaactactatgtgcaaagtgctggatcttggccatgggtgatacaaaagccaaataagaataggtcttgtctraggaaattactgtgtctacatgctattaatggagctatgctgagggcacagtt

SEQ ID NO: 395275 - DNA, 593 bp, Homo sapiens
accctgcaaaaactttagccagtagaaaaacatgaatttatgtcagaaaagctgaagaaatactgggttagctttctatacatacagtgacaaagtatgtatagaaagttaacccagtatttcttttcttaatcccacatttcattggtaaaaacaacacaaactttctcacagttctgtaaatcagaatccagtgtacttggctagtttccctgctcatatctcacaggcccaaaaccaaggtttcagcagagctatgttcctctctgaatgccctagaggggaatccgttttcagactcattcaggttgttggcgaaattcagtaccaggcagtaggggtcgtattttcttgctggattccactctttgttcccagcagcctctcttctggtgcttctgtgtaggacgctgcctttcagaacaagcagcacctggaatacttctcacagtgctgtgtctcttctgccacatctttccataacttcagtagagacagkttctccacttttaagtggtcccataatcagattggagacacccagataatccaaaataatcaatccatctcaatttccacaatcttaatcacat

SEQ ID NO: 395276 - DNA, 567 bp, Homo sapiens
tgtgtgtgtgtgtgtgtgtgtgtgtgtcacagasagagagagagagggaaagagaaagagaaattgatgaataaatctaattaatcaatttggtcctgtacagataatgaagctgtaagttatctctctactgtgatagtaattaatatattccctatggtctactttgcttatatctagtaacattcaggcaaaattataatctctcatgacaccatttcattccttctccagctttatccttcttggaagagtggcttatagcagccactctcactaacccaaatttttattggttgctaacatgaaacaggtcttccattcccaaacctcttcagccatttgtctttcctcagccttcacccctctctattattctgcatcacaaataaccataccctacttataggaaaaatcttatccccgtttctcctcaaaatctctatctgacatttcattattccattattctccttatattagtgaatgtgtagcttgtatatattgaagaaatattattttatagggtattttcttccacaaaggaatggaaatggcttacagaaa

SEQ ID NO: 395277 - DNA, 394 bp, Homo sapiens
ttccataggtttttggagaactggtggtatttggttacatgagtaagttctttagtggtgatttgtgagatttggtgcacctgtcacccgagcagtatacactgaacstgtgtttaatctactttaaattgacttttgtgtatggtgtaaattaaaggcctactttaattgttctgcatatgaatatacagtattaccaacaccatttagtgaaaagctgtccttcctttattgtgtattcttgatatcttcttcaaaaatgcattgagtacaaatgtatggatttatttttgggttttctagcctgttccattagtcaatatgtctattctatatccagtaccatgttattttgattacaatcatttcacaatatgctttgaaaacctggagt

SEQ ID NO: 395278 - DNA, 512 bp, Homo sapiens
gaatcaacctaaatgcctatcaatgattggctgcataaagaaaacatggtacrtatacaccagggagtaatatgccaccatgaaaaagaacaagatcatggcctttgcaggaacatggatggaactggatgccacgatccttggcaaattaatgcaggaacagaaaaccaaatatggcatgttctcacttctaagtgggagctaaatgatgagaacacatgaacacaaagagggaaacaacacacgttggggcctattggaggttggaaggtgggaggagaagaggatcaggaaaaataaccaatggatactcggcttactacttgagtgatttaatagtctgtgtaacaatcccccatgacatatgtttacctatgtaacaaacctgaacatcctgcacatgtacctctgaacttaaaataaaatttaaaataaacaagtaaataaaacagtgcccagcattcaaaaaacagtgaattctattatttactcattgaagcaattacataata

SEQ ID NO: 395279 - DNA, 512 bp, Homo sapiens
gaatcaacctaaatgcctatcaatgattggctgcataaagaaaacatggtacatatacaccagggagtaatatgccaccatgaaaaagaacaagatcatggcctttgcaggaacatggatggaactggatgccacgatccttggcaaattaatgcaggaacagaaaaccaaatatggcatgttctcacttctaagtgggagctaaatgatgagaacacatgaacacaaagagggaaacaacacacrttggggcctattggaggttggaaggtgggaggagaagaggatcaggaaaaataaccaatggatactcggcttactacttgagtgatttaatagtctgtgtaacaatcccccatgacatatgtttacctatgtaacaaacctgaacatcctgcacatgtacctctgaacttaaaataaaatttaaaataaacaagtaaataaaacagtgcccagcattcaaaaaacagtgaattctattatttactcattgaagcaattacataata

SEQ ID NO: 395280 - DNA, 512 bp, Homo sapiens
gaatcaacctaaatgcctatcaatgattggctgcataaagaaaacatggtacatatacaccagggagtaatatgccaccatgaaaaagaacaagatcatggcctttgcaggaacatggatggaactggatgccacgatccttggcaaattaatgcaggaacagaaaaccaaatatggcatgttctcacttctaagtgggagctaaatgatgagaacacatgaacacaaagagggaaacaacacacgttggggcctattggaggttggaaggtgggaggagaagaggatcaggraaaataaccaatggatactcggcttactacttgagtgatttaatagtctgtgtaacaatcccccatgacatatgtttacctatgtaacaaacctgaacatcctgcacatgtacctctgaacttaaaataaaatttaaaataaacaagtaaataaaacagtgcccagcattcaaaaaacagtgaattctattatttactcattgaagcaattacataata

SEQ ID NO: 395281 - DNA, 560 bp, Homo sapiens
gtacatgttattcataaacttatagaggtcaaataatatataacctccaaatatatggagcaatgtttgaattaagtaataggatttgttgcaagtttttttttttccccagtggrgagcagattctgaaataatttaatgttcagaatacttactgagggtcctcggaggggagggaggagagggaggattgagcaaaaaagtcaagttagattcaggcctcaaaacttcagtcaacattacaggaatttgtagagctggaatggtatctcagagttgttgatctcgagttagattttatatcaccacttggaccagttactggatgtgagctactacctaagatcatgactggacaaagcagccatccacatctgaggcaattctgaaggggctgtagctaaagcctttttgccaacagcactccctgcatctgagggaacaagccatactgggtgaaatcaaagcacgtgtaaaggacgactgacacccagaccatggtttattcaataaatcattttattttgcacatattttatctgcatagtttcatgttttct

SEQ ID NO: 395282 - DNA, 539 bp, Homo sapiens
aattttaacaacaaactacagacacaaacgtaccaatacaagaaccaaaaatctggttagcaatcatagtaccttgttttaacttcatattgttgaaagaggcaccgaagaaggttggaaggacagtcttgaattactgatgcacctctcctccattccccagcagtggttttgcggtgtggagggagaatctgtgttcttgggggagggagagcacaatgactgtggaaattggcaatgaactcagtgttgccctatcacagcagacagcaaaggtttgctgggctcagctggtgcccaccccgagaggcagcatttgaccaagctcttgctagagaggaatcacccatcccagtggttgaaacttgagwttatcagcaagcttcaccacgaaaggtcaaaatgcactggggccataagtaaaattgaaaggcagtctaggacagaagcatttcaattcctaggcaagtcctagtgctgggctgggcttagagctagtggactaggatgacatgggacttagagagacaccaactagc

SEQ ID NO: 395283 - DNA, 524 bp, Homo sapiens
tacaagaaaaaaaaaattacaagtcaatatcctcagtgaacttggacgtaaaattccttaacaaaatattagcaaaccaaatttaacagcacaataaaacaatgattcaccatgattaagtgggatttattcctgggatgcaagactgtttcaacatacacaaattaataaatgtgttatactgcattaacataaaagatgaaagccatatcattatttcaataagtgcaaaaaaagcatttgacataattcaacatccyttcataacaaaaaaaatactctcaacaaattaagtataaaagaaacgtactctaacacaataaagtccttaaagttcatttatgaaaaggccacagctaattttatactcaataaggaaaagtcaaaagcttttcctccaaaatcagagacaaggacaacttgactagaagtagaaagaccacttctagtcaacataataatgaaagttctagccagagcaagtagacaagagaaacaaaatacatccaaataaaaaaaaagag

SEQ ID NO: 395284 - DNA, 569 bp, Homo sapiens
tgacacctgtgtaacactcagcagatgtctatccattgaacacatgtgctgctcctacggctccaaccacttcctggattgcagtatatttccatgaactatccactggaccatagtctctctgagaacaaggcaggctctgggtctgatgtttcatgagaaaacctacaatagcaagctcaggacctgaaacccactgggccctcagccaaagcattttattttattttatttttatttttttattttttatttttattttattgtatgttttttgagagggagtctcgctgtgtcgcccaggctggagtgcagtggcacgatcttggttcactgcaagctccgcctcctgggttcaygccattctcctccctcagcctcccgagtagctgggactacaggtgcccgccaccacgccctgctaattttttttttttttttttggtatttttagtagagacggggtttcaccgtattagccaggatggtcttgatctcctgactcatgatccgctcaccttggcctcccaaagtgctgggattacaggcctgagccaccgtgccctgcc

SEQ ID NO: 395285 - DNA, 624 bp, Homo sapiens
tcacctgcttcttttcgtctgctttacgccttaatagcccgctgaaggctgcagcaggtgctaggtagcagcctcccggccctcgggaaaggcggggtggggaggcgagagcagcttagcctcctcgacctcccttcctggtgacggacgaacagttcccgtagaatttcgcttcaccgagtgaccttgagcccagggcgacggtcagcttgttaattcctggctgcaggtacattccgcttcttcctcaccccagacgycttaaaataccctaaattgtgttgctgaaaggaccaagccctggaaggcagggattgagttctagtcttctgtttgccaggcttataacattattaacgacgatgatttttagtaatagtaataacatcaccttttattattgggaagttatgtgccagctattgcactaagtggaattgtcaactctaggagtttacatgttattccattttattaatctttaaactgaggtacagagagttgggcatcttgactaaaatcatacacctgggaaataatgaagagcttgtctgtctccaaagcccaggaacaaattacttatgtgagtaccagttttttcgttgtgaaagaaatggtgtcagt

SEQ ID NO: 395286 - DNA, 538 bp, Homo sapiens
tatttgctcagtgttctaaaaatcctttggagaaattgatgctgttcactccatcaagattagtcagttgaaactggtggcagaagggcatggaggcccagatagaggaaaagtaagagtggaataaaaattaccacaaaaacctggtgctggaaaagcaggtttgctcaaagatgagaagtagaggaaagttggggaaagataaagaaagtgagggagggacgacatgaccacagacaaatagcaagaacaacaaaaaaaggttaaaaaacttccctggtcaaaaaagcagaactagtggacagaatgggaaagaggaagaatgctgagggaaaagaagaaaatgaattaacaacggttgttattacattgaacaggatacattatcctggctgggcgtggtggctcacgcctgtaatcctaacactttgggaggytgaggtgggtggatcacctgaggtcaggagttcaagaccagactggccaacatggtgaaaccccatctccactaaaaatacaaaaattagccaggcgtggt

SEQ ID NO: 395287 - DNA, 471 bp, Homo sapiens
ctcacagacacagtgctgagcaaaagacaccatttatacaaacaggcgaagccaccctttggtgttagaagttagagaggcttcccttggaaggggagtggggarttgtgggcgtggctacaggaagggttcaggctgttgctcctgctctattaatatttcttgagtgttggttactcaggtgtgttcattttgtgctaactcattgagctgtacacttatgatttatgcactcgcctgtattgatgttattttcaataaaaagaggtgttttctatttttttttaagagcaatgtgaagtgtttccattatggagatttcttattgacatatgagctggacaagaaaaatcaactctcctaatgttatgtgactgagcacttatgactcaggacagaatttccagagatagcatcatttatgaattttaaaagtgctgaatcccaaacaatttggaagaaagtaaatag

SEQ ID NO: 395288 - DNA, 471 bp, Homo sapiens
ctcacagacacagtgctgagcaaaagacaccatttatacaaacaggcgaagccaccctttggtgttagaagttagagaggcttcccttggaaggggagtggggaattgtgggcgtggctacaggaagggttcaggctgttgctcctgctctattaatatttcttgagtgttggttactcaggtgtgttcattttgtgctaactcattgagctgtacacttatgatttatgcactckcctgtattgatgttattttcaataaaaagaggtgttttctatttttttttaagagcaatgtgaagtgtttccattatggagatttcttattgacatatgagctggacaagaaaaatcaactctcctaatgttatgtgactgagcacttatgactcaggacagaatttccagagatagcatcatttatgaattttaaaagtgctgaatcccaaacaatttggaagaaagtaaatag

SEQ ID NO: 395289 - DNA, 583 bp, Homo sapiens
gagtggacacatacatgcccatagacatgtatgtagttgatgctttgacatgtgtccactgagtcttgtgattaaaagaatgaactttggcccaggccagacctggttttgcactctggctactcactgcttggtttatgactttaatgtctctgggctccagtgtcctcatctgaaatggagtcaatgattccatgcagcatcattgaaggatgagacgttttgttgttttgatttatgtaaaatgcctagctcaatgcctagacatagtaggtctacagtagacagtaattactactgttcttattttatgtctagcacaggctaggatttaaagactggactgcatgtttgcaactgcagttttccaggttgcgcagtgtggaacaaaaatgactttccatttaatgtcagggtggttcttccgaggagagctgtcagggcagcttctcctttagagagaatacctctgtgctggcaaaactgactctcaaaygagggtagattatcattgcagaggcctcaagattttctgaggtcatctgcttagagcttggtgactaagacttagacagctctgagg

SEQ ID NO: 395290 - DNA, 603 bp, Homo sapiens
atgtcagggactagggagggagggagggaaggcagagaaaaattacttagcctctcccaagatgagaaagtcctcaagtgaggggaggaggaagcagatagatggtccagcaggcttgaagcagggtaagcaggctggcccagggtaagggctgttgaggtaccttaagggaaggtcaagagggagatgggcaaggcgctgagggaggatgcttaggggacccccagaaacaggagtcaggaaaatgaggcactaagcctaagaagttccctrgtttttcccaggggacaggacccactgggagacaagcatttatactttctttcttcttttttatttttttgagatcgagtctcgctctgtcaccaggctggagtgcagtgacacgatcttggctcactgcaacctccgtctcctgggttcaagtgattcttctgcctcagcctcccgagcagctgggattacaggcgcccactaatttttgtattcttagtagaaacgaggtttcaacatgttggccaggatggtctcaatctcttgacctcttgatccacccgacttggcctcccgaagtgatgagattataggcgtgagccaccgcgc

SEQ ID NO: 395291 - DNA, 619 bp, Homo sapiens
aaaaaaaaaaaagaaaaaaaaaggatgagttcaagtcctttgcagggacatggatgaagctggaaaccatcattctcagtaaactatcacgagaacagaaaaccaccaacaytgcatgttcttactcataagtgggagttgaacaatgagaacacttggatatggtggaggaacatcacacaccagagcctgtcagggggtcaggggctagggaagggataacattaggagaaatacctaatgtagatgatgggttgatgggtgcagtaaacccccatggcatgtgtatacctatgtaacaaaactgcacgttctgtacatgcacaccagaacttaaagtataattaaaaaaaaaaaaaaagaacagaaactctggagtcaaactacctctgtttgaacccgggctctaccctttactagctgcaagttacttcacctccctgtgtctcagttttcgcatttgaaaaatggtgatgataacagcagcagctaccttctatgattgctatgagaatgaaataagttaatatttgaatagcgttaagatcagtgtctggcacatagttcatgctatatgagtgttattaaaagattgataagagactggtcttaatatcgg

SEQ ID NO: 395292 - DNA, 653 bp, Homo sapiens
gtgtccacttttgtgtagcagatcttaccgaattatttttaaagtacattgctcctgagggaaagatcagtaaaggtaaagaaaacaaaatatctgtaagaaatgcaggagacaggcttatggcaagtatccatgcctcatcagtgtttacctatgtaagcatggggattcagacaggagatagttgttacaggtaagtattaaggtacttactggaattgaaaaatgaagtcagatagaaagtaagtctgatgtggaaaattagtttgacgatgaggactggatttgctcattaggttatgacagacattttccatgaactgaacaagctaacaagcaaaatccaagttccaataatttaatggaaatagagcatgtgataagatacaagagttttattttatatatgtaaaaatgcataaaattaataatatttcaattctcccaactctttctgagtatatcaggttaatcaaagtgcctctaagtaagtgattcaacaatataattagtattttgttaagtcttagtaaagcccttttgcccagaaaataagtgagggaatgactgtaacaaaagactaacaatttcttttgcaatrtatgttcttcaaaaaaaattgaagaagaacccaactgagttattagctgata

SEQ ID NO: 395293 - DNA, 615 bp, Homo sapiens
ctctgtctcattcaaggcccggtaatgcaatgcagacttcaaactctgaagtgcttgacatttttccataggcctttggtaggtacagtgtattttccttagaggcaaaagtgcaagccgggcgcggtggctcacgcctgtaatccaggcactttgggaggccaaggcgggcrgatcacgaggtcaggagatcgagaccatcctggctaaaacggtgaaaccccgtctctactaaaaatacaaaaattaggtggccgtggtggcgggcgcctgtagtcccagctactcgagaggctgaggcaggagaatggcgtgaacccgggaggcggagcttgcagtgagccaagatcgcgccactgcactccagactgggcgacagagcgagactacgtctcaaaaaaaaaaaaaaaatagtgcatgtgcaagactgtatgtgtgtatgtgtgtgtgtatgtggaacctcagaaaatgcacctccttccaaacggagcagttggaaggcccttgtttcaactgttttcatgaagacacttgtattcatctgctggggctgccagaaaaaggcagcttaagcaaaaaatacagcttaagcaaagtaaaatgcagcgcacagat

SEQ ID NO: 395294 - DNA, 615 bp, Homo sapiens
ctctgtctcattcaaggcccggtaatgcaatgcagacttcaaactctgaagtgcttgacatttttccataggcctttggtaggtacagtgtattttccttagaggcaaaagtgcaagccgggcgcggtggctcacgcctgtaatccaggcactttgggaggccaaggcgggcagatcaygaggtcaggagatcgagaccatcctggctaaaacggtgaaaccccgtctctactaaaaatacaaaaattaggtggccgtggtggcgggcgcctgtagtcccagctactcgagaggctgaggcaggagaatggcgtgaacccgggaggcggagcttgcagtgagccaagatcgcgccactgcactccagactgggcgacagagcgagactacgtctcaaaaaaaaaaaaaaaatagtgcatgtgcaagactgtatgtgtgtatgtgtgtgtgtatgtggaacctcagaaaatgcacctccttccaaacggagcagttggaaggcccttgtttcaactgttttcatgaagacacttgtattcatctgctggggctgccagaaaaaggcagcttaagcaaaaaatacagcttaagcaaagtaaaatgcagcgcacagat

SEQ ID NO: 395295 - DNA, 615 bp, Homo sapiens
ctctgtctcattcaaggcccggtaatgcaatgcagacttcaaactctgaagtgcttgacatttttccataggcctttggtaggtacagtgtattttccttagaggcaaaagtgcaagccgggcgcggtggctcacgcctgtaatccaggcactttgggaggccaaggcgggcagatcacgaggtcaggagatcragaccatcctggctaaaacggtgaaaccccgtctctactaaaaatacaaaaattaggtggccgtggtggcgggcgcctgtagtcccagctactcgagaggctgaggcaggagaatggcgtgaacccgggaggcggagcttgcagtgagccaagatcgcgccactgcactccagactgggcgacagagcgagactacgtctcaaaaaaaaaaaaaaaatagtgcatgtgcaagactgtatgtgtgtatgtgtgtgtgtatgtggaacctcagaaaatgcacctccttccaaacggagcagttggaaggcccttgtttcaactgttttcatgaagacacttgtattcatctgctggggctgccagaaaaaggcagcttaagcaaaaaatacagcttaagcaaagtaaaatgcagcgcacagat

SEQ ID NO: 395296 - DNA, 615 bp, Homo sapiens
ctctgtctcattcaaggcccggtaatgcaatgcagacttcaaactctgaagtgcttgacatttttccataggcctttggtaggtacagtgtattttccttagaggcaaaagtgcaagccgggcgcggtggctcacgcctgtaatccaggcactttgggaggccaaggcgggcagatcacgaggtcaggagatcgagaccatcctggctaaaacggtgaaaccccgtctctactaaaaatacaaaaattaggtggccgtggtggcgggcgcctgtagtcccagctactcgrgaggctgaggcaggagaatggcgtgaacccgggaggcggagcttgcagtgagccaagatcgcgccactgcactccagactgggcgacagagcgagactacgtctcaaaaaaaaaaaaaaaatagtgcatgtgcaagactgtatgtgtgtatgtgtgtgtgtatgtggaacctcagaaaatgcacctccttccaaacggagcagttggaaggcccttgtttcaactgttttcatgaagacacttgtattcatctgctggggctgccagaaaaaggcagcttaagcaaaaaatacagcttaagcaaagtaaaatgcagcgcacagat

SEQ ID NO: 395297 - DNA, 527 bp, Homo sapiens
tgaggtattcataagtgtctgttaagtgtacttagtacctaggtacctaarttcctagatgaggtacttcataagtgtacttagtacctaggtaccctagtacctagatgaggcacttcataagtgtctgttaagtgtacaataagaactgtggatcatgacacagtggaattaacttgatagactgttgctgtcagcagttttctttcataaacagaatagcatagaaattctattcctaatagagcacatttcacatggtaggtctgtgttttctgtgtgttggtgtaggtatgtgtatgtgtgtgtgtgtatatgcaagcacgagcaccaacttgtgttgtaaaatgtgattcttacagtagaccttgattttcaaaaaatttgaaagccggacagcaagataatagttcagctttttgtgaacggtaaggagtgtgcaaatctgaacctgtagtgtctcctggattgctgtcagtgaggacagaggatcctctttaaaaactgggtccaaactccctctggtc

SEQ ID NO: 395298 - DNA, 615 bp, Homo sapiens
gacagcactgggtaccattcagaatttatggcaatgtcagggtcctcttcaaaaagtaacgtttaaaaacatacctttaaggcagccaaccactaaagtttttcaacgcctgggtgaacagtggtctgttatgttgcaagcagacttctttttccttgaaaggatatgccattagaatccacccaaggtctcatcctggcccgcacagatcactcagtgaaggaaatcatattagtttcccattgmtactgtaacaaatcaacacagactcagcagcttagagaaacatagatttattatcttatagttctggaggtcagaagcctaaaaccaaggtgctgcagggctgcactccttctgtagatgatatgaaagaaattctgttttcttgccttttccaactcctagagacccctggcattccttgtttcgtgttctctcatcattgtgacctctattgccaccatcgtatctcttctctaacactaaccctcctgcttccctcttataagaagcctagtgattgtgttggttccacctggacggtccaggatactctccagtttaagatccttaatttaatgacacctgtaaagtctcttttgccacctaagg

SEQ ID NO: 395299 - DNA, 556 bp, Homo sapiens
gaggggcgcaagaagaacacccagttcagcctctcacagaagtctttgaccttgaaggagacctgctccaccattacactttcccctcagtgatcatgtttggcaggtgtattagtctattctcatactgctaataaagacatacccaatatttggtaagttataaaggaaagaggtttaattgactcacagttccacatggctggggaggcctcacaatcatggcagaagatgaagaaagagcaaaggcacatcttacatggcagcaggcaagagaggrcttatgtaagggaactcccatttataaaaccgtcagatctcatgagacttattcactaccatgagaacagtatgggggaactgctcccatgattcaattatctccacctgtcccctcccttgacgtgtggtgattattacaatttaaggtgagatatgggtagggacacagccaaaccatgtcagcaggtatcattttaaaggacattaatccctcagggccctggtcagtctccagtttcagggagaatgtggcttcttcaacagaagagatgga

SEQ ID NO: 395300 - DNA, 617 bp, Homo sapiens
taagtgcaaagagaaaggacaaaatagggacagggcacagaaagggcaggaatggagaacaacagacaatgtgcatagggagacttccatgaggaggtgcccttggcacacagatctgagaagctgaaagtgcgtcatgagggtatctagaagttaccccacagtaggcatgtgcaaaggccctgcggtgggagcctatctggggtggtgagcccagcaagcaggcccatgggactggagcagagtgtggggttgaaaatgaggtcagaaggatgctayggggtcagagattacagagcgccttgtagatcaccgcacagactgtggtattacctctgaatgtgatgggagacactagagaatttggggcagaggacatgatctgaccactagtcaagaagggcttaaacatgcagctggtgtttgctgaggatggtggacatttagatcttcccgtcgggctaatgaacaaagtaaggaagcactgtctctagaggattagcagtgatttaataataataaaaaaaatgacagcaccaattctgtctctgaagtatattccttttatgtggccagttctgggaatccattatcttcaaggaatggagataatgagt

SEQ ID NO: 395301 - DNA, 543 bp, Homo sapiens
gggcaggtttgttacataggtcaatgtgtgccatggtggtttactgcacctatcaaaccatcacctaggtattaagccctacatgcattagccatttatcttgatgctctccctctctcacccaacaggccccagtgtgtgttgttcccctctctgtgtccatgtgttctcattgttgagctcccacatgatcttgttcttcttcatggctgcatagtattccatggtgcatatgtaacacattttctttatccagtctatcaatgatgggcatttgagttgattccatgtctttgctattttgaataataaagcaatgaacatacacatgcatgtataaatgttatttttgaagaaagaaggtaaaagtttgatagatgtttgaagtgatgaaatgagagtttgcatcattccgtttttgctgaattctcaattgcacttgaaagttaagatggagaccatggaggctctacaggtgtcagcagcaattcatcaaaaacacagaaaattgagtatattaactacaayacacatacacacacg

SEQ ID NO: 395302 - DNA, 499 bp, Homo sapiens
atttcacatctttcaatccaatcaagttgacactcgatgttaaccatcacaaaaccaatatggcaaatacatacaatggaatattatttaacaataaaaagaaatgaagtactgacacatggatgaaccctgaaaaccttatgctaagtgaaagatgccagacacaaaagaccatgcactggatgactgcatttatatggaacatccagactaggcaaatcgatagagacagaaagctgaataatggaagctaggtgcttgaggaattgggaggaaatgagaatggctgctctggggcagggagtttctttgagggtgatgaaagtgttctaaaactagataatggtgatgttgcaattctgagtatactaaaaaaacactgaattatgcactgcaacagggtggtcatgatggtaactgakatctcaacaagacttgttttttaaaaaaagaaagaaaagaaaagaaggagaaacagaagcaagggaatcaggtagga

SEQ ID NO: 395303 - DNA, 499 bp, Homo sapiens
aaccagttgcttcccagtagagctgcctttccctggagggtactgagtgggtgtttccagcagcatctccttggaggctgcctctccagagagcactgcagtgggtggagctacaattcaaggggcaccatcgtaagtgaggggtgagagttaatgccccttccctgaaatttcaggatttcaagcaggcttatgttcatgcttgcgcatttgaagtgagtcaagtgagtcactgtttggcagaatttttcttttcccaattgaaaaatccaaattccctcatttacttttgaagtccccaattattttctagctggttgtgatgaagatgaaaaaatccagcccaaagaaccctctttgaggaatcaaacgtataggctgggcagggagggaacyccagccaggtgttactacagcagcaaagggaattcactcccccaaatgccgttgtccttctctccctacctatgggtctcgggtgatgcaaacagattagagt

SEQ ID NO: 395304 - DNA, 630 bp, Homo sapiens
tcaccttgcaggggatcctttcttatcatggcaaaaacacttccccccagaccttacttcccctagagcttacgcatctccatctccatcatgacagttgggtggatcttaaaaatccctgttaactcatatcctacttttgtgacttagactgagatgttccagtgagggagggtaaatacratgttggccataaggcaaactgcttaggatctggactctctgctcgtctttgtagagcaggcctcctttgtggtcagccacagaagccctgtggttgccctaatagagaaggaattacaagaaagacattaggatgatcaagatcagtaatatcacacttatcagttaacaagaacacaatgaccttgtcagagggttgctaatggaatgctaactcctgcatctttttttctctgactccctccactcaagatttgcagtcccgagagagagagagagagacagagagacagtgtgtgtgtgtgtgtctgtctgttgggccaagtgcggttcacgtgttctgttttgactgagggagtacaggaccccttgccttagtcttggagaggctgttaccatgagaagcaattggagtgctgtcaccaaaggaagggatattaaaaaatg

SEQ ID NO: 395305 - DNA, 469 bp, Homo sapiens
ccatgcacactgatgagaaacaaacaatgaatggaggagaggtgtgctgtgggaagcagaagtaggagagcttggagatggaaggcgaggaaagcatgaaaaaggaaaggaagtgtagggaggaaaaatcaaatagacacasaaatgcagagaaaaacagaaatacctgagcaagttattgttgcctcatcccagttagctctccagacctcagttctagttcccgcctcattgctgtgttcaggcctccccagtagttgccccttaaaataagtttttctattttaaaaacattgttcttttacttgtatctcaaagaattaaatatatcgaaatttattagtagtagtattagtattagcgttgcctgcctgcctaatagtttcccatcttctttttggctctaacatctacaaatgactgccatgcttctgccctgggaaccatgtgcctcccagagccagaatat

SEQ ID NO: 395306 - DNA, 469 bp, Homo sapiens
ccatgcacactgatgagaaacaaacaatgaatggaggagaggtgtgctgtgggaagcagaagtaggagagcttggagatggaaggcgaggaaagcatgaaaaaggaaaggaagtgtagggaggaaaaatcaaatagacacagaaatgcagagaaaaacagaaatacctgagcaagttattgttgcctcatcccagttagctctccagacctcagttctagttccygcctcattgctgtgttcaggcctccccagtagttgccccttaaaataagtttttctattttaaaaacattgttcttttacttgtatctcaaagaattaaatatatcgaaatttattagtagtagtattagtattagcgttgcctgcctgcctaatagtttcccatcttctttttggctctaacatctacaaatgactgccatgcttctgccctgggaaccatgtgcctcccagagccagaatat

SEQ ID NO: 395307 - DNA, 532 bp, Homo sapiens
cacgggctgaatgatggttcagagttgaatggattaaccctggtgaactgtttcaagagggtctttttaaaccatcatttgcagatattttgatcttcttcttgtatcagttttcagatacctcaaataaggttcacagccaacaacttgggaagcatctttgcaccctagggcaatgtgtgcccccacctgacctccagatggtattctccaacctgagcaagaatcaataaatcagtgatggggaaaatcaaagaggacgacacagctttgccttccaagaccttaggatatgtgttcatttattacttgggtgccagagcattaatgatgccatgtgggttcaggtttctccttatgggtgttaaaacaaaaggaattattctatctacttgtgttgaagcaaatggaaatttattattctttaaaaraaaggatactatgacagcaggaatacaaaatttatcagtaaaaatgagtccaaattttagtgtcttcagcactgtctcaggttgtgccttgcatttccctt

SEQ ID NO: 395308 - DNA, 532 bp, Homo sapiens
cacgggctgaatgatggttcagagttgaatggattaaccctggtgaactgtttcaagagggtctttttaaaccatcatttgcagatattttgatcttcttcttgtatcagttttcagatacctcaaataaggttcacagccaacaacttgggaagcatctttgcaccctagggcaatgtgtgcccccacctgacctccagatggtattctccaacctgagcaagaatcaataaatcagtgatggggaaaatcaaagaggacgacacagctttgccttccaagaccttaggatatgtgttcatttattacttgggtgccagagcattaatgatgccatgtgggttcaggtttctccttatgggtgttaaaacaaaaggaattattctatctacttgtgttgaagcaaatggaaatttattattctttaaaagaaaggatactatgacagcaggaatacaaaatttatcagtaaaaatgagtccaarttttagtgtcttcagcactgtctcaggttgtgccttgcatttccctt

SEQ ID NO: 395309 - DNA, 570 bp, Homo sapiens
tgcctcataataaatctccttttgtaataacttactgattctgtttctctggagaatcctgaccaatacacacactgacataaccaaagcaacagtcaggcagcactttgcagaggctgctgcccccttcactttgcagaggctgctgccccctttctctggtgcctggccctccaggttgttgttgctcccactaccatctgttgtcaaacacctagtcagttacactcacttattttgccagtttggaaaactaggaaaagcccatttattcggaatttgagtttgggatctatgatttctctattactgaagtcattaaaaagttgtttgttctttctaaaaggcaatctggaaatatttaacaagagttgaaaagctattagtattattttatataatratttcactttagggattttatttcaaagagaaccaacatgtacccactccccccttaaaaaaatttactcataatagagaaaaaagcaggaaaaatgtaaatacccaacagcacagaaatatccaggtaaactaagacacaacaacagaagaaacttctacgtagct

SEQ ID NO: 395310 - DNA, 534 bp, Homo sapiens
aataacttatacacgtgacaatctgggtccctcaagaatctcatctgtcctatcaccagagaaattgaggcagatttagcatttccatttcataatcatgggttcatcaaatagatgtattcaaagccccattcatttagcttgtattggccatatttaacctgacggctccattagaaaggagtttactttgagtataaaagatcatctgctaaatcacatagaaataataactatttgattatactggtgataatactaatgataataatagcaactatggyttattgagtacatcgtgacaggtgattgagagattataaggaccttcttaacaaccttgcaagataaatattacattattttacaattaaggaagttgaatctcagagaagttaggcaaattgctcaagatcagaaagctagaaggagcaaagttggttgcaatttaaattaaaggtcaagactttccttgacaccaagtttactttcaggtctgaaatttttgagacttcagaagtaacttcagtcaca

SEQ ID NO: 395311 - DNA, 582 bp, Homo sapiens
gcttctcccttgagtggcataggaagtcattggaggactgtgaactgagaaatgatatgatctagctaacatttttacaggagtataatgaccgttaggttgttgccaccaggctcaaataccaccactcataaaggcatttttgaaatagactgaggtaattcctcacggaggggaactgctactgtcaaacagatgtcatcagaactataagaatatattagactctttcaacatcgagaaaatgatcaggaattgtaaggagtcactatggkgggaattttttttttttttaatttgagttgagaacctgtctgtattctttttttaccaaaaaaataaagacttgctcaagaaagacatgtgtccctatcagttctaaaaatatcatatctgctctgatggttaattgctgccagattaaaaaaattcttattaaaacaagttttatgttatgagaattgtaggtgaatttagaagccagagatacaagaatgtcttcagcttgtttgaacgtgttgttgttaaatagaattttgaaaactgatgaatagaataaaaaatttatcctgtttttctcaa

SEQ ID NO: 395312 - DNA, 594 bp, Homo sapiens
atgctgtatatttctgtagcacttaccatttagcctactgtataatttacttatgtttattgttattttttgcctcttctttcagaatgtaaatttcccaagaggaagaatttactatgccctacctatgggaggcactcaagcagtatttgttgattggattaatttaatattggtgtttaaggaaaagcaggtgaaggaaaygacagaagacatgagtagattctgaagagtatttcacactgtcagggatgaagcaatagctcacgtgcatactcaattttcctttcaactattgactttcttttccctagacagagatgtgtcagttgtagggttattttctgacttgatagtagaatgaataattgaccaaagaaataaaagaaaggaggaggagagaggtgtatctgagaaagactaagtgagagtgggtgggtgtgtggcaggattaggttggaggattaaaagtcagaggggtcgggtgcaagagatcatgtctgtaatcccaacggtttgggaggccaagacaggaggattgcttaaggccaggagtttgagttgagcctcagcaacatagtaagaccccatttc

SEQ ID NO: 395313 - DNA, 601 bp, Homo sapiens
gaagcttctgcttatttgagacaatgtggggggaaaaacttttctagccacaatgtcttccctactaacgtacctgattatcctttcttaagctgaggcttttaaaacaatcaaggtacagttctctgaaaccatcaagaactaacgggaaagagcgaattcttgctttttgctatctttccccagagcaaagtttatccactgagctgctttttacatatactgccttggaaacccagatcattctgtttgtgttttgggtaaccatgagttatatataatatagtaaataaaagtaaatttcatattatcactgcattaccaggaaactgtggtatagattttagctaaatctaaggagtatgtttgagatggtcttttaaatatatagtaataaaacctacacggagattgaaaagcagtcatcttcccaggtagctgtggaggaacagattttttttgttcatttgtttacttttattttaagttcaggggtacaagtgcaggtttattacataggtaaacttgtgtcatgggggtttgytgtatagattattttaccacccaaatattaaacctagtattcattagctgtttttcg

SEQ ID NO: 395314 - DNA, 382 bp, Homo sapiens
tcttggttataagttaaaggccaagaactttgatctaatacactggtgtattggttccaaaaatgtcttctgaatcagcagcatcatctccttgaagcttgttagcaatgtaaattactgggcttcacccagttctgttgaatcggaaacgtggaaatggaggcccaacagtctgtctgtcttttttttttttttttccgaaagcattcgagtagttctcatgccaattagtttgagaacttctgctctggctcatcctttaggggcatgctatgattcatcctcccccgtcctcagaatcatgtttgctgccctccttgctccaaartacttggatgcatggccagccagtatttattattattccaccacatccttccct

SEQ ID NO: 395315 - DNA, 578 bp, Homo sapiens
ttgtggccataatttctcaagtttaaaaaacacttcttacctatgaattattaagaattaatacatttggattttctgtttccctttccaattgatttacaactaagttcttcactataaagtaggtaggctgtggggtctctatattctgcctaagtggctcatggtttgagaacaaattgagaaccaaagtttcttatgtaaaattgaaaagctgaggagacttggggaaaagttggattttggagttaccttgggaatactttcataaaacaagtatgcatgggtttcccctacactttctgcccattttctgattttgtaagtcagaggtgggccccaatatatgtacaagtaattctcctgtcatgcattttttcttgattcaagttgtgtttaatatagtgacatcaaactagttttacactgttaagtagtgatttaaaactgacctgtaggaaaaaagyccaacctgtcaccttgcttgagtggcttagtgttttgtttatcattatagatttgtttcttatacctagaatgtaagcttcacatgaacagattttgttacggtagttcat

SEQ ID NO: 395316 - DNA, 613 bp, Homo sapiens
atactgcatgctttcacttgtaagtgggagctaaatgatgagaattattaactcaaagaaggaagcaacagacacaggcgtctgctggagggttgagggtgggaggagggagaagagctgaaagataactattgggtatgtaatgggcttaatgcctgggtgatgaaataatctgtacaacaaaccccagtaacaagtctacatatgtaacaaaccttcacatgtactcctgaatctaaagtttaaaaacaaatacataaatttaaagttactaagagataaacacacagagagaaagagccatagagacagcaaagaaatagaaagacataggtaataaaatgaaaaggtgtacatatgcctggaaattgttttaatgaggaaaatacagatgcaggagggacaaatgtgatcaggtaagaggaaatgttaattttttttttttttttttacacattagagtgaaacagtaaaataccaaagacgaaaaagcaaccagaaaaaaataggttagctaaaaagaaatgacasagaccagaatttctaaatagtagcagtgtaagtaagaagataatgaaatcgtatcttcaaagtgagaagagaaaacacaaaa

SEQ ID NO: 395317 - DNA, 616 bp, Homo sapiens
aaataattccccagtaagcacaatgattctttagaaattggaactaactataaattaaacaatttcaaaaacaaaactataaaaagcatttacattctgttcactgcacagatattgcatttaatgtggcatgtgggcacatttaagtgagtttggtataatgcgaggcaggatttccaaaagtaagtgttaggaactaacaaagtcttaaaatgtctctacttttaccatgctgttccctacaggcacatgctcataccctgtttgccagtaaaagagccttactratttcaatgctattcctcttaactcacgttttggtttccagggacttttagcttttgctttctcttccaggttctgaccactaattctttatttggtatctttcatgcactgatgtttgtactttcatattaagaacaaggaaaatgtgagcagataagccactaagaaattagctcattttcatgcaaatatctttgtgtcaagaaaaaatgaattaaaggaccattctatggattgctgaagtgcaattaggtatggtataggaaattattcttcctcgaggtaaaattgtagctgtttgaatatttttaatttggccaatcacaaa

SEQ ID NO: 395318 - DNA, 578 bp, Homo sapiens
ggcaggcacctgttttcattatggaccaaaaacttctttttttttctgtttatttttattttttatttctttttattttattttttatttcaatarttttatgtggaacaggtggtgtttggttacatggataagttctttagtggtgatttctgagactgtgctgcacccatcacatgaataatgaacactgtaccccaatgtgtagtcttttatccctaaccacccccctactctccctgaccctttccgctgagtccctaaaacccattgtatcattcttacggctttgcagaaccaaatacttctttctagccaaaaaaattcaaggtagaaaaagataattctcaaatttttgatgacatctagtttatattttacttctatgtaataagttataataataattattattattattattattttttgagacagggtcttgctctgttgcccaggctggagtgcagtggcatgatcacggctcactgcagactcaaccacccaggctcaagtgatcttctcgcctcagccacaatattgtacttacctcctatctcctttggcttatgaaaacc

SEQ ID NO: 395319 - DNA, 578 bp, Homo sapiens
ggcaggcacctgttttcattatggaccaaaaacttctttttttttctgtttatttttattttttatttctttttattttattttttatttcaatagttttatgtggaacaggtggtgtttggttacatggataagttctttagtggtgatttctgagactgtgctgcacccatcacatgaataatgaacactgtaccccaatgtgtagtcttttatccctaaccacccccctactctccctgaccctttccgctgagtccctaaaacccaytgtatcattcttacggctttgcagaaccaaatacttctttctagccaaaaaaattcaaggtagaaaaagataattctcaaatttttgatgacatctagtttatattttacttctatgtaataagttataataataattattattattattattattttttgagacagggtcttgctctgttgcccaggctggagtgcagtggcatgatcacggctcactgcagactcaaccacccaggctcaagtgatcttctcgcctcagccacaatattgtacttacctcctatctcctttggcttatgaaaacc

SEQ ID NO: 395320 - DNA, 613 bp, Homo sapiens
ctggcctatttaatagtcaacatttaaaaatcagaagctccataaaaattcggattatttaattctttcaaataccagggagatggtcaaccttgtcttcattttaacaggcagaattggatgaagctgagtaaatggtgctgcctttaaatgactccagttcactacccaatttgtctcatttgtgattttcacctggcccctgtaggtattagagtttgcaattcctggtctaatggtattatgtcagctttaatgaaaatggttaagaataaaascagtaacagcaataatagcacactgagcacttagttgcaggcactaagtatgccacagagatcacccaccatttgagggaggtgctataattgtaccattgtacaggtaaaaaactaagaggttcaaagacctgcctaaatgtcaacagccagaaaggggtaatggtaagattaaaaatccagtcagacttaatttgcagttgccaaatagtattcaaattaaatggtactaagttaccctatatgaaatctgagtcttttcctaaaagcagatacctccatttcagccacaggaacttgtgctcttttccgcagtaaatacacggacatgcaca

SEQ ID NO: 395321 - DNA, 573 bp, Homo sapiens
tgctattaatttgtgttaaacctgaaactcatttggtttagcaacctaagatgagaactaaaatatcaagaaaatttaattcatttaatatttataattagtacaacctaaaaactrtcttggtgtagggggggtcattaaatactttcaaaataaaataagaacaggaaaaacagactgtcatatagctttctccctgatacttcacttagtagataaaagaaaagtagtaacatttcttcatcaactactcgactgtttttcagaaatttcaggattttgtctcagtactaatttcgttttttaaaagagctggaaaagaaaaagtcacatctgttttaaatgtttttggttttgctgtattattaaaatgtatcaattaccgtttagtattttaatcttaatgttagatactgtttaatattatctgttatataatctctttcctgataggtttcttttttatttcattgccttgtaccatcctggattattaccctgttgtgcttaggaaaccctctaagtaatagaagctgaggaatatagatgaactgcaaaactaagtccataatc

SEQ ID NO: 395322 - DNA, 581 bp, Homo sapiens
tgatttctacttaacaaattagtttcttaattaatatattaattcctgaaataattcaaatgaaatatgtattgattatagcaatgtcatagatgaaaaaactcaagmaacataaggtgaatagagacaaaatgaaaaaaggtgttaattcatctacgatcagtgtaatcttttctataaagatttaccagaaacttaaaacaattttccaaatagagtaactgtaatatacttgctttgtgcaaacagaaagcaagcatataaaaacgtgttgctttttaatttttacctttatattttcaatgaacaattttgacattttgtcatatttactaacacaggatataacctaactaaaaatagtaaatattttaaaaaattatataattaagtatttactgcatatgttaacagtattgtcagagactccagaggaggacttagagcaagaggtaggaagggaaccttggagaagcacagaacagatactctagaattatgctgttcaacatggtagccgctagccattatggctagtggctatttaaatttaaattatgttaaattatacataaaattaa

SEQ ID NO: 395323 - DNA, 563 bp, Homo sapiens
aatgtcccctttacttcaatttcttgttcacattttccactgtggttaagaaaaaatcagcaactgctattacttaatgatgcagtattctgaagcagctccttaatggatgtttaattgatttttcactcaaaccatttactttcaaattgaacaggatgttgatgaagggtatcagtttccaagaatattctctgctstaaattttatgctttgcttttcctgctatttaatttaaagctatcatagtctaaaaggggaaaaatgtccaaacttgatcctacttaacatggaagaatgtaaacaaatgccaatttgctttttttatttgaacagccattctcatactgggtttgtgatcttcagaaactaaagtttttctatcaattcatgactcatgacttgtctcagttattactgatttctactggatattattcacaggcacaacaaaaatcacacaatttttttattgcattttcacctcaaatgttaaaataattaattttccccagatgtattgagatataattcatcaataaaaattgtgtgtttatacatat

SEQ ID NO: 395324 - DNA, 549 bp, Homo sapiens
aaattacaggaagaagcttctgaagctgagtaaaaagaacagtttttacagattaacattgtcaaatttaacaaataaaagtataggacactcacattttaatttggggtaaacgacaaaaatgtttagtatgtctcacacaatatttggaacaactttatactaaaaaaatttgtctgaaatcccaatttaactgggcattctgtatttaatttggcaatcctactacaatgaaaacctggaaatctaccccaaaactagatttactcataataatttaagggttcttagagaggatgccttccatgcagctagaagctgaaggatatgagggaacaattacatcaatttcaatacctcagtccttgtttgcctacagtatggggatggtgagattgaagaagyggacagttggagtatagtacgtctgtatgcaaatgatgaaagagggagagtgtggaaagacagattttacacttttttaagtgattaaggttgcaatgaccagatttctataattactgtattcttcctgccctccgacaacca

SEQ ID NO: 395325 - DNA, 508 bp, Homo sapiens
ttggtcttactggagaccagccaaatcttgaagccatctggtgccttcccttcaagtcatgtccttagcatacaaaggacacactcttcactccagagagtacaagaattggggacaaagaacaaatatcttcctaggataccatgataggataaagagaaaaatcctacaggtacagaatagaaatatcaggttacctacaaagaacaagaatcaaagctgcctcttctctatgggcctaaataacggaaagcagtgaaatcagttcataagacttctatgaagaaatgttatgatgccycaaatatatatctgttcaagttgtattattgaatgaaaattataaaaggcatttacagacccagatttcatgaaatgagtgcaaagttttcagtatccacattctaggattgcacttatatatctgtttttctggcttcctattaagaaaagagcacgtatattccaaatagttgattttcttcatacatgtgcacaattataacat

SEQ ID NO: 395326 - DNA, 483 bp, Homo sapiens
gtcacaaagaatgtacctcctgtaatattatttataatatcctaaggtgatattacttataatgtcacaggtggtgtacacatggtaatattatttgttattttctagaagtttgttacttttaatgtcacagggggtgtacacactgtgatattattcataatatcctaggtagttattacttctaatatcacagtgggtgtacaccctgtgatatttttcataatattctagggagatattacttctaatatcagtgggtgtacacacatggtgtacaccctgtgatgatattcatagtatccaagggagaaattactcctaatatcacagttggtgtataccttgtgatattacttgtaatattctaggaagatattactcctaatatcacaatgggtgtacacaytgtgatattatttgtaatatcctaggggaatgttactactaatgtcacatgggtgtaaaccctgttatattatt

SEQ ID NO: 395327 - DNA, 419 bp, Homo sapiens
aaccttttttgctgtcacttaacatactgttgataggtaccttgctatgcsagtaaatacagattggtgtgatttttaatcccttcttgaagtcctgttattcagatatcataatcaaccttcttgttggtcatttagattgtttctaattgttcagttctttcgaagtcaaattcaatgaacattcttttgtttttcagagacagagtctgactgtcacacaggctggagcgcagtggcacagtcatagctcatggcagcctcaaacacctgggctcaagtgatcctcctgttttagcctcccaggaagctgggactaaggcatgcaccaccatactgggttaatttttgtatttctttttggtagagatgggagtattgctaagttgcccaggctggtcttgaactcccggcctcaa

SEQ ID NO: 395328 - DNA, 585 bp, Homo sapiens
ccagggagggaactacgccaactgaaggaatcaggacctccctgccaagggcagctcttaacccaaaggtcacacacacacttggatatccctcccccagtggacagcccatggcccacactctctgggaaccacaaccaccacccaagcacctccgctttggatgtaatgaggagtggaggcagcataaagaggcctctgcaaaaacacaaaatggcacatgtgcaaggccattcactacagcaatattcaaaagagtgaaagatgggaaacacctagtgcccctcagtaggcatctaactgaatcaaccatgaatgtcatacaatggaggactccacagctggtctgatgggcaggaaggtctctacacgctgcatrcaggcatcaccagatactactaagtgcaataaataacaaccactgcagaacaatgttcacagcatgtcagcactgcatgggaaaggggggcctggatattatctgaacatgtgtgtgtgtttcttatattttaaaaaaatgaaaatagaagaataaataacaaataaataaaagtggttttctttgggggaaagaaataactagat

SEQ ID NO: 395329 - DNA, 548 bp, Homo sapiens
ttgggtgctatgtagttaatgatttaaactgcatgcattgacagattactccttaggcaaaagtatttaagaagggataagtagaaattctgattggaatattaaaacatttttwaaaaattaattatgtttagactgttgaaccgtgtttatataattttaggataatggatttatttgcttttttttttttttaagagaaactacttgaagtaaattcctacccatacttcttacttgtctcctttcctttgattaatctaaggaatgttgatgatgagaagaaagatggaaatgttgaggtggttgcatatttggtttgttagaatatctgtcatcacctgggctatttgaagctgctgttgctgatgttgttttattgactcatgaagacaactgaaaagattgctttgtaaccttatttttttctgatgtgtgtttacatccatgtctatatatacatattgcatatgtatatatctgtatgtgcatgtatatgttaaaaatctgatataagtgaaaacatgctctgtgctttgagcaagtag

SEQ ID NO: 395330 - DNA, 461 bp, Homo sapiens
gttgccacaggaaccaacctcgtgactacagggttagcactttcagctcccccgtctcccttccaaggagatgagaaggactggaggttgaggtacataccaatgcccagtgttttaatctaccatgcytaagggatgtgacctccacaaaactcttcagggacagggctggagagcttccgggctggtgagcacagggaggtgctgggatggtggcgcatccagagagagcctggacactccgcaacagtcaccccgatgccttgcccagggcagtccttctctgctgcccctgagttacatcctaatcataaaccagtatgtgtaagtaaaatgttttcctgagttctgtgagctgttctaaacctgaggagcagtttgtgggaaccaccagtttgtagtccattggtcagacgtctgggaggcctaggccttgcaactggcctctgaagtgggggcag

SEQ ID NO: 395331 - DNA, 546 bp, Homo sapiens
atttcatcatgtagacttaaaaggatttctttaattccctattgttatatatacactttttatattgatttttatcacaatacatcaaagcatttattatgccattgaaaacttccaataaacacatttttaaaggactgttatattatggctggaccgtgaaccttgagttgtttatccagtagtgctaagagatttgttctratccacctgatttcttttgtgcagtgtttatagtgactaaagaaacgtattttcaagatgattgggctggctatactctgtagctgccacagaagaaagcaaggctatgccccaatcccaccacattaagatccccagttcagggctcttcattaaaacagctaaacaaactggtgtaaacagtacttttacttgaatttaacatcttttatgttttctgggccagactttgtgtggatattggataataggcttggtggcccttttatatcccttgtgtacttgtaattctaggaaaaatacaaagcatttagtgggaaggatttgtaagagaatacagtt

SEQ ID NO: 395332 - DNA, 501 bp, Homo sapiens
aaatattcaaaaagtttaatgtaaagaagtaaatttaaatcacctgtaatctcaccatctagaaatacactcatttaaatagaagctgccactttactttttttttttttttaaatgtcatggctgttttttctccaacttttattttaggttcaggggatacatgtgcagatttgttacatgggtaaattgcatgtcacagttgtttggtgtacacattatttcattactcaactaatgagcctagtacctgatagtttttcgatggtcaccctcctcccaccctccaccctcaagtggtcgctagtgtctgttgttcccttctttgtgtccatgtgtacccagtgtttagctcccattttkaagagagaacattggtatttggttttctgtttctgcattaattcgcttagcataatggcctccagttctatccatgttgctgcaaaggacatgatttcactcttttttgtggctgtgtagtattccatggtgtatatg

SEQ ID NO: 395333 - DNA, 573 bp, Homo sapiens
tacctacctcataagatctgttgtgaagattgagataattcatacaaggtacttagcatattgcccaacatgtaaatgctcaataaatgttagctattttttaatttaaaagaaaaaagactacaaagagcagtggaaattatgaagctgaaaacacaaggcttttgaaaacgtcattgtgtacacaggacatttttccccatattactgaatctggcctctcttggacttcaaggattcatagtttggtaaccctccagctcattaaacacactctcattggcaggaaaaataaaattacaattagataaataaagcacttaactgtaaaaaggagatggcaatctttttgcctggaacgctaccctaagaacttcacgaaccatcytaaggcactacgcatctgtcacaacacttcaaatgagaattacttgggccctggacatctccctaacgctggaggagatgccacaggacatacaaattggagagggaagccacaattcttctcgaggccagcccaagtgggaagtccattcctaaacatagaaatgctactcccaactctgagaa

SEQ ID NO: 395334 - DNA, 608 bp, Homo sapiens
atgcattttcttcaaagtgctttctttccagagcacagaaaacccagacctattgctatggacagggaacagcaggcaatagcagcaatataaactcatggatgtatccatctattttccacaggagagacagaattaagaaaggaatgcctggtgcatatactataatgcagagaataaagaaatcacacttctctaagtttcagcacatactttttttgttgttgtttatattggtttcctgctaagactgtgctttcaaacaaaaatagaaagttgactttatggtaatagtacataatattttcttmtttttcagagaggaggagaaccagtgtgagcttttattattctgccagggaaatgtcctgggcatcctgttaattgaaatggacaacttcctaggctcaaaaaatctgtcaggtggacttgttgcagcaacataatgttaaccacaggcacagatgacatgagtcacattcgcaacatgctgctggttaaactgatttagggagataaaaaataaatgttggaaaataagctgatgatcacagaaacatacattaaaaaacttctaattcatactgatgaagaacatccttagtatt

SEQ ID NO: 395335 - DNA, 571 bp, Homo sapiens
aagtgaacaactcatattttaaatttgatggaaggccactaaatggaacaatcatgttccaagtaatcttggaaccataaacatggttagagcaaagctaaagtttctataaattttaccaaaatgtttttcctatagaagaaaattgttcttgaatcatattttctttkctaggtagtagagaaaatcagttcatggagttttaattgatcccctgctgtgtacttcaagctatgctagacacggtgtggagaaaagacatgggggcacttgtccagaaggacattaggcaggaaaacaaggctagcaaaaagcaggaataagcaaagggaggtggctgagaaggcatttggagcaccttacgtatccaacatactgctgattccaggatcctggaaatcatctgtgattctgttctttccctcactctctacattatcataacctatctattctgtctccaaaaagtggtccaaatctaactacttcatatcgttctcacagccactattatagtctaaatcacttccattattctcttcactctcttaactcttatcttttctcccta

SEQ ID NO: 395336 - DNA, 631 bp, Homo sapiens
acttaacttcattgaatatctctaaattttttctaatcttgcagtgatgtcttaagtgtgtgcctgttcatatttatgaggcttttgataagctacaactccgccactgtgggttttaaataacatatgtgttgcaatattgctaatgttgactaggactgtgtttggaaaggatacatgaaggtaggaaggcaggtacactagaagagtgaagattgcaagtcattaagtggaatttgtgtgtatgtgtgtggtgggggggatcagttctagacaagtaatttccaagggactaggtctaggagatgtcatgtgatagaaacacttaaatttctagataccaatcactggatcaaaggcactacaatttttaaggggaaaaaaatggaatgaagtgtttggcttgaatatcctagctaaattctaagttgagagactgtagtctgctttttctgactctccctatagattctttgggatgctgtactttctcattgaattcttttcttaaatgattttgcagtattgttgtgatctgttaaacagctgctttgttcyactccagtggtgggtcaagtgatttctgcactctgtatagtttgtatagtttgtaacactccttagggaagaa

SEQ ID NO: 395337 - DNA, 405 bp, Homo sapiens
atatgattaatcatcattttgctgtacttctgtaaattattaggcaaagwataacaagcctaaaacttattttgcaaacaaattagttttattgtgattaactttggtaaaaaggggggaactcgagagagaaaaattatgacttaaaagaaaactacagtgtatctgttattagattctagctctgttcatttttttgagattttattatttacctacaatttagactggattctgaaattgttagtttcctctaatgtctgactgcaactctccaaaataacattttcacttttttctccaatttttttctgacttggaatcactgaaattaaatgtgcctttttcttgaagccctgaaagctgaagctggttgactccagataaatcacaataacaacttaa

SEQ ID NO: 395338 - DNA, 481 bp, Homo sapiens
ggaagattcccttcacccctaaaccaacttcttgttatctagaaaattactagtaataataactggctagtaactagccagttactaataataactaattaataaccagtagcagttactagtaataataactggcttatataaccctgattttgagaccaatgctagtctatgttaataacatattaatctcattttttccttaccataatcataggagagaggcctggttattatgctaattttacaaataaagaattaaggcacagagaggcagtaggcactcaataaatattggttgtgttatcccattcaactaatagycactgagtgtaccctaagggccagttctccaacttgaaaactcagaggaatatcagtttgtgtatctcagggagtttctgtaagagggaggaaaaaatgaacagttgaaagcaggaaagtgttaaatataaagccccatgcaaattgttcagatgcc

SEQ ID NO: 395339 - DNA, 596 bp, Homo sapiens
gttgtaacatacataaccttcagacaggcaggtaaaagaaatgtgttttctctgcctttctcacacctcaaaaataaataaaatatatttcagataaacttcatttatatcatcgtgatgatgattaattatacccaatcattcaaagttaagatgtaatttatgcatcaaagttctttggggctaaaaaatgttattatgcaggaataatttgtatatatcctataaaattatttagaaatttctactttttatatatcaaacttacatttttttccattgaacttgactctagtttgatatgtactaagatatagatgtttcattttgttaatttattatactatgttttactctaatatttgtttgaaacttttgaaacattgagtttgaaatgcaatttcaaatgcagtttcaaaaatattaaatgtgatacaacgtgggtcatcaacatgggttttgcttttctatctttatgttattgtycttcatattcacatattcaaaatttataattgcctgcatcttgaaaattttatattgtcaccaattttaccataaagattgacatcaacatgtactttgcttagtgagaa

SEQ ID NO: 395340 - DNA, 554 bp, Homo sapiens
ttttaaacacaccctctttattattagtatccagtgtgatcagagtttacaaggaggagactatgaagttcttgaaagtattactgagcttcagcaatcaaaagaaagatgactatagttgacacttgaacaacacgggtttgaactatgcaggtccacttattcacaggttttcttctgcctctgccactgctgagacagtaaaaccaaccaacccctcctcttccttctcctcctcagcctagttaatgtgaagatgaggatggagacctttatgatgatccacttccacttaatgaatagtaaatacattttctcttccttacaattttcttagtaatattttcttcacttttcctactttattgttaagaagagtatataatacacataacatgaaaaataagaattaatcaactatttatgttattgataacatccagtcaacagtaggctattagtagttaagttttggaggagttaaaagttaaccatggamttttaggactgtgtgggagttggtgatcaagagtcaactgtattttagaatacac

SEQ ID NO: 395341 - DNA, 584 bp, Homo sapiens
ctctagattcactttctgcacttaccaagaatattgcaaatgtggcttggtaaccagtgttcaaaaagagattatggtttttataagcatgacattggcatcatgaaactatcttctacagtctcagatcagcaatggaaggcaatgatggccaaaataatattcatctttcacactacatttatagagaaattagggtttctgacaatgcccyatctgctagcttgtcttctcatttttagtgtatcctgtcttatcttaaaagtttagattgggtgctacatcctccatgaagcttaccaatctcaattcttattggttattttctttttgattcctttatttaataagactttaggatatatacataactctatagtaaaaatatagatgaccatataaagcagcatttgccatctctctacttaaatgaaatgtgcttaaatgctagtccctggagcctaacagaatactctttacttagtcactactcaaaaaatgctggttgatgattttttttttctaaatctggttgaaattaattctctttattattctgttctcatggaagatgaggacaagaa

SEQ ID NO: 395342 - DNA, 446 bp, Homo sapiens
gatataaggtcctttcaagaacccatgaggctacacatgaccttcccctgctacctctctttactggaatatgaaaccttacttgagcctacagtactctgcatacatagttaccatttgctatttactttacattagggatatataaaaaaaccctaaaaagccagcctataccaagctcagatgggcttactagtgaattttactcaacatttaaagaagagatattactagttccctacaatctcttccggaagatagaagcagagggaatacatcctaactcattctgtgaggacagaattacatgaatatcaaaactagacaaaggtaatacaagaaaagaatrctatagaccagtatctctcatgaatatagaggcaaaactcctcaacaaaagccagcccataaaccatcctgtcaggtgaaaaggtaatggaactgtg

SEQ ID NO: 395343 - DNA, 600 bp, Homo sapiens
tactctgcatacatagttaccatttgctatttactttacattagggatatataaaaaaaccctaaaaagccagcctataccaagctcagatgggcttactagtgaattttactcaacatttaaagaagagatattactagttccctacaatctcttccggaagatagaagcagagggaatacatcctaactcattctgtgaggacagaattacatgaatatcaaaactagacaaaggtaatacaagaaaagaatactatagaccagtatctctcatgaatatagaggcaaaactcctcaacaaaagccagcccataaaccatcctgtcaggtgaaaaggtaatggaactgtggagggatgttctgctttccattacaaaccatttattcattcaaccaatatttacttctgtgaggttgattctacgtggtcaagaaatcaaacctgtcatctctctcattcagtcagtcacttattaattcactcactgaacaaattttttttttcaaaatgtacaatgcgttaggcattatacctggtgctgggggatacartagtgagcaaaataggccaaatccttgccatcatggtttttacatt

SEQ ID NO: 395344 - DNA, 601 bp, Homo sapiens
gtccattagcatttgagaaactgttgtctctttcatcactgtattagcaacaattgcacccctatcttaagattatgaaaatgtgccagttctggagaatatgctctgggtgaggggttggttgtctcctgctgccctggctacatcactgtttgcatgaatgcggtttgcacattcatagcagaggtttgtgctgcttcctccatggcatggtgttgtggcagggagtcatgcacccagccagggamaatattttctggtctcctttgtatctaaatgtgactcattaactagttctcatcaatgaactatgggtggaagtgttgtgttttattttcgagccaggaattttgagatgagaaaaggaattctctactcgttttcccccatcaatcaaaatgcagcaaactctgaggccataatggatggagcagactcaagatgaaagcaagttagctccccgaatcactgtgtgaatcatactgagctattatgtgaatggtaagtcattgtttattatgtaaagtcactgaaaatttcaggtttatctgttaaagtggataacattatcctaactcaaagattttcagacttcaggaga

SEQ ID NO: 395345 - DNA, 609 bp, Homo sapiens
cacagactggtttccaaggtgctgaaagtctaataagttgaggtagatgaacaataaatcacaatcacactcacacacacgtacacacaaacacacacatgatgctagagactcaatcaccccccaccctatagaaagggcacttgtcttactaagctttgttttaccattctcaagattttgtactcagtaagtagtaatgggactgaacagctgatgaatggtttctgtggctgccagaccatggctcactggcacagaacctgccatgtttactccatggtgctttatcagtcatggaaacctgaggttgagagaaagataggatccatacctgcctttgtgcaatcaaagatcactagaagtgtataccatgtccactgaaggaaggaataagaatggattaagatattgcacattgtgaatcctcagaaaccatatattgaatgaattcatcgaggaacaaaggtagggatattaaggcacccgagtttgaagacatttttatggacacataggcaaggttatcccaacaatctgcagccaaggaagwaaagtaacctgctgacttttataatataatataatcttgcctctgagcacagtcac

SEQ ID NO: 395346 - DNA, 575 bp, Homo sapiens
taaatcttatcttattttcaaacactgcacgtttgtggccatagtattccatagttctgtcttataaaattaaggcatttgacagtctttcttcattctgtcctatctccttccccttcagttaaaactggcagtgtttctgctgagtggctgattaggatagtggttcacacatgcagtaatctgcttattaaatgatcacgaagcccacactcttagagttcttttccgaacatgtgttctcattttttaaaatacagataggctgagaattttccaagtctttaagttctggtttctttttgcttaacaattccttatccctctacccccctctccccaaacaaatattcgaagatcaattccatcttcaattcatttggcttctttcatttaacaataagctgttaggaggaactaagccaccacttaaacactttgcttagaaatctcctcagctaattataaaatttcattattcccaaatttcacmtttcacaaaacattagaacatgaacaattcagccaacttctttgctactttataaaaaaggatcaccattccttcagtttcc

SEQ ID NO: 395347 - DNA, 571 bp, Homo sapiens
tatagaggaggggagtagaattgcaaatacttataatttaatgtatttccctaacacagaagaaagttctcagaattataagtgacattctatttgcagtaaacacttagctggaggggttacaataaacctttacattttcaaggtgtgacagggatttcaatctcttaccaagtcatcattttctccattgtagcattagacagtttgtgtcatgaaacttgtcatcagcgaaatgagagcatggcagtggggtccctgtaaaatgataaactcatttcttttttgtgtttaataagtccgaaaaagaatccaacaattttaggaccacagaatatatttgcatatgtgtacacacaaaaacatgcccacctatatgtgtatatgtatacacataagctcactgttatggactaaattttgtccccctaaaattcatatgttgaagccctaactccttttgttactgtatttggagacagggtccataataagatagtaacgattaaataaagttataagaatggggcyttaatcctgaaggactggtattctcacaagcagaggaaga

SEQ ID NO: 395348 - DNA, 588 bp, Homo sapiens
atgttttctgaagatctatcttcctctgaatgcagcagttttcctctctttaataaggatgatctgatttacaaaacaacaaaaaaacagtaaatcaagaccaaaaggtaagacactctgccctcaggattartgaacccaaaggctggtgtccatacagatccttctgatcctaatatcctacagtagaagatagagcagcctccatgtttgggacaatatttttattatgtgttaacatcaaatctgtagaagctccaagctctgaaaagattatacccactccttgtcatgtaatttaaaataatagaagaattttctaaaccaaaaagttaaaagttaaacaagataaacagttatgactttctgattattttgataatttttttgtaatgccacatatcaaattacttaaataattactttcattattgtcctcttccccttttgtgcccctgcattgctggtacagtgctggtggttgttttcacctgttccttgtgtgacagcacttcccacccccagagaggtattttttcaaatgtggttctgggggtcccttgagttagatcatgtgcagggcatagt

SEQ ID NO: 395349 - DNA, 588 bp, Homo sapiens
atgttttctgaagatctatcttcctctgaatgcagcagttttcctctctttaataaggatgatctgatttacaaaacaacaaaaaaacagtaaatcaagaccaaaaggtaagacactctgccctcaggattaatgaacccaaaggctggtgtccatacagatccttctgatcctaatatcctacagtagaagatagagcagcctccatgtttgggrcaatatttttattatgtgttaacatcaaatctgtagaagctccaagctctgaaaagattatacccactccttgtcatgtaatttaaaataatagaagaattttctaaaccaaaaagttaaaagttaaacaagataaacagttatgactttctgattattttgataatttttttgtaatgccacatatcaaattacttaaataattactttcattattgtcctcttccccttttgtgcccctgcattgctggtacagtgctggtggttgttttcacctgttccttgtgtgacagcacttcccacccccagagaggtattttttcaaatgtggttctgggggtcccttgagttagatcatgtgcagggcatagt

SEQ ID NO: 395350 - DNA, 662 bp, Homo sapiens
agctcttggcctggggtggcctttcagggttctccggagttggggtstaggaattttataggcctcagttgatcaatcattggatgtagactgtttgcgtattcaggtatcattgtcaactcagactctgtcaacagtccttaacatgtttcaatttccctttttcaactccacggtttcctaatcaattgtataggtctctttaaaaagagactggaggaatcattcccagcatgcttgccatggtattgctgggttcttcctcctggaaacctgacttctttttccatccatgggttctgattctgaaacctagcttaggtctagaagctgagaaagggattgtgactttgcattgagatggcagctttcagactcctgattaaccaccttggatttcttttgattgtatagcttaagtgcccttattgcttgcccatctactttgcctctagcaaagctgttttctattaaccatctctatgggtcatgctcccttttgctgacactcattccaatgctttcatccatccagtctcctggttaagtcctgatacatggccttgcttgtttcaaggacctaaatttcccactgtcagtagtgagctcatttctacatctgccttggcctatgtaggagagccaccacaaacaactttagt

SEQ ID NO: 395351 - DNA, 580 bp, Homo sapiens
gaccatcagtggatgaagttgcacattttactatatttttttctccagtattaaacattctcatgttcaaagaaataattatttgtacattcattgaagagcgctggggttcagataacactttaaaaattgacccaaaagcttcaaatcattccttgaccttctcratgtccctgaaggcccatttcagtcagatactaattaactggcagccaggactttgagttgaagaaattgttgttttcgtttttcagaataaagagacaaattacacgaattataggaaaacaagatcaagtgaggaaatttgttttcaaaggaacctcttccacagaacattctggaatcatgaattttatctcattcttccactctgccttcaactttggtaccagagcttctgtggtcagaatgatggcagaggacaagtgtgtaaaatctgcccttatcagtggagggtgacactctgcacaacagccaatccgagggaggaaagcagtcaagtcagttttacagagattttcagtaccaattagcaactcttaaaaggatgtttctggtaaactcagaataccagaac

SEQ ID NO: 395352 - DNA, 580 bp, Homo sapiens
gaccatcagtggatgaagttgcacattttactatatttttttctccagtattaaacattctcatgttcaaagaaataattatttgtacattcattgaagagcgctggggttcagataacactttaaaaattgacccaaaagcttcaaatcattccttgaccttctcgatgtccctgaaggcccatttcagtcagatactaattaactggcagccaggactttgagttgaagaaattgttgttttcrtttttcagaataaagagacaaattacacgaattataggaaaacaagatcaagtgaggaaatttgttttcaaaggaacctcttccacagaacattctggaatcatgaattttatctcattcttccactctgccttcaactttggtaccagagcttctgtggtcagaatgatggcagaggacaagtgtgtaaaatctgcccttatcagtggagggtgacactctgcacaacagccaatccgagggaggaaagcagtcaagtcagttttacagagattttcagtaccaattagcaactcttaaaaggatgtttctggtaaactcagaataccagaac

SEQ ID NO: 395353 - DNA, 610 bp, Homo sapiens
agggaagccacattccaccagtggggcttgataatagaagcttgttaaacagaacctgcataacaggatcatcccaatatttcaagaccccagtacataagcaggcaactrgatggagaaagctagtctttgaaatttagagttccggaaaagagaaatctctcctctcctgaccttcccatgagatgataaacccacaataaagccaagagaggctctgagaataatcacttgagttttaggggaactgaaagacaggaatactgaaatattcaatcattctgtgcttgaatctttgccaaaccaccaggcatgttacaagcgtgggactgttatatggtatgggtctcttccctaaattcctgctccctgagatcctaaaagttacagaagccaaatcacttcctagcaacagacgccagatatgatagccatgaagagtagatgagatgaggagctcacagtggtacaaagaagagtgcatgtcagagggatgtggtgtgatgctgctgcccatgaacacccacatgatgccacagaccctcagggaaccactagtgcccagggaagccggccccacctgtccacatcaagacaagagcttgaacac

SEQ ID NO: 395354 - DNA, 610 bp, Homo sapiens
agggaagccacattccaccagtggggcttgataatagaagcttgttaaacagaacctgcataacaggatcatcccaatatttcaagaccccagtacataagcaggcaactggatggagaaagctagtctttgaaatttagagttccggaaaagagaaatctctcctctcctgaccttccmatgagatgataaacccacaataaagccaagagaggctctgagaataatcacttgagttttaggggaactgaaagacaggaatactgaaatattcaatcattctgtgcttgaatctttgccaaaccaccaggcatgttacaagcgtgggactgttatatggtatgggtctcttccctaaattcctgctccctgagatcctaaaagttacagaagccaaatcacttcctagcaacagacgccagatatgatagccatgaagagtagatgagatgaggagctcacagtggtacaaagaagagtgcatgtcagagggatgtggtgtgatgctgctgcccatgaacacccacatgatgccacagaccctcagggaaccactagtgcccagggaagccggccccacctgtccacatcaagacaagagcttgaacac

SEQ ID NO: 395355 - DNA, 610 bp, Homo sapiens
agggaagccacattccaccagtggggcttgataatagaagcttgttaaacagaacctgcataacaggatcatcccaatatttcaagaccccagtacataagcaggcaactggatggagaaagctagtctttgaaatttagagttccggaaaagagaaatctctcctctcctgaccttcccatgagatgataaacccacaataaagccaagagaggctctgagaataatcacttgagttttaggggaactgaaagacaggaatactgaaatattcaatcattctgtgcttgaatctttgccaaaccaccaggcatgttacaagcgtgggactgttatatggtatgggtctcttccctaaattcctgctccctgagatcctaaaagttacagaagccaaatcacttcctagcaacagacgccagatatgatagccatgaagagtagatgagatgrggagctcacagtggtacaaagaagagtgcatgtcagagggatgtggtgtgatgctgctgcccatgaacacccacatgatgccacagaccctcagggaaccactagtgcccagggaagccggccccacctgtccacatcaagacaagagcttgaacac

SEQ ID NO: 395356 - DNA, 623 bp, Homo sapiens
ttcacatcattgccaaaagaaaaaaggagatgcttgtaaattttctgtgcaaaatctcagttcaaaactgtgtcaccctgatgtttaatgtgctrttaaagaacagaaaacatgtccagagttaaacatgctgaaaatgagatcaccctgtccttatggccaatgctgtccatctcagaggactacacagaaaggctgagagcatagtgaacaagtggctgcttgtgaaccaaccttcctcatccaccttcaacccaagcatttggagggttgagatctgttcaaattgtgaaaagaaagatattgcgtaaaaagcaacagagaacagaaagatgcatgaaactgtatgaacagtgtgcactgtctgaacagagagtcaaatgtcattcggtacaacctgactggcctgtaggtctttcggtgtcctgaaatttccacctcattgcttatttttaagtaccagtaagtaggcctagcctagagaatagaggcaccctggttttgtaaagtgccagaagaatatcacctctcttttaatggttatgaccttattcatttggggcaaatccccacttaaaatgccagcacgctgtgagaagtaaggcttaagtcattatcagtta

SEQ ID NO: 395357 - DNA, 623 bp, Homo sapiens
ttcacatcattgccaaaagaaaaaaggagatgcttgtaaattttctgtgcaaaatctcagttcaaaactgtgtcaccctgatgtttaatgtgctgttaaagaacagaaaacatgtccagagttaaacatgctgaaaatgagatcaccctgtccttatggccaatgctgtccatctcagaggactacacagaaaggctgagagcatagtgaacaagtggctgcttgtgaacyaaccttcctcatccaccttcaacccaagcatttggagggttgagatctgttcaaattgtgaaaagaaagatattgcgtaaaaagcaacagagaacagaaagatgcatgaaactgtatgaacagtgtgcactgtctgaacagagagtcaaatgtcattcggtacaacctgactggcctgtaggtctttcggtgtcctgaaatttccacctcattgcttatttttaagtaccagtaagtaggcctagcctagagaatagaggcaccctggttttgtaaagtgccagaagaatatcacctctcttttaatggttatgaccttattcatttggggcaaatccccacttaaaatgccagcacgctgtgagaagtaaggcttaagtcattatcagtta

SEQ ID NO: 395358 - DNA, 453 bp, Homo sapiens
taattttgatttaggtcaagaatgctaacagtgttaggaagttcactgtagcctcacatccaagccaacttctccagttcagctttactagtaatagtgctggtatttcactttttttctgtctgatgccttgcaatgttggttctgaacttggtcctctaaacccacaacagttggtgattttctrtctcctgccacagtgtctcttagtcattctatctcacccctttaccttgtcctcagccatagagttttttcttttcccactctgtgagtatacaggtacagggagatctgaaacccttccagactggtggatgagctctgcctgatggttatgcggcaggcactcctctcaaaagcatttcatatgcctacttgttatcttttcattagaaataaatttagttaggaactctgtgcctggcactctcatcctgcataattttggcc

SEQ ID NO: 395359 - DNA, 453 bp, Homo sapiens
taattttgatttaggtcaagaatgctaacagtgttaggaagttcactgtagcctcacatccaagccaacttctccagttcagctttactagtaatagtgctggtatttcactttttttctgtctgatgccttgcaatgttggttctgaacttggtcctctaaacccacaacagttggtgattttctgtctcctgccacagtgtctcttagtcattctatctcacccctttaccttgtcctcagccatagagttttttcttttcccactctgtgagtatacaggtacagggagatctgaaacccttccagactggtggatgagctctgcctgatggttatgcggcaggcactcctctcaaaagcatttcatatgcctacttgttatcttttcattagaaataaatttagttrggaactctgtgcctggcactctcatcctgcataattttggcc

SEQ ID NO: 395360 - DNA, 578 bp, Homo sapiens
ccaactctcaatttagtaaagaatttacaattagaaaaaaatatttagactacataccatgtacagatacgtacatgcttacggttggttcgtgttcagaatagaggccacaaagctgagtggcctttgccataaggcctggattctaggcttgtctcttcattattttaatcaaattacttctaggtaagaaaggaggatctgataatgagttcattgtttcaaaaatgttagaatttttacagccaaacaaaaccgttcagtggtactatatagttaatcctggataaactaaagctcagcttcttgaaaatgaaattaaatgtgtaaattaaattaaaarttaaaggtggtacatagcttcattcccaaaagaagagatagaccaggcgattgttttctggtgtgaatgctgctgaaacctagtgttctgcgataatatctcaggggcagctggaaggtgagggtgggaggttggatttggggcagaggttcaggtccattccacaacttcaactaaggcagcttttcttatttcatgcaagctggttcatgacctacatgtggtttttaaaatt

SEQ ID NO: 395361 - DNA, 569 bp, Homo sapiens
cactttatgaggaatcactgttgtgagcaagaccacttagattctcatggtgatacttaccttatttcctcttagtccatgctggtcacacctggaaggcaagttctcctctaattttttttctcccttgtagtgcctggcacaagttctttgcatgcggggggagttgcagtgaagttgcaagggccatggtaaagtggttaggagatgagttttaatcttgtctctggtaccacacctcaggtagaaatatactatgtatcaatctgtgcatttgcatctgtatctctctactagtgaaatgagttgctactrttcatttcagctgtgaaattctgtaactctgtggctactttcataccgttcaaatgcgatgttatatgctggtaacatgaaaataatggatgagcagttcaactatattaaaaataaacgtggttaagagtgctcaccttaagtgtaggatttgaaagtgtaggctctaaagtcagactgggttcggaacctggtatcattactgacttggtgtgtagcttctctatttctcagtctatttaacctttctcatc

SEQ ID NO: 395362 - DNA, 569 bp, Homo sapiens
cactttatgaggaatcactgttgtgagcaagaccacttagattctcatggtgatacttaccttatttcctcttagtccatgctggtcacacctggaaggcaagttctcctctaattttttttctcccttgtagtgcctggcacaagttctttgcatgcggggggagttgcagtgaagttgcaagggccatggtaaagtggttaggagatgagttttaatcttgtctctggtaccacacctcaggtagaaatatactatgtatcaatctgtgcatttgcatctgtatctctctactagtgaaatgagttgctactattcatttcagctgtgaaattctgtaactctgtrgctactttcataccgttcaaatgcgatgttatatgctggtaacatgaaaataatggatgagcagttcaactatattaaaaataaacgtggttaagagtgctcaccttaagtgtaggatttgaaagtgtaggctctaaagtcagactgggttcggaacctggtatcattactgacttggtgtgtagcttctctatttctcagtctatttaacctttctcatc

SEQ ID NO: 395363 - DNA, 569 bp, Homo sapiens
cactttatgaggaatcactgttgtgagcaagaccacttagattctcatggtgatacttaccttatttcctcttagtccatgctggtcacacctggaaggcaagttctcctctaattttttttctcccttgtagtgcctggcacaagttctttgcatgcggggggagttgcagtgaagttgcaagggccatggtaaagtggttaggagatgagttttaatcttgtctctggtaccacacctcaggtagaaatatactatgtatcaatctgtgcatttgcatctgtatctctctactagtgaaatgagttgctactattcatttcagctgtgaaattctgtaactctgtggctactttcataccgttcaaatgcgatgttakatgctggtaacatgaaaataatggatgagcagttcaactatattaaaaataaacgtggttaagagtgctcaccttaagtgtaggatttgaaagtgtaggctctaaagtcagactgggttcggaacctggtatcattactgacttggtgtgtagcttctctatttctcagtctatttaacctttctcatc

SEQ ID NO: 395364 - DNA, 533 bp, Homo sapiens
gattaaaaattgaagtttcatggtatttggagaatatcataattctcttgtgaagatgtaatgatttgcagatgatgggtgtcctcattcacctctattgaaggagcttgacaatctgccttaaaggataagcatcttatttctaagcaggaaaccaggaagtagatttgggtctatcttgttccaaaactgggtcytaagctgaaaatcgctgaaaagaatgagggcttcattcattcctcttctgttcattctagttcccacaagctttgggtgcagaaaaaattaagtttataatgatagttcagggacagtggggagacatatagtaagaaatacaaagaagatgcctcctgaaggtcatttcccatgacaagacatattcaagtgggaatgataactcctgaagtcacaggataatgagatgtaacttctgttttctgttttatttagcacttggtagctattctgaaacagatgttttctaatctgtaatattttgctgaaaacttttggtgaaattgctggaagtt

SEQ ID NO: 395365 - DNA, 622 bp, Homo sapiens
actcccaaataattacaagggttattaaggtctccaattacaatagtgaattcatctgtttctccttgcagatctgtaagtttttgcctcatgttgtttgatgctgtattacrcatacatgtcaagtattgctgtgtgttcttgtagccttgtcgcctttattgttagttaatgccctttatccctaaaaatgtttcttgaagtctgctctgtctgaaattgatatagctactcccactttctttggattagtgttagcattatatgtttttcttccattgatttataatctttctctaatataaaactgttttatctacactgaaaatctgttctttagtgtaatcattttcatcaattatcttatcttgatcttctagattacttgctgcagcttctatattagcacttgctgcatcaccttgcacttttatttatggaggtagcttcctttcttaaatctcatgaactagcctctatatttttatttaaagtatgtttcttgtcaacagcatataactgggtcttgagttttggtctgctgtgacaattactgtcttttaattgatgcatttataccattgctattcaaagtgattattagtatattctggttaatatc

SEQ ID NO: 395366 - DNA, 590 bp, Homo sapiens
tcctgtttgtgagcctctgtattgcagcatatgttctaatatcttatgtctcacatctctctagtaayctaatggtagcaattttctgcaacttttatcagactctaagcatctcatttgtaagtgaaaattataaaagaaaaattagtgccaatataatttctaagtctctatggtatgattcaaaagagaaactgatcataacaatgtatcttcaagtgatactctctataatatcttaattataatctagtcaataaatgttactggtttccagtttagcaatgtgttgtataaagttcttattttactttctcactaaaattaaaagagaaaataaacagttggaaagtgaggtcaaagatttcattatagatgaaaaaattagtcaagctaagaagataagtgtcatgctgtgtttttactttattttcactaatttgttttttgaaatgggtcatatttttctttcaactctttgtaaaataactgcaattatactttactatgttctatagctaccattaaattaggcaaattaagaaacaattttcactattgattattttgagtgttacccacccatcttt

SEQ ID NO: 395367 - DNA, 590 bp, Homo sapiens
tcctgtttgtgagcctctgtattgcagcatatgttctaatatcttatgtctcacatctctctagtaatctaatggtagcaattttctgcaacttttatcagactctaagyatctcatttgtaagtgaaaattataaaagaaaaattagtgccaatataatttctaagtctctatggtatgattcaaaagagaaactgatcataacaatgtatcttcaagtgatactctctataatatcttaattataatctagtcaataaatgttactggtttccagtttagcaatgtgttgtataaagttcttattttactttctcactaaaattaaaagagaaaataaacagttggaaagtgaggtcaaagatttcattatagatgaaaaaattagtcaagctaagaagataagtgtcatgctgtgtttttactttattttcactaatttgttttttgaaatgggtcatatttttctttcaactctttgtaaaataactgcaattatactttactatgttctatagctaccattaaattaggcaaattaagaaacaattttcactattgattattttgagtgttacccacccatcttt

SEQ ID NO: 395368 - DNA, 597 bp, Homo sapiens
gccttgcattacttgagaatggagagctgtcttccccactcattgcaacttccctgcccaggatctgtaagtttaaaaagaaaatgtgataatgtattaaatttgtaccttctatcaaaatactaggggttgctccaggccagtttttccccaggatgctggggaaaacacaaggtcasactcttagctccagagaaatagtcaggcaggcataaactggacacgagtcaggcaaaagtgtctgccaggataaataaacttttcatgtgagggatgtcctggtcatgggcaactaggcattaagacatccactagttgaaagaaatatcccataaaaggtatactgtaaaaagtcacattcagctcccctttattttccattagggcttggtactctcatactggaatgctaatttagttggtggatctcaaaacaggcagatgctcatactttaagaaaagtgaagaagcagatgtgatatacttagtggtagaaatattgggtgtaatacctgatagcttctattttcttaatagattagagatatctgaagaaagatcagatgaaaaaaattattcctgagaggaaaaagagct

SEQ ID NO: 395369 - DNA, 578 bp, Homo sapiens
aatcatgaagaaatccaaaacctaaatagaccaataacaagtaatgatatcaaacccatgattaaaagtcatccagcaaagacaagccaaggacctgaaggctttactgctaaatgtttggtaaaagtttaaatacacaaagatcaatcaaaatgaattaaaggcttaaatctaagacctcaaaacatgaaactagtagaagaaaacttggggaagctccctaagacattgatctgaacttaagtttcttgagtaatacctcagaagcacaggcaagcaaagcaaaaatggacaaatgggatcacatcaggtttaaaagcttctgcacagcaaaacaaayaaacaaacaaacaaaaaacaaagagacaacccacagaatgagaaatatttgccaactatccaacaagagattaataaccagaatatataaagagctcaaataactcaaaaaatataagaattcaattacataggcaaaatatctaaacagacatttctcaagagaagacataaaaatgacaaacagttatattgaatggtgatcaacatcattgatcattaaataaatgcaaaccaaa

SEQ ID NO: 395370 - DNA, 642 bp, Homo sapiens
tcatatttgtactgctattaataatacagtaaagtttatattctataaaagttcagatagtacatatttcagactttgtggtccacacagtctatgacaaaaaagtaggcataatgatatggtttggctgtgtacccatccaaatctcatcttgaattccctcctgttgtgggaggaacccagtgggcagtaattaaatcatgggggcaagtttttctcaagctcttctcatgaataagtctcacaagatatgatggttttataaagaggaattcccctccacgagttctctctctttgcctgccaccatctacataagatgtgatgtgctcctccttgccttccaccatgactgygaggcctccccagccatgtggaactgtaagtccattaaacctctttcttttgtaaattgcccagtctcgggtatgtcttcattagcataatacaataaattggtaccagtagagtgaggtgctgctgaaaagatacctgaaaagacagaagtgactttggaattgggtaacagagagaggtcagaacagtttggagggctcagaagaaggcaggaaaatgtgggacagtttggaactctctagatatttgttgaatggctttgaccaaaatgctgataatgatatg

SEQ ID NO: 395371 - DNA, 622 bp, Homo sapiens
atacaaattatctatatattttatagaatacaaaatttgcagcctgaccatgcaatagaaaagaaaatcccattttctgaggataaattcaagccagctgcagaaatttgcaaaagtaatgaggaaccaaatgctaatcatcaagacaatggggaaaatgtctctagggcatgccagagacttttgtggcagcccctctaatcaaaggcccagaggtttaggaggaaaaaatggtttcatgggctgggtccagggtccctctgttgtgtgcagtctagggacttggtgccccacatcccagctgctccagtgtgactaaaagtgatcaaggtacagctcaagctgttgcttcagagggtgcaagccccaggccttggcagtttctatgtggtgttgagcctgtgrgtacacagtagtcaaaaattgttgttcaggaacctcacctagatttcagaagatgtatggaaaggcctggatgcccaggcagaagtttgctgcaggggcaagacaaggccctcatggagaacctctgctaggtcagtgagaaagggaaatgtggcgttggagcccccacacagagtccctgctggggcactgcctagtggagctgtgagaagagggc

SEQ ID NO: 395372 - DNA, 622 bp, Homo sapiens
atacaaattatctatatattttatagaatacaaaatttgcagcctgaccatgcaatagaaaagaaaatcccattttctgaggataaattcaagccagctgcagaaatttgcaaaagtaatgaggaaccaaatgctaatcatcaagacaatggggaaaatgtctctagggcatgccagagacttttgtggcagcccctctaatcaaaggcccagaggtttaggaggaaaaaatggtttcatgggctgggtccagggtccctctgttgtgtgcagtctagggacttggtgccccacatcccagctgctccagtgtgactaaaagtgatcaaggtacagctcaagctgttgcttcagagggtgcaagccccaggccttggcagtttctatgtggtgttgagcctgtgggtacacagtagtcaaaaattgttgttcaggaacctcacctagatttcagaagatgtatggaaaggcctggatgcccaggcagaagtttgctgcaggggcaagacaaggccctcatggagaamctctgctaggtcagtgagaaagggaaatgtggcgttggagcccccacacagagtccctgctggggcactgcctagtggagctgtgagaagagggc

SEQ ID NO: 395373 - DNA, 551 bp, Homo sapiens
ttatcaaaggaactctacttttcacaacttcaaaagaacactctatgattaasaaatacatgggaaaatataatctttagaaaatctccaaatcatgtaattgtatttaaaagtacgttatgttagaaactatatttaatagtaaagatcttggcctataatgcttacattaaaatacatatgataacactgtattttgagaaaataggtataataacataattgctaattttgattttatgactactacactttggcaaaagtatttttctacttctagcattgctgtacatttaaacactacattttgttacataaaattcttttcaatatttgctataacttaagtttgaaaacaaattcacaagtggatattctacttataacaatggtaaaaggcagtgataatttcatttttctagttaatatcaatagaaagatacagccaagatgcaatcagtttgaaattctctactttctggacagttcattttgctatactatcaaaagatcagataaactgatttcattatcatgatcaagatatttaa

SEQ ID NO: 395374 - DNA, 551 bp, Homo sapiens
ttatcaaaggaactctacttttcacaacttcaaaagaacactctatgattaagaaatacatgggaaaatataatctttagaaaatctccaaatcatgtaattgtatttaaaagtacgttatgttagaaactatatttaatagtaaagatcttggcctataatgcttacattaaaatacatatgataacactgtattttgagaaaataggtataataacataattgctaattttgattttatgactactacaytttggcaaaagtatttttctacttctagcattgctgtacatttaaacactacattttgttacataaaattcttttcaatatttgctataacttaagtttgaaaacaaattcacaagtggatattctacttataacaatggtaaaaggcagtgataatttcatttttctagttaatatcaatagaaagatacagccaagatgcaatcagtttgaaattctctactttctggacagttcattttgctatactatcaaaagatcagataaactgatttcattatcatgatcaagatatttaa

SEQ ID NO: 395375 - DNA, 584 bp, Homo sapiens
gagatggtgtctcaaaaaaaaaaatgatgattgatagatgatagatagatgatagatagatagattatagacatgtaatttgaaaatattttctcccaatctgtgctttttttcattttcttgttattatatttttatgcacaaaagtttctaattttaaaaacagccacattattgacttttcctccctcctttagttgctgtgctctaratgtgaacagatcaacaatgaattctgaaatttaatcagtaataaaaaatccctgccaaccagaaaaagctgaggaccagatggactcacagatgaaccataccagatatacaaagaagggctggtaccaatcctactgaaactatttcaaaaaaattaagaaggagggactcctgtctaacttattataagaaacaagatcccacttgataccataatctggcaagaacacagcaaaaaaagaaaaccacaggccaatatgatagatacagaaatccataacaaaatactagcaaactgaatacagtgccacataaaaactttaaaaattattaaaatggcctgattgcccaaagaaatctagagttttgat

SEQ ID NO: 395376 - DNA, 584 bp, Homo sapiens
gagatggtgtctcaaaaaaaaaaatgatgattgatagatgatagatagatgatagatagatagattatagacatgtaatttgaaaatattttctcccaatctgtgctttttttcattttcttgttattatatttttatgcacaaaagtttctaattttaaaaacagccacattattgacttttcctccctcctttagttgctgtgctctagatgtgaacagatcaacaatgaattctgaaatttaatcagtaayaaaaaatccctgccaaccagaaaaagctgaggaccagatggactcacagatgaaccataccagatatacaaagaagggctggtaccaatcctactgaaactatttcaaaaaaattaagaaggagggactcctgtctaacttattataagaaacaagatcccacttgataccataatctggcaagaacacagcaaaaaaagaaaaccacaggccaatatgatagatacagaaatccataacaaaatactagcaaactgaatacagtgccacataaaaactttaaaaattattaaaatggcctgattgcccaaagaaatctagagttttgat

SEQ ID NO: 395377 - DNA, 541 bp, Homo sapiens
aacacagtatctagaccacagaactcattggtgttactttgagctaaagaagatggcctaaaagtgcagtagaataacattttgaatacttagttctagtttcaggtagtagagtatctgaactagaaacaaataaatgttaatattatctcccacagtcagaatatgctggtcaggaaaccaggaagtttatgtaggtgaggctccttttactccaaatcgtccatgaaaaaatttgcaacacaaatgtaatcattgttttatgtgtgcatggtgtttgtgtgtgtgtgtctgtgcrcatgtgcatgagtgtactaagtatatacttatagtaatattccctacatattttctacatagtaagatagtaagatttcctacatatttcttatatagtaagatattctacatatttcagtatttaattcagtattacaaatcaggaaagctcattgaaatagtgaatgagctataaacaaataaatatcaataaatataaagtggcatatgggaggtatgtctccatttatggtggaggtaa

SEQ ID NO: 395378 - DNA, 606 bp, Homo sapiens
cttttgcactaaatcctgcaaatattctcatttcacttagacaaaaggtaaactccatataagttccatgcaattttacccacttctctccaacatcttgttttctagttgaccttatttcttgttatttcaccaacttcactactctgtgtgagtcatcttggcctctttgctgttcttcaggcatgctagataatatatttagggcctttgctcttcttggaatattttatctaaaaatgtttgattttagtgaaataaaatacaattttatttgtagtaaactaaaaaatgtttactttggtgaaatgcttcctcacatctgyctagttttactcaaaatttataatttttcagtaaaaaattatctactatattttatattaaatccttcctacacctggtatattccttatcaaacttatcaaacttatcaaactttctaccttagttttctctagggaacttatcactacctaacactatacacatttgctattgttatctccccaactaaaatataagctccacaagaagatatctgtttcttttgttcattgctttatctgtagggtctagaagagtgcttggaataaaatggtgaaa

SEQ ID NO: 395379 - DNA, 606 bp, Homo sapiens
cttttgcactaaatcctgcaaatattctcatttcacttagacaaaaggtaaactccatataagttccatgcaattttacccacttctctccaacatcttgttttctagttgaccttatttcttgttatttcaccaacttcactactctgtgtgagtcatcttggcctctttgctgttcttcaggcatgctagataatatatttagggcctttgctcttcttggaatattttatctaaaaatgtttgattttagtgaaataaaatacaattttatttgtagtaaactaaaaaatgtttactttggtgaaatgcttcctcacatctgtctagttttastcaaaatttataatttttcagtaaaaaattatctactatattttatattaaatccttcctacacctggtatattccttatcaaacttatcaaacttatcaaactttctaccttagttttctctagggaacttatcactacctaacactatacacatttgctattgttatctccccaactaaaatataagctccacaagaagatatctgtttcttttgttcattgctttatctgtagggtctagaagagtgcttggaataaaatggtgaaa

SEQ ID NO: 395380 - DNA, 554 bp, Homo sapiens
ggaatactgctgtacatgcccctcttttgggctagatgggtcagaagacacccagttaatgataaagagttcagttcaattggtgacttgatgacccatagtcaaacattcagtttctaccaaagcccaggcacaggcaacagctctctcacaaaaggagagtagttatctccagaagatggcaggttcttgctccaaaatcctagaggcctctgctgtgattcatctatgggccctgccaaaggctccaaacatcagccctatctgccagtgccacttcaagcaccattggatctgctgggtcatatggtccaagcggaagagcagtttgcacaacagcttggaactatggcagagccttctcctcttgtggaccccactcaaaactggcagcatttcaggtcactcaataartgggctggaggaacacacccaaatgtggaatgtgttgcccccaaaatctaagtaggcacactaggcattatacctctttcttggttgtaggaagggacaaatgcagcaacttatccttcaccttagaagaaatacctcga

SEQ ID NO: 395381 - DNA, 543 bp, Homo sapiens
aggactatcagtgttttccatagtattagaagtaaagtccttagcatttttgtgtctaatcagattaatcagccaactccagaaaccccaaaaccaactaaagaaatccattgttaaaattctattactctagaaccactcccagtaccaaaatctgtattaatcagtgttccttataggaatagaaatgacagtatatatatatatatatatatatatatatatatatatatatatatatatatatacatatatatgagtttattaaggagcattgattcaygcaatcacaatctgaagtcccacaataggccatctacaagctgaggggaaaggaagaccgtgtgaatcccaaaacctcaaaagtagggaagcttacattacagtgcagtcttcagtctttgactgaaggcccaagagcccctgacaaaccactggtgtaagtccaagagtccaaaagctgaagaacttggattctgatgtttgagggcaggaaacatccagtgtgtgagaaagatgaagaatggaagactcagcaagtct

SEQ ID NO: 395382 - DNA, 609 bp, Homo sapiens
actatacagaaagtaagagagtgtgtgaaccaattagatccaacaaagaaaactagaactaatgaggtcagagtagaactcagttatgattctcatgaactctaattgtagcaacacgaccaacttacatcacagccttttgccctttgtcatgaagttgtacatataaatggttcaaaatcagagaagaagaatggagacattaaaaggtctctagagaagttcagactcagcttctgccttatgccaacaaagtaagtcagattctggtactccacatcaatcttcagagcttaggactagggctcaacttcccctttcaaagataatgaaaatttctctgatagtaaatcataatatttgtagctacatggacatgtactttcagtttagctaagtatataaaaagaaaaagaaaataattaagtatttatttgactagatatacatacacacacattgtgctgcatggcagacatactgatgtataaattattttggccawtttaatatataaaaatccaaaaatatattaatgttatatatatttaaaatgaaaccggctgagaatcttaaaagtctagaatctattaaaaccaattttacatt

SEQ ID NO: 395383 - DNA, 527 bp, Homo sapiens
gtaaacaaaaatattttactatattgtattaatatacacaaaaatcttattaaaacaagaaaaccaaatccaacctttgcatccatgtgctattaatgctaaaggtagttttaataaratcttataaaaaaatcggaccacaaagtatgttttccctaaaccttttatggcctcttacatattttctaccctctttcttttataaaatgtttatatctattatctttagtttttcaattttaaacaactcttaaaaacctctaaactggacaaaattacttttcgttgaacaaaagtcacattacacattaccttttttttttttttaacaagaaacacatcctacttttcttatagtaagaaattgtactatgtaccaaatgcagagcccggccaaatgacagctgtgaagacagtgcctggaaaatccaatttctcttagtatggccaaaagtcacagctggtccaggaaacaagactcaagtgttgtccttacgcctcactttgattacttctctaaacctcat

SEQ ID NO: 395384 - DNA, 527 bp, Homo sapiens
gtaaacaaaaatattttactatattgtattaatatacacaaaaatcttattaaaacaagaaaaccaaatccaacctttgcatccatgtgctattaatgctaaaggtagttttaataaaatcttataaaaaaatyggaccacaaagtatgttttccctaaaccttttatggcctcttacatattttctaccctctttcttttataaaatgtttatatctattatctttagtttttcaattttaaacaactcttaaaaacctctaaactggacaaaattacttttcgttgaacaaaagtcacattacacattaccttttttttttttttaacaagaaacacatcctacttttcttatagtaagaaattgtactatgtaccaaatgcagagcccggccaaatgacagctgtgaagacagtgcctggaaaatccaatttctcttagtatggccaaaagtcacagctggtccaggaaacaagactcaagtgttgtccttacgcctcactttgattacttctctaaacctcat

SEQ ID NO: 395385 - DNA, 527 bp, Homo sapiens
gtaaacaaaaatattttactatattgtattaatatacacaaaaatcttattaaaacaagaaaaccaaatccaacctttgcatccatgtgctattaatgctaaaggtagttttaataaaatcttataaaaaaatcggaccacaaagtatgttttccctaaaccttttatggcctcttacatattttctaccctctttcttttataaaatgtttatatctattatctttagtttttcaattttaaacaactcttaaaaacctctaaactggacaaaattacttttcgttgaacaaaagtcacattacacattaccttttttttttttttaacaagaaacacatcctacttttcttatagtaagaaattgtactatgtaccaaatgcagagcccggccaaatgacagctgtgaagacagtgcctggaaaatccaatttctcttagtatggccaaaagtcacagctggtccaggaaacmagactcaagtgttgtccttacgcctcactttgattacttctctaaacctcat

SEQ ID NO: 395386 - DNA, 542 bp, Homo sapiens
tgaagcaatggcctgagctgtaccgtgaacccttttagtcccagatggaactgcagtgactggaatgaaggacaccatgtccaaaggctgcacagagtagtgggggccctgaacctggcccacaaaaccatttttcttcctagacctcctggcctgtgatgagaggtgctgccatgaaggtctctcacatgccctgcagacattttccccattgtcttgtctattaacatttacctcctctttacttatgaaaatttctgcagcaggcttaagtttttcctcagaaaaatgggtttttyttttctaccatatagccgggctataaatattccaaacttttatgctttgctttccttttaaatataagttccagtttctgattatctctttgttcaaacgtacgagtatgtgtacatgctcagaacagccagttcacctcttgaatgccttgctgctcagaaatttcttctgccagatgccttaaatcatctttctcaagttcaaagttccatagatctccagagcagggcaaactgccacca

SEQ ID NO: 395387 - DNA, 552 bp, Homo sapiens
attggcacttcagagctgagcatcttaacattttctcttcttacccccagctggggactttgcatttgcaatgagggccccacttctctgagccctagtgaaagtggatcactttaagcccacaacaatggtggcttcttatcctcttagttaatgctttagataacttttcttttagaccaggtaggggcttgtaaagtgggactgtggctctggccttgcctggtaagacacatgaaattttctcatcttttctaactatcttccctcccctgttttctcttaatctgaaagaaatctctgcattggtaaatgtggacaaatcaagctgtgttactgacatatctgcagcagytgtcacggacgagatttatttatataggatagcaattctcgagctccccaacaacatcccaaagctttgggatggttctaacgacaaagaaatgacatttatctttgtttagtattatttgcaagcaccaatctagaatttaaccatgtagtagctgcttttatttgctacctgttaccataccagtgaaaccacaa

SEQ ID NO: 395388 - DNA, 576 bp, Homo sapiens
gacctgccaggcaaagcacatatgagttgggtctgtcctggaaaacttgtttcagtgattgacattaaacacctgctgcccttatttagatatattcctctcaagtccctaagttgttctctcactaagcctgagagtgagagggctaagtaagatagagacgtagtgcatttagagaaccatactcagtcttctgttaagacactaccaggtctgacactggcttactgccgcaggctgtttattactcttaagcccaagacaacttctgcagtctggataagttgcctccctagttcatctttttatccttgaaaaaggcccagggctcccaggcattttcttttctttggtgtctcctgccattccccacccccagggttcttctctttctatgattggctgctactcccctcatctttgctgcccagatggcaagcacaaaggaaaaaggtctttttttcctyttaaggcttttattgctaattataagagaaaaagcaatagggccacaggactgaaaatttaatgaagttcatactctctttttttctctgttagcttgttcctaactat

SEQ ID NO: 395389 - DNA, 579 bp, Homo sapiens
tgttacttcctcttattttatagatgaggaaatcctcacgagaggaagtcttagtaccttgtcaagtatcaattaactgttataagggtgattgaacattcacatccagggcttttatatttcaaatccctggttctttccattatagcatgctaggatcatgagaaaataaagaagtggaagaaagaccagagaaaggagtaggaattgcctaggaaaataaacaaccatcaggttccagagagaggttattagaaatctagagttcagacaaagaatcataaaattgcaagattagaatggaccttagagaagtagagctcaccaccctctccagctcatctctctctccaacatctccaagtggtcacccagccrcttcccgctacaatgatggggagtgtcttactgcagaagacaatctgttccatctgtatttagctctggccacgaggaaattattccctatgaaccccaggatttcctttggctccaagtttacaaagcaataattagcactttgagttgggaaagctaggcagcaaagtggttatgaaccccagctctagaatacaattg

SEQ ID NO: 395390 - DNA, 520 bp, Homo sapiens
ccaaaatccaaagagaagttctagaaaaggatggttccagagatgactttttgattgcaagaataattgagtggcagaattagaaaaagcaaatgtatccttgaaatgtttttaagttacaaaaataactctggaagcaaagacacatgatgatgatgatgaagatgatgatagctttagtgtgctcactatatttctggccctttccttactgctttccgaatattgctttttttcctcccttaatatagcactcccakgtatgagagactcatttccattttcagatgaggaaactgagtaagagtggccaagtcactagcccaaggttgcattgctagtgagtagagagccgagctttgaacttggtgtgtttgaagagccttaactatttctttgtacctccatatccagtacttccataataccaccagtggaccatctctgtgaatattttcccactcatttctctttgcttctaatatttattagcatattaaaatattataatattgtttgt

SEQ ID NO: 395391 - DNA, 338 bp, Homo sapiens
ctaagaaagtggaatgaattaggagttggttagtgaaagagtggacctcccagaaggctcctttttgaggaaaagcatagcacctttgatgagtggaaagatggcattatggttttggagtttagagaactagtgggaagaaagggcataaatagaggtgggagaaataggcagaggtcaagctgggggctgttwcttggatccttcatgtcagtaaagacttgttctgcgggcagcagaacactcaactcacactggcaagaaagtaagctaccaccctatgcggttgaagtgtcttgggtagatctttgggcaggactggattggggctcaaagca

SEQ ID NO: 395392 - DNA, 480 bp, Homo sapiens
gcagaggtcaagctgggggctgtttcttggatccttcatgtcagtaaagacttgttctgygggcagcagaacactcaactcacactggcaagaaagtaagctaccaccctatgcggttgaagtgtcttgggtagatctttgggcaggactggattggggctcaaagcatgtggccagtatgctgtttttctccctttgctcgcctacttcttaaataggttctcccctctatttcaatatggctggcagtagcttatcagtgtttgagttgggaactagctgctgcttgtgcccaagttccttgtatttggaggtggtgtgctctgaggagaagaaacaaaaatctggagaaagcttagaacctagaaaactcagccaaagtgacttcagactcagacacttcagcagtcaccagttgccaaggcctgctacatttctggattctgcctccccaagtccagttggagcctgcaaggtgga

SEQ ID NO: 395393 - DNA, 593 bp, Homo sapiens
ttttccagatatatgcattctgctcaagggctgacacagtatttggtgcatagattgcagtcagaggacattcacagaaagtaatactacattaatttcttataaacttttgtaatatttgcttacaaattccttgcaaaattttttgatctatttccataatattagcattttcattagaaaaacttagcatattaattatttcatctttttttctcattagtcattaacacgttgaggtttatatttgttccttacatattttttgctacaacaattattcacactactttttcatagtcaatctctttaaaaattattattttgcttattccataagtatttgttgaggacctacattgtgacaggccctatgccagaggctgatggcagtgaacaaaacagatgagttatagctttacyagttggtgaaaaagagagtttttaaataaaaagttatacaactagatataattataaatcatgtttacagagttatgtgtgagaattaaaagggagattctcttataagttcccaggttcagaattctggttccaatctttcttgcttagaaaatttaatttaaaaaggc

SEQ ID NO: 395394 - DNA, 621 bp, Homo sapiens
gatcttgtctgatttctggttgaattttgttttgttcatctgcattgggaaaattcactgatgtacatccctcagtctacctaggccccaggctacctagagattaaacatggagtttttcccaaggatattattttgcctgtaattgttttttaattttcctgaaggcccagctctgcaattttctgtgttttttttttccctcacaaggaatgatcargcttaaagtgaatagtaatagaactattcatttgttccaaatctactttccactgagactcataaaattatacttgtagagttagagaggaccttgttcaaacatcttattttactgaaggagacacagagatccagaggttgattgattcgtcttctatcactccgctaagctgatagagtccagactaggacctggtctcttggcctctggtctggggctctttccatgtcaccccttacaaacaaaaaatttattgattaggctctgctaatgaagaggcttctaaactagcattttgcttctgagagtgaaagtaagtggttgacttctcattacctccacccattaccacctccatctcccaccaagctgccatcatcttctaacaggccttcctg

SEQ ID NO: 395395 - DNA, 574 bp, Homo sapiens
aattcccttttcgtgtttatcatctgtcttctctcaccagaatgggaacaagaattttttttctgttctatgtactacctactgtagtgccttacatataataggtgctcaataratatttgtgaaggaataaatcaaatacctagcccttacctggtaggcagcctctaaaatggctccaaatgatttctggcttctggtattcagacccttgtataatctcctccccccacgtatgggttagacttagtgacttactcatggttcatacaaagtgaaaaaagtgatgagatgttgcaaagattgggtttttgcacaaggactctgacttccatatttttgccctttcttgctctctcacttgctccctctgatgggagccagctgccatgttgtgagctgccccatggaaagaccctcatggcaaggaactgagagaagcctttaaagaacttaatcttgccaacatctgagtcagtttgaaagaggatctccccttggtcaaactttcagataagaccacagccccagttgatgtaaactgatttcagctttgtaagagtctttgagggac

SEQ ID NO: 395396 - DNA, 574 bp, Homo sapiens
aattcccttttcgtgtttatcatctgtcttctctcaccagaatgggaacaagaattttttttctgttctatgtactacctactgtagtgccttacatataataggtgctcaataaatatttgtgaaggaataaatcaaatacctagcccttacctggtaggcagcctctaaaatggctccaaatgatttctggcttctggtattcagacccttgtataatctcctccccccacgtatgggttagacttagtgacttactcatggttcatacaaagtgaaaaaagtgatgagatgttgcaaagattgggtttttgcacaaggactctgacttccatatttttgccctttcttgctctctcacttgctccctctgatgggagccagctgccatgttgtgagctgccccatggaaagaccctcatggcaaggaactgagagaagcctytaaagaacttaatcttgccaacatctgagtcagtttgaaagaggatctccccttggtcaaactttcagataagaccacagccccagttgatgtaaactgatttcagctttgtaagagtctttgagggac

SEQ ID NO: 395397 - DNA, 572 bp, Homo sapiens
tcatttgaaattgggctgttcttaaaattgggggacattcaattgttataggccaatactgtggcaattcaagtagtttctttatctaagactatatctaagagtagcagtcagcaaactacagcccatgggccagctgtatgtttctataactatggatttatattagaacacagacacacccattcatttgcatattgtctatggctgctttgcagaattgagtagtggctgcagagactatctgaccagcaagcctaaagtttttactatctgtccctttaagaaaaagtttgctgaccccggttctagaggcaaaaactaatacctccactctttgtgctttctgaggagtccaccctttgctttctctccacaagtcttccttaaaagcccagtaagtgggtctgataactcacctacccacgcaagcaagattgccaagtggtttaggacagtgkccttaaaatgtttttgaccatgatccacagtaagaaaacaatgttatctcactactaagaacactatacatatatatgtaatgaaaacaaatgtatcacaaacgaatactt

SEQ ID NO: 395398 - DNA, 612 bp, Homo sapiens
ggctgtactaataaactcaaccatatatttaaggaataaataataccaattttacacaagttatttccaaaaatagaggttgatggaactttttccaactcattttatggggccagtaaatactgatatcaaaacctgacaaacacaatagatgcaaaaatccttagcaaaatattagcaagttcaatcttaacaatatattatagaaaaggcaatacaacattgtcaagagggttaatcccaaaaatgtaagattggtttaacacttaaaaaccaatcaatgtaattcaccacattacttaaataaaagagaaaaatgatataatcatttcagtagatgcagaaaagcattagaaaaaattcaccacctttcttttgataacagagtcttagcaaagtaggactagaagggaacttcctcattctaataatgtgtatctaaaaaacctatggctaatattatgcttactaaaatactgaatcytttccctgtatgtctgggaaaggctgtatgttctcattattaaaatagattatatgggttaggtgtggtggctcttgcctataatcccagtactttaggaagccaagacaggaggataccttgagccc

SEQ ID NO: 395399 - DNA, 443 bp, Homo sapiens
atcttgtttttattttctcttagcattttaaatgccttatgcctttgatttacatcatttctgattacaaatctgctatacatcatctttgtcatttgtcatctgacattcctaatgtaataagtaattttgttcaggatacttttagggcattttycttatcactggttttaatgcacttcagttataatgtccaatagtatattgctgtgcttggggtttgttgagattcttatgtctgtagcttcatagttttcaggaaattcctcatcatttcttctttaaaacttgctctgctttccttagaggactccagttatactaggtcacttgaacttttgccacagctcactaatgctctactcattttttcttggtgtgctttatttggaatcttttctattgttgtgtctttaagttcactgatcttttcttcagaaatg

SEQ ID NO: 395400 - DNA, 487 bp, Homo sapiens
atcctctcttgcttctgctctcaccatgtaacgggcttgctcccagttcactttctgccatgactgtaagcttcctgatgccctccccagaagccaagcagatatggctgccacgcttgtgcagcctgcagaatcgtgagccaattatatctccttttataaattgcccagtttcaggcattcattyatggaaacacaaaaatggacaaactcacatgttcttggaggatggtgaagtgtgctccccttgtggcctatattttttaacaacatttatagttattctgattatataagtaatttgggttctcagtgaatatttttgtgaataaaaaaatgagaaacaaacattatcttaccaatttggcagctacttttgatatttttgagaatatactttctatacaaaatatatatttatgtttatgtatttttatttaaatatcatactaatatacagtcagttaattaacttatgtgattgact

SEQ ID NO: 395401 - DNA, 487 bp, Homo sapiens
atcctctcttgcttctgctctcaccatgtaacgggcttgctcccagttcactttctgccatgactgtaagcttcctgatgccctccccagaagccaagcagatatggctgccacgcttgtgcagcctgcagaatcgtgagccaattatatctccttttataaattgcccagtttcaggcattcatttatggaaacacaaaaatggacaaactcacatgttcttggaggatggtgaagtgtgctccccttgtggcctatattttttaacaacatttatagttattctgattatataagtaatttgggttctcagtgaatatttttgtgaataaaaaaatgagaaacaaacattatcttaccaatttggcagctacttttgatatttttgagaatatactttctrtacaaaatatatatttatgtttatgtatttttatttaaatatcatactaatatacagtcagttaattaacttatgtgattgact

SEQ ID NO: 395402 - DNA, 563 bp, Homo sapiens
ctcatatttgttcatagcttctgcttagatcagacagctggcctcagatatcctaaggatttttcaatgctctgggacatgcaatcaagcagagtttaaaactactgcagttccagtgactgaaagaagccagaggaatttcagtagggtactgtgacaagaagcagagaaagagacattgatttatcgttagaacacaccactgcagaggtttaggaagagcaattttggcagaggacaagggctaacatccagtgagcctagcactagggtgattcatgaatatcaagctgtgaagaccatcagatcttcacccaccagatagaatgaccgagagatcccrgggggctgtaattcttatgtccaatttctagccttgcattattgaaaaaaaggaggctgggcatggtggctcacacctgtaatcccaacactttgggaggctgagtggggggtggggagtgggtcacggatcacttgaagccaggagttcaagaccagcctggccaacagggtgaaaccccatctctctaaaaatacaaaaattagctggacttggtggc

SEQ ID NO: 395403 - DNA, 563 bp, Homo sapiens
ctcatatttgttcatagcttctgcttagatcagacagctggcctcagatatcctaaggatttttcaatgctctgggacatgcaatcaagcagagtttaaaactactgcagttccagtgactgaaagaagccagaggaatttcagtagggtactgtgacaagaagcagagaaagagacattgatttatcgttagaacacaccactgcagaggtttaggaagagcaattttggcagaggacaagggctaacatccagtgagcctagcactagggtgattcatgaatatcaagctgtgaagaccatcagatcttcacccaccagatagaatgaccgagagatcccggggggctgtaattcttatgtccaatttctagccttgcattattgaaaaaaaggaggctgggcatggtggctcacacctgtaatcccaacactttgggaggctgagtggggggtggggagtgggtcacggatcacttgaagccaggagttcaagaccagcctggccaacakggtgaaaccccatctctctaaaaatacaaaaattagctggacttggtggc

SEQ ID NO: 395404 - DNA, 361 bp, Homo sapiens
cacatgccagtaatcccagctactcagggggctgaggcaggagaatcacttgaacccaggaggtggaggttgcagtgagccaagatcgtaccactgcactccaccctgggcaacagagtgagactccatgtcaaaaaaaaaaaagaaactgctactactttctttaaggacaggaataactgcttcttggggatgcagaacacaacttgaaaccttggattttctgtagttagttcatttagcactaaygtattgtatataggaagcttaaaacaaataatatattccaaatagcagagcaaaaacacaaattacaataattatgctgatggtgaatttcccaatggcaaacatggaagtc

SEQ ID NO: 395405 - DNA, 488 bp, Homo sapiens
agcattgcgtacattatataattatcttcccttaaaaaacaaaaagaaggaaaagaacatcacagctgttcccaaatgacaaagtcacaatgtgtttttctggtgtggttctaatcaaaagcagtcttcctgagggaggcaatctcttctggaacaagcatgatttttaaagttacgtgtacactgctccttcatgatttcatcattgtgaattgatgatggtttactttaataagttttggcatctggaaggagtaaacagtacactttgtatgaagcaaggtccctttagaattttctgttcactyatttcaccataggtaaattagccatgactgagttttagacgagacaaaggggaaaagatgtcctcctggtcctgtcagcatttctgaaaggtttaatcctaacagctgaagtgaagatgatgaattacatcatcatttatgaccaatcaagcagaggaaagggccaagacagaaaagaat

SEQ ID NO: 395406 - DNA, 593 bp, Homo sapiens
tgtgggataatttacatctttagcggcaaccctcaaatggaagaagaagccaatgaaaacagacttccatccttcgggtgaacaattcacagatagttctggcaaattcacctcaggaagcttgtttatgccttctcgcattagcttttcttccctccttgcctttttttactcttcttgttgccttattcctgatttttgcaatcacctttcaaataaaacaactgcrcccaggtccttgtcactagctctgtttataagggatcctaaactaagatagttggtcattgtatattaatctgactgatgtttctctgaaggcatacagtcaaaatcgaaggctacaaaccataatttgatttttagtaaaggtaaagatttggtaagtactatacagaaatacttaacatacttcatttcacctgcaaaaatgggtatgttttgtttatactctacctatgtctatgcaatgctatagttgaattaaattttgcaaaacaaatctgacattaggaatttcctgcgttagtaaaaatcaactcttatccctttatgatatgagtttatgttcatattactcataagtaggtgat

SEQ ID NO: 395407 - DNA, 441 bp, Homo sapiens
gagaaacacagctgtgtgcatatatctacacacacgtgggtgtgtacacatgtgcatgcatgtgcaggsacacagtgacaggagcaatgcatttgtgtgtgtgaagtcactgaaatatttggttgttttggagaaggccttactactgctcacaaatatttcttttattatgtttctatgttcatgagaaaatgttctccccgactttgaagttaattgtggtcatgtgaactgttttggccaatgacatgggtgtagaaatgatgagggtcactcattttaatgcatttaattggtgagataatggtctccagagaaataaatcagtgtttctttaagtctctgaattgtgtaggtttcatatttctgtagaataagctagtgtatctgacatttttaaattttaattttagattcaaggggtacatgtacaggtttgtt

SEQ ID NO: 395408 - DNA, 405 bp, Homo sapiens
tcagacctgggccataggattttcctatgtgtaagccttatgctttctctcaatccagcagctgcatgaagactctggagtgggatagagtcaaaaaatacaagagaactgggtctccaaatgatgatgtggaacagatcactggagaaacacagctgtgtgcatatatctacacacacgtgggtgtgtacacatgtgcatgcatgtgcagggacacagtgacaggagcaatgcatttgtgtgtgtgaagtcactgaaatatttggttgttttggagaaggccttactrctgctcacaaatatttcttttattatgtttctatgttcatgagaaaatgttctccccgactttgaagttaattgtggtcatgtgaactgttttggccaatgacatgggtgtagaaa

SEQ ID NO: 395409 - DNA, 551 bp, Homo sapiens
gtgcatgcatgtgcagggacacagtgacaggagcaatgcatttgtgtgtgtgaagtcactgaaatatttggttgttttggagaaggccttactactgctcacaaatatttcttttattatgtttctatgttcatgagaaaatgttctccccgactttgaagttaattgtggtcatgtgaactgttttggccaatgacatgggtgtagaaatgatgagggtcactcattttaatgcatttaattggtgagataatggtctccagagaaataaatcagtgtttctttaagtctctgaaytgtgtaggtttcatatttctgtagaataagctagtgtatctgacatttttaaattttaattttagattcaaggggtacatgtacaggtttgttaccagtgtatattgcgtgatgctgaggtttgggcttctgttgatcccatcacctagtgcccagaggaagtttttcagccctttctcttcttccctttcttcctccttttggagtccccagtgtgtatttttcctatctttatgtccgactgtaaccaatgt

SEQ ID NO: 395410 - DNA, 589 bp, Homo sapiens
tttaaattatttcctcctatttgtgtatcactataaacagatgtggaggatgagatataggatatattttaaatggaaatattgtattgctttgggaaaattcaagacatttagtgcctgaagacctccagatcttgaaatttaagaaaatgggatcccacagcagtaatggctgagccagaatcctcagtattcttgtgggtgttcctgcccctacattgtcaacttcaatttctgccatgagaagcacctaggacagagtttggagacagcaagaaatatggcaatattggccagtctgctgacttactttagaaatttggytacttttcatgtctttcttttgaaacggaggaaaaaatttacctagagtttaagatctcttatttagtacaggagcttccaatttttaatagcataaacttaataatgaaaaattataggccccttacgttgtagtagttgttctcttagaatctactgattaagacaattcataatgatataaaactctctattagatcactatgcacttaaagaatatagattttattaaaatccatgcatccatattcattattcatgctgc

SEQ ID NO: 395411 - DNA, 577 bp, Homo sapiens
agactgttatctcattacaagagaacacaaaaagtcaaattagctggaactgagataaaatctgagacagcacttaagataggaagtctttatacaatggtcaagttcatctgagtcagaaactcttgaatggtccattaactatgggcctttctaccctaatcactataggaaggtatcctaggatataagaaaggaatttacttaccttaaccaagtccacaataagcagatgggctccttattacacacaactcacagaatggttacaacccatagggggcagcataatgttttaaactgtactgagccctcaataactattgttccttattctatcctaagatgctatcattctgccattcttcatttttcaatacactaacatttacctactcctatcatgtgaatcatattttcctttgtatttttttatttattccatccataaacctygttttattgcaaagaaagaaatgtgatgttctttcaggaactcatagcttagttggggaggctgatatgactgtttttgtgtcttggtgataaatgcaaaaataagcacatatacatttta

SEQ ID NO: 395412 - DNA, 589 bp, Homo sapiens
agcaagaaaaaagcaggagcatgacgagaaaagcccagaataataacgtgacggtattattacatgtttcttaaagaaataagaaaatgacaaaaagtacaaaagctaattcaaaagtctttatactttgacaaaaagtacaaaagacacactatgtgtgtctctgggttttatgaatatctacattgtttatgaataaaataagaaaattctttgctttcattgaacccttttggtgtgacctgctattctttcataagtttgggttcagttttcttttgtattttartattcctcttccctatggatgtatgattccgaatttgatatgtggaagaaagaatcacgcagatgtctagaattcttatctcttctcccagtaggtttgtttttaattcactctcccacacttgtacttctaacctccttaataaaaatgaaatccctttttattcattagcattttaatagaaaaagaagactacaataatagtatagtctatgtccatatgctatgttaaataggacagagcattccataattcccagaagaaaagtttcatgcagactaaatacagcattttgattg

SEQ ID NO: 395413 - DNA, 589 bp, Homo sapiens
agcaagaaaaaagcaggagcatgacgagaaaagcccagaataataacgtgacggtattattacatgtttcttaaagaaataagaaaatgacaaaaagtacaaaagctaattcaaaagtctttatactttgacaaaaagtacaaaagacacactatgtgtgtctctgggttttatgaatatctacattgtttatgaataaaataagaaaattctttgctttcattgaacccttttggtgtgacctgctattctttcataagtttgggttcagttttcttttgtattttagtatycctcttccctatggatgtatgattccgaatttgatatgtggaagaaagaatcacgcagatgtctagaattcttatctcttctcccagtaggtttgtttttaattcactctcccacacttgtacttctaacctccttaataaaaatgaaatccctttttattcattagcattttaatagaaaaagaagactacaataatagtatagtctatgtccatatgctatgttaaataggacagagcattccataattcccagaagaaaagtttcatgcagactaaatacagcattttgattg

SEQ ID NO: 395414 - DNA, 483 bp, Homo sapiens
caacgggtgtcagataattaggctctgttctcaagggcacacagtgagcttttctaaaggcagtctgaaaatcatagtcaagtgctctaagtctgtgtcctagagttggtgggaaatgtctagtcaaacacgagatgtgaaaggttttaccagacatgcggtcattttgtatgatgtacggctattctgtcagttagattaaagtaaggatwggtaagcccattttacagatgataaacatgttcagggagattaaagtttgttcaaggtcaaagggaaacatcattaaggagaggatgagggaaaaaagctggagaggggagagaggaggagggggacaaccattcaggaatctggagctcttcttgaagatggtatcccatgcaaaatttgaaactgtagatgttttaagaacacataaatatgatctgatgtgggtttgggtgttagccttttttgttttttttgaggcggaatctcact

SEQ ID NO: 395415 - DNA, 564 bp, Homo sapiens
gcctactccactacctggtacactgtttggccacrtgtcctgtgtaggtccagcctgggccaaaagactcaattctcaggtttttattagactcccccttctcaggcctagacattgagataatggaggagaaacccaactcagaagatgcccagtctcgaaatgggttccagcaatgtttcatatcttacttaaagtgagatctaccccagagacttggtggttcagtgggcaatcaatctctcccttcctccaacccctgacctcttttgcttaagctatttgagtcaggtctttaaaaactgcatggaaagatatctaaatagcatacactttcacggctattaaataagccaaagtgtaaaaatgataatgaccgatctgttggcaagagcatggaaaaatagactctttcctacacaacttacagaaatataaattgactatatatatggaatacattaaatatatataaataaacttaaaaatgtgcgtgtcctaacactcaaaaatcccactttaaaattttatcttaaataatcaagaatgtatgagacaaatttg

SEQ ID NO: 395416 - DNA, 564 bp, Homo sapiens
gcctactccactacctggtacactgtttggccacgtgtcctgtgtaggtccagcctgggccaaaagactcaattctcaggtttttattagactcccccttctcaggcctagacattgagataatggaggagaaacccaactcagaagatgcccagtctcgaaatgggttccagcaatgtttcatatcttacttaaagtgagatctaccccagagacttggtggttcagtgggcaatcaatctctcccttcctccaacccctgacctcttttgcttaagctatttgagtcaggtctttaaaaactgcatggaaagatatctaaatagcatacactttcacggctattaaatragccaaagtgtaaaaatgataatgaccgatctgttggcaagagcatggaaaaatagactctttcctacacaacttacagaaatataaattgactatatatatggaatacattaaatatatataaataaacttaaaaatgtgcgtgtcctaacactcaaaaatcccactttaaaattttatcttaaataatcaagaatgtatgagacaaatttg

SEQ ID NO: 395417 - DNA, 607 bp, Homo sapiens
agcaggcaacagaacatgtgcaggggaactcccatttgtaaaaccatcagatcttgtgagattgattcactactaggagaacagtatgaagggaaccacccccatgattcaattatctccacttggccctgctcttgacacgtggggattattacaattcaaggtgagatttggcaggggacacagccaaactatatcaccgtgcatggccactcctacttgatctgatcaatttacctatccaaacacttgagaaccarctgtattaaagaggcacgatttggcattttccaaagaagagctaaaacagtctcttgctcctacgggctgctggataatcagagatttctgtctctaaggaagtgtaaacatcttggggtacttgttaaaataaacagctttctgaatcccttggggagagtggattctgtaggtctgaggtggaaactagttttaatgcactcccaggggttgtggagtgggcccctctgctctggatctacttggatcaacaggctcaagtggtctctttggacaactgattcacgcaaagtcatgcccaggctttttgataacttactcttgtccaggcaaggagttttcctcc

SEQ ID NO: 395418 - DNA, 576 bp, Homo sapiens
gattttgtagaggtagaaactgaggctcgaagagatgaaagctacctacctggaaagtgaaaagcgaaccagatctgcccagctgttttcacactgctggttctccaggtgagccaagtgtctaagtttcagcggcagaggaggcactggcatcagcattgccctagcatcctgccccaggtagccaggcatgatcaggtctgcaggctgctgcttatgcatgagattcaaggaaagctggtagggcttaggggcccattggcaccacagtttctagatccgcaaagagactcctgggattccagatggctttccagtcttttccacttgtctcttacagaagtctttctagctgagtggtcttcctttggccccctggaaactctcatgattttctgattttattcattctgttcctctcacttgaatgcccatcttttcatccaccctaccaggtaggtgaatcttgttttgtaggattcaattcatgtcctaccttttctataagatccccscgggccagaccagactttttttgcaaaatcctttaacatcatactgctcatatggttctaa

SEQ ID NO: 395419 - DNA, 625 bp, Homo sapiens
cactgctaacacttaactgggaatactgaaccattgctcctagagaaaatacagggttagtttcctgtgaggctttggtcatgacgttttggtcaaccaatcaagacataactctgtttgatgtgtgcttttgtttaaagatacctttttaatacaygttgttgattctttaacgtggaactcagccaacagcaagtgaaggaagcttatctaacacacgcattttctccgtaaggtacattacagaccttggagcttaggaacactaggcagcaattcagcaccatgcttggggccattttaaatagcagatcaccaaaaaagcacaaagattcaaaaaacgtgctactaaatagaccgcgaaaaagacatttgtttacaatgtgagggttgaaacgagaagacagagcatcgcctcattggacctcagctggcaaagtgcacaccaggtgactcaaatttttcactgcactgcacatgtcctgaaataactgtgaaagagccatgagtattgatcagggggttacaaatacatttcagcaagtagacaaattcacaaatatggaatccacaaataatgaatagcaactgtgtattgttaagatttaggtcaattatcctccag

SEQ ID NO: 395420 - DNA, 625 bp, Homo sapiens
cactgctaacacttaactgggaatactgaaccattgctcctagagaaaatacagggttagtttcctgtgaggctttggtcatgacgttttggtcaaccaatcaagacataactctgtttgatgtgtgcttttgtttaaagatacctttttaatacatgttgttgattctttaacgtggaactcagccaacagcaagtgaaggaagcttatctaacacacrcattttctccgtaaggtacattacagaccttggagcttaggaacactaggcagcaattcagcaccatgcttggggccattttaaatagcagatcaccaaaaaagcacaaagattcaaaaaacgtgctactaaatagaccgcgaaaaagacatttgtttacaatgtgagggttgaaacgagaagacagagcatcgcctcattggacctcagctggcaaagtgcacaccaggtgactcaaatttttcactgcactgcacatgtcctgaaataactgtgaaagagccatgagtattgatcagggggttacaaatacatttcagcaagtagacaaattcacaaatatggaatccacaaataatgaatagcaactgtgtattgttaagatttaggtcaattatcctccag

SEQ ID NO: 395421 - DNA, 501 bp, Homo sapiens
gaaacaccttctcagggatactgaggccataagaaattgtcaagtctttgtcctaagggcttttatacagatgatgcaatgcatatacagaaaaatactttagctgtcttctatttctccaagaagaagaggaagcccatttcccaggctaagaaattatctccaagacragtttcttaatactcaagtttaaagaattctatcccaatggattaaaaagaaaagcctcaaacatcttcagcctttgtaactatttctgtctttgcttcaaacctgaccttctccgtgaagctttctctgagcttaaagcaatccttcccttttccacgtcccttcctgttcttccacgtagcatttatttggtcactaattagccattcagtgccctgtaacaatagcatgaattgctgtttagatccaggttatcatttcatttttatggctattccttggctttatgtctcacagcatggtgttacttttactgaaatcctctcctct

SEQ ID NO: 395422 - DNA, 501 bp, Homo sapiens
gaaacaccttctcagggatactgaggccataagaaattgtcaagtctttgtcctaagggcttttatacagatgatgcaatgcatatacagaaaaatactttagctgtcttctatttctccaagaagaagaggaagcccatttcccaggctaagaaattatctccaagacaagtttcttaatactcaagtttaaagaattctatcccaatggattaaaaagaaaagcctcaaacatcttcagcctttgtaactatttctgtctttgcttcaaacctgaccttctccgtgaagctttctctgagcttaaagcaatccttcccttttccacgtcccttcctgttcttccacgtagcatttatttggtcactaattagccattcagtgccctgtaacaatrgcatgaattgctgtttagatccaggttatcatttcatttttatggctattccttggctttatgtctcacagcatggtgttacttttactgaaatcctctcctct

SEQ ID NO: 395423 - DNA, 586 bp, Homo sapiens
atgggttttacacatacagaaagatgctcagcctaataataaaataaatgcatactagaagtacaatgaggtatcactttttgcctatcaaattggtaaagttaagaacatttaataacattgtgtgccagcatggtgtggggaaatagaaactctcctgtaatgggaaagtcacctgtacatcttccttggagggcaatttgacaatattgattgacttcacaaatgtctgtctcctttaatctgcaattctacttctagaaatttatcctcttaatgcaaaatggttaaatatctacatttgtgtatggtccaatgtaacacttgaaaatgatcaaagtaatgagtgtacaaagaaatcatacaatagaaataarcaaagtgtccatcattaggggattagataaatatgttatggtacatcctttcagtggaagaccgtgtggatacgtctttttaaataaagtattttcatttatactggtatgaaatgattccatgttatattacttagttagcaaaatggtatgcatagtatggtttcatttgagtaaaatataaaaaagaataccttcatgtatatttt

SEQ ID NO: 395424 - DNA, 586 bp, Homo sapiens
atgggttttacacatacagaaagatgctcagcctaataataaaataaatgcatactagaagtacaatgaggtatcactttttgcctatcaaattggtaaagttaagaacatttaataacattgtgtgccagcatggtgtggggaaatagaaactctcctgtaatgggaaagtcacctgtacatcttccttggagggcaatttgacaatattgattgacttcacaaatgtctgtctcctttaatctgcaattctacttctagaaatttatcctcttaatgcaaaatggttaaatatctacatttgtgtatggtccaatgtaacacttgaaaatgatcaaagtaatgagtgtacaaagaaatcatacaatagaaataagcaaagtgtccatcattaggggattagataaatatgttatggtacatcctttcagtggaagacygtgtggatacgtctttttaaataaagtattttcatttatactggtatgaaatgattccatgttatattacttagttagcaaaatggtatgcatagtatggtttcatttgagtaaaatataaaaaagaataccttcatgtatatttt

SEQ ID NO: 395425 - DNA, 611 bp, Homo sapiens
gtgtgagtcttcagtcacttatataggctcctgtgtcatgtaaaacttacattaaatccatttacaggagcaaaaacagaaataattcatttcatcacttaaaattatgtattataatgaactatagtttatttttctgccagtgagcacgaagttatctgttctataatattctggaatatgttcataggcattattattattttttttattgttattattgagacagagtcttgctctgctccccaggctggagtacagtggcagaatctcagctcactgcaacctctgcctccctggttcaagcaattctcgtgcataagcattattttgaagttttatattccaggaagattaaaatgataaaagcacgggattcagagaccaaaagacctgggtttacgtctaagctgcatcacttactggccatgggactgggataagtcatgtaactcctttcatctcagtttcctcactgatactacaagggctccagtagtcacccttaaccccactgttatggccaggtttaatcaaatggcatgagttaaaaggacctggcactggggatrtggatataatgagaggcacccactgctaagtggtgcaac

SEQ ID NO: 395426 - DNA, 598 bp, Homo sapiens
tgcaaaattttaaaaactaataaatatgcaaataagacataactgggatatgtggcataacaaaaaaataaatatttggtctttgttcctcccacctctgtttctggcacagagctcctaaatttgcttggaatttcctgagtgataggggactatcttttgttattcataacaagtccctttcaacctcacctaagtttatctgatgaagtgacttatggggtgccctaggtagcgtctggatgggggttagccaccagcagggacaccaaccttgtgattcgagggttagaactttcagccccatgtcaggacctctgaggaggggagaggaggtggaagttgaggtcagtcactaatggccaatgattaaatcaatcacaccatgtaatgaaacctccgcacaaaacctctaagttgtggggttcagggagcttccaggttgagaagccccccaccaaccatgacccccatattttgctccaygcatctcttccatttggctgttcctgagctgtatttgttataataaaatggtaattataagtaaggcacttttgctgaactctgtgagtcatcctagataattaccaaattt

SEQ ID NO: 395427 - DNA, 643 bp, Homo sapiens
tccttattcttttattaaataggccattctgaacacatttgagctttgtttttttttttttttttgcaattaagagtcataaatgtgactatataaaataggacctgtgtattcaaatgtccttaacatatttagatgtgatataccgctgtagacttctatttcaaagtactccaaaacttctatggtatctgaattctttggttagattattctaatttttctgcctccttctttactctctggtataagagagcaaagcttcttaccctcacagagtggtatacctctgtgtccctgcttttacgactgcttttagcaagctctagcttttcttaattgctgcttctaatgtataactaaataggaaattagaaaagaaagcytgtaacaatagtttctgaaataaataagagctaagctttctaagaggctttcttgagagtaaactatatatctggccgtacaaagcccccatcagtgaattaccagtatctgaagtgatctgtttttctgtctgtcaggcaatgagctttctgaaggcaagcactgtatttactatgaaaatttagaagaccaataatttactgttcacctactatgtgccaggcgtcaccactccttccctctgcagggctatggc

SEQ ID NO: 395428 - DNA, 514 bp, Homo sapiens
agctaaggttattcctcatgaaatatatcatgttggatttttcaaaggaatgcagagtacaatcttggaaggacaagactaagaagagaacctcatggggaaatgaaaatattaaaacaaataaaaaataattgcgaaataaataaatcactttttcctctctttgcctagaaaatagccctgtatttcaaattacaactgcccttgaatgttctttttttcttttcaaccctatacattttaaagcatgttcttatttgatatataygatcctcttattggcaatagttttatgaataggatacacatataagatgacagagttgagcatatttttatagataggtgcgctaaccttcatacacattccaggtgattacattccataggatgccagaaagcatatcaagaagagaaactactttaggcatcctaacttgggcaaatgcatctcttctatcaaaacatttttttctaccttgcaacacaaagatggtagatgaagaaagatgtt

SEQ ID NO: 395429 - DNA, 514 bp, Homo sapiens
agctaaggttattcctcatgaaatatatcatgttggatttttcaaaggaatgcagagtacaatcttggaaggacaagactaagaagagaacctcatggggaaatgaaaatattaaaacaaataaaaaataattgcgaaataaataaatcactttttcctctctttgcctagaaaatagccctgtatttcaaattacaactgcccttgaatgttctttttttcttttcaaccctatacattttaaagcatgttcttatttgatatatatgatcctcttattggcaatagttttatgaataggatacacatataagatgacagagttgagcatatttttatagataggtgcgctaaccttcatacacattccaggtgattacattccataggatgccagaaagcatatcaagaagagaaactactttaggcatcctaacttgggcaaatgcatctcttctatcaaaacatttttttytaccttgcaacacaaagatggtagatgaagaaagatgtt

SEQ ID NO: 395430 - DNA, 422 bp, Homo sapiens
aaaaaatcacttataccaagaaccaggaaaattgcagcctgaataagaaaagactgagatgaatcagatgttggaattacctgacaagaattttaacaaagccatcataaaartgtttcaacaagcaattacaaacatgcttgaaacaaacaaaaaaattgagtctcagcaaaaacaaacaaaacaaaaatggatataaagagcaaaataaaaattttggaatggaaaaatagctgaaatacaaaacttgccaaatgggctgaacagtacagtggaaaagacaaaagacagaatcagtaagcatgatgagaaccagtatcattcacgaaatgtgaacaacagagagaaacatcagaaaccatggatatcagaagaaagtggcattatctttcaagtgctgaaagaaaagaactgtcaaccca

SEQ ID NO: 395431 - DNA, 422 bp, Homo sapiens
aaaaaatcacttataccaagaaccaggaaaattgcagcctgaataagaaaagactgagatgaatcagatgttggaattacctgacaagaattttaacaaagccatcataaaagtgtttcaacaagcaattacaaacatgcttgaaacaaacaaaaaaattgagtctcagcaaaaacaaacaaaacaaaaatggatataaagagcaaaataaaaattttggaatggaaaaatagctgaaatacaaaacttgccaaatgggctgaacagtacagtggaaaagacaaaagacagaatcagtaagcatgatgagaaccagtatcattcacgaaatrtgaacaacagagagaaacatcagaaaccatggatatcagaagaaagtggcattatctttcaagtgctgaaagaaaagaactgtcaaccca

SEQ ID NO: 395432 - DNA, 605 bp, Homo sapiens
taatatgtctcgatgacctaatgaaaaagtacaaaatacaacaagatcaaaaaaaagggggaaatttttctgtggttttcattttgaccaatttccttgayagctgtctgtggagagaggctgattaaaagtgtaagctttgcagtaagaccacatggattcagatcctgaccctgccacttattggctatgaccttgagcaagttacttaagtgcactgtgcctcagctttctcatatgtaaaatgggtataatagtgcctatcacatatggatattctgagtattaaatgagataatccatggaaagcaccaagaatgacagttcctaccttaccataaacactcaataagtgcagccattattcctttgtccttattcttccaaatgtacttgaataaaattgtacacaaaatattaagtattataaataaacattgttattggttagatggcctttctgcttaagtgtttctatgtatttgactttttccctcagattagacttttcaaaagtgtctctattttattcttttcaatgaattagttacaatttatattatgttcttatttttatcttaataatgtaataatgtgtataattc

SEQ ID NO: 395433 - DNA, 605 bp, Homo sapiens
taatatgtctcgatgacctaatgaaaaagtacaaaatacaacaagatcaaaaaaaagggggaaatttttctgtggttttcattttgaccaatttccttgatagctgtctgtggagagaggctgattaaaagtgtaagctttgcagtaagaccacatggattcagatcctgaccctgccacttattggctatgaccttgagcaagytacttaagtgcactgtgcctcagctttctcatatgtaaaatgggtataatagtgcctatcacatatggatattctgagtattaaatgagataatccatggaaagcaccaagaatgacagttcctaccttaccataaacactcaataagtgcagccattattcctttgtccttattcttccaaatgtacttgaataaaattgtacacaaaatattaagtattataaataaacattgttattggttagatggcctttctgcttaagtgtttctatgtatttgactttttccctcagattagacttttcaaaagtgtctctattttattcttttcaatgaattagttacaatttatattatgttcttatttttatcttaataatgtaataatgtgtataattc

SEQ ID NO: 395434 - DNA, 633 bp, Homo sapiens
tctcttatgaagatacatacacagatatgttcattgcatcactattcacaatagcatagacatggaatcaacctaaatgtccattaatggtagactgaataaagacaatgtggtacatatgcactatggaatactatgcagccatagaaaataatgagatcatgtcccttgcagggtcatggatgaagttggaggccattatacttagtaaactaatgcagcaacagaaaagcaaataccacatgttctcacaagtgcaagctaagtgatgagaactcatggacacacagaggtgaacaacacacacaggggcctatctacgggtgtagggtaggcagagggaaaggatcaggaaaaataactaatgggtaataggtttaatacctgggtgatgcaatcataggtacaacaaacccccatgacacacatttgcctatgtaacaaacctgygcatgtaccccaaacataaaacaaaagtataaaaaaaagaaacctacctttaattacatttgcagaaaatactctttttaaacctaaacaaatactagtcctacactctgtatctctgtatgtaattagatattgaagaaaaatggagaggttaatcttcagcaaggcaataaatacaacatc

SEQ ID NO: 395435 - DNA, 533 bp, Homo sapiens
ttgagtgtttctgaaagtaaaatatatctcatttttttgtcatgtaatgaataascagtaggaggaaaaatagaaatcatcggttatgtcagaaattaggtcattttcaaaatctttaagagtaaaaatgtctaaataatctcaatggcttagatgaatgtgagattcttttacctatgtcattaagggacaaattactgtgagcttcttcatgtatctattcctcttttactgttttatgaatatgatattagtatttaagtgtaataactactttattggactgctgacttttttttaagtaacctactttttaaaatattttgcaggctcctttaaaaatctaactatgctctattaaacagctttaagaactaaacgctattctctagcctgctgagtaaatatgaatttcacagttaaatacataaaataatgattacatcaaatggtcatgagggacatgtttttagaagtatactaattaaactacatccttcagacaacatgtttctacacttactagcaatgaa

SEQ ID NO: 395436 - DNA, 564 bp, Homo sapiens
attttataaaattttaattttacaaaatagcttattcgtactggtcaaaactctctaggtctttttttttttttttttttttttttgagacggagtctcgctctgtcgcccaggctggaatgcggtggtgcratctcggctcactgcaaactccatctcctgggttcacgccattctcccgcctcagcctcccgagtagctgggactacaggcacctgccaccacgcccagctaattttttgtatttttagtagagacggggtttcaccgtgttagtgaggatggtctcgatgtcctgacctcgtaatccgcccgcctcggcctccctaagagctgggattacaggcgtgagccaccgcgcccggtcaaactctctaggtcttaaaaactcaggaaaatctgaaaagttacacagccaagaggagcctaagaagacacggggaataaatggtttggagccttaaaaaaaatatgtattaggttagaaattttaaaaaatgaacaaattatggactttagttaataataatgtatcaatattactttagtaattatgacaaatgt

SEQ ID NO: 395437 - DNA, 587 bp, Homo sapiens
cctgccacttcagttgtgtcttcagcaaactgtagccctgacaaacattttgactataacctcatgagaccctgcaccagcactacccaactgaggcactccaatattcctgatctcagaaatagatttctattgtagattataaacatgtgttgttttaagccactaaattttggaggaattttgctttacagcaatgggaaagtaacatattcctatacttttacaactgatattctattcctaagtaattcctgagtatgattgttttttgacttattttgtggatttgtgcccctgcccaaatcttatgtcaaattgtgatcgccagtgttggaggaggggactgttgggaggtgataggatcatggtggtggatttamcccttgctgttcttgtgatagtgagtgaattctcacgagatctggttgtttaagagtgtagcacttcccactttcctctcttcctctttctcaggccatgtaagacatgcctcattcttcttcaccttccatcatgattgtaagtttcctgagctctccccagccatgcttcctgtacagcctgtggaactgtaagtcaattaa

SEQ ID NO: 395438 - DNA, 523 bp, Homo sapiens
tccttcagaggagaagatgcactctggtttctagaattttcagcttttctgctctggtttctccccatctttgtggttttatctacctttggtctttgatgttggtgacctacggatggggttttggtgtagatgtyctttttgttgatgttggtgctatttctttctgtttgttagttttccttctaacagtcaggtccctcagctgcaggtctgttggagtttgctggaggtccactccagaccctgtttgcctgggtatcaccagtggaggctgcagaacagcaattgtttcagaacagcaaatattgctgccttatccttcctctggaagcttcgtcccagaggggcactcacctatatgtggtgtctgttggcccctactgggaagtgtctccctgttaggctacacagaggtcagggactcacttgaggaggcagtttgttcattctcagagctcagcagctatgctgggagagccactgctctcttcagagctgtcagacagggatgatccaattt

SEQ ID NO: 395439 - DNA, 523 bp, Homo sapiens
tccttcagaggagaagatgcactctggtttctagaattttcagcttttctgctctggtttctccccatctttgtggttttatctacctttggtctttgatgttggtgacctacggatggggttttggtgtagatgttctttttgttgatgttggtgctatttctttctgtttgttagttttccttctaacagtcaggtccctcagckgcaggtctgttggagtttgctggaggtccactccagaccctgtttgcctgggtatcaccagtggaggctgcagaacagcaattgtttcagaacagcaaatattgctgccttatccttcctctggaagcttcgtcccagaggggcactcacctatatgtggtgtctgttggcccctactgggaagtgtctccctgttaggctacacagaggtcagggactcacttgaggaggcagtttgttcattctcagagctcagcagctatgctgggagagccactgctctcttcagagctgtcagacagggatgatccaattt

SEQ ID NO: 395440 - DNA, 523 bp, Homo sapiens
tccttcagaggagaagatgcactctggtttctagaattttcagcttttctgctctggtttctccccatctttgtggttttatctacctttggtctttgatgttggtgacctacggatggggttttggtgtagatgttctttttgttgatgttggtgctatttctttctgtttgttagttttccttctaacagtcaggtccctcagctgcaggtctgttggagtttgctggaggtccactccagaccctgtttgcctgggtatcaccagtggaggctgcagaacagcaattrtttcagaacagcaaatattgctgccttatccttcctctggaagcttcgtcccagaggggcactcacctatatgtggtgtctgttggcccctactgggaagtgtctccctgttaggctacacagaggtcagggactcacttgaggaggcagtttgttcattctcagagctcagcagctatgctgggagagccactgctctcttcagagctgtcagacagggatgatccaattt

SEQ ID NO: 395441 - DNA, 490 bp, Homo sapiens
cagccaaaaacctttcattatcttttaatattacatgaaagccttttcaaaagagaaaaccaaattttatgtttgcattagtgcatctttaatgataaagctagtttgtaataatattgtataaatgtaaccagttttaaaaagtttgaccgtaagttatgattttcataaagctcttataactctttataatttttgttaaacagatcaattgtctaagaaaaccttgttatttggccacatgggttcagattctggctccaaatcagtatgcttttattttaaggttttaacctacggggaaaacaaacctaaataatccccttcaaatcttagccaatttgcttatagccacagaaccttttttacaagatcaacccttcacaaatcmttttcaacttactttaaacactcagttttgtccccttcttttaggttaaggcaatctttaaagccctctgaactagacaaaattacattccctttaaca

SEQ ID NO: 395442 - DNA, 496 bp, Homo sapiens
ggtatgctgtccaactgaacatgcaaggcctttttggtaaagctccacagtttctcattctcttctacaccaccaagcatggcaatctcatcttcttggactaagccctctggagtgttaactctgtgttctatgagcttctggcaatcatctagtggtttaatggtctgtttaatggtgccaacctcttgcaaaagggtcaccaatcgctcatccaggagcttcccatgggttccctttaaatcatgaaaatgttgtttgagaacatcgcttgtctgtgatgcactctctttgatctctatgcctcccacagcccctcaagctggtgacccagctcccaccagtagttctgtaccacctccacgttctcaagggcctcctacagcagcagctcargctccagctccatcgcctgcctcatgcagctgctagagcaggttcccgactgttgagtctggggttttctgatgggaagatatttatcttctgatgtaag

SEQ ID NO: 395443 - DNA, 325 bp, Homo sapiens
ttgttgagttaatctaaataaaattatacctgctttgacacatcagaattttaaaaatattttctcaagatgcccatggcctcgtaagtgctatgtgtacaaattatacccttttcaaatcttaccttttatagcactttatggtcctatatatgargtattttgagatgggagcactttgtggtggtagaaacttcagatcatttattcacctgatttcttcaaaaatttggtgaaatcattatggtaagtattattatgcccatttacaaatgagaaaactaaaagtcatagtgaataattgatgtcatacagtgtgtgcatt

SEQ ID NO: 395444 - DNA, 325 bp, Homo sapiens
ttgttgagttaatctaaataaaattatacctgctttgacacatcagaattttaaaaatattttctcaagatgcccatggcctcgtaagtgctatgtgtacaaattatacccttttcaaatcttaccttttatagcactttatggtcctatatatgaagtattttgagaygggagcactttgtggtggtagaaacttcagatcatttattcacctgatttcttcaaaaatttggtgaaatcattatggtaagtattattatgcccatttacaaatgagaaaactaaaagtcatagtgaataattgatgtcatacagtgtgtgcatt

SEQ ID NO: 395445 - DNA, 467 bp, Homo sapiens
atacaggatgtccacgcccagagaaatacaaacttaagacaaacaaggaacaacttttcaaatattcctcaaatatttcatgggacatactatatactaaataaaaaaaatcactcagtattattcaaaattcaaattgaattcagctccctatatttttaaaaatagacttcttagaataaatttatatttatagaaaaatagtgaagatagtacagagttcccatataccccacaagccatctcctctcttataaacatctcacattacatttrttataattaatacaccagtagtgatgctatattattaaaagaagtctattctacataaaaacacatcaccaatcccaagatctttcagattttcttctattttattgtacaagttttatagtttttcattttcatttaagtctgtgatctactatgacaatttttgtaaaaggtgtgaggtctgtgtctag

SEQ ID NO: 395446 - DNA, 487 bp, Homo sapiens
tatttctccattatcaaactaatctagactatagaaagagactagttgtctgcaagattatcaatgatggaaagtctaacatcttccttgaaattcttatttaaatttcactagcttccacctaaatcatctctatttactataatcttggtgaagacagaaaatagtagatcaacaccttcaatgcaattgaggaccagaaattgcccgttccttgcccccgtttgtcctcacctaccctgcacatgccatgaatgttgcatctaactctttggtattcctgacaacactatgccytttcactctttgtctttctagagagtgttttctctttctttccacaagtacaatgttagctcaatattaatgatcaaaactaaaggtcatccctgcaaaaacatttctgtcttatcctaagagtcttccccttgttcttgctcgtgcaacagagtaacatgtcttggagttgtttaaatgccaatcttcc

SEQ ID NO: 395447 - DNA, 615 bp, Homo sapiens
tgctggtatagtgaatataaggaaacaggttcagctataccctgcatgttgtttttatttatgaagcatgaatatttgtgaggcacatctctcattcattctacaacaagtatttattgagcacctataatataccatgcatgaaaacagctctaagtttcaacacagagaggatttcttcttctgacagagcttgcatcacactaaatctcttactctatctttgcagaatctctccaacataagcatatcattattcttaccctatcctcattcagctcttcataaatgtctgctaagtcatttcaatataaaataaagtagcgaggatttttaattaggctctgtatttggagggtgactatcacagtttgaattgtgtttcccaccaaatttatatgttaatgktctaatacccactacttccgaatgtgactgtattagaagacagacactttaaagaagtaattaaattgggataaggtcaatagagttgtccctaaaccaatttgactgatatccttatacaaagaggaaatttagaaacaggtaatgagggaagaccatgtgaaaacacagggagaaaacagccatcttaaaagccaaggaaagcga

SEQ ID NO: 395448 - DNA, 585 bp, Homo sapiens
  misc_feature (1)...(585): n = A,T,C or G
ttgtaaaaagaataggaaagtaacagtgagttttaatatagtctacctaatatgccagccaattgctttccttttttgatatacaattaaggtggtaaaaattgattgctgaattatggtaaactgtattangtgatgaattgataagttctacagaatgataataaattatatgaatgttatcaccagctttaccaaaaagagaataatcttcaattttactggaactactctgataaagacatcaatgtgcaaatccttttaaaattcagtgtgaatttgaaaacataatttaagtattagctgtactacataaagwttcttcttctaaaaatttaagacaaaacacactttttgcaatctatgcaagaaacaatagaaaatcatttcgtgggcagaaggaaggacattctgatatttaggagactagtgttgattacttaatatgattacattattctttcttactagttcaaatttattaggatggtgcaaaagtaatggcagtttttaacattacttttaatgggatatgtaaccagaatttgaaacaaatacattaaaagtaatggcaaaaccacaatt

SEQ ID NO: 395449 - DNA, 612 bp, Homo sapiens
gtctcatcttcacctgagatcactgcaacctggacttcattttccatatgtctatcagcattttggtcgaagccattcaacaagtctctaggaattttcaaactgtcccacatcttcctgtcttctgagccctccaattctctargaagtttcaaacttttccaaattttccggtcttcttcttatccctccaaactgttttaacctctgcctgttacccaaattccaaaagtcactttcacatttttgggtatctttacagcagcaccctactctctaccggccctactctttaccgccctactgcagtactaatttaatgttattagtcagttctcatgctgctaatacataccagagactgggtaatttataaaggaaagaggattaattgtctcacggttccatatggatagggaagcctcaccatcatggcagaaggcaaatgagtagcaaaatcacatcatatgtggcactggcaagagagtatgtacaggggaactgcccttttatcaaatcatcagatctcatgggacttatacactatcaggagaacaacacaggaaaatctggccccatgattcattaacctcccactgggtccatcctatc

SEQ ID NO: 395450 - DNA, 594 bp, Homo sapiens
aaacaatactaatattttaaagctaaatatatagtcagagaaaagtttcaactatatcagtgactcccaagaaagtcatattgaaaacatcacaatgataacataacaaatgttgctccaaattaaaggtaaaatattctgacaattatataatcatttccatatgaggtagtttccaatgaatctttaagattataacaaatgacaaggagacatgttgtatatctttatctatattattaaacaaatcttctctaaaagaagagactcataaaatctaagaagtaargaggagcaagcatgaatattaccactccctcgactttttgaaagttggctaaaaatatccataataacagtatctataacatgtctacaagctagaaaaatagttgaaaaacaggtaaatgtgatgatagcaaaagatccagaaactatacatgactaaataaaaaattattgtgagagcatccccatgctgagctaggtatactaacaggggcatatattttaacatctctaaatttcagttttgttgactatagaataattttaaatctgtgcacgtcaggtgtttataatagagtataaata

SEQ ID NO: 395451 - DNA, 636 bp, Homo sapiens
agcatttctttccagtttcatcttcctttgcaattttcagcattagcttagatgttaaacaacggatcacaggatgtgtagaatgaacaaggggcaattctaatatgggccaaatgtattaacttcattcttggtattattgagatgtactggaggggagggcaataaagatgagtttcaactgcagcttactacacactaaactgacctaactgactacagtacatttttattcacaagtgatgacaaagggctgtccgtatgtacatgccacatattcattacaaatttcatgtcattttttgaaagcagtgcttgttttataatttatgaagtattacgatgcattattttctgataagatgtgtgaaggaacaaaatcccctgaaaccgtttcactgttagaataaaaattgtactgcccagtgactatcctgacctgctaattgcttcaaaatctgaattcatatttataatcacattttctaaggtatgtacatgctatgaacctttctttytagtgtctttcattacatgaagtgatatatgaggtactctgaagaaaatcaaagttttggcaagatatttttcaatagaatacttctacatacattattcatttttgaaaagatatta

SEQ ID NO: 395452 - DNA, 537 bp, Homo sapiens
agaaaaccatttaatgtaaagatttgtaaataatcacttcaaaagaagtgccttgttgctgtcacatttagtccatcttcatataattcttatctgggccagtttcttgggcatgggacatgtgcagttacacaagcctgtgctcttaagagggtcttacccatagtttaatgttctgctgttgtagtcttgaaattcttaatgatttaacaaggggtcctccattttcattttgcactgggccctgcaaattacatagcccatcctgatttctacarctatagaatagcacaatgggaattccatatggattaataatatgtgacacttacggctttttctatacgcttccaagtacttcatataaattacttcatttcattcaatggtagaattggtagatgcttaacttttaatgaaagacaaagtcagattcactctaaggattaaaaaatatatgtaacattacattttaaagattttcaaaaacaatttgttgtggaaatgaattattgtcatgagatattccccactaga

SEQ ID NO: 395453 - DNA, 537 bp, Homo sapiens
agaaaaccatttaatgtaaagatttgtaaataatcacttcaaaagaagtgccttgttgctgtcacatttagtccatcttcatataattcttatctgggccagtttcttgggcatgggacatgtgcagttacacaagcctgtgctcttaagagggtcttacccatagtttaatgttctgctgttgtagtcttgaaattcttaatgatttaacaaggggtcctccattttcattttgcactgggccctgcaaattacatagcccatcctgatttctacaactatagaatagcacaatgggaattccatatggattaataatatgtgacacttacggctttttctatacgcttccaagtacttcatataaattacttcatttcattcaatggtagaattgrtagatgcttaacttttaatgaaagacaaagtcagattcactctaaggattaaaaaatatatgtaacattacattttaaagattttcaaaaacaatttgttgtggaaatgaattattgtcatgagatattccccactaga

SEQ ID NO: 395454 - DNA, 600 bp, Homo sapiens
ttaatattatttttattgctgttttgacagtggttattgtccagccttttctcttactggcccatgttaatgtatttttaagtttcaaggctaactacctggttgacagagttccacctgaatagcaatttctggccaggcacggtgactcatgcctgtaatcccaacactttgggaggtggatcacttgaggtcaggagttcgagaccagcctgcccaacatggtgaaaccctgtctccactaaaaacacaaaaattagccgggcgtggtggcgggcgcctgtaatcccagctacytgggagtttgaggctggagaattgcttgaacacgatctcatcactgcactccagcctgggccacagagtgaaacttcatctcgaaagaaagagagagagagagagagggagggagggagggagggagggagggaagaatagcagttaccaggaaaagaggtcacaacatccttttggaatagaaaacaaaaggcaaacaaaaaaggaagaaaaacccactctgcacttaaagctgcctgagccattctgtgacccagattaaaatatcagaaaaagaacaaagccaccacctaaaaggtttaa

SEQ ID NO: 395455 - DNA, 600 bp, Homo sapiens
ttaatattatttttattgctgttttgacagtggttattgtccagccttttctcttactggcccatgttaatgtatttttaagtttcaaggctaactacctggttgacagagttccacctgaatagcaatttctggccaggcacggtgactcatgcctgtaatcccaacactttgggaggtggatcacttgaggtcaggagttcgagaccagcctgcccaacatggtgaaaccctgtctccactaaaaacacaaaaattagccgggcgtggtggcgggcgcctgtaatcccagctacttgggagtttgaggstggagaattgcttgaacacgatctcatcactgcactccagcctgggccacagagtgaaacttcatctcgaaagaaagagagagagagagagagggagggagggagggagggagggagggaagaatagcagttaccaggaaaagaggtcacaacatccttttggaatagaaaacaaaaggcaaacaaaaaaggaagaaaaacccactctgcacttaaagctgcctgagccattctgtgacccagattaaaatatcagaaaaagaacaaagccaccacctaaaaggtttaa

SEQ ID NO: 395456 - DNA, 535 bp, Homo sapiens
ttgagctgcttatcatgtccaccaagcagcaagttcctgacactgcaattggtgaagcccagcaatgccaggactctgcaactggatctatggttgtaaaagaacaatatgcacctaatttgccactgacacagctcagtttgataaatttctacagcaattccccttggaatctttttggttgagatattattcttattctaaagaagaaaaacttgtcctcatttgtttacatcttcctttttagtttttccccattctttcgtgatgcctgatgaatcatttttccttgttgctgggaagggggaagcgagattccttgtaatgatcatcacatacgtctagctctttgttatttttcttctaactccataaatactttttttattaactgaagaaactggaaaataggccctggcaattattatttctaagactgctattgcattgccacctacttcagaatgcttcctttactaaaatgtttgtaatacaggyttcatacttaacatatacaaatatcagggtaaaattt

SEQ ID NO: 395457 - DNA, 589 bp, Homo sapiens
ttcaatagtgaacatagcagacaaaataatcttccctttcaggaagcttgtattatatcgagggaccgagacaagagactagatgtgctattttagtgtgtactaatttcatcttgaatatattaagtaatctgattatattctcctacattttaaatatgattaatttagaaacaaatgtattgaacacattgtaaacatgtgacagtgtgtaacagctacaaaattttatacttgtcagttttgctgtttggtcatgcctatcatatacaaagagatgtttttcacaactatttcacaaactaaaataatcaaatgaaaccactatactaaagaagtgtaaaatatatgaagcccatctttaacatagttagatttttctttgccattcaatattttaaggatacagaaataccattagttttgctcaggttggtagtgtcgaagacaacaaaaaataaagttcacaaaattaaaggagaagcactttctcatttaaaaagtgatttatttctaatttcataggaagctctatttggcagtttatggractaattacacacttggtcaattgccttcctccattttt

SEQ ID NO: 395458 - DNA, 518 bp, Homo sapiens
caaaagctgtattcattagacttctgtgtagaagattctgcccaggaatcacaattgttatgctagyatattagtttcttaattaaacaaactttttttatatgcctattactgtctgactgtggagatagtgggattatgatgatctgtaagagccagtgtttatatagcttggaatataccagagtatacttacatgaatattaatgttatgaaagtaataacatgatggattaaatagttctttataattctcaaaaggctcaatcatacattcatgtccatcattacagttttcaaacactgaaacacattatcacaatcccatttgaagtatgttaaatattttgcccaagagcccatgagtggtaaatgcagacatagatctactatattgtaggtcaaattttctcaacctgagcattattaacatttgacttagatcattctttgttgtggacagctcctccatcattttacgatgtttgcagcattcttggcctgtagtcactacatgc

SEQ ID NO: 395459 - DNA, 518 bp, Homo sapiens
caaaagctgtattcattagacttctgtgtagaagattctgcccaggaatcacaattgttatgctagcatattagttycttaattaaacaaactttttttatatgcctattactgtctgactgtggagatagtgggattatgatgatctgtaagagccagtgtttatatagcttggaatataccagagtatacttacatgaatattaatgttatgaaagtaataacatgatggattaaatagttctttataattctcaaaaggctcaatcatacattcatgtccatcattacagttttcaaacactgaaacacattatcacaatcccatttgaagtatgttaaatattttgcccaagagcccatgagtggtaaatgcagacatagatctactatattgtaggtcaaattttctcaacctgagcattattaacatttgacttagatcattctttgttgtggacagctcctccatcattttacgatgtttgcagcattcttggcctgtagtcactacatgc

SEQ ID NO: 395460 - DNA, 518 bp, Homo sapiens
caaaagctgtattcattagacttctgtgtagaagattctgcccaggaatcacaattgttatgctagcatattagtttcttaattaaacaaactttttttatatgcctattactgtctgactgtggagatagtgggattatgatgatctgtaagagccagtgtttatatagcttggaatataccagagtatacttacatgaatattaatgttatgaaagtaataacatgatggattaaatagttctttataattctcaaaaggctcaatcatacattcatgtccatcattacagttttcaaacactgaaacacattatcacaatcccatttgaagtatgttaaatattttgcccaagagcccatgagtggtaaatgcagacatagatctactatattgtaggtcaaattttctcaacctgagcattattaacatttgacttagatcattytttgttgtggacagctcctccatcattttacgatgtttgcagcattcttggcctgtagtcactacatgc

SEQ ID NO: 395461 - DNA, 620 bp, Homo sapiens
agtggttcagtattcgctaattcaatgttcacaatgactttgtaaaaaaatgattaccatggataatgagaatcggtatacaaacatatatatacacagacatacacacatcctttttgtgtttaagaagttaaagtagaaaattgtagtataccagtattagttacagtctccaagaatacaactataaaaacatatttaagccattagtaaatttcattatattacaatcagaattcaaataattttgtttaatatttgcttctgaaactggtgcaccatttagctgttttgataccataaacaagtaaattttataaatgtagatatatgagatctttcagttattttgattgactcatttataaaatgtatctttgagtgagtctatattaggatttctccttttctgtgtaaattaagtaaaattcgatactttctctgctaactttatttaaacaatgcttcttgagctctctgttatttgataggaatttagtagttcagagaaatcaattgactcttctacttcaattttttgtctttctgaaatcttgaataaagsctttaaacctgatggcaatacctttatctctaaccctgttcatgtgagagtgcat

SEQ ID NO: 395462 - DNA, 574 bp, Homo sapiens
gggtttcataatcacagatttcaccacagactgaagatattttcaaaaataaataaatgaaaaataataaaataatacaaataaataattatgatgactatgtagcatctacattgtattaggtactctaaagataatttsaagtatacaaaaggatgtgcatagattatatgcaaatactatgccattttatacaaaatgagcatctgaggattttggtatccacagggttactgaaactgccccatatggatactaaaagacaactgtattcatttgccatatacaccaaataaattggaatttctcttttatctccggatactatttattcttaaacacaactattctgtttttattataatggctttatattatgtttgcatatcagataagatcatcttcactattctttcatttataacttttggctattttaaaatttttattctttaatatgagtttgaagtcataacatctaaaaacccctctacctcatcaaaaataaataaataaattcttcctgtagctgtctttgtacttggaactgcatatgttattttgagagaagagt

SEQ ID NO: 395463 - DNA, 574 bp, Homo sapiens
gggtttcataatcacagatttcaccacagactgaagatattttcaaaaataaataaatgaaaaataataaaataatacaaataaataattatgatgactatgtagcatctacattgtattaggtactctaaagataatttcaagtatacaaaaggatgtgcatagattatatgcaaatactatgccattttatacaaaatgagcatctgaggattttggtatccacagggttactgaaactgccccatatggatactaaaagacaactgtattcattkgccatatacaccaaataaattggaatttctcttttatctccggatactatttattcttaaacacaactattctgtttttattataatggctttatattatgtttgcatatcagataagatcatcttcactattctttcatttataacttttggctattttaaaatttttattctttaatatgagtttgaagtcataacatctaaaaacccctctacctcatcaaaaataaataaataaattcttcctgtagctgtctttgtacttggaactgcatatgttattttgagagaagagt

SEQ ID NO: 395464 - DNA, 574 bp, Homo sapiens
gggtttcataatcacagatttcaccacagactgaagatattttcaaaaataaataaatgaaaaataataaaataatacaaataaataattatgatgactatgtagcatctacattgtattaggtactctaaagataatttcaagtatacaaaaggatgtgcatagattatatgcaaatactatgccattttatacaaaatgagcatctgaggattttggtatccacagggttactgaaactgccccatatggatactaaaagacaactgtattcatttgccatatacaccaaataaattggaatttctcttttatctccggatactatttattcttaaacacaactattctgtttttattataatggctttatattatgtttgcatatcagataagatcatcttcactattctttcatttataacttttggctattttaaaatttttattctttaatatgagtttgaagtcataacatctaaaaacccctctacctcatcaaaaataaataaataaattcttcctgtagctgtctttgtacttggaactgcayatgttattttgagagaagagt

SEQ ID NO: 395465 - DNA, 531 bp, Homo sapiens
acaggagccttgtcactggtaattattggacaatggatagctcctggaacaaagtagtagtgaaattatttaaattttcacctataatgaactgtaatggtatatgggtgaaagaaaatgtactagtgggtgcaatatatcaggagttaagaaaaatgagggaaatgataaatgcaagaacaatgaaatttgacagctctgtctgggggcaactgtgtttagaaaaagataataaaatgctcttctcaatcagaataagaatatcacattttgagtgtgtgttgggggagcaaatattatgatctcgtaaagaactgtaaaatgcaagaatagtagtattcattaaatctctgcttaattcatcaaaatgtcttaaaagggcagatagatgttgaagactgatactagactcccactaaatagtagtcctaatcgtagtaattaacatggctgcaattgtgaggtatgtgcctattaatctstatgaatgcatgctcttttgcattcttaccagaaagaaggatcagaaac

SEQ ID NO: 395466 - DNA, 535 bp, Homo sapiens
caggatttgaatacagaacaatatgggatggggttgtgaagtacatttttggctgacggaccaaagacatgaagaacataaaagctgaggaaaactatggtcattgtagtcaaatcatggaatgaatgtaactgaaatgaaaccattagccaagaggcaagtggcaaaacccagagaatggaggtgaaatagytaaggatgcatatcacgaatggaaaaaaaaaaattcccttaaggaaaaacccaggaagatgctgaaattactttaaatctggaaaatcttttgaaagaataggcaaataaattgtaaaaataatctcctactatttattttaatatttcattggcaggactatcttcaacaaaacatgattaaattatggtttggaaatcatgatttgatggagatactagatatctgtcttaagtgtattttaactgttacatatccctttcattcatttcttagaacattttttggaaaaatttatctttaaaatatgatttagaaaaataatgtggttcttttttaggc

SEQ ID NO: 395467 - DNA, 592 bp, Homo sapiens
acaaattatttatctgctctaacactaaacagtaattgatgtttataataatggaattattaatgctggaagagaccagagataaactgaacctcatcttctcatttaaaaaactgaagtcacatagcaatggtgttgaagagccaacctttttgacctacctccatggctcagatggagtgttttcctgttatacttgtatctgaatttgcctactgctttatagttacattcaattgaactctataactttctgatttaataaggatttaaactacctaattatttagtgctaagaccatggttgagttttataagacacttcaaaaaattgtacatggggtcatacacacaggtgcaaactaaargggagtttagattgctcattgctcttccaaggtgaaatcaccattttatctgatgacttacaaatgaaaaatctggccaataaatctatttagtcagatttctcaacattgtgaatgatcctcctggtagccagatattatgtctatcatgacatgaccgcttatttcatgttgacttgttgttctgtgtggaacttcctgtggcactagagttttcttaagta

SEQ ID NO: 395468 - DNA, 524 bp, Homo sapiens
tgaatctttggtgtggaatgaaaaatgtgaacttcttactcatagtgtggtttttaaatatatgcagttgagtgatgattggatactattcatcatattgcctataatatatatttaccgataagcagtgagtgtaaaattgttgtagcttgaataagaaaccacttttgtagttttaaycagactttctcttaaaaacattagataaaataaaagattcaccggatggattctgatgaaaacgaaaacaaagtaaaatgactggcttagcagattctttgaaatgtagcagcccagggatgtaccaaatgtcgaattctagactgaggagtagagttcattggagtcttaaactctctgatatcacttaaagctggagtttattttaaaacaaatgaagcatgggccacctcatgatgcagtggctcctctctggttgaggagagggaaaattggaaaaactggtcgagtaattatcaataattttttttaaaaagaggatcccaaactgtaaaagattgaaa

SEQ ID NO: 395469 - DNA, 562 bp, Homo sapiens
ccaaaaaaactggctcaagagtgygccgtcattccctgtcctcgggggcaatttttataagacaaagatgatgtgttctttcggtgtctgagtagaatttgcccctgaactgtctgggctagtgtagtgttgtgagggtgggtttgaattctgtattccatttctttaatgctgataggattatttacattctctatttcttcataagctagcttcaaaaagttttattcttctaggatcttattcatttcagctaagtattctcattctttcccttgaggctgtctgcagtattctcatgagtctctaatctctgctgtctctttattgttttagctgctcttactgtcattcccaatctgctgcctctttagatatgtccccgtttattcctattgttgtttatttgccttttcccctttttcctgattaatcctctaagatgtttgttcatttctttagtgtcttcaagttctaacttttaggctttgtggatttactgcattattttatctttatttttctattccagtactttattttgtttcctttctactgtttt

SEQ ID NO: 395470 - DNA, 570 bp, Homo sapiens
tggcctcagtagatgaatccatgtgatcaagcctagtgatcagctaggattcttgaatctcgggacccgttgccagaataacaaaatgggggcttcctgtaacctcggctctttaaagcaacacttctgataccagggttagggtttcagaaaatgcagccgccttaggagcctcattggcagctactttccactaaaacatcttccatttctctctctcaggagtttcctttaacagtgtttacactcagatttggagagtcctgctgcacctggctgctgacccctatccagaggtctcggacgtggccatgaaagtactcaacagcatcgcctacaaggtacgtgccgggcgctccccaccgcgctccagctgctggttctcggttacgagtatgcatgccaggaactccaggtrtgcccgggtccacaccacggtttagaaagtaacgaaacgagcttcagcaaatatcttaaatctggagatgtacacagtacaccccaaactgtgtctgtgcagctcccacgtgggcagagggtgctggatttactgatgcctgtcaaagcaat

SEQ ID NO: 395471 - DNA, 570 bp, Homo sapiens
tggcctcagtagatgaatccatgtgatcaagcctagtgatcagctaggattcttgaatctcgggacccgttgccagaataacaaaatgggggcttcctgtaacctcggctctttaaagcaacacttctgataccagggttagggtttcagaaaatgcagccgccttaggagcctcattggcagctactttccactaaaacatcttccatttctctctctcaggagtttcctttaacagtgtttacactcagatttggagagtcctgctgcacctggctgctgacccctatccagaggtctcggacgtggccatgaaagtactcaacagcatcgcctacaaggtacgtgccgggcgctccccaccgcgctccagctgctggttctcggttacgagtatgcatgccaggaactccaggtatgcccgggtccacaccacggtttagaaagtaacraaacgagcttcagcaaatatcttaaatctggagatgtacacagtacaccccaaactgtgtctgtgcagctcccacgtgggcagagggtgctggatttactgatgcctgtcaaagcaat

SEQ ID NO: 395472 - DNA, 244 bp, Homo sapiens
tcctgacttcaactgacccgctcgcctcagcctcccaaagggctaggattacaggcgtgagccactgcgccagcctacttctggaatttttcttagaaaacccaatttgcggctatagctctgcccgccccgtacatgcaatagtttggracattttgtaaataaccagaactcgcatttcctttgcctcaagcgtctttgtctgtggtcccgtctgactcctccatggacgtcagttgtttct

SEQ ID NO: 395473 - DNA, 573 bp, Homo sapiens
ttttagtaatatattgcaataatttcagttagagtcaactccacagctcttaaataactactcatttatgtttctttattgctactccaacatatgtttttagaataaacctaaacaatagcatccatggatgactgcagtttaacttgaatggaattttggagcacagagagacactttgaaatgctgagcgggacactgaagctcctattcccttctacatagaaattgcttaagaactgattagatagctatatatgcattaggcaacatatyataaagacaggagaaggagttaaaaaaccttgcagatctcttctggtcatgattttcttgatcgaccatgctgtgtcttgagatatttgaagcatagatgtctgagggaatgaaatatgcatgttctgacatttctaaaaactaatatgggaaggaatagaaaaaatttatcctctcaatgtatcatattatcaaaggcaaagagttgaatagccaaataaatggtagtaaaggaaaattaccctctctcttttcctgtaattatttgaagagttcttaagccatggcccctggaaa

SEQ ID NO: 395474 - DNA, 573 bp, Homo sapiens
ttttagtaatatattgcaataatttcagttagagtcaactccacagctcttaaataactactcatttatgtttctttattgctactccaacatatgtttttagaataaacctaaacaatagcatccatggatgactgcagtttaacttgaatggaattttggagcacagagagacactttgaaatgctgagcgggacactgaagctcctattcccttctacatagaaattgcttaagaactgattagatagctatatatgcattaggcaacatattataaagacaggagaaggagttaaaaaaccttgcagatctcttctggtcatgattttcttgatcgaccrtgctgtgtcttgagatatttgaagcatagatgtctgagggaatgaaatatgcatgttctgacatttctaaaaactaatatgggaaggaatagaaaaaatttatcctctcaatgtatcatattatcaaaggcaaagagttgaatagccaaataaatggtagtaaaggaaaattaccctctctcttttcctgtaattatttgaagagttcttaagccatggcccctggaaa

SEQ ID NO: 395475 - DNA, 583 bp, Homo sapiens
agctggagtggctgggatgtggggagcagtgtcctraggatgtacaggactatggggccctgggtctggactacaaaaccattcagtcctacaaggcatctggtcctgttgtgggagaagctgccacaaagttttctgaattgccttctatgtcttttccctcattgtcttggatatttacatttggctcccttttagttatgtaaatatgtctagcaatttgttgccccacagattgcttgaattcttctcctcaaaagaggctttcttttccaccacatggccaggctgaaaattttccaaacacttacactctgcttctattttaaatataagttccagcttttataagtcatttatttgctcccacatcttagtgtaggctgatagagatagccaggccacatcttgaacaatttgctgcttagatgcttcttctttcagatacccaacatcatcattctcaagctgaaacttctacagagccctaaagcataaacagaatgcagccaagttttcttaaggcattacatgcataatatttgctccagtttccaacaggtttatcatttccatttgagac

SEQ ID NO: 395476 - DNA, 583 bp, Homo sapiens
agctggagtggctgggatgtggggagcagtgtcctgaggatgtacaggactatggggccctgggtctggactacaaaaccattcagtcctacaaggcatctggtcctgttgtgggagaagctgccacaaagttttctgaattgccttctatgtcttttccctcattgtcttggatatttacatttggctcccttttagttatgtaaatatgtctagyaatttgttgccccacagattgcttgaattcttctcctcaaaagaggctttcttttccaccacatggccaggctgaaaattttccaaacacttacactctgcttctattttaaatataagttccagcttttataagtcatttatttgctcccacatcttagtgtaggctgatagagatagccaggccacatcttgaacaatttgctgcttagatgcttcttctttcagatacccaacatcatcattctcaagctgaaacttctacagagccctaaagcataaacagaatgcagccaagttttcttaaggcattacatgcataatatttgctccagtttccaacaggtttatcatttccatttgagac

SEQ ID NO: 395477 - DNA, 423 bp, Homo sapiens
tgtctcaactggtacaataaccctagtgttgatatgatgggctaagcggggacaattgaaattctgatgtcatatttctcattttttttacatagatttctggtatgttgaaatgttgtagcaatttaraaagcctttggtcccagttttaaccacaattgagaagtcagttttctgaactaacaccaggagttggtaaaaaaggttaatgacaataatttataatgagctccatgcaaatcagaaatcaaaattcctggaatgaagctgagttgggaacataaggggatacacatatattaaacattgattctgtaacaaggtgacatagatacattttattcaataatgttagtgtaattccagattatttttgttgatctgtctacatagatggtggcccttaggtcttcccctgagaga

SEQ ID NO: 395478 - DNA, 537 bp, Homo sapiens
ttttatttgcacttctctaatgattagmgatgttgagcattttttcacatgcatgtatgtcttcttttcagaagtgtctgttaatatcttctgcccatttttaatgaagttatttatttcttgatttggttgttaatttacgttccttatagattctggatattagacatttgtcagatgcatagcttgcaaatattttctcttattctctaggttgtctgtttatgctgttcatagttatttttgctgtgtggaaggtttttttgctgtctcaataatctgtctaatattttcagtggggcattgaattctgcccctattattgtgtggttatctaagtgtccttgtaggtctcaaagtaagtaattgttttatgaatccatgtgttccagtgttgggtgcatatatatttaggacagttaagtcttcttgttgaattaaattttttaaatttaaatttaaattaggtcccatatgtcaatttttgtttttgttgcaattgcttttggcaacttcttcatgaaaactttgctagtt

SEQ ID NO: 395479 - DNA, 552 bp, Homo sapiens
aacaaactaggcgtagatagaacatacctcaaaataataaagccatctatgacaaatctacagtcaatatattattaaacagggaaaagttgaaagtattttctataagaactggaacaagacaaggatgcctagtttcaccactcctagtcaacatagtactggaagtcctagctggagtgatcaggtaggagaaagaaagaaaaggcatctaaattggaaaagaggaagtctctgttcactgatgacataattgtatacctagaaaactctcaaaaagactcctagattttgtacataaattcagaatagtttcagattacaattcttcttttttgtgttttccacttgcttggtaaatttttctccatccctttattttgggcttatgtgtttctttgcacatgagatgtgcctctagaagtcagcataacaatgagtatttacttgttattcaacttcccattctgtttgttttaatagggcaatttarcccttttacatttaagattaatattgttatctctggatttgatcctgtcatcatgatgc

SEQ ID NO: 395480 - DNA, 636 bp, Homo sapiens
gctgtcctgcaaaatgtttcatgtgcagttgagaataatgtgtattcatcatcttttcaatggaatgttctggatatgtcaaattcatttggtctatattgcagtttaattcccttgattcattttgattttctgtgtagatgatctgcccactgatgaaggtggggtgttgaagttccctactattgttgtattgcagtgtctctctccttttagatctattaatatttgttttatacatttaggtgctccaatattaggtgtgtgtatatctatgattatcataacttcttgctgaattgacccatttgattacataataaatttttcgtctcttttacagcccttgatttaagatatattttatctgacataagtagagctaaacctgctcttttttgattttcatttgsatagaatacctttattcatctgtttacttttattctatgggtgtccttacaggtgaagatagtctcttataggcagcatatagttgtaccttgtcttttattgattcaattaccctacatcttttgattgaataattcaaaccatttgcattcaaattaattattgatacatgtggacttattactaccatttttgtgattgttttctagttgttttgtagaa

SEQ ID NO: 395481 - DNA, 537 bp, Homo sapiens
ttttatttgcacttctctaatgattagagatgttgagcattttttcacatgcatgtatgtcttcttttcagaagtgtctgttaatatcttctgcccatttttaatgaagttatttatttcttgatttggttgttaatttacgttccttatagattctggatattagacatttgtcagatgcatagcttgcaaatattttctcttattctctaggttgtctgtttatgctgttcatagttatttttgctgtgtggaagstttttttgctgtctcaataatctgtctaatattttcagtggggcattgaattctgcccctattattgtgtggttatctaagtgtccttgtaggtctcaaagtaagtaattgttttatgaatccatgtgttccagtgttgggtgcatatatatttaggacagttaagtcttcttgttgaattaaattttttaaatttaaatttaaattaggtcccatatgtcaatttttgtttttgttgcaattgcttttggcaacttcttcatgaaaactttgctagtt

SEQ ID NO: 395482 - DNA, 596 bp, Homo sapiens
gatcacatcattggatcccttgcaggcattccagaataccagcctggagtgtggcaacttcactgggcacctgacccagaggagcaacaacactcacagtagtctggctcccagcgactctcaagcctaggggaagggggagtgcactacatcaagagaacatcctgaaagacaaaagaatctggatggcaggmcttgagtgccagattcttctgatggtaagaagcttctttctgcagaggcacacaggtacagtgctgggcttagcagggtaagtcttcagcccagtccctcaagtcagccatccctggtatacattaagggttttgaagaagatgaagtctttccccccttatcactgtaggcacagttggggcttctcccgtggaagcctggcatgggtgcaactataaacagcctttctggaacacgtcagggtgactgcatcctcacaggaggagctccctctaggctcaggcttcgatgaggtgcagagtcacaattcctttgtatttgtaacatcaacattcctacagatgaaaagtggtgcctgtataatctgagtagccaaagcacggcaacagcagtgtgtctga

SEQ ID NO: 395483 - DNA, 537 bp, Homo sapiens
ttttatttgcacttctctaatgattagagatgttgagcattttttcacatgcatgtatgtcttcttttcagaagtgtctgttaatatcttctgcccatttttaatgaagttatttatttcttgatttggttgttaatttacgttccttatagattctggatattagacatttgtcagatgcatagcttgcaaatattttctcttattctctaggttgtctgtttatgctgttcatagttatttttgctgtgtggaaggtttttttgctgtctcaataatctgtctaatattttcagtggggcattgaattctgcccctattattgtgtggttatctaagtgtccttgtaggtctcaaagtaagtaattgttttatgaatccatgtgttccagtgttgggtgcatayatatttaggacagttaagtcttcttgttgaattaaattttttaaatttaaatttaaattaggtcccatatgtcaatttttgtttttgttgcaattgcttttggcaacttcttcatgaaaactttgctagtt

SEQ ID NO: 395484 - DNA, 548 bp, Homo sapiens
aatctgttttttcatctctttatttttaatatacgtgtatctttataggtgwagtgtttttctttcagggaacagatcaacgggtattgttctttaatatattccgccatttattgtcttttgattggagagtttagttcatttacactcagtgttattattcataaataagaacttactcctgcaattttgttattcttttctggttgttttatggtcttctattttttctttcttcccttcctgtcttcctctagtaaaggtgattttctctggtaatataatttcgttttttttaatttttactttttgtgtctctactgcatgcttctttggtttgaggttaccacgagtctcatgaatattataactcattattttaatctgataacaacactatttacataaacaaacaaaaaaactaataaaaactctgtgccttctctttgcttctcccactctgctttttaactttttttatttctacttctgtatcttttagtacttagtatatcttcaaaagttgttgaagctattgtttttattgg

SEQ ID NO: 395485 - DNA, 548 bp, Homo sapiens
aatctgttttttcatctctttatttttaatatacgtgtatctttataggtgaagtgtttttctttcagggaacagatcaacgggtattgttctttaatatattcmgccatttattgtcttttgattggagagtttagttcatttacactcagtgttattattcataaataagaacttactcctgcaattttgttattcttttctggttgttttatggtcttctattttttctttcttcccttcctgtcttcctctagtaaaggtgattttctctggtaatataatttcgttttttttaatttttactttttgtgtctctactgcatgcttctttggtttgaggttaccacgagtctcatgaatattataactcattattttaatctgataacaacactatttacataaacaaacaaaaaaactaataaaaactctgtgccttctctttgcttctcccactctgctttttaactttttttatttctacttctgtatcttttagtacttagtatatcttcaaaagttgttgaagctattgtttttattgg

SEQ ID NO: 395486 - DNA, 468 bp, Homo sapiens
tgtacttttgactcagtcacagatttgagaaattttccattgagcgggtctgctggtaaacccacgttcattgtttgtttgttttaatctgaaaatgtgtttacatgattcttgaagatattctttgacaagaaacttccatatgtggtagcctatttgaagttgtcatttactatttcatcattgctgctaaaaagtcatttgttwaaaaatccgtgactctaactgttcttgtttgaaaggaatacgtctttttaagatactcagattccttttaagctcttcatctggccctccttttttctgattcaatgtattgtttaattttttacttatgactaattaatcaattaattttcacaatcacagaatcaaatgtccgataagttgctatgtcaaagacctgtctgaagatggcaaaaacactccacaataaacaaaagacaacaccatggtctcaggaacact

SEQ ID NO: 395487 - DNA, 554 bp, Homo sapiens
taggtttgaattaaattttgacttttttctcccaaaatatctcttgtcgaaacaacggatgtagagagaaatacattccctccaggcaaatctgtcaggcctggtctgacctgggaccctgcggacactgcccctttgctgagttaccgagatgagccagccccgtggctgtgcccagcctgccccatcccctgctgatttgtgtgtcctagagcgcagccccctgccctgaagacttcttaataggctggtcacaccctgtgcaggagtcagttgcagtcaggacacarcatgaacatgaggatccccgctcagctcctggccttcctgctgctctgtctcccaggtaaagaaggagaacactgggaagttagccacccagtgtgctcagtacagcctggctcttcagggaaatcctcgcataacatggtgaaaagtgtaaatatttgtttttgtatttccaacctgagatgccagatgtgacatccagatgactcagcctccatcctccctgtctgcatctgtaggagacagagccaccgtctcttgccagg

SEQ ID NO: 395488 - DNA, 542 bp, Homo sapiens
accaatgcaagaactccagtaactcaaatggcctctgtgtcatatgtccttctaacaaccacaccagttctccaacaagagttcttaacctggatgaactgtctggaattacataaatataattcagaatatggataggaaaaaaaatcatcaagactcaggagaatggcaaaacccaatccraggaaaataagaataacagtaaagtgttacaggagctgaaggataaagtagctggtataataaaaaagaacctaaccgatctgaaagcgccgaagaacacaatacaagaattccacaatgcaatcacaagtattaacagcagaaaaaaaaacctgaggaacgaatctcagaacttgaagattggttctctaaaataagatggacaaaaataaaaaagaatgaacaaaaccttcaaggaggatgggattatataaagaggccaattctacaaatcactggcatctctgaaagggaggtggagaaatcaaacaacttggaaaacgtagttcaggatatcatctttgaaagcttccctaacc

SEQ ID NO: 395489 - DNA, 542 bp, Homo sapiens
accaatgcaagaactccagtaactcaaatggcctctgtgtcatatgtccttctaacaaccacaccagttctccaacaagagttcttaacctggatgaactgtctggaattacataaatataattcagaatatggataggaaaaaaaatcatcaagactcaggagaatggcaaaacccaatccaaggaaaataagaataacagtaaagtgttacaggagctgaaggataaagtagctggtataataaaaaagaacctaaccgatctgaaagcgccgaagaacacaatacaagaattccacaatgcaatcacaagtattaacagcagaaaaaaaaayctgaggaacgaatctcagaacttgaagattggttctctaaaataagatggacaaaaataaaaaagaatgaacaaaaccttcaaggaggatgggattatataaagaggccaattctacaaatcactggcatctctgaaagggaggtggagaaatcaaacaacttggaaaacgtagttcaggatatcatctttgaaagcttccctaacc

SEQ ID NO: 395490 - DNA, 618 bp, Homo sapiens
aaactatcatgattcataaataaaaagattatgtacagagaaaattgcaaattatgttacagagaaagtagttatgacctgaatgtttgtgttcttccaaatttcatgttgaaacttaatccttaaagcaatattaagagttgggccttcaagagataattagttcatgagggggtctcgcttcgtgaatgagagaagtgccctaataaaagtgcacaagaaagcttgctagattattttttgcatttcttccacctgaggctgcagagaagggagcatctatgaggaataggccctcaccagacaccaaatattccagtaccttgatcttggacttctcatctccagaactatgagaaataaaattctattgtttgtaaattacccagtctaagtattttgctatagcagcaagaattggctaagacaggaattgctactgagaagtggggtgctgctctcacaacccctacacaacccctaatgtagaaatggctatgggtagwggctggaagagtttggaagtgtgcgctgtcaaagcctgtattgccacgaacagaccacaaagggtgactctggtgagggcttagaggaagagcagagctgtagagaaagcct

SEQ ID NO: 395491 - DNA, 459 bp, Homo sapiens
ttcctctaactgatgatattctgggcaatttcttcatttcttctagctaaaagtccaattacttttcaaaagctctaaggttttccacaatactcttagtaaggggcctggaaagagcaggccagctgtctataggtataggccattcataaatgggtatccgtaacatatggacccaccgttctgagactggccacgagtcaattgagaaagagtatgccatcacttgcagatgcccacaggagaacttggacatacagaagagggataactgagttgagactggagttgtgcagaatatatrtgtgtgtgtgtgtgtgtgtgtgtgtgtgtgtatgtgtgtaactacataatatattaatatacgtacagacataattttaaaagagcacaaatggaaacacatacataacacaaacgcagttacattaagagtgggggccagagggtccttttatc

SEQ ID NO: 395492 - DNA, 459 bp, Homo sapiens
ttcctctaactgatgatattctgggcaatttcttcatttcttctagctaaaagtccaattacttttcaaaagctctaaggttttccacaatactcttagtaaggggcctggaaagagcaggccagctgtctataggtataggccattcataaatgggtatccgtaacatatggacccaccgttctgagactggccacgagtcaattgagaaagagtatgccatcacttgcagatgcccacaggagaacttggacatacagaagagggataactgagttgagactggagttgtgcagaatatatgtgtgtgtgtgtgtgtgtgtgtgtgtgtgtgtawgtgtgtaactacataatatattaatatacgtacagacataattttaaaagagcacaaatggaaacacatacataacacaaacgcagttacattaagagtgggggccagagggtccttttatc

SEQ ID NO: 395493 - DNA, 619 bp, Homo sapiens
aaatcaaataagcatttgtgaagtgtcaactattttctctgcagtggtgcttttcaaactacccagagtgaaagacttttattttttgtaaaatgtaaaatattgtggcaatgtcagattgctataaaaggttttcaaatctgtacttccaggtacttcaaaattagtttgcagattagtaccagtggtcttagtacaatttgagtagctacagtaagtaaggagttgatacaaaagaaatacagcatattgtcaccatcattggtataagaatgttgtggggaggactaggcttacctatgtaaccagtggaaaatgcagcatatggtacaattactaaagataaatatagacataaagaagagcgatgataaaactgttctggatcccagttaaaatctttggggttactgcttaactctctggactcacagccccgacccaccatccccaatgtgcagtttcactcatggaaaaaaagtgtctagaccagcagctgaggatgcatttactctatgttcagcccactcaaaatacagttctgtaatcagaatacaaaaacaaccaccamcaacaacatcagcccaactttctttactgtgtttcatttaatgctgaa

SEQ ID NO: 395494 - DNA, 557 bp, Homo sapiens
ggctggtggattggcccacctgggagccacatggggcaaggggagccstcaccctcagccagccaagggaggcagtgagtgagcatgctacccagcctgggaaactgctttttccatggatctttgcaatccacagatcagaagatcccactcatgagaccacaccacgagggccttgggtgccaaccacagagccatgcagattctcaacagccactcagctggagtctgcctaaaactaccgagttcccaagttggggaggggtggtcatcatcactgtggctgcctgctgcctaaaccctctgagttccctgggggagggggagcaatcatcactgtggttgctggctgcctaagacaactgagcttcccaagagaggggcagtcatcatcactgcagctgcctgctgcctgaggaaactgagctccctaagaagggacagcagccatcactgtggctgctagctgcctaagacactgaactcctggggaggaagggcggcagccatttctacagatccaggctgctgtttttcctttgctgatgccaggaaga

SEQ ID NO: 395495 - DNA, 519 bp, Homo sapiens
gcttacagattttctctaggtgctctctaagcagagagaacagggtactggttaagattgtagatctaggggatcactgatctaggtcctattccaaatttgattcctcacctgctaagcttgcaagtgcaacttatttaaattctctgaaggttaaatgtttcatctaaatagggataataataaacacctatagcatagagttgtttgagattaaatgagataatacatgtaaaattatgtgcctggcatacagcaagattgttgttgttgttgatgatgatgatgatgatgataatatttttctatccccagtgcacaactgcttgaacctattasataatcaatacatgtttcttgaactgagatcaatttccccatgttgtctgactgatgaagccctacattgaagccctacattttcttctagaggagatgacatttgagcaagatcttaaagaaaatcagatgccttcacctgaccactgcttggtgatcccatggcactttgtacatctc

SEQ ID NO: 395496 - DNA, 597 bp, Homo sapiens
tctggctgggcatggtggctgatacctctaattccagcacgttggaaggttgaggcaggaagatcacytgaggccaggagtttgagaccagcctaagcaacatagggaaacccctgtgatatagtttggatctgtgtccccacccaaatctcatgttgaactgtaatccccagtgtggtaggtggggtctggagggaggtgactggattaggagggtggatttctcatgaatggtttagtactatctccttggtactcctcatgatagcaggtgagctctcacaagatctggttgtttaaaagtgtgtggtatctcccccctcactctcttgttcctgctttcactgtgtgacatgcctgctcccgcttcacaatctgccagtaaattgtggcaggttatgagtgtgtgtaatttatgagtgctgataggatgaaagatagaaaatgattttagatagaaagaaaatcattctggaagctttgagtcttccttttgtaatctatgttggttcttttttaacatcccctgtttcagcacttactgacctggagtctgtctcacaatgactaaatgtaatataagattctaggatgtac

SEQ ID NO: 395497 - DNA, 631 bp, Homo sapiens
tcattgtctgatttcagcattaaatgaaacacagtaaagaaagttgggctgatgttgttgttggtggttgtttttgtattctgattacagaactgtattttgagtgggctgaacatagagtaaatgcatcctcagctgctggtctagacactttttttccatgagtgaaactgcacattggggatggtgggtcggggctgtgagtccagagagttaagcagtaaccccaaagattttaactgggatccagaacagttttatcatcgctcttctttatgtctatatttatctttagtaattgtaccatatgctgcattttccactggttacataggtaagcctagtcctccccacaacattcttataccaatgatggtgacaatatgctgtatttcttttgtatsaactccttacttactgtagctactcaaattgtactaagaccactggtactaatctgcaaactaattttgaagtacctggaagtacagatttgaaaaccttttatagcaatctgacattgccacaatattttacattttacaaaaaataaaagtctttcactctgggtagtttgaaaagcaccactgcagagaaaatagttgacacttcacaaatgcttatttgattt

SEQ ID NO: 395498 - DNA, 407 bp, Homo sapiens
aaaacagcattttacacaaatcaagaaatagctcccaaccatgtctttgtggcattgttaaacaacagtaaattgtactttgagttctatttcatctaattaaatgaaatgagaagtgggcycaattcccccagaaagagactggagggaaccacaatctttcctgtgattagatacaccactaaggaaatctgaccctgagcaactgaaagctgcctattctcattaagaagagctacagactgacccttttcaaagactagtaactggacacatttctttcacaaattatcttcttttcccttcttcataccaggaattctcagggattataatcctcatcaatataacaagcctccaaagtcatattttttaactttgtgaaatgccctcccacctaactaccc

SEQ ID NO: 395499 - DNA, 407 bp, Homo sapiens
aaaacagcattttacacaaatcaagaaatagctcccaaccatgtctttgtggcattgttaaacaacagtaaattgtactttgagttctatttcatctaattaaatgaaatgagaagtgggctcaaktcccccagaaagagactggagggaaccacaatctttcctgtgattagatacaccactaaggaaatctgaccctgagcaactgaaagctgcctattctcattaagaagagctacagactgacccttttcaaagactagtaactggacacatttctttcacaaattatcttcttttcccttcttcataccaggaattctcagggattataatcctcatcaatataacaagcctccaaagtcatattttttaactttgtgaaatgccctcccacctaactaccc

SEQ ID NO: 395500 - DNA, 407 bp, Homo sapiens
aaaacagcattttacacaaatcaagaaatagctcccaaccatgtctttgtggcattgttaaacaacagtaaattgtactttgagttctatttcatctaattaaatgaaatgagaagtgggctcaattcccccagaaagagactggagggaaccacratctttcctgtgattagatacaccactaaggaaatctgaccctgagcaactgaaagctgcctattctcattaagaagagctacagactgacccttttcaaagactagtaactggacacatttctttcacaaattatcttcttttcccttcttcataccaggaattctcagggattataatcctcatcaatataacaagcctccaaagtcatattttttaactttgtgaaatgccctcccacctaactaccc

SEQ ID NO: 395501 - DNA, 407 bp, Homo sapiens
aaaacagcattttacacaaatcaagaaatagctcccaaccatgtctttgtggcattgttaaacaacagtaaattgtactttgagttctatttcatctaattaaatgaaatgagaagtgggctcaattcccccagaaagagactggagggaaccacaatstttcctgtgattagatacaccactaaggaaatctgaccctgagcaactgaaagctgcctattctcattaagaagagctacagactgacccttttcaaagactagtaactggacacatttctttcacaaattatcttcttttcccttcttcataccaggaattctcagggattataatcctcatcaatataacaagcctccaaagtcatattttttaactttgtgaaatgccctcccacctaactaccc

SEQ ID NO: 395502 - DNA, 604 bp, Homo sapiens
tgtggcctcctccctctcctttgccaccaggttcataggtgcacagcccactgagtccacccctcaggggttatcagtttatctacttgtcctcattcccactgtggccacagtccaggccaccgtcatcttttgcatggagtgcagcggaagcctccaagaactctttccatcctgtccatccattcttcactctcctctcagcatacagagttccctggctaagcccctcacctgcccctgaactcaggtcaagtccagcttccccaacctggcttccaagaatcctccagattgccttctctaccctgtgacctccttccccatcatgcctggtggctggctggtatggcatccctgagaacygaagggccattccatcccactcagcggccgtcctcttctggacacctggttccagaattgcttgggactccggagaatatcttgaataagagccttgactagggaatcccacgccccacagccagaccagtggcaacaacctgctaacagagggagaatatggtctccaagtggccactctgtcctgacgacagcctccttgctgaccatggttcctggaggcagagaggcatgagtt

SEQ ID NO: 395503 - DNA, 604 bp, Homo sapiens
tgtggcctcctccctctcctttgccaccaggttcataggtgcacagcccactgagtccacccctcaggggttatcagtttatctacttgtcctcattcccactgtggccacagtccaggccaccgtcatcttttgcatggagtgcagcggaagcctccaagaactctttccatcctgtccatccattcttcactctcctctcagcatacagagttccctggctaagcccctcacctgcccctgaactcaggtcaagtccagcttccccaacctggcttccaagaatcctccagattgccttctctaccctgtgacctccttccccatcatgcctggtggctggctggtatggcatccctgagaaccgaagggccattccatcccactcagcggccgtcctcttctggacacctggttccagaattgcttgggactccggagaatatcttgaataagagccttgactagggaatcccacgccccacagccagaccrgtggcaacaacctgctaacagagggagaatatggtctccaagtggccactctgtcctgacgacagcctccttgctgaccatggttcctggaggcagagaggcatgagtt

SEQ ID NO: 395504 - DNA, 547 bp, Homo sapiens
atacactcttagtttctgtttctctctctctgtgtctctctctagttctgccttcctgtgtatctttctattttccacctctgtttttctctgtawatctctctgcctctctgtatatctctgtatgtcctgtatatctctctgcctctctctgtctgtcctctcacacacagatacattcttccctttctgtaattaatcttgtccacaccccctctcccgttacatgaactacatacagtgtcactgtaataccaaatcattacatacttaaataccatgaaagtctcagtgctgccacaatattaccaattctgttacagtcatcatcctcagagccaaccatgtatcaatcactgtgctgggcactttatatgtgctcactcctttaatctgcacaaccccaccagtagtctgactattatcccattttggagaaggagtaagtaactgaggctcagaaagatggaaaatttggcccaaagcacacacctggtgttgaggccaggatccacacctgagcaatctgccctccacccctacccaa

SEQ ID NO: 395505 - DNA, 461 bp, Homo sapiens
ttagtttatatgctaattgtctggctgcctccactagaacccatgcccgttaagagcaggacatcygcccatctattccagtctaccactccccaaccccctggaatagtgtctggcatgtgaaaagcctttgctaaatattcgttggctgattgaatgaatacatgataaatgaatgaatggtgaccctgacacgtgctctcctagacaaagttttgcagtctggtcctgtcctagctcattgccatatcccacactcttgacctttatactaaccagcccaacatccccaagcacctctcaatcactgctcatttattcattcagtaaacacttattgaatgcctactgtgtgtcaggtactgggcttggcgctggggattcaggggagagccaaacagatctggtctctggactagcatacagtctagtgggcctacatagtgagtctcagatgtgca

SEQ ID NO: 395506 - DNA, 458 bp, Homo sapiens
gtctaatatatttcatattatatacacatatatctattatacacttggtctgaaagttaatattacaaatattgtaagaatttacatttgtacatttatattatgtaacatatttaatgatgtatatagartatatgtctatatctaacacattttttactgcatgtaaaatatactctatataacatagagcattagaaatacagtataatatgtgtatatgttacattgggactctatgtgaagtatatgtatataacaaattggaactatattgtaatacacagtaaatatcaatatgtatattttatatattatatatttgaatatatgtgtatatttatatttatatttaagacatatatcataacattattaagcattataaaaattgttatatcttgtatagatgttttcataacttatgcttatttatacctttttggtcaggaatgcaa

SEQ ID NO: 395507 - DNA, 583 bp, Homo sapiens
ctgagacaagtaatggtcaggcacacctaaggctaatactgttctctgttacactaagcttgaagcaaattattaaactatgggtcatggaaatgggtctctaattatgagtcaatgtgatccttggaataattctttgatatattaacagtattttggaaagaatgacattcaaatttgcaaattaagaaatatgtgctatttgaaactgaatgttccaggcagatasctaactaaatttatttagtgatgcaaaagttaactggatatgggggaaaattcactgggaagaggtaaagtagaaaatattttttacttcctgtttactatgtattaataaattaaacttcatttatataattatacaagtgtgaggccaaatttatttaagctaattcaaagctaatgctagattccattattgcaaagacattcatttgggttataaagaacaatgttaggagacatatgatttaaaaagctttggagctgctggcatggaaatcagcaataaaaaatttgagaaggcagagataattaatgagctaggattcaaataaagtgactttgaattatggttgga

SEQ ID NO: 395508 - DNA, 583 bp, Homo sapiens
ctgagacaagtaatggtcaggcacacctaaggctaatactgttctctgttacactaagcttgaagcaaattattaaactatgggtcatggaaatgggtctctaattatgagtcaatgtgatccttggaataattctttgatatattaacagtattttggaaagaatgacattcaaatttgcaaattaagaaatatgtgctatttgaaactgaatgttccaggcagatacctaactaaatttatttagtgatgcaaaagttaactggatatgggggaaaattcactgggaagaggtaaagtagaaaatattttttacttcctgtttactatgtattaataaattaaacttcatttatataattatacaartgtgaggccaaatttatttaagctaattcaaagctaatgctagattccattattgcaaagacattcatttgggttataaagaacaatgttaggagacatatgatttaaaaagctttggagctgctggcatggaaatcagcaataaaaaatttgagaaggcagagataattaatgagctaggattcaaataaagtgactttgaattatggttgga

SEQ ID NO: 395509 - DNA, 558 bp, Homo sapiens
ctaactcctgactattttattttagcaacactgcaacaatacttcgtataatgacatttaacttgcatatttgcacagataatttcaaagtatatgcaatttaatgaatctactacctggtataaataaggaatagaggcaaaataarcatttgaatttataactactcttaaatttatctagagcacatttgagatagaaagttatgatattttgaaaagctaaattaagagaattgttttatagcattagatcttttcgcatggtctttaacaaatttcaagcttttgaaactttatatatattttaagttgcttgtagacgatcaaaaagccatttcctctacttaaagaacattgaaaatcatatctttccttcaaaaaacgtcattatcttggagaacattttccaaataaactctgcaatttaaattacaattaaaaaataacatgaacaattaattcacatatatttcattttagtgatagatgattcacctaatattgcccgaagtctagaattctagagttagaagattctataaagtttatgtagttc

SEQ ID NO: 395510 - DNA, 589 bp, Homo sapiens
ctttgtggcttactagccaattctgaagtctactaggtaagatttatagctaaggagagaagagtatacaaaagatttttctgtattatttcatccctgagaacggctaatatttaaatatacctctctttcactgggtctgactattgtgtcctctttcctgggcagaataacctctattccagaagatcaattgctttcttttagccccaagaaatccactcattttcacctttttgatatggggttttcttacttctctaggcagtcattttacagagaataatatytatacgctgacagtttttttcgtatggctatacactgatccattctttgccccaaacaaattctggaagtgcgagtttataacattgtaagtctgttatttctttgttctttattttagcttagcttggtttgtcagaataggtctggtaccagtactctgttattctaggccacaggaaaaataaactatataaaagtttccattactaagatggaagcaaaaggatcagccttccgcattcctccacacattgggatgcgaaagggagacagatgaggacttatacctaccagttgc

SEQ ID NO: 395511 - DNA, 589 bp, Homo sapiens
ctttgtggcttactagccaattctgaagtctactaggtaagatttatagctaaggagagaagagtatacaaaagatttttctgtattatttcatccctgagaacggctaatatttaaatatacctctctttcactgggtctgactattgtgtcctctttcctgggcagaataacctctattccagaagatcaattgctttcttttagccccaagaaatccactcattttcacctttttgatatggggttttcttacttctctaggcagtcattttacagagaataatatttatacgctgacagtttttttcgtatggctatacactgatccattctttgccccawacaaattctggaagtgcgagtttataacattgtaagtctgttatttctttgttctttattttagcttagcttggtttgtcagaataggtctggtaccagtactctgttattctaggccacaggaaaaataaactatataaaagtttccattactaagatggaagcaaaaggatcagccttccgcattcctccacacattgggatgcgaaagggagacagatgaggacttatacctaccagttgc

SEQ ID NO: 395512 - DNA, 589 bp, Homo sapiens
ctttgtggcttactagccaattctgaagtctactaggtaagatttatagctaaggagagaagagtatacaaaagatttttctgtattatttcatccctgagaacggctaatatttaaatatacctctctttcactgggtctgactattgtgtcctctttcctgggcagaataacctctattccagaagatcaattgctttcttttagccccaagaaatccactcattttcacctttttgatatggggttttcttacttctctaggcagtcattttacagagaataatatttatacgctgacagtttttttcgtatggctatacactgatccattctttgccccaaacaaattctggaagtgcgagtttataacattgtaagtctgttatttctttgttctttattttagcttagcttggtttgtcagaataggtctggtaccagtactctgttattctaggccacaggaaaaataaactatataaaagtttccattactaagatggaagcaaaaggatcagccttcygcattcctccacacattgggatgcgaaagggagacagatgaggacttatacctaccagttgc

SEQ ID NO: 395513 - DNA, 573 bp, Homo sapiens
aataatatatttccacaagagactaaacagaaatatgaaggattcatgggaatttatatggaaaaggccaaataaattaaaaagttaacagcatttccccaagtcagaaattcatttccatattaaggttaaaaaaatcaggacctttccatttaacaatctgaatatatttcctacatgagaaaataacagaagaaatggaattagtgagtctgcaaagaatctctacatgaagttactatttctattcatcctttgttcttctaagtaactagtctagtgactttaatctcagtagacagtagattgtcaaaggaatgcattcaayagtaggggtgaaaagggagaaggagatacactgatgtaaaaagtctttgaagatgtcttagcaagacagtaggctcttattacacaaactttgattttaaatagtggctgaattaagcttaaataaaacaggttcatgtatctaaaaatcatcttctgataaaaaaagagaccaatatagcaactaaatgctattccttcttttttaataaaaggcagtgatattttactgtgaatcactgtaaa

SEQ ID NO: 395514 - DNA, 536 bp, Homo sapiens
aaagaacttctggtgtcacgccagacaacgaggccatttcaacatcttaatcatgctggcacacttatcaatgcaattcaagatcttatggcaatacttayataagttcatctaactcatttaacttgagagactgtgatgtttcatggaaatggacttatgtctgttttgaaaatttgatgaaagagtgtgaggacacgcagtgtgtcttaaagacttggctccttcattatagtaacaaaagaatttcctctaccatccaaaactcgaatgtagaataattttattcatttaagtatatcctctctttttcttttcttctatcatcagtactttatgctaagtaagccattgcttaactttcttctagttggtaatgtctcctcccttaatttctgctaagggtaatttcacaaacatataaatttttaaattctcaaagagcaataaacatatgtgaggttctgaataagaacaggcagttttctgaatatctcatgtaatttccaatattaatgttttcttactgaaacaga

SEQ ID NO: 395515 - DNA, 536 bp, Homo sapiens
aaagaacttctggtgtcacgccagacaacgaggccatttcaacatcttaatcatgctggcacacttatcaatgcaattcaagatcttatggcaatacttacataagttcatctaactcatttaacttgagagactgtgatgtttcatggaaatggacttatgtctgttttgaaaatttgatgaaagagtgtgaggacacgcagtgtgtcttaaagacttggctccttcattatagtaacaaaagaatttcctctaccatccaaaactcgaatgtagaataattttattcatttaagtatatcctctctttttcttttcttctatcatcagtactttatgctaagtaagccattgcttaactttmttctagttggtaatgtctcctcccttaatttctgctaagggtaatttcacaaacatataaatttttaaattctcaaagagcaataaacatatgtgaggttctgaataagaacaggcagttttctgaatatctcatgtaatttccaatattaatgttttcttactgaaacaga

SEQ ID NO: 395516 - DNA, 606 bp, Homo sapiens
ctttggccaagggaatctcagagaaatctgaaaagtcataaaggtaacgcaacttagacaaacttcatttttggagtttagacacaactgaccagcattaatgtgaaatagcgatcgtgagactgwcagaatggactctttgtgacaataagataccaaattgtaaataagacttaaggccttgcaaggcaagggttacatcacagcttacaaagcataaaatctcattaaactggttaacctattgttaatctgttatggcttatttccaacctgactctggtatagcatcacacaacagatagcacaccccttatcttaacctaagtgttcctttgtaccgacttgtagtctttaacaatgcttcactcttttaaccaattgcaaattaaagaatgtctgaattcacctataacctgtaagcctccacttcgagatgacataccttttcaggccaaactaacgtataccttccatgtattgacgtgatgttacctgtaattcctatctccctggaatgtataaaaacaaactgtaacctgaccacctatgcacactttgtcagaacctcttgaggctgtgttcctcaggccatggtcacttata

SEQ ID NO: 395517 - DNA, 538 bp, Homo sapiens
taaaagtttgatttttcaagtagaaaatatgttgatttataaaatggtctaaaagaagcttgttaccttgagagataatattcaccactgatgaaagcacatgcatrtttattcttctggtagaggcaaataaggactgagcagcattttgagcctctcaaatcaatccctctcctttcttacctcactagtttgttttcattttctaaaataatagattttgaatatcacatttcattaccattgctctcaaaattcacttaccatttatggattaatcactgttgtttggtgccgaaaccagctcgttcagggagaccctaacccagaggtgctagaggaattaaagacacacacacagaaatatagaggtgtgaagtgggaaatcaggggtctcacagccttcagagctgaaagccccaaacagagatttacccacatatttattaacagcaaaccagtcattagcattgtttctatagatattaaattaactaaaatatcccttatgggaaacgaaggtatgggctgaattaga

SEQ ID NO: 395518 - DNA, 538 bp, Homo sapiens
taaaagtttgatttttcaagtagaaaatatgttgatttataaaatggtctaaaagaagcttgttaccttgagagataatattcaccactgatgaaagcacatgcatatttattcttctggtagaggcaaataaggactgagcagcattttgagcctctcaaatcaatccctctcctttcttacctcactagtttgttttcattttctaaaataatagattttgaatatcacatttcattaccattgctctcaaaattcacttaccatttatggattaatcactgttgtttggtgccgaaaccagctcgttcagggagaccctaacccagaggtgctagaggaatkaaagacacacacacagaaatatagaggtgtgaagtgggaaatcaggggtctcacagccttcagagctgaaagccccaaacagagatttacccacatatttattaacagcaaaccagtcattagcattgtttctatagatattaaattaactaaaatatcccttatgggaaacgaaggtatgggctgaattaga

SEQ ID NO: 395519 - DNA, 643 bp, Homo sapiens
ttgatttatgttccttgtatatgtgtgccatctccacttattttaatgtggatttcaaattgtagagtttacttttcaacccacataaagatagacattgaaagtcactatgtagtcagaatataacataatcaaaacttttcattttaaattgactccaattctaactacaacctaaaattgcaaaacatagtcaagcagtgatctctgycactcatatcagagatccaaatggccctgcagatgtgaaactgtctgttgctatgggagaacagctggaatcagttaatgattcaagtcagcatgagctgacacactagactagaaagtttcatctccatggtagagaactgtaggaaaagaagcagagagccagattgttgcaggaatggcctcatgagggacacagctgtaagcataattaagcccatctcccactgacaagtggaattgtttacccttgtacatatgaaactcagtcatcagcaggctagtcttcgatcctatccccactgtgatagagaaccaattcactagggacagatatcctaaagagactaataaaaatcacctttgtttaggaattgcaagaagctagtatgagagaaacacaagatttttcttggtgatctttgtttttctt

SEQ ID NO: 395520 - DNA, 643 bp, Homo sapiens
ttgatttatgttccttgtatatgtgtgccatctccacttattttaatgtggatttcaaattgtagagtttacttttcaacccacataaagatagacattgaaagtcactatgtagtcagaatataacataatcaaaacttttcattttaaattgactccaattctaactacaacctaaaattgcaaaacatagtcaagcagtgatctctgccactcatatcagagatccaaatggccctgcagatgtgaaactgtctgttgctatgggagaacagctggaatcagttaatgattcaagtcagcatgagctgacacactagactagaaagtttcatctccatggtagagaactgtaggaaaagaagcagagagccagwttgttgcaggaatggcctcatgagggacacagctgtaagcataattaagcccatctcccactgacaagtggaattgtttacccttgtacatatgaaactcagtcatcagcaggctagtcttcgatcctatccccactgtgatagagaaccaattcactagggacagatatcctaaagagactaataaaaatcacctttgtttaggaattgcaagaagctagtatgagagaaacacaagatttttcttggtgatctttgtttttctt

SEQ ID NO: 395521 - DNA, 552 bp, Homo sapiens
tttctttcttcttatatggtcagtagttatttagattttaaaagatgaagaattggagatatatttaccaccttacacagttttgggtgtaattttttttaaaaaaaggctaaactggggagtgtgatgtcatgattgaataacatgacaacaatgagataggacacttaattaaactagagttaaactttaatactagtttgagtttggaactctttttttaaatacaaaatcatcatctaactactacaatatataggaactaggaaataaagtttattcttagaattacttcaaatttttataattatgcctaccaggagtgattaaatgagagtaggatatatatttcccagaatcttttatttagccaggttctcacttataattgttagagaagtaaaagatgaagctatagttggtgatgacatgggraaatttaattttactcttctcatctcctgttcctagcaacacagagcagtaatataagggataaacacacactcacacacacacacacacacacagcaaacagcaaaggtgatagta

SEQ ID NO: 395522 - DNA, 644 bp, Homo sapiens
ccaacatagtttcttagtggtgataattctaatacagaagaataaagcaaattggtggaaygagagtgataaagagtgccatgtattaagatacacttcaacaataaactgggtaaaatgaagaagacattttctaagagaagaacatttcagaaaaaaaaatgtcagagcactttgaaaagcctctgtgtttgaagtatgcttggtgtatcttggaaatatcaaggataccaatatggctgaggtggagtgagcaagaaggagaatggcatgagttgagttcagagaggtggagacatgaagatcatgaaggctttgtaggctgcataagttaaaatggatgttccagctgctgtaacaaaaaacaaattttaacagtagctttgaacacaatagaagtaacttgtgtctcatttggcagtctaagttaaagctctccagaaacaatgtgctagtcctgatgcagcctactagctcatttcatcttttcgttttgtactaaactcagtgcttccaaaactgcatccaggtggttattggtcacacatctgtgatatatctagtgataagaaagaaaaaagaaagtgaaagcaaatgtcttttacttggaatgaatgactgaaaggttaaacacatcatttata

SEQ ID NO: 395523 - DNA, 607 bp, Homo sapiens
ggactcattagaggtttactgctctcagcaacaacttatacactggccaactcaagttaacagcagtatccaatagcatcaaaatgtcagttagcaatggtttcctcccttggatatttctgaccaacttttgtccaataagactttgttagatattaatagcagtctaaaatcagccttaactgatttcctttgttttagcaggtctgattctccctttgaggatcttgcttgttcataagattaaytcaaatgaataactttgtataatataacctaaaggttgaaattacatttcttattaaacaaagagcaaaatacattgtgaatatttatcatgagccatagaccgtattactcaacctataaagatggacctggagagttcagtctgtaggaatttgtgtagactaaagggaaacagatatgaaaacaagtatgttcaatgtaatttcacaagtgctacagtgaagaatgtgggcaaatgctattgatgacagatgaaggaccagcaggctggagagagtggggtaagtgttaagagttacagggttctcagactggcagctgttggctgagtctagccacagaccagatgcaatttgaa

SEQ ID NO: 395524 - DNA, 526 bp, Homo sapiens
gatgaagctctcagtggctgaccatctatgttaatttgtgagaaaacaaaatagccttgtatgtgccctaagcaaggaggactgatgagtaaccacagaaacaatgcccaacatcatagccatcttacttggctcaattacacatttctgactaatgattaaagttgaacaaactttccatttaatggatgccaaaactgttgcattcagatcagctgcagacaaaagcagagctttcaatagaaaatttaaactagtgggattatgacastaaaacatttctttgaagaattgtaatggaaggggaaatatgagtttactagtacaattctgaagacaaagcactgtcaaagtaagggctaccaagagatggaagtggtccagtcaaagcaaaagtgaataggtcaagagcaaaggttatgtcaacagccttattgggatcctcaaggcgttttgcttgatttcttggagtgccacacaatggtaacatttccttattatgagagtgtttggagaaacttagcaa

SEQ ID NO: 395525 - DNA, 564 bp, Homo sapiens
acttataccaaatgataagatgagtggtaaatgttcactgcaatttacatagaacacaaccttagtcaaggagagttgttgaggaaatacctacccagctttcaggtaccacttgaggttttaggctcactatgtagccattcctgacatgctggtatacaaaaatgtttactcctctctgaacttctgtagttacactaattttataccactgtttacatggcatttataaatatattacaaatatgctcattatacacatattaaaataaatgcattataaatattataagtgtattataaatatatactcttgaattagtatgcatatgacttgagttcccatatctagaactttgaagaaaagaactttataaaataagttttgtrgatattttatagttaaactaattgttactgcatgaataagtaacataagtaagaagtgaaaagtttttagagataagaaagtgctatatgtggagaaaattgaatttttgaaaatcctgacttaatacccagagaaacagattttttttaagtttagcttcatttatttgacat

SEQ ID NO: 395526 - DNA, 424 bp, Homo sapiens
gcaaatccacatacctatgccatcataatatcaatcagggaaaaacatgcttgagtcttttatgaagactaaatgactaaggagtggtgcgtaagttttccctgtttcaacaagctgagcacttccttttacttcacatttaaaaaatttttttttcacacrttatttgggagcaggtggtgttttgttacatgagtacattgatttgcaagactgtggtgcacccatcacctgagcagtatacactgcaccctatttgtagtcttttatccctcaccccttcccagcctttccccctgtgtccctaaagtccattgtgtcactcttatgccttggcatcctcatagcttagctcccacttacaagtgagatcatacaatgtttggtttttcattcctgagttacttcacttagaataatagtc

SEQ ID NO: 395527 - DNA, 582 bp, Homo sapiens
acaggctataagataatacccatatgatcatctcagtagatgcacaaaaagtatttaacaaaatttaatacctatttatgaaataacaaaactctcaacaaacttggaatagaagggaagccctgaaactgatggaaaaaaaaaaaaaaacctgctgctaacatttaatgatgaaatcaraaagctttgcccctaaaattaggaaccaggcaatgatgtatgcttgtaccacttttattcagcattgatttaatatcaacatttaataccaacgtagatcactgtagtttaacactcctgagctcaagccattctcccatttcagcctcccaagttgctgggactatattcttatgggaagtatagttgttcatttttaaaattgaatttaaaaaattttgagataatgttggattcacatgcaggtgtaagaaaaaacacagagagggcctggtgtggtggcacatgcctgtaatcccagcaatctgggaggccaaggcaggaggatcacctgaggtcgggagttccagaccagccttaccaacatggagaaaccccacctctactaaaaatataaaatta

SEQ ID NO: 395528 - DNA, 582 bp, Homo sapiens
acaggctataagataatacccatatgatcatctcagtagatgcacaaaaagtatttaacaaaatttaatacctatttatgaaataacaaaactctcaacaaacttggaatagaagggaagccctgaaactgatggaaaaaaaaaaaaaaacctgctgctaacatttaatgatgaaatcaaaaagctttgcccctaarattaggaaccaggcaatgatgtatgcttgtaccacttttattcagcattgatttaatatcaacatttaataccaacgtagatcactgtagtttaacactcctgagctcaagccattctcccatttcagcctcccaagttgctgggactatattcttatgggaagtatagttgttcatttttaaaattgaatttaaaaaattttgagataatgttggattcacatgcaggtgtaagaaaaaacacagagagggcctggtgtggtggcacatgcctgtaatcccagcaatctgggaggccaaggcaggaggatcacctgaggtcgggagttccagaccagccttaccaacatggagaaaccccacctctactaaaaatataaaatta

SEQ ID NO: 395529 - DNA, 582 bp, Homo sapiens
acaggctataagataatacccatatgatcatctcagtagatgcacaaaaagtatttaacaaaatttaatacctatttatgaaataacaaaactctcaacaaacttggaatagaagggaagccctgaaactgatggaaaaaaaaaaaaaaacctgctgctaacatttaatgatgaaatcaaaaagctttgcccctaaaattaggaaccaggcaatgatgtatgcttgtaccacttttattcagcattgatttaatatcaacatttaataccaacgtagatcactgtagtttaacactcctgagctcaagccattctcccatttcagcctcccaagttgctgggactatattcttatgggaagtatagttgttcatttttaaaattraatttaaaaaattttgagataatgttggattcacatgcaggtgtaagaaaaaacacagagagggcctggtgtggtggcacatgcctgtaatcccagcaatctgggaggccaaggcaggaggatcacctgaggtcgggagttccagaccagccttaccaacatggagaaaccccacctctactaaaaatataaaatta

SEQ ID NO: 395530 - DNA, 554 bp, Homo sapiens
tccttgtttctagccctcctaggctcctagatagattatattcccactatctcaagtagcagaagatgttccatacaaatgctaaactgtcacagctgtagatcatgtgtctgcccttttgatccccacattctcactacctgtttctttgttggattaccaataaagagtgtgggctcccagagctcagggccttcccagcctccacaatcgctatggccccctggtcccactttagttctcaaactgtctttttctcaatcctttgactccaccagacttcctcacccctacgacctggtgctgggtctgattaccccaacactaaccgctataaattatcttcttagtactgcttttgctgtatcctataggttttgaaatgttgtgtttcccttttcatttatttcattcatttattttttaatttaatcactgacttgctggttatttggaagcatatagtttaatttatatgtatttgtrtagtattaaaagttcctcttgttactgatttcaagttttattccactgtgatcagagaaaatacttaa

SEQ ID NO: 395531 - DNA, 558 bp, Homo sapiens
tctgatgtctttaaattgtaattatttcttaatgtatttagactacattagcataaaataaaaatgtgggttaaataaagttaaatggatttttaatatagatctattcagaatatgccattgagcattggaaatcggtgaactatagttcgaactattttaaaaatgtatttttccagacaacaattttaacaaagaatatctctgaggcctgaggttccttggaacatgttgatcaataacactgagcattgtttctcaaatctggctgaatatcgaaatgacattacagcttttttttttcacatagagtttccctgtgacataattataacagagccaaagaaaatcagtctatttcccttatcttttccttgtttgttttttaatgtatcaaaagcctttgatgaagccagtacacaatggttttgcaattgagaatcaccattaaataaacttttatatattcaaattcaaaaattttactgaaaatttagaggttttttctayttcaaaaattgttttaggaatttgagtctattgttgaaatgttgtagt

SEQ ID NO: 395532 - DNA, 608 bp, Homo sapiens
gattgtgtctatttcccccccaaaaaaaacctttaaaactgacatttgcttaccaattaggattataattattttgtggcatattgtaggtattaaattttatccaccctcctttcctgtttttaacagttatggtttcattatactttartaattaaaaattatttgaacttgtatacaatattttactgagatccatcatttatgttatctactctgaagtctttactgcttgtatatcttttcttgcaacatttccagtccacctgctatggcagttcctctccatggaacttaactactcaacagaatgaaagctcttctccctttttcaatatcattttccttggttcactccaacttctgccttcaaatagcatctagtcactgatgattttaaatgggcatgttttatctctcttattagattagaagcatattggtaaacaataactcggctatcactaacctagcctgtacctatcatgtttcctagagcgcccatacatattatctattaaatacagctatgaatgaatccttgaatgcaagtttctaaatcatgtgttataggaagaaaaagaaacatttttagaaaatataattta

SEQ ID NO: 395533 - DNA, 618 bp, Homo sapiens
tttcactaccttcatatagactgcagtcaatgtatatattaagttaatgtatccttagggagattataatcatgtcatgattaaaaacatcctgctgtgaaatgcaatcagtttcttttactatagggagtcagccaaattaatcagctacccaattaggtataaattaatgcctttccccaatggtcaaaagtaagaaatagcctgtgaatccaaagatattataagccattctattgtatatgtcactcatttatactgaagaagaagagtctaaaacaatgattcttcacttatgatgtacattatgaaggcacttgcaggtgcatactatatgacatctagattttgttcatctgcaatcaagtaattatgagattcattttttgtaaatttcattattyttaacactgcattataaatcttgacagaaacctttgtgatctgtatttttttcaccagcagaattggtctttttagtggaaattttgtcaaaatggacaataatttaagaaaatgtgaaaacgaatgatcccaaggacccacatttaaacaaagaaaatgtctcatgctatagctaacacagtgttatattctgttctttgataaaacatcaat

SEQ ID NO: 395534 - DNA, 578 bp, Homo sapiens
ttcacttaaccataagtacttgctgggaacctccaatgttgaagcactgtgctaaatgctaaggaatatggaaataagaccaatagatcctcagggcattcacaattcagcaaggaaaacagacacatataactgctgtaaaacactctgataagtgctgtgataggtcactgaagtgttatggtggcctggaactcgatagttccagcaagagactggttggtcacaatgtgctttggaaaggagaccacacattagttagctcttgaaagatgagcagcattttactatgggaagggcattcaagataaaggagaggacaagcactgtcacaaaaatagaaatgcaaatggcaactaccrttaacaacaatgcattatatacccaaaaattgctaagagtagattttaaatgttctcacaacaaaaaaataagtgtgtgaggtaatggctatgttaattagctagacttagccttttcacaacatacacgtatatcaaaatatcatgtacaccatcaatatgtataatttttacttgtcaaatacataaaacgaaaggtaagacattttgtaattt

SEQ ID NO: 395535 - DNA, 467 bp, Homo sapiens
tcactttgcatttataagctgtttgttctttaacacagttgcccatcataaatattcattgaatggatccaagtttattttcagctcctacagctgtgctcagtttgaggctctgcaccatggaggtcaaagagatcaaactagctgtccctctttgtttcccttgccttccctgacctgatcgcacaggcctttggtgtagtctggggaccttgtctactaaaaaagaagtcccaggataaggaaagtggctcctaaatataacctcggggcctctcttctcccatctcagagaccttggatcaggacaactgcctcttggcactgactttaaggaaaacaaaactgttggctatagccctttcctgtwtgccagcatttccttttttgcattgaatctctgttgaatcatttctttatttcgcacactctaagaaggaggtggtggtccgggaggaggaagctcg

SEQ ID NO: 395536 - DNA, 494 bp, Homo sapiens
ccaggctaaagtttgggggggcaattagggctcacggcagccccttgacctcccaggctcaagtgatactcctgcctcagccttctgagtagctgggaccacaggtgtgcaccaccatagtcagctagttttgttatgtattatttatttatttatttctatatttattgcagagatgaggtattactctgttgcccaggctggtctcagactcctcagtgcaagtgaatcctcctcccttggcctccccaaatgctgggattacagaggtgagacatcatgcctggccatggttgctggttttgaagatgtgggaaggggaccatgagccaaggagtgcaggtggcctgtagaatctgggaaaggaaaggaagtggattcccccagagcttccagaaaggaacayagccctgatgacaccttggctttagcccagtgagactcctgttggacttctgacctctaggatcttaagtcaatgcatttgtgatatt

SEQ ID NO: 395537 - DNA, 617 bp, Homo sapiens
catactccttcattctgcaactcagccaatccctgggcccctccttgtgacagagaaatttaagacycccatcctccaaatggtgatgtgaatcaagagatggcagaacttacagtcttgcttatgtggcattgaacgagacattgcttggatgttgcctaaaacatcagttctaccttcaagtggcaagaaaacatagcacttggtaccatctatctcgaaaaattaagacatttaaacaggtcatctgatggatttccaagttggattcatgtttttaatttcctgctgtcaaaatagagggatgtttccctctacccattaaccatttttaataaaagcttgaaaacatgatggaacatacacagggttcggcagtcactagtgacactttgtagaagctcacttacagaatgagtttctttgtggctcttgtcaacccaaataaagatttgcatcaaaaactgtcccttcttggtatctatgttaagagtaaagcttagcatatctaatgctaccctttcgctctaagtttaatgaaataaccatttaggtgaggggagtggccttagaaatttgggctaaatcaatggttccttggcagatcgctgagtaat

SEQ ID NO: 395538 - DNA, 617 bp, Homo sapiens
catactccttcattctgcaactcagccaatccctgggcccctccttgtgacagagaaatttaagacccccatcctccaaatggtgatgtgaatcaagagatggcagaacttacagtcttgcttatgtggcattgaacgagacattgcttggatgttgcctaaaacatcagttctaccttcaagtggcaagaaaacatagcacttggtaccatctatctcgaaaaattaagacatttaaacaggtcatctgatggatttccaagttggattcatgtttttaatttcctgctgtcaaaatagagggatgtttccctctacccattaaccatttttaataaaagcttgaaaacatgatggaacatacacagggtkcggcagtcactagtgacactttgtagaagctcacttacagaatgagtttctttgtggctcttgtcaacccaaataaagatttgcatcaaaaactgtcccttcttggtatctatgttaagagtaaagcttagcatatctaatgctaccctttcgctctaagtttaatgaaataaccatttaggtgaggggagtggccttagaaatttgggctaaatcaatggttccttggcagatcgctgagtaat

SEQ ID NO: 395539 - DNA, 641 bp, Homo sapiens
tactccttcattctgcaactcagccaatccctgggcccctccttgtgacagagaaatttaagacccccatcctccaaatggtgatgtgaatcaagagatggcagaacttacagtcttgcttatgtggcattgaacgagacattgcttggatgttgcctaaaacatcagttctaccttcaagtggcaagaaaacatagcacttggtaccatctatctcgaaaaattaagacatttaaacaggtcatctgatggatttccaagttggattcatgtttttaatttcctgctgtcaaaatagagggatgtttccctctacccattaaccatttttaataaaagcttgaaaacatgatggaacatacacagggttcggcagtcactagtgacactttgtagaagctcacttacagaatgagtttctttgtggctcttgtcaacccaaataaagatttgcrtcaaaaactgtcccttcttggtatctatgttaagagtaaagcttagcatatctaatgctaccctttcgctctaagtttaatgaaataaccatttaggtgaggggagtggccttagaaatttgggctaaatcaatggttccttggcagatcgctgagtaatttgtggttatcaatggaaacattttg

SEQ ID NO: 395540 - DNA, 601 bp, Homo sapiens
ttctttctcacagtaactcttcaaggtaggtcttattattttcattatgcagttgaggaaacagactctgaggcagaagtggcctgaacaaatacttgcagattggagttgggagaactggattccaacccaggcccaccaggcactatagccaagcaccttgtcaccaggctcccaaagttcattatgtcatttcattctcccagcaacccagcaaggtggacatttcaccstattttgcatatgaagacttaaggctgcgggtcccttggctggtgggcagcagagctgggattccccaggactggctgtctccaagctccacactggaagaatcaggagcaatagatttcttcttgctctcagaaggaaaccaccaactccacagtccctgggcaagacaatagcctgaagcagccactgcttcagggaaacacagaaggaggaacggacagcctaggatcccaaggtctgggagctcactccagctctgcctcctggcaaatctgttggcttccctgggcctcactttcttcatgtgttcatctaaaaaaaaggaggatgaagtaaatgacatctgaggttgcaggactgctgctag

SEQ ID NO: 395541 - DNA, 583 bp, Homo sapiens
aggtgggtgaatcgcttgagctcaggagttcacgaccagcctgagcatcatggcaagaccctgtctctacaaaaagtacaaaaattagctaggcatggtggcccgtgcctatagtcccagctacttagggggctgaggtgggaggattgcttgggcccagaaggttgaggctacagtgagctgtgatcgcaccactgcactccagcctgggtgacagagtgagaccctgcccccccccccaaaaagaagaagaatcagggtattgaatatctgtctcctttatccagcccagagtgacgtggcgtttatctcctttaagcaatgaaattgcacattttacccagccatatgccatgrgcagccaacatcagtgttttgaccttgcagtgggtactagacattctaaatttaaattcacattgtggggtccccaagctaaaatgctaataggaccctttaccctttagaagctgtcaccaggtcctcatgggatgtaggatctgttctaccacatacacctatgacttcaaactttctggtctgtctggaattctgattagaatagtctcccctagtcacaaca

SEQ ID NO: 395542 - DNA, 553 bp, Homo sapiens
actgagcttttctgtggtgaaggatgggtgatgrgttgccttcacctatttccagtgaacactggctgtcctccttgttaactcccagatggcaacttccgattaattggccttgcctccttgtctataaagtgttctctggtgtgtttcatcctccactctccccagtgttctatgcagtatttaaatctttcagaagttatcttctttaagaaaaacttattggaaaaaaaaaacagatggaagaagaagtcatagattaagaggcttacaagatatctcaaccaatcaccatgtgttaaccttatttgtatcctgattcaaacaagctgattgtaaatacaaaaaactgtgacatgtaagagacgattggaagtttgaacacttggtagatgttggatcttaatttattggtcattattttaggtgtcataatggtatgatagctatgtttttaaaagaatccttatcttttaggggcacataccgaaatatttgcagatgaggatgatgtgattctggtgggcagccaatgagtggggatacagaggaa

SEQ ID NO: 395543 - DNA, 553 bp, Homo sapiens
actgagcttttctgtggtgaaggatgggtgatgagttgccttcacctatttccagtgaacactggctgtcctccttgttaactcccagatggcaacttccgattaattggccttgcctccttgtctataaagtgttctctggtgtgtttcatcctccactctccccagtgttctatgcagtatttaaatctttcagaagttatcttctttaagaaaaacttattggaaaaaaaaaacagatggaagaagaagtcatagattaagaggcttacaagatatctcaaccaatcaccatgtgttaaccttatttgtatcctgattcaaacaagctgattgtaaatacaaaaaactgtgacatgtaagagacgattggaagtttgaacacttggtagatgttggatcttaatttattggtcattattttaggtgtcataatggtatgatagstatgtttttaaaagaatccttatcttttaggggcacataccgaaatatttgcagatgaggatgatgtgattctggtgggcagccaatgagtggggatacagaggaa

SEQ ID NO: 395544 - DNA, 469 bp, Homo sapiens
agacatgcatttcagtggaagccatgccttgtccagagtaagcattcaatctattctagccaacgaatggatgagtgcattttaaagataagcagaagtattgagaaataaacacggtgacacttgtgttgtgaggacatgcgaatkattccccactgtttgtggggctggagatgggaggtcagcctgcatcaccagtgccactaccttctacactcccctttgcatctcaaggaagccaggaattacctttaccaactctccatccctgtctggttctgggtgagtctgtccatgagaggaacttgtgtgaagcctagaaagaggagagaaggagaagcccctcttgtcccaaaacagctgcaagcagacacatgagactccacggccatctggtaaactcttcgacatcgcctactttgctgctgcagttggagaaagttgttgcaaactgcccagagaccctggg

SEQ ID NO: 395545 - DNA, 600 bp, Homo sapiens
gggagcctatgttagtaaactttaagggaatgaagatgccacattttggcagtgtgttagtcacaagtggatttggtgtctagatagggaagggatgagtagaatttggaaaatgtggggctttctgttctctggctgcttcagggatttaattattaggcctttagagcactattattaatcttcgtacataaatcgttctctggcctaagacaggaaggaagacctaatcctggttttactgccagcagaaataaaataatatatgcctcaaacctgattaacagtgcaagatactgttattcacacattaaatgcytgaagttacttacatgaggttacttgctactctggagcaatcaagaaaacatggccagcacggatcagcaagatttaatgtttcacagtacagtatctttctttggaaaagaaaaagtcagttcagatattaggaactataaacccagacctcatactatgagtcctttcattatactcaactatgccctagcatcagagagaataaatgaaaatctccctgctgaagaatgttagcatggggttgggaaaattgtatatatttattggtcctatatttct

SEQ ID NO: 395546 - DNA, 494 bp, Homo sapiens
ggtggtctttgcttctttgcagcccctcaacatgacagcatgtttgagtcctttccagcaagaagctgaactccccaggagtctgccagttttctagaaaacattggttactggctcctttctggttttgaccattctttactcagggcttagctctgaggactcctgtcatgccggggtttttaattggctcttcatcttggcgctwaaactattcctggctcaaaaagaattatccctttctcttatagccctgaacttttccatattctttcctctcttcttttctagcctgttagcaagtggcagaagaggggatcagagccagatagcctgggttccagttcagggtttttgccatttactggctgtgtttttctgctcaaggtatttaagctctctgggtctttagttcttcatccacagaagggggataataagagcaccttcctctttgcattgtcaggagacctccatgcattaatatatgttaa

SEQ ID NO: 395547 - DNA, 401 bp, Homo sapiens
gaggtgttccttagcccaagagggatcctaagccagacatttcaccccatgtctctggatactaagaagctaaaatggtcacagcagtgcccatcctgactgaggacactgctttccagataaagagaggtctctcagggcctccgtctaccccttagtaaaaggtttattttgcctgtgggaggggagcattgagatcgctggctgaagtaaaaactaaggagttgggtygggggtgataaacccctttacctatgggagggctttgccgtggctcacttgggccggaggataggtaggcgtggtcgtaggcagcggagggtagtgggggccacccatcccttcagaagccaccactcacgctggattactgaccagggttttggcgcgtaactcattcc

SEQ ID NO: 395548 - DNA, 574 bp, Homo sapiens
ctattcactctttacatcctagtttagatacctcctccctctagaagccttctctgaacccactatcttttacagcttacatactcagggtgcaagaaataaacctggctgtatttttctctaactcagcttacattgtattatgcatctctttgactgtatgctggaaatacaatttcaacaattttagagttctacctatttttacccaacctttcatccaagttccagggagaaatataatgctgagttgtcaggagaggggtgaggaarggtgaagtgtctggtccttagggtcatcattcctcctcattaacttcagctacaacatccattgccattatcagacttggaggatgatcctgaattgcagcccagtcttcactgcaagtcgtccttatgtctagccctctctatgctgctttctgggtctctggtgggctcacatgatgacaaggagatcattcagcctcttcctttcccagcatggccaaatggtctctttgggaccatctaggaaattgtctatttctgtacctttcttgggcacatcttactactcttgcagctttct

SEQ ID NO: 395549 - DNA, 521 bp, Homo sapiens
cataattcagcagatgctgtttacggacattgagattacatacataagcatgtatctatacatctctaactagcaaaactcttgtcttctaacatcaccaatttgaaagccagaactagaagggaacttagaggttacttgccccaacgcatgtgttttatttatttattcctgaagggcaaagtgttcctgttcaatgtcacagaagggaattagtagcagaaatagcattacaaatccgatctcccagctcccaggacaacgttctttccactacactgaaaagggaacatccctccctaacccatccaagatgcatcttagacggtaaagaaactcaagctggcaatggagcagaaccttaacaggtcgtcgctagatcggagccctgggtgagcatgcaaactcgccaccctgcactggcggyggagagacagcgtctccacacgctcatttctcccccactttctctgtcttaaaattgttttctaattaactcaatgtgaattacccctgttagt

SEQ ID NO: 395550 - DNA, 609 bp, Homo sapiens
ttgatcaattgagggaaaaacatatgttacttgatataactggtgggtcaaaagaattaacccaggcaaatttgagataggtggatgggatgatggattgaaaatacagctgctctctttccaatcatgtactaagtaatttgggaaagattgatctaattgggtctagagagtacacttcacatggcattgtttgactttttttctgcatcgctagcgatctgtgcattacaactcaaatcagtcgggtttcctggcatatgtaattgccaatgttttttaccagaagagwaacattactcccacctcttcttattatgttacaaactatagtgctaatgaccatcgaccaacagtgactttcaggatgacctgtgtgagttttatctgaaaccatgtgaatttttcatcttaaaagtcccttagaatctcagtctatgtacactcaggtttgttgcaggtttagagttccgtgttttttgtttctaatgtagacacagccttataatttacaacagcattcactaattaaaattgtaagcataattactatccacgatacttattattagtttgcattcataaagctcaaaattcacttcatccttt

SEQ ID NO: 395551 - DNA, 624 bp, Homo sapiens
ccatcccaaaaccaaaaagatggaaagaatattggaaatgcaattcagtgttaatgtgtgttcaacattaatatatgtccatgtgaaatcatcttgtgcaccatctgaaatcatttcatgtgccacagtaagactttgtgaagcaccaaagaatatgacgtctaagaatcctcccaatgtgacctgtgtgtgtaacgagtcatttcacatctgtcactgatcagctgacaatggaaagtcaattcaggagtacgcccagtgggtggcaggattgaaccgaatgctgcagatgcaggactttcttaatatagctccattgtttacagcccgcagctgttgtttacagctcagcaccacccttcctcctcacctgctatttgtctacatctgcctctaggtccctgaggaaaacaacagaccakcatatcatgtcatgtggaaaccggaactggggactcctaaatactcatgtctgttgggagagggccccaatccctcttttctcacaccttgtggaatctgaattcacgtttaaacctaggtaggaaacagaaaggatcaagatcactgtgcccctgagtccaatttgaggatttaaaccaatgaactgttgaagtcaaaata

SEQ ID NO: 395552 - DNA, 525 bp, Homo sapiens
agcaggcagaccccttccttcgacccctgatggtctcacctctgggctgccagcccctacacaagagcctcagcctgcacaatttggattgcttagtttcttcagagagtatttctgtgacttcagcctatgaacaaatgccatctgtacagttcttcaatcagtgacttcaattcctgaattcctgtccctcatcttacttctgttctggattgctgctgacttggaagagttcatccaagaggaaaggctccctgctccttgcagccttccttagtggatgcatcaggcagtggcatttctgcgagttcatccaatttgacttcttccatctttcagaaactaattaggacctttggtctattggtatccctccctycaaggcttaggacttggaggaatatatctttttcttactgccactacgatctgttttaggactaggagcaaaaacttgcattcagcctaagattttgatgaagagaggagatttactcattcaattttacagttggctggagtatc

SEQ ID NO: 395553 - DNA, 570 bp, Homo sapiens
ttttttttttcagtaagaaaagctgcttttctgagcaggcacagcacattatcttagttccataacttgaggaggcccacagtgcctgggccctttgaggcactggcttctacttcctccccatgtgagccctggggacccaacactgtcccaggcagaagaggagtgtcaaggcctctcagggaggatggagagctaagctctgcttgcttcctcaccttcaagagccaatgcttttaraagttctcctacaatctgctttggggtaaagtcagttagcgggagagagagcccaggcaaagttaaactcatgcagtgtggaggagaaggttgacctggtgacctagaccccaagcccatcaccgtggcacaccgtgcttggggactgagggccgagcacacatgtgtcttgcattggtactttggggcagcgagtctccattgttatgtccttggcacccagcacagtgctggtacaaaaaggaatacagtcattatccttgtggactagctgcctgcagactgacccagaattacagagccagcatcttcatttgactgacaaggaaa

SEQ ID NO: 395554 - DNA, 508 bp, Homo sapiens
tcttcgcttcacatttgcctggggttggcttctattccccaagacaggggttctctaacttgaatgtgcatccgaatcatcttaaaacacatatttctgggctycacctccagagtttctgactcagcaggtctagctgggagccaagaatgtgcattttaacaagtttccaggtgatgctgatgctgctggcacacctcacttagaaagccactgccccagaggcaggagtcacctgtctccaatttctgcctctttttctggccttggatactatacatatttttaaggccttccctctccaaacttctcaaaacttggctcaaaagattatctaaaggctggtccaaaaattactaaaaccagaagaagaatggatgtattctctttaaagaaacagacaggactctgtcttaataagagagcagttacttattcaagagctaggaaaggagggatggcactgttgttagggattcatggtcaatttttttcttccatgcaggta

SEQ ID NO: 395555 - DNA, 536 bp, Homo sapiens
catttttcttaagcaaggaacacctactaaggcctctgcatatttccccataatatatctctgtatttgcacagagggagaatgaataacatagaaaaatcctcccctggaggcactccatttggaaattctgcttgttttttcttttgatcagggagagcccattgtttctggaataagcaaagaaaaatcttataacagggtctccccataagcagaaatcaaagaggacttctccaggaaacaaatccaagtaaatttcaccatgggcctgctattttttgccccrggaaaggggttttaagaaggtgataggccgggcgcagtggctcatgcctgtaatcccagcactttgggaggccgaggtgggtgaatcacctgaagtcaggagttcaagaccagcctggccaacatggtgaagctgcatctctactaaaattacaaaaatagccaggcatggtggcaggcgcctgtaatcccagctactcaggaggctgaggcaggagagtctcttgaacccaggaggcagaggttgc

SEQ ID NO: 395556 - DNA, 604 bp, Homo sapiens
ccaggaaacaaatccaagtaaatttcaccatgggcctgctattttttgccccaggaaaggggttttaagaaggtgataggccgggcgcagtggctcatgcctgtaatcccagcactttgggaggccgaggtgggtgaatcacctgaagtcaggagttcaagaccagcctggccaacatggtgaagctgcatctctactaaaattacaaaaatagccaggcatggtggcaggcgcctgtaatcccagctactcaggaggctgaggcaggagagtctcttgaacccaggaggcagaggttgcactgaacctagaccatgccatggcactccagcctgggtgacaagagcgaaactctrtctccaaaaaaaaagaagaacataagatgtctcttccatatatgagaaccacagctcagtttccctccagtggcccccctataggctgctagcccccaccagggtcttctacccagcaccaacccaggaacaattctggctcattctggctgacagcaatgaagcacctatctaaatactgttgagatgttgaattcagtagaaaatgaacagtcaaaacgttttgacaggtgtttgccttgtgatgt

SEQ ID NO: 395557 - DNA, 604 bp, Homo sapiens
ccaggaaacaaatccaagtaaatttcaccatgggcctgctattttttgccccaggaaaggggttttaagaaggtgataggccgggcgcagtggctcatgcctgtaatcccagcactttgggaggccgaggtgggtgaatcacctgaagtcaggagttcaagaccagcctggccaacatggtgaagctgcatctctactaaaattacaaaaatagccaggcatggtggcaggcgcctgtaatcccagctactcaggaggctgaggcaggagagtctcttgaacccaggaggcagaggttgcactgaacctagaccatgccatggcactccagcctgggtgacaagagcgaaactctgtctccaaaaaaaaagaagaacataagatgtctcttccatatatgagaaccacagctcagtttccctccagtggyccccctataggctgctagcccccaccagggtcttctacccagcaccaacccaggaacaattctggctcattctggctgacagcaatgaagcacctatctaaatactgttgagatgttgaattcagtagaaaatgaacagtcaaaacgttttgacaggtgtttgccttgtgatgt

SEQ ID NO: 395558 - DNA, 595 bp, Homo sapiens
taataaataaaaagaaagctgtaggaaaatacaataacagacagcctgtagaaattttgaagaccatgattaacacagttgatctaatagatatatcaaaatccctgtacctaagaattagagaatacatagtattacaattcagtcaacttaacaaatgtcaaacaacaaatatcacatagccatgctttctgatcataatacaataaaaattaaaatattctacaaaaaaggcaaccctccaaactcccatgtgtttggaaataatttatgagtcaatccattttaatgattagaaaataatttgcattgaaaggaaataaaaatagcatatgtcaaacttcaggtaatagagcataggcatcacttagaggaaattgtatagaatgcatatataactgaagaaagtccaagaattagtgagcaaactatccaactcaaaagttgagaaaagaggaacaaagtaaaccccccacccatcaaaaaatgaataaatgaaattataaagatgartagagaaataaataataaaagagaaaagagaaacagaaaaagtcaacaaaaccaaaagcatttgtttggaaaaaagctaagt

SEQ ID NO: 395559 - DNA, 399 bp, Homo sapiens
atggtcccaccccaccaggcttgctcacccttttacctgcctacctcctgtagacattggcgtctttcctctgaagcctatacccagtattctctaagtaagccccttctccaagtttcttcagatggtggttaggctagtccaaaataccagaggggtaagcagtccaaaaaaaaaaagaggaaaaggagtaaaacagaagcttttctgaaaacaatttacacttagaaacctaactaaaggaygagacatcatcgtctcctcatgtaacctgcattttctgggcacccaccatgtgcctggcatggtttgcagagcagaagagacagcagtgacaagaccagaccccctttcctcaccaaactttcttcctctgtgacacaggcaatcatcaactaa

SEQ ID NO: 395560 - DNA, 561 bp, Homo sapiens
gcttgtttgcctggcttctttctcatttagaactgtttcctccagagggtttcctattcaaagaggctgtccagcatcagggctgaatcccaggtgggccaggcaaacactacaccatgagcaatctcttttctttcactgttgcccatggaccacttygggggcagctcagatccccgcttggacagcaagcacagagcacagaaagccccaatttgtgcatttgtcaatgttcctggctcctcctccccggtctgttcccagaaaactccttctgttccctgagcctgtccagctggaggggtgggaaaggaagaccgtctgtcagaccctccaaagggacttccagaaactggggtggggagacagcctttgaggagaggaccacacaacggggcctcagggaatttacaacttctgcacctgattaagtggctggtggaggcggaaagcagggctgggagccggggcctaggctggcaggctgtgaagcacaggactgctccaaggtatgtgagtcagcaggagggggtgcagtgggtgggggtctggaccatcatc

SEQ ID NO: 395561 - DNA, 575 bp, Homo sapiens
ggcttgtttgcctggcttctttctcatttagaactgtttcctccagagggtttcctattcaaagaggctgtccagcatcagggctgaatcccaggtgggccaggcaaacactacaccatgagcaatctcttttctttcactgttgcccatggaccactttgggggcagctcagatccccgcttggacagcaagcacagagcacagraagccccaatttgtgcatttgtcaatgttcctggctcctcctccccggtctgttcccagaaaactccttctgttccctgagcctgtccagctggaggggtgggaaaggaagaccgtctgtcagaccctccaaagggacttccagaaactggggtggggagacagcctttgaggagaggaccacacaacggggcctcagggaatttacaacttctgcacctgattaagtggctggtggaggcggaaagcagggctgggagccggggcctaggctggcaggctgtgaagcacaggactgctccaaggtatgtgagtcagcaggagggggtgcagtgggtgggggtctggaccatcatccctgtgtcctgcc

SEQ ID NO: 395562 - DNA, 575 bp, Homo sapiens
ggcttgtttgcctggcttctttctcatttagaactgtttcctccagagggtttcctattcaaagaggctgtccagcatcagggctgaatcccaggtgggccaggcaaacactacaccatgagcaatctcttttctttcactgttgcccatggaccactttgggggcagctcagatccccgcttggacagcaagcacagagcacagaaagccccaatttgtgcatttgtcaatgttcctggctcctcctccccggtctgttcycagaaaactccttctgttccctgagcctgtccagctggaggggtgggaaaggaagaccgtctgtcagaccctccaaagggacttccagaaactggggtggggagacagcctttgaggagaggaccacacaacggggcctcagggaatttacaacttctgcacctgattaagtggctggtggaggcggaaagcagggctgggagccggggcctaggctggcaggctgtgaagcacaggactgctccaaggtatgtgagtcagcaggagggggtgcagtgggtgggggtctggaccatcatccctgtgtcctgcc

SEQ ID NO: 395563 - DNA, 619 bp, Homo sapiens
aagtcacctggaaaggtgaggatttttttttttgatattataattatttttgaaggggaaatgtcaaaatttgatctttaagatatatatttttatttttcaattgacaagtataatttatgtgtttatgatgtacaacgtgctgttttgatatatatgtatacatcatggaaaggctaaattaaactatttaatatatgcattacttcacgtgtttattttttgtgttgagaacacttatgtactctcttagcaattttcaagtacatayacaacatattgttattaaccgtagtcatgatgtatgatagatctcttgaatttatttgtcttgtataacaaaattttgtgtctttgaccaacatctctccaatcctcccaacccccagcctctggtaacctccactttactgtttccttgagtttaactcttttatattccacgtaagtgatatcatgcagtactattccaaatgacagaatttcctttgtttttaaaggctgaatagtatcttattgtgtatatataccacatcgtctttgtctttgtccaaccagtgtctatttgtccattgatggacactggttggttccatagcttggctaatgtgaatagtgc

SEQ ID NO: 395564 - DNA, 654 bp, Homo sapiens
tctctttcactgtctcagttatattaataattttgcaatggtggtttcatgataatgcaatagcaatcacattttactaagtatttattatatgtcaagcactatgtcaactgcttggtataaattgtcttgtttgttcccaacagccccatgaagtagatactattaccattttccctattttacaaagggggaaactaaattgaggcacacagaggctaagtaacttactcaaggtcagacagaaaatggtagaaactggattcaaactctagcatgtayattcagagtaccaacttcctaccaccacaatttcctgcctctctaacctgagttggagccattagaaccattaaagatattctaaaaatattgaacctcgagagaaacattgttcagcatcttggtatcttctctcctgggaactccttagtttctatgcaaatttgctgaatttctacccagaggtctttagcttcaaatatcaagtggtaaggggagtatggtgggtgctgggatgacaactctcaagtccaaagaacatttcattttgacaaaatgaaacaacaatagcatataacatttattaaagtcttgcaatatgttagacattgtaagtctccattacatttatttgatcctcattacactcca

SEQ ID NO: 395565 - DNA, 574 bp, Homo sapiens
aagtttcttatttccatctgagaccccatcagcttgattttcactgtccacatcttgatcagcattttggccrcaacaatttgaccaatctataagaagttctagactttcactcatcttcctgtctttttcttatcaattttttgagactgagtctcgctctattgcccagcctggagtgctgtggcgtgatgttggctcactgcaaactccacagcccggattcaagtgattctcatgcctcagactcccgaatagctgagattacaggcgcctgccactatgcctggctaatttttgtatttttaatagagatggggtttcacagtgttggccaggctggtcttgaactcttgacgtcaggtgatccacccaccttggcctcctaaagagctgggattacaggcatgagccatcatgcctggaccttcttgtcttcttctggaccttcttgtcttcttctgagccctccaaactcttccaacctctgcctgttacccaatttcaaaggtggtcccacattttcaggtgtctttatagcaatgccctattccttggtaccaactttctgtgt

SEQ ID NO: 395566 - DNA, 595 bp, Homo sapiens
tgcttttttttttattccagattcaccatttgcttctcaacggtttaatctctagtcagggaactttggacattttttacccaggtgatagtttctatagcttgattgttttaagacactggagcatggaagatgcacccacagtcaacatgcattccttatgtcttctgaagggaaaaacataatggccaatgcttctaatttctagccacataatcatgtattgtacacctcagatgtataaaagctrtatgataatgatacagaaaggacataaaataaaacatgtataacaacaggatctctttcctcatataactgacttcatttttctcagtttgtagagttgctcagaagtccctatgtaatcattatttatgtacactcagagtagatagaatagtgtcctttaaattttctatatgccattaagtgaagggaagcttctgccttgggcattacaaagattctattcttgaccaaattttttttttaacaaggccttgaccttggactctgtctttggcttgcttagtccagtttagtgagaattctgctgagtcaatttagtggaaaaactccacctttgatatct

SEQ ID NO: 395567 - DNA, 490 bp, Homo sapiens
aaataattaattcacaatattttaataaaaacaaaatatatttattgagagcttaccataatccgaacactttcctaattgtggaggttttgacagtgatcaagaaaaaagacagatcctgcctccttttgcgagctttcatccaaataggggcaataaacaaatataagcaaaacaatgaataaaataattataaacagtgatacctactataaagaaacaatgagtatcaattcatgtctttttgaagaagagacacttattccttttgtatcctagtcaataagttatgaggsggggatagctcagtagaaggaaatagctgcctgttccctggcagctcttgctctagcctgctcttgcttggctaaaagtaattttcagttaaaagggtggccgtgacttgttattagtgaacacagaatcttgggaaggattcattatgtgaaatgtgaaataaaaactttcaggcaaagggaaaactaagtat

SEQ ID NO: 395568 - DNA, 565 bp, Homo sapiens
taaatttccaaaccataaatattaagttaaatattagaaaattgacctacaagtattttagtgttttgcttactagctgctccctgaggcttactctgggtcttaaagatagaaatggaatatggtagaagacacattatttctaaatcttccctagagtatcccttttctaattaataattgacattaaataaaaattgtaacaataatacaattaaaattaaaaggaaaataacgttcagtgttttcttttattgcaaagattatttttttttattgacacacattgtragaattgtaactgcttaatatagcttctggaaatgacttcaaagacttttcagtttcactcttttaaaaatgactaatataaaattattataactaacataaaattaaaatgtgctcctacaaaaaagtaagatttttctctttgagcaatttttatttagaagattattcttaaaaagcattgatctctttctataccacacacacaagttctaagtacaagaagtctattgctaaggagattttatgtcacattgcttgccatggaattaaa

SEQ ID NO: 395569 - DNA, 486 bp, Homo sapiens
cttactacaaaatgagaatggaaacattctggtttaaacaatgttaatatcatcaaacatccagggaaatataacaaattaaaagagaatcacttcaaagaataaaaggcctacaccttaagtaataataaatctaatacttgacattcatctccctggaaaataaaattagataaacttttgcaagggcattcagaacagccaatccagtttattaataatttcctgttttcatattrgaagctcatattatctggccccagccacagtagacctccacagatatttaataaagctgccatcagtaatcctctctgattacctataaccttccagctataacacacactgtgctgcagctccacagaaggacagcacagtgtcacctgctatgatgtttgacagcttattctgcgacatcaagccagcacaaaattactttttccaaatccatccttggttaataaccaaaagcaataatggtat

SEQ ID NO: 395570 - DNA, 460 bp, Homo sapiens
attatgttattactatgtactgggtactacgttagggactgaagatgccaaaatgaataagagatactctggcttcaaggagaccgctgtttttaaaatttaaaatagatattataacataagtaactgacaattatcagctgctggttactgaacatagaaattgtacttattttcaaggatttaagagtgatttgaaaagtttctagtgccacccacactttcctcccaacctacaaaaatctctgtgcagaagacaaggtatttatcacaacaattgaacagatgagaaaagtgaggctcagaaatactgtaacttgctaccctcgcttctatggccaaggctcctgagaggtatcaatgcctatcatttctcacctcctgcttgcytttcaacccaatgaaacctgagttctatgcccaggactctagcaacttctctcactaggaaattctacct

SEQ ID NO: 395571 - DNA, 620 bp, Homo sapiens
cagcccctcccatcatacacctgtaggcctagtagtgaagaatggtctcttgggccaggcccaggaccccactgctctgtgaagccacaggacatgatgcccagcaacccagccactccaactccagctatggctaataggggccaaaggagagttttggcctttgcttcagagggtgcaagccccaaaccttggcagcttcaacatggtgttaaacctgtgagtatgcagacagcaagagttgaggcttggaagcctccacctagatttcggaaaatatatggaaacccccggatgtccaggcagaattctgccgcaggggcagagtcctcatggagaacctccactagggcagtgtggaggggaaatgtagggttggagcctccacatagagttcccactggggcactgcctaatggagctgtgagaagaaggccaccatcctccagaccttagaatggtagattcattgacagcttgcaycatgcacctggaaagcccacagtcactcaatgccattccacgaaagcagctgcagtggctgtaccttgcagcatcataggggaagagctaaccaagtccttcagagcccattcattgcaacagtgtggcctggatgt

SEQ ID NO: 395572 - DNA, 641 bp, Homo sapiens
atttctaaggagaaaaaaggagtttgaaaacttacttaatttctgacttgcttacatttaaattcattatgtaatatactttagtaataatatatattttatgcaacacatatgcagccatactttacatatcatgtcctaagcgttattttgttccaaagactaagagaaataataaaacaaacaaaaaatggaaatttaaataaaatgatataattagcaaattatacatcatgttaataactaggaaaaacaggttactaagtacttgaggcaaactccaaattgctcaactgttgggtgacataaacaaaaaaacaatttaattaaccaggattgtatttttaagttgtttctattttaataatatagtattctgtgtcagataagtcaatgttgaarccacagttaccatcttctgaactgtcatgctgggtggtaggatatcaccatgctttattagcttgtcagccttacacaattgcaatttccacaccctctgtaatagttttttgctcctatcaatttttaagaggcatcccctattactaaaaaaatttctatgttcttaggaaagaattttattctttgtctctgcctctgtttctctctttctttctttctctctttctctctctctc

SEQ ID NO: 395573 - DNA, 503 bp, Homo sapiens
ttttctttcttacatccttattctaaaattttttctatttttaattttttttttactttataaacttttttgttataaattaacacacaaacacgcaccttagcctaggcctatgcagggtcagaataattattataactgttattcatctctaaatcttgtccactgraatgtcattagggcattatcatgcatagagctgtcacctcctatgatgacagtttcttcctcaggaatacctcatgaaagcctttctttgcctacagctaacttttaaaaaataagtacaattaggataccctaaaataatgataaaaactatagtataataaatggtaacagtcatatagtataaaaactatagtttttatactatagtttttatatagataaatgtatacatcatatatagctatatatataactatatataactgtatatagttatatctatatctatatggttatatatatataaccatatatatataaccatatagata

SEQ ID NO: 395574 - DNA, 631 bp, Homo sapiens
acacagcatatccccctttgttctctctctctcctgctctgctatatgaagtttgtgcctgcttccacttcaccttccttcatgattgtaacttttctgaggtctccccagccatgcctcatgtacagcctgtggaactgtgagtcattaaacctcttttctccataaataacctagtatcatgtaggtctttacagcaatgatagaatggacttatacagaaaattggtaccagagaagtggggcattggtataaagatacctgaaaatgtggacatgactttgraactttggtaatgggcagtggttggaatagtttggagtgctcaaaagaagatggaaacatgagggaaagtttggaatttcccaaagacttgttgaatgcttgtgactaaaatgctgatagtgacatggacagtgaagttcaggctgaggtggtctctgatggagatgagtaactttttgagaactggagtaagggtcactcttgctatggtttagcaaagatattggtggcattgtgcccctgctctagagatctgtggaatggtgaacctgagagatataatatagggtatctgatggaagaaatttctaagtagcaaagcatatgagatatgacctggctgct

SEQ ID NO: 395575 - DNA, 631 bp, Homo sapiens
acacagcatatccccctttgttctctctctctcctgctctgctatatgaagtttgtgcctgcttccacttcaccttccttcatgattgtaacttttctgaggtctccccagccatgcctcatgtacagcctgtggaactgtgagtcattaaacctcttttctccataaataacctagtatcatgtaggtctttacagcaatgatagaatggacttatacagaaaattggtaccagagaagtggggcattggtataaagatacctgaaaatgtggacatgactttggwactttggtaatgggcagtggttggaatagtttggagtgctcaaaagaagatggaaacatgagggaaagtttggaatttcccaaagacttgttgaatgcttgtgactaaaatgctgatagtgacatggacagtgaagttcaggctgaggtggtctctgatggagatgagtaactttttgagaactggagtaagggtcactcttgctatggtttagcaaagatattggtggcattgtgcccctgctctagagatctgtggaatggtgaacctgagagatataatatagggtatctgatggaagaaatttctaagtagcaaagcatatgagatatgacctggctgct

SEQ ID NO: 395576 - DNA, 585 bp, Homo sapiens
gtaactctttttatctgtcacatcctaattttgagattatattttaaaatagacattcaggtatttccagataattgttctattttagaacaaaatggatgaatttacttttcttttagactgtaaatgtggtttgtttctaatatattggacacaaattttagagagtctatcttagggttatgtttggcaccggagatcacagtggctgtaaagacaacgtcttgtaaaagagtggacattgacatcatggtatttttttttgtttaaccattctaaggtaggcaaacttaaatttacttttattacacttaagaaatatttcttgctattacattttgcctgaatagaaagaaaacatttttataaacgttcctatagctttcatgcttcgaggaaactgttgcaatcagactgaatttattgaatatcatttcaattttcctttgacttctgtaaaaatttttagtacaagtctgttttaaggatgaatttgttttaataatatagaagaaaattcattatatgaagaaaataattrtctatttgttttagataaataaacaggaaatgaacaatcaagtt

SEQ ID NO: 395577 - DNA, 452 bp, Homo sapiens
ccaagctttgctgttcctaggaagatttaagaaggttgcatatttaaatgtttgtatcgttgcacacatttgcagagttagagatttggttttattctattttcgacgytaattttgtgaccaattacaattccttgtttttatatagtttttattatacttaaaaatattatgtttcttactgctattcataacattatttgaggtaaggaagtatttaataataaaaatgctaggcaatcaaagcattagagagcctaatgatcaaaagcaaggagttaatgttgataaagcagagagaaaaatttgacttttccacactcagtctctacttaccacttatttggtctctttgggtgggtcctgataaatttgttacaaacaagcacatattcatttattcaagagtcagattcataaagctgaagcacagtgattaattagtgctatta

SEQ ID NO: 395578 - DNA, 452 bp, Homo sapiens
ccaagctttgctgttcctaggaagatttaagaaggttgcatatttaaatgtttgtatcgttgcacacatttgcagagttagagatttggttttattctattttcgacgttaattttgtgaccaattacaattccttgtttttatatagtttttattatacttaaaaatattatgtttcttactgctattcataacattatttgaggtaaggaagtatttaataataaaaatgctaggcaatcaaagcattrgagagcctaatgatcaaaagcaaggagttaatgttgataaagcagagagaaaaatttgacttttccacactcagtctctacttaccacttatttggtctctttgggtgggtcctgataaatttgttacaaacaagcacatattcatttattcaagagtcagattcataaagctgaagcacagtgattaattagtgctatta

SEQ ID NO: 395579 - DNA, 560 bp, Homo sapiens
tggggggtactactgattatttggaattagagtatactcatcctaaggactatgctagcaaaatactaatatgttcttctttcctcaactcctgctttccccttgtgccccaggctctttgatgatcattgagtttgtacctgttattatatcattctttctcatttcaacatactcccttttcatattaaaatttaaaattttccttcttcatttacatgtattaatgacttctgggaggcaccttaatcatatcagtaatgagctgttagcttcaattaaagaaggtagcccttctctaacctggttgtccttttcatgatctttatctatcagattytacaggttaactctctaagcctgtctgtccactgattataataaccagttttccacagccttattcatgtgtcattgacttcttcccatctctttttgagattgtaaataaagtgaaaatgaggtatgtgttgtgtagatgcataattacagcatacagaaaaacaatgttgtacataaaaacaatgacttctgacataagaaacaagtaactttcttgt

SEQ ID NO: 395580 - DNA, 591 bp, Homo sapiens
cccttcttttcttctcttttttcctttctcctttcctttggatcttccttcctagagcacttcccctgcaatcagaggaaattagaaagtccccaaagatcaaaaagtcaaaataattaacagattcgttaattcattcaacaaatacttaggaagtctccagcattgtcccattgtggaaaaaaacagaattgaagttcctaccctcaggaagagtatgggcwtgcggggaacacatgctccatggagatgagttgactactcctgtgatgagtgcctcttgagcagtgtggtccctggatcaaaggcaccagcatcccttggagacttggtgcaaattcttggcccacttcaaagctgctgagttaggaattctgagggtgggtccagcaaactgggttttaaccagcttccaggtgattctgagaaccactgctaagaaaagaggttaacaaactttcaggaaagggtcagattgtaaatatatttcaggcttttcagatggtatggcttccgtcacaagtactcaactctgcaattatagtgcaaagctgccataaataacatgtaagcaaatggatgtaggtgtgt

SEQ ID NO: 395581 - DNA, 583 bp, Homo sapiens
cagaggagactccactttctcacatgytgggggctggggtcttgtgttggggaaacagaggccaggggtccagaaaggaccacccttgaagttaatttttggagcagggaatgtactctactctagatgtctgcaagagggagatgcaacttaagcgagagaggatgtgaggggatggcttgtcccccgcgagtgcatgtgtctgcatgtgtctccccatgtgacacgggagtgcatgcaaacacatccatgtggccagggtgcataggtgtgcatcaggagtgctcgtgctgtgggcttctgtgtcagcaaatacgcattagggaagctgtgtatgtacacacgtgtgtttgtgtccacgtaaagagaacagacgcatctgtgtggtatgggtttgcatggaatgtaagagtactggggaaacacgtctttaaaacccattgtgaaaaccagtccattatgaaggtgtgtgcttcattttggaaaagggatctagtttatttttattcttagcaccttcttcacctctcaggtaataaatcgctcttattttgcctatcaccataggtcctgcccccaggaa

SEQ ID NO: 395582 - DNA, 610 bp, Homo sapiens
cctgtgtgctttggcccacagtcttctctttgcctggacactctcccttccccatttgcttcttgctaagtccaaacaattaatgccttgacactcagctcagtaccaccttgaggtagattggagcttcctcctmggtgttcccacagtgacttgtccccttttttatagctctaatggcaccaactgtgaattgattctgcctccccaatgagactacaagaccttcaaagttaggaatcctgtgtcatatcataagtgtagggtcatgtgcagaaaaggtgcccaataaatatttggagaaggaagggaagggaaagggaaagaagaggaagagagaggcgaggaggagggtgaagagaggagatgccaaatattaattacaaacagaagccgaagactcaactctgacatctttggcttgagcagcccctcctggctcctcctggcaccagatgttttggagcatggacccccaggactcacctggcgcacatgcaggttaggctttccaacttgaccagcacagtctggattccactattttacctgtgctcatacagctttctgccttttgaaacaaagtcatggctagaacatcagcatccaa

SEQ ID NO: 395583 - DNA, 610 bp, Homo sapiens
cctgtgtgctttggcccacagtcttctctttgcctggacactctcccttccccatttgcttcttgctaagtccaaacaattaatgccttgacactcagctcagtaccaccttgaggtagattggagcttcctcctaggtgttcccacagtgacttgtccccttttttatagctctaatggcaccaactgtgaattgattctgcctccccaatgagactacaagaccttcaaagttaggaatcctgtgtcatatcataagtgtagggtcatgtgcagaaaaggtgcccaataaatatttggagaaggaagggaagggaaagggaaagragaggaagagagaggcgaggaggagggtgaagagaggagatgccaaatattaattacaaacagaagccgaagactcaactctgacatctttggcttgagcagcccctcctggctcctcctggcaccagatgttttggagcatggacccccaggactcacctggcgcacatgcaggttaggctttccaacttgaccagcacagtctggattccactattttacctgtgctcatacagctttctgccttttgaaacaaagtcatggctagaacatcagcatccaa

SEQ ID NO: 395584 - DNA, 503 bp, Homo sapiens
  misc_feature (1)...(503): n = A,T,C or G
aggtgctcagccctggctaagaaattataaggacaccatcagctgaggagacatggggcctggcccaggagcttacagtggagtggcaggagaaggacacacacacaaccagagagggagcaaagtcagataaacacattaagcgccaaaggactctgcagaccaccggtgtcaggacagctagagtagcatcaaggatgtcccttgatataagcaaaataacaccacacccaaagtccagttagaaaaagcaactgataaagctatgttgcaggggcaggcaggawgtctcatgcctttaatcctagaaatttgggaggttgtgtgggatgattgcttgaggccaaagttcgacaccagcctgggaaacatagcaaaacctcatctctacaaaaaattttaaaagttagtcaggcatggtgatgcacacctctagttccagctactanggaggctgaggtgagaggatcatttgggcccaagagttcgaggttgcagtaagc

SEQ ID NO: 395585 - DNA, 564 bp, Homo sapiens
tacagtcagctctgcatgaattaaactctttctctatgacaattcccttgtcttgataaattggctctctctaggcagttgataaggagaacttattgggcagttacactttcctccttctagacacascttacacaaactgtttctgtgccttagttcatgacatttcccataggtagaatattcccctcctctccctcttctatctaccctattcttagatcctgctggagctcagatccgctctcctatggaaggtcttcgtggccacactacccagttgcctctgtactccacagtacactagtgcctaccattcatccatgcattgctgaatcagagaaggtccctgatgtaggagtttacagcacagtgagaagagaggagacagaaagaccacaacaatccatctgcagcatcagaaattccttccaacgaagaaagctatttttgtttgtgtgtgtgtgtgtgtgggttttcttgccttgtattttgtggaaaaggtaaataaatgactctaagaaatactatttattaatgattttctttttaaaatcatacaca

SEQ ID NO: 395586 - DNA, 508 bp, Homo sapiens
aagcacagttattaactgaattaacttaatagagataaatttaaccatttatgtttaagaagtaagaataactgcagccccaggagagtagtcaacttctgtgaagactggctggggagatgagtatctctcaacttaatctacagtaactaactttgtgccttctttttttcttcttcagttgtctgggttcatgtctaagcttgttccagctatccagaatgcccacaagaattcaactggatctggaagaggaaagaaactgatggtgttaactgaacccattttgattgagacctacacagggctgatgtcattcattggaaaccgcaacaaacttggctattcccttgcccgtgggagtattggtttttgagagtctttttggtaccataagcatatcatccacagataygtcactttgaaaattccagtttgacccacgctatttttggactgaaacaattaattatttttaaatgacgctttatgatttagaaatttagta

SEQ ID NO: 395587 - DNA, 601 bp, Homo sapiens
catttaatcagatgctgactccaactacagctattgatctagatgtggttttgttgcttgagtcaaacaatacattccttggcacctggtatgcagttattgatcttgaatttctttttctttttcttttctaatctrttattaagattatgaaaagcagtttgctttcagcttgtagagccagcaatatactcagggttactatatcaaccttctaaccttatgtcatattctagtcaacaaggatcttgaacacctctctgttctataagacatcatgctggtccatttcattgatgacatcatgttgattaaaccaggaaagcaggaagtagtaactgttctaacacttgtataaaacatgtgcaaggaaatgtattgcctcaaaattcttttctttgtcaccaaaaagtcacatcagtaacttttgtaaaggatcagtggtctggggcatgtcaatatacacatcctaaggtaaatggtaaattgctcccctacatgactaactttcttagttaacccctcaatacttaatggggttctttagatgtgaaagtaacatatatctcatttgggtctgctacttgaatatattgacaaa

SEQ ID NO: 395588 - DNA, 601 bp, Homo sapiens
catttaatcagatgctgactccaactacagctattgatctagatgtggttttgttgcttgagtcaaacaatacattccttggcacctggtatgcagttattgatcttgaatttctttttctttttcttttctaatctgttattaagattatgaaaagcagtttgctttcagcttgtagagccagcaatatactcagggttactatatcaaccttctaaccttatgtcatattctagtcaacaaggatcttgaacacctctctgttctataagacatcatgctggtccatttcattgatgacatcatgttgattaaaccaggaaagcaggaagtagtaactgttctaacacttgtataaaacatgtgcaaggaaatgtattgcctcaaaattcttttctttgtcaycaaaaagtcacatcagtaacttttgtaaaggatcagtggtctggggcatgtcaatatacacatcctaaggtaaatggtaaattgctcccctacatgactaactttcttagttaacccctcaatacttaatggggttctttagatgtgaaagtaacatatatctcatttgggtctgctacttgaatatattgacaaa

SEQ ID NO: 395589 - DNA, 624 bp, Homo sapiens
taattgcattactaaataactagggtagtagtcccaacaaccaaatcctgctttgaaataaaagtgaaattggaaaactgttgatctcaataataataagttgacagtactgactgtgcttgataccttgtgatgttacatccctacatcagattcttatattgtatttcttatgagtacaagcttactctcttgcagaattagaaaggttaggagaaaaaataaaatgaagaaaatctaaatgttattccttgattatcctttgattgggaagttagtaaacattttcaaaatgataatccttacaaggattcagtgaagctggagctctcatatataatttgtagcaatagaaaattcttttgtaatttaatttgtcaatattatcagatgacagtgtttgtacatgcacacttctgaaccactaattatttctttagtaatgtatagtaaggtggggtaataattttggaaatatataaatatgcttgtctcttttgtgtttccatgtatctgattttcatccaagtcagcctgaagcayctatctactctttctgaggatgcagggcagggaagttcagagggaaaatagaattgtaataacatgaaggcagagtgaaaa

SEQ ID NO: 395590 - DNA, 590 bp, Homo sapiens
gaaaaggcagagctgattgaatacatcttacaggtgagaaatgcgagacttacaggtgttcagggattcatgcatcatgagctattgatcgcgggccttaaaatctgttcttctgactctctgtccagtgtttttttctttggatatataatcttttatcctcctccctctcctttacttgcctctcttcccctcttctcttccctccctctttctctctctctctctttccttacctacagttgttttgtttttttgtcctttctcttcttccttcctctccatgtgctcctctctgttactgtaacttctgcttaagaggccgagaagagcactatcagaacttagcagacaagtgccagcatatccatatactggtacttaataaaacagasttttgttttatgcagtttgcctttggcttaatatgaaggaaaggggtgacggcaagagacaagtaaaggctgtggatgatttgtgtgaaatgaaggcagattctctttgaaggggtgggttgcccctccacacctgtgggtgtttctcgttaggtggaacgagagacttggaaaagaaaaagacacaaagacaaa

SEQ ID NO: 395591 - DNA, 659 bp, Homo sapiens
catatgaaactgagtctatcatttagatgattgttactgcctttctgtaggtaatcttatttggaggtaaagaactagaaataggttcttttgatattgacatatcttgaacagccacacatagaaatatgttgccatrgagcccagtaaatggtaattcagatttgctaggccttggctaaaaactggattcatagagctctgactccttcaaattcctagattttcacagttcaatgtgctcagtgagctggggcactgtctgttggaagaatatgtatcttagaccttttccctccatcggctttcccaactctatcctttcagtccctcaggccaaataccttgaagttattcctaatgcctctctttctcttatctctacatcctatcctttaagaaattatattttctctttattaaaaatttatattagatgacaggtgagtagatattactgtttcatttttatttttgagactggagagactcaagcaggttaagtgattagatcaaatacgcacagctaaggaatgtattctaaaaaaattaggagatgtaaacaggaaaataatcagccacacagatgcctccttaccctacaaattattttttgtagtgtcataccaaaaacatttgttataaagcatttgtgcttc

SEQ ID NO: 395592 - DNA, 585 bp, Homo sapiens
ataaatcatatataatggattaatttgtgctcggggcccactttgcttgttgagtgaaagaaaatgagcaaaggttgaactggaatgatcaattaactttactgaaacactcattagtctacaagatttctgtgggaggcttacctgtaaaaaaatgctaccagctccccagctccactgtgtcccctttagagaggtggtaagtggggtgtgtatcgcagggggaaatacacaggtcttgtttcaaatagaccaaagacaatacttcagcaatttgaaataggttctttgaacattaatttcctcataaatatagcaaatattatctataagatttctataatatttgaagacaatgaatatgaagatgtgtagaccatgttcccttttctgtgtcacctttamttacacaacccttacagttacacacacacacacacacacacacagcgcgcaagcaggaagaaactggttaattttttttttattacactttaagttctagggtgcatgtgcacaatgcgcaggtttgttacatatgtatacatgtgccatgttggtgtgctgcacccattaactcctcat

SEQ ID NO: 395593 - DNA, 591 bp, Homo sapiens
tatactttttcatgccctggttaaatcgccacttcttccaaaattgacttatcctcaaatcagatgtggaatctgccctctgtaatgaaagcttctcccctcagttttctcctgtctttcttagaacccgtatctttcctagtagactgtgagcaacctgaatgcagaggcatttccttgttcgtctttgatcaacaatgccaargctgtgttgtgaacacagttcagctcagtacacatttgtggaatgaataatattgttgctaagttagagttcagtatttacatcttttaaactacattatctctgtggctttaaattagattcattttgtttagtattcattagttaacataaactctattgggtactactcagattgcaaaaaaaaaaaaaaaaaaaaaaaaaaaggccttggtctctttgacccttaaattattatgaaggagtcgctttaatattcaaagactcatttcttctctgctctctgtaaaaatgtgtggggatatggtagtggaaagcttcattgatatcccaagcatctttaggggattgtgtgtacgtgcacattttcatttaaatgattggaa

SEQ ID NO: 395594 - DNA, 636 bp, Homo sapiens
ccatgccgactcttttatttgccaacagttaaacggaagcctcaagaagtgattcagctagtccagtcgatgtgccttttttcatgcctttggaagacagtagctgtggggaagaactgaaatatttatgtgtgccaagtactgtaactgagaagttttcatgctttacgtcattttaattttcacatgcaccttagataagctatctaagaaaaaagggaagcttggagaggatcgggtcagttgtctaacatcccagagttatcaagtggcaaggccaggatttaaaactcaacaagcagaaagatcttgagwtttcttgatacggatatggctaaaatgaggaagtctctgaatttgaaaatcttacctgtttggtgtgtttgcctctattatggaaattcatatctggaaatgcaggtgtaactctttgagagtgtcccctttctgagtagagttttgtgcttccttcttttcacccagctatgggatacagctgctcacaatttggagcccacactctcaatgaccccctcaccttcatgctgtgttcacactgatctctctgtgttattactctcctgcccttgtgtacaagtaaaattccttcccattctttaagactacttcaaatgc

SEQ ID NO: 395595 - DNA, 527 bp, Homo sapiens
atgaactatacagtatctgcttcaactgctaactctgatgttgtagagtgaaagcaaccacaggcaatatataaatgartgaatacacctgtgttccaataaatctttatttacaataacaggcaatgggcttgatttggccagcagatcctagtttgccaaccttttcctgaagagagtggagagtcagaatagtggagaacaactcttggtgggccctattctatcctgttcaactttctatgcatgattcagttgaaggtagagatcacaactgggaaatctgcaaattccaggacatcaggaatgttctctaatatacgttatgacataattggggtgcagaaagaggcaagtatgccctagtgcttaggattattgtctttggagtcaggtggaccttcattcagattgtagctctataattatctatttggagaaactaatttgtgtaaattattcaatctctctaaaccttattttttctcatctgtaaatggacataattttacctttctcaagggttg

SEQ ID NO: 395596 - DNA, 607 bp, Homo sapiens
tatggtcccagctaccagggaggctgaggtgggaggatcacttgagcccaggagttcgaggctgcagtcagctatgatcgaaccactgcactcctgcctgggggacaaagtgagaccctgtctctaaaagggtattaaaaaataaaatttaggccaggtgcagtggctcacacctgtaattccagcactttaggaggcygtggccggcagatcactggaggtcaggagttcaagaccagcctgagcaacatggtgaaaccccatgtctattaaaaatacaaaacttaggtgggtgtggtggtgctcacctgtagtcccagctactcgggaggctgaggcactagaatcacttgaacccgggaggcagaggctgcagtgagtcgagattgtgccactgcactccggcctgggagacagagcgagaccctgtctcaaaaaattaattaatttaaaaaacataaaaacttatcaaactgtttagtctacatatatgcagtttattttacataaaccatatgccaataaaattgttaagttgtagctaatgctggcaagggtgcattgaactggaactctccgatatgctagagaacaaaacatgtgagaa

SEQ ID NO: 395597 - DNA, 607 bp, Homo sapiens
tatggtcccagctaccagggaggctgaggtgggaggatcacttgagcccaggagttcgaggctgcagtcagctatgatcgaaccactgcactcctgcctgggggacaaagtgagaccctgtctctaaaagggtattaaaaaataaaatttaggccaggtgcagtggctcacacctgtaattccagcactttaggaggctgtggccggcagatcactggaggtcaggagttcaagaccagcctgagcaacatggtgaaaccccatgtctattaaaaatacaaaacttaggtgggtgtggtggtgctcacctgtagtcccagctactcgggaggctgaggcactagaatcacttgaacccgggaggcagaggctgcagtgagtcgagatygtgccactgcactccggcctgggagacagagcgagaccctgtctcaaaaaattaattaatttaaaaaacataaaaacttatcaaactgtttagtctacatatatgcagtttattttacataaaccatatgccaataaaattgttaagttgtagctaatgctggcaagggtgcattgaactggaactctccgatatgctagagaacaaaacatgtgagaa

SEQ ID NO: 395598 - DNA, 587 bp, Homo sapiens
ggcctaatattttacatacaggcatamccgtggtactctgcaaagtttccaagccattctaaccttaaacaacttgctctcactttcttcagacactcaagggaaagtcataaggaaaaggctcacctgtgctgggctgaaccaaccatgtgggcaggtacaatgctccccacaagtccctttgcccttggtgctcgtcttgtgggggcttttccgcacactgtcccacaaggtcctgttgaagctggaccccccggtcctgtttgaagctgggccccctggtcctgaggagggcatggtctgagaactgtacccgagcccctgacagttcctctgccagccacaagcacagtgggcatccctgatcagggtgggcgcactcctgacggcatccatcccatcggacccccggctgcagctgtgttgcttggtgaggtatgcattcatactgcactgatgcctactctttcctttggtcagctctgcacagaaatgtctcctccctcacacccctttcttccagccagttgtaaaagtcttttttccaccgtggattcctcagtatctttgacagctgctataagcag

SEQ ID NO: 395599 - DNA, 588 bp, Homo sapiens
tgttcctttcacagtctattttctcattccccagtgttctatactttgttttcctcttttcttcctcatgttctagttgttcacataatttcagctctatttaatgaraaaacgatttcagagttccctagggcattttagtcatgttgcgtaagaacatttccttcttaaaaatattatcagaatgccaagctttaacatatattaaagtctttctaaaaaataatttcattgcaagtaaatgtattaattttgctaattagcaaatttgatttttgatagaaatggttcttgtgaaaatggttccttggcacaaatgcaaatgacaattgaatagctacaggaaatttctagggccaaagggaatttttatgtaagtgtcaaacaaaagtacaaaatatatttaaagagacttctttttattaaggaaggtaagttaagagacattagagcttgcattaatgaaggggtcactgaggttcttacatgaaaatgccttaagtaagctctgtcttatatgaggtcatgatatattagggttgggtatgaccttaaatgtgacatagtctagcttctcatgcaaagcag

SEQ ID NO: 395600 - DNA, 625 bp, Homo sapiens
ttcttagggagctcagagtgattagagcctgcttgtgaatccagttccctgaaggttgactcagycaaataataatgctttactctctggtactctgcaaccaactgacattgcgctctcctctcctttcagcagacactttagagttcaatattgaacagcaccctaacaaatagtattctttatgctttagaaaataaaattagagagattctagaatgcttttttattttgctctaaccttctctaatattctttttatattttggtaatattctgacctctttgatagaaatgcactgttgagagaggtatacttgagaatcatgagttttccatcttgttaaatatcttggagttcaatgaacacaaacctttcattttaaagatatggattttctatctcaactagtaaatggtagtgcttgatctaccatttactgttacctcatgtaattgccaatttttggtgtgtaaccacaaccaaaaaaaaatcagcggcaataagcatttttttcttctctatcagttagctaggacagctgcttcaggctgcagaatacagtagtctcaccttatccatggatgacacattccaaatctcctggtggatgcctgaagctgc

SEQ ID NO: 395601 - DNA, 625 bp, Homo sapiens
ttcttagggagctcagagtgattagagcctgcttgtgaatccagttccctgaaggttgactcagccaaataataatgctttactctctggtactctgcaaccaactgacattgcrctctcctctcctttcagcagacactttagagttcaatattgaacagcaccctaacaaatagtattctttatgctttagaaaataaaattagagagattctagaatgcttttttattttgctctaaccttctctaatattctttttatattttggtaatattctgacctctttgatagaaatgcactgttgagagaggtatacttgagaatcatgagttttccatcttgttaaatatcttggagttcaatgaacacaaacctttcattttaaagatatggattttctatctcaactagtaaatggtagtgcttgatctaccatttactgttacctcatgtaattgccaatttttggtgtgtaaccacaaccaaaaaaaaatcagcggcaataagcatttttttcttctctatcagttagctaggacagctgcttcaggctgcagaatacagtagtctcaccttatccatggatgacacattccaaatctcctggtggatgcctgaagctgc

SEQ ID NO: 395602 - DNA, 411 bp, Homo sapiens
acacattgtttcctagtctaatgaatagacatgttaatgaaaatggataatgcatggtgaaaagcacatgttgttaaacacgccttgcttatctctgcctggcttattcttacatatcctaaagggttcagcttaaatwatgcttcttctaggaaagtgagattcagggtagagttcctcttaggagcttccccgaaggctcttcttcctatcaaggtagttatcacactgaattgcagctatttcattaatagttgatctttctctctagaatgtaaacttcatgaagcacaaagaaaatattgctttatctttcccacagttatacctcagaaaccctgcacatttttactgactggtggaaggcaggcagacaggcaggaagggaagaaactacaataataagccatc

SEQ ID NO: 395603 - DNA, 597 bp, Homo sapiens
gacccttttccctcagctgtaaggagagacaataaaaactaccttgcatattgtattctttaggagacaggttcagttacatataacagagaccaaaataatgatgtgtttgcaagataggmatgtatttctttcatatatgacagtccctaggttagctgtccagagctagaatgtctatgctgctccacaaggtcttaaaaggacccaagtaccttttattttcttttttaccacccttgggggttgcccttgcacatgtagtccaagaggcctaccaccatgctgacgtgctaaatagcaggttaaaagaagtacagagatggacattgttcgtccgtttaaagcaatgtctgaaaagttgtaagcatgatttttccctcatacctcaaagattaggcacaaagccattcctagatgcaaagggagactgagccatataacctttattctgagatgccctgggctcagataaaagtgagggatcccgttattatgggagaaaagggtaatgaatattggggagaagcagcggtttctaccacacaacatgttagtagtattcttcaatgtcggaagcttctgcccaggggatgc

SEQ ID NO: 395604 - DNA, 597 bp, Homo sapiens
ttaatccacacatcaacatgtgagatatacattactgttcctattttacagaaaacaccatgagccttggaaacataatgtatcaaaaggcacacagatgttttgactccaagtccatgtatgtcttcctctcctcaggaaagccttcaggaacctcgctgaccaggtcataccatcctattacatgttttcaccgcagcattttcctctccttcatagaacctatcacagtttaattttayatggttgggtgattatgtattttatgtttaagagcaatggcagtgcttgtgtccccaaggcacataaagcaggtgctcaggattacttgttgaatgaacaaataaattgtactgctaaaagtagagggggcagaatgagaggtctgtgaacaaatatggtaataacatgagtaaattaaaaactgaatttcacacagtaacaacaaagacccactattcttgactacctgttgtttcttttctaaatataagtattatttttcaaattattactagtgaaagtaagaaaaatatttattttccaaggcaaataaaaacaaattatttttaaatctttttttaatgaaggcattaa

SEQ ID NO: 395605 - DNA, 546 bp, Homo sapiens
aatgtactaccaaaagaacaatttctactttctgggagctgatcactgtctttggagacagacaaaattgaatttaattctatctctacaaatagcaagctttaagaccctagttatgttactcaatatctctmccacttccttttctcacctcttagatgggtacaatgcctatatcacagggttactttatgaaaagacctagtacatgaagaatttagtgctgtacctggtacttggtggatattcaatcaatgttaaatcattttccctcacacacaaaaactcatttctgtgtttccaaaaatgttttcacgttttgtatttgagtctcagaagaaccctgcgataacagggattattatccctgtttctcattagagcaaataaaggctcagaaaaaccaagaggctttcttttggtcatacacacctcataagcaacagagcaaagacttcacatttctcacttgttttcattatagcatgtatgcctcctggaaaaacatgtaaagtgaaggcagaaagcagaggatgtcaatgaaat

SEQ ID NO: 395606 - DNA, 544 bp, Homo sapiens
tttcaatatcaattcaaccaaccttctctttttctcattcatggtgttctgttcagctcacacccacagtccctcctctgccttcattcctgcccttatagtctcccatctgccccagccacatgcttcttctccatgcattgtcgaccagccagcccacaactttcagaaaatattccttcactagtaaatgttctgaatttctcaggaaacaacargaaaataaaaagctgtcttttaagttaccttccaaaatcccagtcattcctctctgaaattcttaagcaaatgcttatcattattccagaccccacttgctgggtcttgtgaggcttttccaacctcctgtttatcaggttcctttattctttcctttaaagagcatgtcctaaaaatcctcttctctttagtttttggggaaaaaaaggtaaagaattcatagtctttgtgtgtggaaacagttttaaaaactgccctttgaatcttgcattcattcatttattcattgatccaacaaacatatcaagcatctcccatgtgctat

SEQ ID NO: 395607 - DNA, 583 bp, Homo sapiens
ccacacatagcagggacaattaagccaggtttctgaaaataatctctttcttgaggttctcttctgaggctccagtgcctttgtctgtgggcttgaattatttagtgttgtttttatgatttacctgtataattcctgaccttaaataygacccaactctcatcctggttgttctgaccttgcttctgtaatgctcaaagtgttagatcacaagttggagaaagttagtaacatactctcatttcatactgctctttcttgccttagtgactttgttccagttgtttttaacctctcacctccctcatcttgtaaacccctgttttaaaactgtctcaagacttttctcctttttctagccttcgctggttatctttcctttccatctcacgcagatggatcactcttcccttgctgcatttaccatggtttgtacatcttttaattgctgctcctaatcacactgcaatatagttttcttggttttagtgttttcttcttactctaatgaggtggttaagaataacgctctctgaggttggaacactgagttcaaggaccagtcattccatttattaactat

SEQ ID NO: 395608 - DNA, 580 bp, Homo sapiens
ataattcaacataaatttttattattttaattcacagcataacatgcatatccatattcatgtagcaattcaaatagcttctttcaagatttttctgattgtgaaattttgatgtatttaccaataggaacttttctcattttgggggggcccatgctttgccacttctctgagtgcacgcttagtttgcctaatgggtaattcaaattccccaacataaattaggagatgttaaaaagtaaaaccagagaaaataaataatctggttaaatgctatcacaactggaggatagctgttatagcttcctaatggataactatttaatttctctagcttcatctctccctgttccccaatcttctactgcaagcccagtgtcttttggacttgatttaattctgttcctcccaacmattttcaatgctcacagaacttcatgtttgcttgtcatgccataaaagagctcctactcagggaatgactattgactcataaagtattcctcccttacttccaactcacagtttggcctcacttagagattccctttaccaagaccacagagcctcatgctagtca

SEQ ID NO: 395609 - DNA, 623 bp, Homo sapiens
tttggttttatacattttatggagacataagatatcaatcaatacatttgtttgttcagtccattggttcagtccaaaaaagtggaacaacttgaagagagtagggggtgggctttcagttggtaggtggattcaaagattttctgattggcattggttgaaagagtttatctaaagacctggaatgaatagaagggagtgcctgggttaaggtaagaggttgtggagaccaaggttcttattaggcaggtgaagcttccaggccgcaggcttcacagcgaataatagattgtaaatgtttcttatcaggctttaaaaggtgccagactcttagttaattctctcttggatcatgaaaaagtcctggaaaggggaggggattttctacagaatgtagatcttccccataacataaaactttgtgtggccatttcaaattatgtcaaataaatctattttggggtaagatgctctaattcctttcagggcctgctctctgtcatgttggtattttatctactctaaatagtcagctttgtcagtcttctattrtaacgttaatgctggtcagctgtgcctgaattccaacgggaggaggaggagggattaatgaagcatgtcca

SEQ ID NO: 395610 - DNA, 614 bp, Homo sapiens
attggttgaagacaatcccgtgtctatacctagctgagagacgctagtgtgtttaattttttagcagggtaacaatttctaatgagaagaagacaatgtatattctgaggtagttaattgtctttgctacattctctgaacagtattattagtatccttcatgaagaagtttattctttttattcttcaagttcttgtatttccactataaccaatactgctatagaagatactyatgttgtctttatgatttggaccttgccttgtctccactgttaatttccagtgcatatcctatctaaggtttcctgttcgtctcactgtttcacacttttgtgaaattgcataattttttttctttaactggaaagctcttatttcactcccacctctactttatgagctctttccttattcatccgctttccatatggagttgatcatgtattcagttttgtgctcacatatctttcccctaagtagaccataagctccttgaacatactgtgtcttatgtatttaaaaattcccagcacttagaaccaggaaaaaaaatcacagctactcaatgcattcttgaataaattaataaaatgtacaactaaggtacatat

SEQ ID NO: 395611 - DNA, 578 bp, Homo sapiens
gacaatttcttgccctttaaatttagtttacaaagatgatttgccttkcctgaactcctaaacaatactaattactcccttgtttgcattccagtgtacttcttactccctcttcacagttaccatactaagttttgttggtctgtttacatatctttatcatctacaaatctaaggccttcttgaagccatagtctctatctcattcctctttgttgcatcagtacctcagctaaggtctggcacacagtaaagtccctcagtgaatatttctgtaatacattaatggattattaataacatatttgaatagcatttgagagcttctaatatgttttctatgcattcccttatttatctaagtagacaaacatgcatatcacacacacatactgtacaacagagattattcagcttcatttgacaactgagaaagctaggttcagggaagttggtcacagtttctccaacttaaaatcctgctctgtatatctggagacagttgttcccaaaaccaggaagatctcgtgtcacgatttttaattgtcctgaatgacctgctcgatggtgctcacaat

SEQ ID NO: 395612 - DNA, 598 bp, Homo sapiens
gcaaactaaaactcatacttcatctttgcctctctccctaaaatttcttctcacacaaaagaatcattctagatataaaatattttaagactttctgtatagcytcacctgttatgtttcaaatcttagtgtatgatctagtgtcaaattatggtgagtaggggaaaaatgaaggcagagggattttttttctggagttataccttatagaaaatggatagaggcaataatggaagaaagagcttggtaataattctcagcttcacttcaaatcttttttactctttatatagaagagaactccttgctgctgattacatagttcttaggccagaaaattaacctgtttacaagaaaaacaaaatatgaactatgaacatagaacaacaggaccatatatagatttttgaggtgccttgtctaaggcatacaggacattatgcttcagccaagtcattagaaaccaatttctataattgttccttatcaaatttaacttttgtcttttatttctgcatgcttttcttaatgtcctgtctcctaactttctatgtctgagtggtaaaaacagagatcatttcccagaatgaaaagttat

SEQ ID NO: 395613 - DNA, 554 bp, Homo sapiens
tctgaaagtgagggtaatattatttttattattaagagttcaggcaagcagagtcaaattgatttcaagccaaaacatgaatcttccatcctgctaccttgttttctgagctaggctggtgttaagctaggtaggtaaccatccaggcattttattaaatgctagggaaagggaccacaatcttagcttcctccaaagttgcttcctttagacatcctgacacagtctgcaggatgaactagccamgccctcaggcactcacatagtttattcagcactgttcgtgtctcagtaagtccagcggtcttatgtctccgtagagcaggggcaaagcaggtgacaagccaaagccactggatgatattagtagtgatgacttagagctgggctggattgaactgcacccacctagttgtcttgtagagaaggaacttaaaaggagaagaaaatctaggaaagcaaaaagtaaaaactaatctcagtaataagtataataacctaagaacctttttttttttttttttcgagacacagtctccccaggctggagtaca

SEQ ID NO: 395614 - DNA, 570 bp, Homo sapiens
ttatttttttttaatgagatccagtaaaaactgtctttctccagagtctttatttacccacaagatacgtcccattgagaatcatgaaaatattatgactaactagttgatccattatatacatatgtatgccaaggktatgttttccatgcccagtgtttttggtaaagacatgaaattttgttttgtaaaacctgctggattgctatttgttttatcatttgattaggattccacagaatagattgacattaaaaagctgttaactctgttaactccagagggcacagctaatgaaataccccaaaatttgagcactttccaaaaccaccatgtcgtatagaagagttctctattaatcaagatgaaagtatgtcctttatctaaatgaaatctgtaatttgagacaaagatgaaagatcctttggaggataaagcaaaagttgttgtgaaaattctagaaactaaaaagtaaagatagctctactcaatattcatgaagttagactggtgatgcaaatagagattgcaatctcttattttctagtgatttgccttgtagcactcctg

SEQ ID NO: 395615 - DNA, 565 bp, Homo sapiens
ttaggaaaagtaatggagaaatcatccacaatgagcatctagtgaattgttttcatcacaatctgaactgcaaagagatcagagtacaggacagtgacacgccattgtggaatccaagtgggctcaggtgtgttagatgttagtttgtgaaaaaatatttgcttatcagcaatgtcagaataaagaggtataaatatttatttgaagtttaaaatccacatttcaattatttatcctacttgagtctcagttatcctaatctagaaaatgggataataataactacactatagagttattatgataattaaataagataatatatgaaatgcttggcatggcactttgggtatcatgaattctcagccatgtcagttctcctaataacaatagtaatatttattcagaacttattagtgcagttgcgattttaaggaattcatatggattagctcattttgtcctcttaataaactctatcaggccctccaaatgttaaatataacacaaaaagtttagttaaagctttaccagatgattrctaatatagtatatataaagccat

SEQ ID NO: 395616 - DNA, 672 bp, Homo sapiens
acaattttttaaaaatataatctttactgaatcttcatttattataaatagaaattattatatttctggtgcatttgaaaggctttttgtgataaggagtgaggcaggtatcagattcattttctcccccatatggttagtcaattgtgtcattacattttataagccattatttttctcattaattcaaaaacgccttttaaaataaacttacatagtttaatttatcaatattttcctttagagtttcaatgttgaaagaaaaccattttcttctactaatgtgaatgtgtagtttattttgtttttcatcaagaattatttgtgatgaaaggcatgaaaatggratgatcattttagccaatatttacccagttattttcagcaccatttatctactcttccatcactgatttcaaatgtcaacattcttgcacgatagagatagagtttgcttttgttctttctgttttgtctctttctgtgccattactatacctttaagattgttgtgcatttataatatactttaatatctgattgtatattcataaacagctggtaaagtccctgtcattatattcctttcctcttaatgctcttggctatttttgtatttagtcttcagataaaatttagaatcatttgtcaatctaagtataattatacagc

SEQ ID NO: 395617 - DNA, 533 bp, Homo sapiens
  misc_feature (1)...(533): n = A,T,C or G
ctgaagtaagaatgtcccagggagatgttttaggtcactgagcagaatgaaattcattttaggtttaagctctttgccttatcttggcattacctttataattaaaataataatagaaaaagaaatcatgaaaaagatattgtcaggatatgatagcagttgatgaaaccaagctcacytatgctttcacttgttttaatacaacatttaatgtatgtacccaaagaacatcaccgtattttatactaagcatggcgntatgaaattttacaaacttaaaacacaataactataattctggncagatctanaatttatcattgcccaaatacttccactctaacctcatttcttctcggttgaaatttgtacaaatgctttctctctctaaggggcaggggtttctctgctcagaggtgagatgaatgtctaaaaagataatttgaagtcttctgagccactttttagtcataagcacaaaaaacaatcacccatattgaacctttaaaatataaagattcttgaactttaaa

SEQ ID NO: 395618 - DNA, 580 bp, Homo sapiens
aatatagaatttcccagagattcattggccctagaacactttgttggggataggtctaccagtcacctctggagaagttccaagtcatagtctttgggaaatgctgcctatgattagcataggagggaaacaatcactattgytgaggccctctcaggaattaagtgaagctgactgatttgtttttaagttcttatacataaacatttttattcaaataaagttaaggtcccatttcatggagttccgttatttagcaaacaaaaataggcaaaccaagaaaaaaaaattaaatgaaagctagtgatactgtggtaaatgtaagacatgtacggagttaatcatggtaggaaaaaaaaactactaaaatgtctaatatttcagggagaataatactgctccctaattgtccacaaatattctgcattcatatcctccactgcattttctattcttccaattttcaggggaagatcgacaggtttgactacataaaaagtacaatttctccatgatgaaatgcattttaaataaagtcaaatgacaatatggggaatcatttgcaacatgtttgaaagat

SEQ ID NO: 395619 - DNA, 595 bp, Homo sapiens
tctagctgcaatatttcagtcaaatggtatgattcgctaaataaaagcaaacagggagctaaaaattttttacttaatcattcaaagattaaactcatctatcacccagtggaatcaatcgctttatgcatgcaaatgtagcttttatttataaaattctcaaagagaattgaggttacatgaagaaaaaagatggcaactttgattaarcatcgtcaagaaaaatgcaacttttaagatgagcaatgagccaaattattaagagtaggaggtgggacaggaggaagagataaattgattttaacttccaactctgatttgactctgattttgggcacttactatttttcacacccctttccttttcctaccatatggaaattagaaggaaaagacaattaggatgataggagagaagagacaaggtgctttagagaaagaaggagaaataaagttagaaccttgtccaggagctctctcccaacatgaaaactgaaagagcaatattttgtccaaggaaactgggcatttcctcagcttgttcctccctggttattttactgctagcacttcagtcaccactgtcaccatctgg

SEQ ID NO: 395620 - DNA, 595 bp, Homo sapiens
tctagctgcaatatttcagtcaaatggtatgattcgctaaataaaagcaaacagggagctaaaaattttttacttaatcattcaaagattaaactcatctatcacccagtggaatcaatcgctttatgcatgcaaatgtagcttttatttataaaattctcaaagagaattgaggttacatgaagaaaaaagatggcaactttgattaagcatcgtcaagaaaaatgmaacttttaagatgagcaatgagccaaattattaagagtaggaggtgggacaggaggaagagataaattgattttaacttccaactctgatttgactctgattttgggcacttactatttttcacacccctttccttttcctaccatatggaaattagaaggaaaagacaattaggatgataggagagaagagacaaggtgctttagagaaagaaggagaaataaagttagaaccttgtccaggagctctctcccaacatgaaaactgaaagagcaatattttgtccaaggaaactgggcatttcctcagcttgttcctccctggttattttactgctagcacttcagtcaccactgtcaccatctgg

SEQ ID NO: 395621 - DNA, 568 bp, Homo sapiens
aaccttcaggaacagctggaagagagaatgaaatgtgaacaacaaatagccagaaaatgagtgtctcttttgtagatgacatttttatattactgaagttcaggaggattatagagacttccccaatttctatcgtatcaacttgcttagtcttctgatttgtttttaacttaaggaagtgcttattaccctgttacataagtatatatataataggttatgtatatttgaaaaataccatcatagacagccaatgcacattggtcttcatgatgaatgcatcccattctcagtcacctgttcacacctccaagcacatgattccattatctcagatgcaatacatcctgycactcttctaacattttggcacagaacttacctagtatatctctgaatggcacatttcttttttgcttcttttctatcaaagtgtattcttttaggaaaacagaaacatatctagataaataacaaagcactctgccatgaaagacctttagcaaagcaagagccagccaagatctgtacgtgttgattacagccaatacattcaaccaacaaacag

SEQ ID NO: 395622 - DNA, 521 bp, Homo sapiens
tatattataaatagaggaagataaaaggataagagttctatatcttatttgaactggtaatatgacactaataacacatatatatatataactttatatatacataatcttcatacacacatacatgtgtatatacacacacatatataaagtaattcttagagcaactaatatataaaagctgtatgttttggtctgtttaggctattgaacaaaacaccatagacatggtgagaaacttattttctcacagtcctggatgctggaagtacaacagtcactggaatattcagtatctggtgaggactagctttctggttcacagacagcatgtttttactacgtcctcacatggcagaaggagcacgggcggtctctgggatctcttttataagggcactaatcccattcacgaaggctctgtcctcrtgacctcccagaagaccacctcctaatactatcacatgggaaattacatttcaacacatgaattttaaggatacacaaacactcagtctata

SEQ ID NO: 395623 - DNA, 541 bp, Homo sapiens
gaatgcaaaaagtgaattctaagttatattatgtatcattccttttatataagattcttaaaatgacaaaaattatagaaatagagaacaggccagtggttgctatgggtaaggggtgtagagaggagggaagacagagtggttatcaargtgcaacatgaagtatctttgtgtggcagaaatgttctctatcttaattgtatcaatgtcaatatattggttgtaattttgtaccctagttttgcaagatgttaccattagtaaaaactgggtgaagggtatatgggatttctctgtattgtttcttgcaactgtatatgaatctacaaatatctaaaaataaaaagtttaacaaaaagctatgtctgcattcattatgtcaaaattctattaattcaatgcatatatacctactttttttttttgacatggattctctctgtcacccaggctggagtgcaatggggcaatctcggctcactgcaacctccacctcatggatttaagccattctccagcctcagcctcccaagtagctggg

SEQ ID NO: 395624 - DNA, 516 bp, Homo sapiens
aagggcacattataattttaatgattgtttttctttttagaagcacatagccaaggtctttatcggtatgtctttatctgagccctcaccatcaccattttcacacacatgagtgacatcatatgcagtaaaatagacaggacaaatcagctgcatcctggagtaccagcaccatccctggaaaagtaagtgttttcctgagtgcacgttgcttgttcaaaattgtcatagatgagaaaaacttgagaaaagttactttaaactgaattaatttttagacttggtcatagagatgcaaacatcatgcctttgaagagttgctcatgatgtgtcacgtaggtcaytactggatttcatagtatatagcatttggatacatgataggacaatagtttccaacctcgttgattatctttattatccagtgatatggtttggctgtgtcctcacccaaatctcatctcgaattccagctctcaagtcctcatgtgtcatgggagggacctggtgggaggt

SEQ ID NO: 395625 - DNA, 546 bp, Homo sapiens
ttgctggggccaagcaaagaatgaacattttatcacaggctaccaaattaccacatggccttagctgcctatcatgaactggttgctgtctaaccatcaaaccaaaaagcacagcagcacttcatattcaaatgacatgtaagagattcagcccagtcatatcctaaaggcaaatgtaagttgcatgagcaagtggcccacaggccacattcctgatccaatgcctcctctttctcaacctgccctcataaccacatagagatttccctatagctggttgactgaaataatacagcttcatttaaagatgggagccccttwcagacctatttggggtggccttggaggacaagggtgaagggaaggcctccagtggacaaaactttgagcagtgaatctggctgtttgctttgcttggaagaagatagggccagagttgtgaatctacaccacttaatgaacagtggctaaaagattagataagtggtcagggacttggaagaaacataattggaaaattggttctgtaactaggcacagactatg

SEQ ID NO: 395626 - DNA, 533 bp, Homo sapiens
tgtcatcctctgcaaacagctattatagttttgaggaacaacttctgtcttgttgctggggccaagcaaagaatgaacattttatcacaggctaccaaattaccacatggccttagctgcctatcatgaactggttgctgtctaaccatcaaaccaaaaagcacagcagcacttcatattcaaatgacatgtaagagattcagcccagtcatatcctaaaggcaaatgtaagttgcatgagcaagtggcccacaggccacattcctgatccaatgcctcctctttctcaacctgccctcataaccacatagagatttccctatagctggttgactgaaataatacagcttcatttaaagatgggagcccctttcagacctatttggggtggccttggaggacaagggtgaagggaaggcctccagtggacaaarctttgagcagtgaatctggctgtttgctttgcttggaagaagatagggccagagttgtgaatctacaccacttaatgaacagtggctaaaagattagat

SEQ ID NO: 395627 - DNA, 557 bp, Homo sapiens
aaatacaatactctttaatatttatcttggtgcagcagtgtattaagcctgattttattttgaagcagaggtaaaacttattttacttgcagatataaaacattgcataaaactgttcatgatgaccagttgmtgggaagtggggaggatgtcatactagtaattgtccacactgtctacttatcttgtgcctcttctgaacacagtagtaataaatagatgggaaagaaaaaattacatgaaaggtctgatgagtccattgtaaccaatttgtactatgtccaagagaatgagtccctaaagtttggacccttctttatccttcattcgttgaccccttcccagagtttagaggctgtctttatcctcccaaacctttcaagaccaattatcagtatgattttcttcacttctcacatatttattcaatcattcatttaaccaaaattagttgagcacctacagagtcttggactctgcaagacagagcaggggaggaagtttgggagggaaaggtgtgaagaaagccttagatgcacaaaggtgagtaagataca

SEQ ID NO: 395628 - DNA, 500 bp, Homo sapiens
gaagctcctatctgagcaggcatttaagaagctgggccttgaagaaggaaagatggaagcacattcaggcatagaaaaagcaataagccaagcctatgcaaatagacccagagggttggaggttgtttctgaaacaatgttgaggccactcaaagaggcctttttacggctaaatttcagatcaggaagacaaacaaactcatgcaacttagaaggagagttgcccagwtaggagaggtaagagtggaacatggtgatctctaccagatagaccacatcttggactctcacgcatcctgtaagctccttctccaatgaaaatcataggactcttcaaagtcatatttgaaacaacagcaaagtctgcagtaaacactgtgatatttgatcctgttccatctacataatagagctataaaaaatgatctggattaggcctaccaactttaaatctgataggactcaatcagtgcaggttttcatggctctgctatatggat

SEQ ID NO: 395629 - DNA, 595 bp, Homo sapiens
tgaatatgagtgtacaaatttatctttaagaccttgttttcaatttttgaatatatacccagaaaggaattgctgaatcttatggtcattctrtttttaattttttgtgaaactaccatactgctttccatagcaactgcacgttttaaattcccaccaatagtgcacaaaattttaacctctccacatccttaccaatacttattattttctgttattttgttgtgatagtggttttgtttttggcagtagtcataataatggatgtgaagtcatatctcattgtgattttgatttgtgtttccataatggtttgtgatgatgagcatcttttcatatacttattggacattcgtttatcttctttggagaaatgtctattcaagacatttacccatttttaaatcagatttttgttgttgagttgtaggagttctttgtaaattttgggtattaatcacatatcaggtataggatttacaaatatttaccactccgtaggttgccttttcactctgttgattgtgtattttgatatacaatagttttcacattttagtgttgtccaatttattgatctttacttttgttgcct

SEQ ID NO: 395630 - DNA, 595 bp, Homo sapiens
tgaatatgagtgtacaaatttatctttaagaccttgttttcaatttttgaatatatacccagaaaggaattgctgaatcttatggtcattctatttttaattttttgtgaaactaccatactgctttccatagcaactgcacgttttaaattcccaccaatagtgcacaaaattttaacytctccacatccttaccaatacttattattttctgttattttgttgtgatagtggttttgtttttggcagtagtcataataatggatgtgaagtcatatctcattgtgattttgatttgtgtttccataatggtttgtgatgatgagcatcttttcatatacttattggacattcgtttatcttctttggagaaatgtctattcaagacatttacccatttttaaatcagatttttgttgttgagttgtaggagttctttgtaaattttgggtattaatcacatatcaggtataggatttacaaatatttaccactccgtaggttgccttttcactctgttgattgtgtattttgatatacaatagttttcacattttagtgttgtccaatttattgatctttacttttgttgcct

SEQ ID NO: 395631 - DNA, 595 bp, Homo sapiens
tgaatatgagtgtacaaatttatctttaagaccttgttttcaatttttgaatatatacccagaaaggaattgctgaatcttatggtcattctatttttaattttttgtgaaactaccatactgctttccatagcaactgcacgttttaaattcccaccaatagtgcacaaaattttaacctctccacatccttaccaatacttattattttctgttattttgttgtgatagtggttttgtttttggcagtagtcataataatggatgtgaagtcatatctcattgtgattttgatttgtgtttccwtaatggtttgtgatgatgagcatcttttcatatacttattggacattcgtttatcttctttggagaaatgtctattcaagacatttacccatttttaaatcagatttttgttgttgagttgtaggagttctttgtaaattttgggtattaatcacatatcaggtataggatttacaaatatttaccactccgtaggttgccttttcactctgttgattgtgtattttgatatacaatagttttcacattttagtgttgtccaatttattgatctttacttttgttgcct

SEQ ID NO: 395632 - DNA, 606 bp, Homo sapiens
cacactgacccacttataattatcatgcccaacatgatgttccttgcttttatgtttttgctaagtatcaatacttctccctggaatgctaattctcacatgtgtaaaatttctgtttatcctggaagagtgaaagtttctctgcctctcacttttacttcaactcctatgacatataactacagattgagttattttatycgcttctttgctccatgttcttttcctccataggagactcatttcaggcccatctcttctctcctaagatctggcttctgaaattatcccttgctattgtccacctccattagatatttcccttcagcttccaaatgtgttcttccttttcaagtgtttttaaagtctttccttgattctactctcatctcttttctttcttttatcatccacaaaagaaagaagagtaggctacatctgctgcttcaattatgtcaccttctacttcttcagtctattgtaatgtcatttcaaatagcagcacataattgaaattgctgtctctaagtaaccaatactctgctgactttaaagtcaaggattgtattgtccttatcctatacaatccctctgaagtaattgtgc

SEQ ID NO: 395633 - DNA, 543 bp, Homo sapiens
acatatttttgaggtgcatgcaataatttaacatatttatataatttgtaaagatcaagtcaatgcaattaggatatctatcaccttaaatgattgtcatttctttatgctagaaacattcaaagtcttactcaaaatatgtagccttttaaaaatggcatttatttatttgatrgaatggtagcaattttgaaagaattatacaatacttgtactatagctagtgccaacatgtgcatctgtgccagaattaatctctttgacatagcactttctgaaagtaatttgtttatctcttccacagtacatgcttgtacacaattcttttgttaatacaacacagactcatcttttcattaagcattttgaatgtagtcaggtaccttggtgataaggaataacaaatctgcctaatatatttttaaaaatcaaaaatagcacagctatgatttcttctttggcaattttactgtttgtgagaatgctctatggatatattctctctttcaattttcacattttaacttctatcaaatttaacag

SEQ ID NO: 395634 - DNA, 435 bp, Homo sapiens
aaccaattctccactctaacaaaatatactgttttattttgtatgtttttcagacttaaataggagctcacaagtgaatagattatcarttttataaaccattagttaatacatctcaaaatctttttccactaaaagtgagctccactgtaagaaagaaatgaaaaaaatgaaaataactgaaagaaaggagagaaggtatggagaaagaggagatacgaagaaagcaaaaaaagattaaacaagagaatcaacctaaagcaaactcgaaacagatataatggcaggaattgcatcccggcatgttggagagttactctacatgtttcctaaattggctgtaccctttagttgagtagggatggcaggtgacactgacctgggttatgtatttgctgagggatgataaaggacaggagcaaagccctccctcac

SEQ ID NO: 395635 - DNA, 539 bp, Homo sapiens
tattatatattatagttttagccaagagagatacgcttatctagagacatgtttatatttgtttgttaaaatttataaggtaaataatttgtttttaaatcaatgtttaattttctgtgataacatgcaatctaaaatacctctaaaataaaccaattctccactctaacaaaatatactgttttattttgtatgtttttcagacttaaataggagctcacaagtgaatagattatcaattttataaaccattagttaatacatctcaaaatctttttccactaaaagtgagctccactgtaagaaagaaatgaaaaaaatgaaaataamtgaaagaaaggagagaaggtatggagaaagaggagatacgaagaaagcaaaaaaagattaaacaagagaatcaacctaaagcaaactcgaaacagatataatggcaggaattgcatcccggcatgttggagagttactctacatgtttcctaaattggctgtaccctttagttgagtagggatggcaggtgacactgacctgggttatg

SEQ ID NO: 395636 - DNA, 541 bp, Homo sapiens
cagcaatgtgctcttctctttccaatcatgtaacttttactaatggaaaatgatttgtttttaacaacttccatgcatttctttctcgttttaataagaaagggtgtcttgtggcattgagctattgaattctctataaaaaacaaaagtctctatatgagtttccagctccataggagggctctgtgggattggccaaaggtggtggggagacttaagtgagtgtaactaacttgatatgaataggtcagttgggaaacaaagcaagctcatcgccttctgatcatggaggtggtraaataacattttttaaaaatgtgaaaccgggaaggatcagaagtatgaattgagttctgctttcatgatccaaactctatgtactctcagagaatttttaaaacaaatatctgaagaggttttcacttattttcattcaatgtttcagagcatgtaaatgttctcctttgatgagaaatgttgatgatttgggttgggtgggggttgaaatgattatagcaagtgcgtcttttgctgtagccat

SEQ ID NO: 395637 - DNA, 570 bp, Homo sapiens
tgtccacaatgatgttaaaatgcatttcttaaagacagaactcatcattctttttgcttgcttcattggtctttaaattccacacaccaaatagcatcatgtcttgcaaatagtggaaaatattatctaggaatttttaaagctgcaattcacagaaaaccttgctaacagaagcttttttaataagggcagttaatcttccctaacaagatgtatgaagtcaggcagcataggattgaagaattcaaccacacaggcatgtcaccatagacactgggatgttcatatttcacttctgccattcagtgtggctgccatcctctggctgtctccttatcgctcctagatgcctgctacagctcctgctgctatatgctcatatgatcatagccacagagaagaaagagagtgaaacggtttggctgtatctccacccaaatctcaccttgagttataataatccccacatgtcaatgtgkgataatgataattgaatcatggggatggttcccccatactgttctcgtgatggtgaataagtctcatgaggtctaatggttttctgaatgg

SEQ ID NO: 395638 - DNA, 580 bp, Homo sapiens
tcacttctgccattcagtgtggctgccatcctctggctgtctccttatcgctcctagatgcctgctacagctcctgctgctatatgctcatatgatcatagccacagagaagaaagagagtgaaacggtttggctgtatctccacccaaatctcaccttgagttataataatccccacatgtcaatgtgggataatgrtaattgaatcatggggatggttcccccatactgttctcgtgatggtgaataagtctcatgaggtctaatggttttctgaatgggaattcccctacacaagctctcttgcctgccaccatataagatgtccctttgctcttcctttgtcttccaccatgattgtgagacctccccagccatgtggaactgtgagtccattaaacctctttcctttataaattacccagtctcagatatatctttattagcaacatgagaacgggttaataagagagtcactcctaagaattccttctcaccatggtgccaaaccttttctagaagcttcacatcctcccactcttgtagccttctttttggggagtcagaattcactcatatg

SEQ ID NO: 395639 - DNA, 635 bp, Homo sapiens
ataggtttttttaatagttctatcacacagtgtggtaaatatagttaataatattgtacatttcaaaattgctaaggaagtaaatttcgaaagttttcaaaaaaatgtaagtatttgaggtgatgaatgcgaactagcttgatttaattattcacactgcattcatgagtcataacatcactttgtaccccataagtgtatacaaattataattaacaattaccattttaaaaagaatgatactggttccaactgtgtgactagttgtagaaatgatgactagagtagctatggatattcttctttattttgatatgacggtgtttgtatttatattaaccatktttttcctttttctctccctattctctaccacctactataatgcatactcatagaaattaaatttaaatacaggagttaaaaaatgagaatttgacttagctaaagggataaatagtataatccaaaaatagattcaactattttatgttcccttttgaagagaaggatagcatatttggggttatatgagagatagttgcattatgttagatagaaatataattttgcttctttttttttaagaattaaggatagttgaaagagagctggaatgtagtggatttttcctt

SEQ ID NO: 395640 - DNA, 634 bp, Homo sapiens
aagttgcaagacacactttcagatgacagaaaccagaagaattcatgcaaatcaatgagcccaacacaccttatttaaaagagaacatttgacaggcratagagaaaaccattttgaatctttgcttttggagatatcccaggttttaattatcaaatgtcaccatttcctaaatggagatttttctacagataacccttttaaaaatctatttaaaaacagcatttcttctactgatcttggtgttaatgttatgccaaattatgttttcttcaccattcagaacttcactttaatgatatccagtaacacaataaggcaactataaaatttccttaatagatttggccaatttaattttaagctaatctgtttgggatggattttgtttaccacatgcttgtagctataagaattttgaacataaagatggcgatgtctctccaatttcattataagaggagcagaaacatatttggaatgtatgtattgttcaggatgtatgacaatgtgcttgcagagcaagaatactatttttactcagtttatatatccatttggtgttccttgttgagagatgatgatagagccttaggggaagtgacaatccaagcaccaccactggcaaatgaga

SEQ ID NO: 395641 - DNA, 568 bp, Homo sapiens
tatttcttcatagtagtgtaagaatagattaatacrggagattatcctgaaacagccatgtgagcccaatctaatcacttaaatctttaaaagcagagacttttctctggctggagctagaagagggatgttgcagaagaggaaggcaggagacatgaggcagaagggggaggtcagagaaattaaaagcatgaaaaggagttctcaacctcaacccaccactgctggtttgaaagggttcacaagcctttccaatgcacgtggctgccaggagctgagaacaacctcagccaacaaccagtgaggaaattgggacctcagtcctataactgcatggcactgaattcaccagaataagcctgaaaatgaatcccacacttacatcctgtgaaaaagggtgtggctatgttgtgagactctaatcagggaaacagtaaagcctcattatacctgaacttctgacccatggacactaagatagcaaatgaatgttaagctgctatgtttgtggtaatgtgtcttagccaaattgcagacattaaagactccaaaaattaggtttttacag

SEQ ID NO: 395642 - DNA, 594 bp, Homo sapiens
ctttagttaggctctatttcatcagcctcatcttttctccccctagaaccccaaaactatacttttttaaaattgtacttgtatttctgaggactgcatattatctcagtcttgggccttggttgagccaattggccagacttcttccactcccagcaaagtcggtttctatttgtcctttggttcttattttaggaatcatctcctttggaaaaatctacttagccttgctaagaaaaggttgggtgactctcctttgggtgcccataacattctggtacttaagattttggcattatatcactttctgagtacttagtatatgttggcattatgacctcttttggggcttttctcactggactccctgttcttggagggccaagaacatgtgttttgggttttgtgaagcaatgcctctctagcataaagctcagtgtctggcatgcagtgtgygctcaactaatagatataaaagaaatgaatgtagatgttaaattcatgggcaaatggggaaaggatgatattgtgagggtcccctgtcccagaataaagataagtagaataaagggaaaggagaatattagatccatc

SEQ ID NO: 395643 - DNA, 616 bp, Homo sapiens
gcatggctggaatgaatacaagttgaaggggaagttaaatccgtctaaactttaaaatgtagagaagatttaacatccttatgtcctttggaacgttatggtgcattcatggttcacgcagtcagtaaactaaaggtcgggcttcagttggtattcagcatagtgtgtcgtaacattgacaggctatatttatacagtggtgctgaaagattaaaataaatatatatcaatgttgatccyaacaaatgtatgcattgcagctgatagagttaccatcagtttttgagtttgtaattgtttacccatatgttgccaatggcagtttttccaaaatataataatttggcacttcattctgtagttttttttggagaactaaaaaataacatttaatattggtacaccatgatttctagactacatttgtgaggggaaaaatagagacctggctttcaatcagttctctaaccagttttatgagaattccatctctaccagtctctctggctacaatttttgctcctccaagtgctaaggaaaaaaatagtttgtactctctgctttctcacaagagaaaatggcatggacctagggtctttagaataatttgttactc

SEQ ID NO: 395644 - DNA, 616 bp, Homo sapiens
gcatggctggaatgaatacaagttgaaggggaagttaaatccgtctaaactttaaaatgtagagaagatttaacatccttatgtcctttggaacgttatggtgcattcatggttcacgcagtcagtaaactaaaggtcgggcttcagttggtattcagcatagtgtgtcgtaacattgacaggctatatttatacagtggtgctgaaagattaaaataaatatatatcaatgttgatcctaacaaatgtatgcattgcagctgatagagttaccatcagtttttgagtttgtaattgtttacycatatgttgccaatggcagtttttccaaaatataataatttggcacttcattctgtagttttttttggagaactaaaaaataacatttaatattggtacaccatgatttctagactacatttgtgaggggaaaaatagagacctggctttcaatcagttctctaaccagttttatgagaattccatctctaccagtctctctggctacaatttttgctcctccaagtgctaaggaaaaaaatagtttgtactctctgctttctcacaagagaaaatggcatggacctagggtctttagaataatttgttactc

SEQ ID NO: 395645 - DNA, 552 bp, Homo sapiens
cagctctgtgcccacatttctcttgccctttgagcaatggggactccaatctccttccaacaagactcaattcataattttcttttctttttcctttttttttttttttgagacagagtcttgctctgtcacccaggctggagtgcagtggtgtgatctcagctcactgcaacctctgcctcccgggttcaagccattctcccgcctcagcctcccragtagctgggattacaggcgcccaacaccatgcctggctaatttttgtattttttagtagagatggggtttcccatgttggctaggctggtcttgaactcctgacctcaagtgatccacctgcctcggcctcccaaagtgctgggattacaggcataagcaccacacctggcctcataattttctttctattcacatctccaagggtaatgaaatgtttcctacacttctgttaaaaagaacttctgccatgagaaagaattctctctctcagaatggtggttcttttggttcaactcatatgatcccatcagtcctaaaatgattgccttgata

SEQ ID NO: 395646 - DNA, 552 bp, Homo sapiens
cagctctgtgcccacatttctcttgccctttgagcaatggggactccaatctccttccaacaagactcaattcataattttcttttctttttcctttttttttttttttgagacagagtcttgctctgtcacccaggctggagtgcagtggtgtgatctcagctcactgcaacctctgcctcccgggttcaagccattctcccgcctcagcctcccgagtagctgggattacaggcgcccaacaccatgcctggctaatttttgtattttttagtagagatggggtttcccatgttggctaggctggtcttgwactcctgacctcaagtgatccacctgcctcggcctcccaaagtgctgggattacaggcataagcaccacacctggcctcataattttctttctattcacatctccaagggtaatgaaatgtttcctacacttctgttaaaaagaacttctgccatgagaaagaattctctctctcagaatggtggttcttttggttcaactcatatgatcccatcagtcctaaaatgattgccttgata

SEQ ID NO: 395647 - DNA, 519 bp, Homo sapiens
attgctgacattgctgagaggtcattggtcccatcatttactgctatttctgttgggtgtatacgaatatttataatatatatgtgtatgtatgttcgatattatatatttgtattatgtatttatgtaatattatcacagattcacacagggtgttaaaaataggagattctcaataactactaaaccaatggatattttgtgtgagtaactgaacacatgattttcttgtaaaccaatttgattttattcttttaatgattaactttaaaatgaacagaggtaactattttgaacaactaactgctgttgaccatgattctgatgaaagtaacctatgtcttctagaagtttagattcattctgaattgcctaaacacatttttaacaagagtgtccaatctggacctacawagtacacaagtaaaaggaaaatagcacaggctctcggcgataaagcttcaaggtgaatttatgagtgttcaggggaagttttctccttcacttccaaatgtactg

SEQ ID NO: 395648 - DNA, 453 bp, Homo sapiens
tttttacatttttaaatttgtttatttgaaaatttccaaacattaatagcctttatttgccattgttctacagctggtaacccacatattatcctactattgaaattaacttggatcctatcaattcaaaattttgaatttgcgtggccttttttaacataagaaatatatgcagactcgcattataaatgaataaaatttctcattaattcagcctgtataatcaaaaattattcagagttatgttttttttttcaccaggttatttctaggtaaatgtcttccatcaccttgctyagggctgtgctaataattactatgatctctctgtcataacctaatatctttaattaaaatttttaaaaacatgatttccaggcaagatgagcacatatttatggacatttggatgctgctcttagtttcctccagcacatttactaaaataaccac

SEQ ID NO: 395649 - DNA, 610 bp, Homo sapiens
ccaatacaagtatcccagagttagagcacacagtacggcagctgggagctgagcgttggctccctaaaatttcccaggaatgcagcaagttggttgaatccaccttataccacaatcaaaccctcaaggccatcaaataggataaaagataaaacaacaatccaaaggtcagcaccctcaaagattgaaggtagataagcccacaaatgtgwgaaagaaattgtgcaagaatgctgaaaactcaacaagccagactgccttctttcttccaaacaaacacatcacctttccagcaagcgtttggaactgggctacgatggctgagatgacagaaatagaattcaaaaattggatagtaatgaagttcattgagctcttaaagacctaaaaagagacttagactcccacgcaatacagtggtctactttaacaacccactgacagtattagacagatcatcaagacagaaaattaacaaagatatacaggacataaactcagcactggattaaatggacttgataggtatctacagaacactccaccaaaaaacaacaaaatatacattcttcttatcaccacatgacacactctataattgatcacataa

SEQ ID NO: 395650 - DNA, 610 bp, Homo sapiens
ccaatacaagtatcccagagttagagcacacagtacggcagctgggagctgagcgttggctccctaaaatttcccaggaatgcagcaagttggttgaatccaccttataccacaatcaaaccctcaaggccatcaaataggataaaagataaaacaacaatccaaaggtcagcaccctcaaagattgaaggtagataagcccacaaatgtgagaaagaaattgtgcaagaatgctgaaaactcaacaagccagactgccttctttcttccaaacaaacacatcacctttccagcaagcgtttggaactgggctacgatggctgagatgacagaaatagaattcaaaaattggatagtaatgaagttcattgagctcttaaagacctaaaaagagacttagactcccacgcaatacagtggtctactttaacaacccactgacagtattaracagatcatcaagacagaaaattaacaaagatatacaggacataaactcagcactggattaaatggacttgataggtatctacagaacactccaccaaaaaacaacaaaatatacattcttcttatcaccacatgacacactctataattgatcacataa

SEQ ID NO: 395651 - DNA, 610 bp, Homo sapiens
ccaatacaagtatcccagagttagagcacacagtacggcagctgggagctgagcgttggctccctaaaatttcccaggaatgcagcaagttggttgaatccaccttataccacaatcaaaccctcaaggccatcaaataggataaaagataaaacaacaatccaaaggtcagcaccctcaaagattgaaggtagataagcccacaaatgtgagaaagaaattgtgcaagaatgctgaaaactcaacaagccagactgccttctttcttccaaacaaacacatcacctttccagcaagcgtttggaactgggctacgatggctgagatgacagaaatagaattcaaaaattggatagtaatgaagttcattgagctcttaaagacctaaaaagagacttagactcccacgcaatacagtggtctactttaacaacccactgacagtattagacagatcatcaagacagaaaattaacaaagatatacaggacataaactcagcactggattaaatggacttgataggtatctacagaacactccaccmaaaaacaacaaaatatacattcttcttatcaccacatgacacactctataattgatcacataa

SEQ ID NO: 395652 - DNA, 637 bp, Homo sapiens
aagctagacgatacggaatacatcttttatcatttcatttctatgaagttttaaaacaggcgaaatcaatctattgtgatgggaatcatatcattgcttgctttgagggagtaattcaatgggcaatggtatgaaagaacttctagggtgataaaatattcttagtaagagtcaagttaaatatacgyatatatatatacacacacacacatatatatatctgtatgtatgtcaaaattgatgaaaagatatacataagacttacaaatttcattctgggtgtactatacctcaataaacttaacacatagggatgaaagaagttaaggaataaatcacaagaattttggggctgagtgccttaatagtaatatctaaaaacaatcatatttattatcatctacttagcttattacatcttaagtatgataatgtacctactcataatttttaaatccgccaataaattatcaaataattagtctttggaagcattatatatgacacattacatattcataatatttggcatatagtatttatattcctattcttaaaattaaataaattcgaggaaaaagtaaagaaagaatttgaaaaaacatagcagcataagaaaaggtatggtattagcaag

SEQ ID NO: 395653 - DNA, 552 bp, Homo sapiens
atacacagacaaacaggaattctagtcagtgccaatccccactaacacatcgttgtgcatacactgagaatttcatctttcttctctttgaatatcacactattatgtttcatctgtwttaaataaattaagtaatttgctctgttgcccttcctcattttcttatttcatttcttaaaacaaatgaaaatatgctgtgatcataatgcatgacaatataattcagaaaatagaaactaagcatttaaaatgctttcatatttcatttatgagactttttttttgtactatgtatgtgtttctgtggttcctgaataaatggcatcttccatcaatatttaattgtcatctccaggattcctagattttgggagctaataatgaaatatatccctttatatcctacaaaagagacagcaaagttatgttgcttcccgtaacattttaaatacattagttgattcactaaacttctttttctcacctacaaagagaaagcaaataattttaaccatctcaataattctgtttaattttgttttttaaatgctt

SEQ ID NO: 395654 - DNA, 533 bp, Homo sapiens
ttacagacattttattaaatcatttgaccagtttaagaagtatgttctgcattacacaattcctactctagtggaaaacctgccttcaaaagactgacaaaggaaactaaccccttgtcacaagacatgtcaccaattgaaaacatactgctgctgggatttgctggctgttgggatagtttattgtggaataaaatgagattaagatatacatttcacatatgacaataataaagcttaccrgttggctttgcatgaatagaataagtgcctgtctggtttgcatgatgtgaattgtacttgttgacttacttttccaaatcctcattaccccttccccagtggtattgtctgaaagcctaaaatgatcatcatgcacattattgtttaatagtttcataatttacttgatcatatcttactgtgcatggcatatctttgccataattgggcatgaacagcctacctatgttagcatgaaaatcaaaaagggcccaaagtcagtggcatttattcagcagtgtgtgatccac

SEQ ID NO: 395655 - DNA, 533 bp, Homo sapiens
ttacagacattttattaaatcatttgaccagtttaagaagtatgttctgcattacacaattcctactctagtggaaaacctgccttcaaaagactgacaaaggaaactaaccccttgtcacaagacatgtcaccaattgaaaacatactgctgctgggatttgctggctgttgggatagtttattgtggaataaaatgagattaagatatacatttcacatatgacaataataaagcttaccagttggctttgcatgaatagaataagtgcctgtctggtttgcatgatgtgaattgtacttgttgacttacttttccaaatcctcattaccccttccccagtggtattgtctgaaagcctaaaatgatcatcatgcacattattgtttaatagtttcataatttacttgatcatatcttactgtgcatggcatatctttgccataattgggcatgaacagcctacctatrttagcatgaaaatcaaaaagggcccaaagtcagtggcatttattcagcagtgtgtgatccac

SEQ ID NO: 395656 - DNA, 626 bp, Homo sapiens
ttttgctacatgtgactttcttgtcctcaagttaaatctgacaaaatcatgcaaacttcttacttcccacttagaaaacaaacgtgaattttatgtttatatttacataaatactatatattatatattatatgtacagtatatatatttatatattttatgtatatatgtatacacacacacacacggagacagagagagagtatatatattcctgagtttaaaatagaaacaacagaaacaaaaaggaaaattttytgagacaaaagcataagcactttcccagtgaaagatggtttaattctaataagacagacagtaggtagtctttggaatctgagcatttactcctctatgaaaaagcacatatagcaagatacaagcttacacatagctggctgtggatactggcaatgtaggggagtcgacacaacaaaattttaacttcctacttaagttgctgaagtcctgacacttaataataaaaaaaaaaaatatatatatatatatatatgtagaagaaccttcatagaagaaaggaagaaagtgagtaagtaggtactggtgtcctcagaaatgtaaaagtggtaactattaggagtaaaaaaaagagggcaaccaggtga

SEQ ID NO: 395657 - DNA, 549 bp, Homo sapiens
atgttatttagtggctccaacaggtctcactcactttcctccatggtctattgatttgatgagtttgttgcccttaggcttggactcttagttcaaaaccgttgtacaaatgtacatttattatgttattaattctttgtctgtattatgatttttaaacttgattcatatttcttgcctagtttgtaaagtcaactctaacaggataatrttagctaaaccctcaaatgattacagatgcctatggattgataatatgaaactcaatgctagactccagataaacatacccatagaatatttttccttctggactctttgttattcaaatgtggcccaagttcctgacatagaaacccctaccttctccctgtcatgggacaaattcaactgggacaggtccatcccagccctcagggacaattaaacctaactgcaaaatggtttatcagtgatgctttctgaaaaaagatcttgatcaaaagggggaaatatggaagttgtttctactaagtgggtcatgcttgtcatgaccaactaaaacagagt

SEQ ID NO: 395658 - DNA, 617 bp, Homo sapiens
ggtttgaactcccaagcctcaggaagagtagggccagggcagtgatgtggaccaaggtagcagaggtttagggacctgctctgtgaaacaccacttctcaagttttatggtgaaaatcaatcctttagcaaccttgttataaggcagatttccacacaatagccttagagggaggcctgacagactgtatttctaacaagctcctaagttatgccaatatagctggtcctatgtccagtctttgctatccactctctgtaacatgatttagtaacaatttcctcaggttttagtttacattttcatatttttaggttagctttatgtatgcatttgcatcatatgcccctatawttttttatgaacagaaggtttttttaattcattgtcgaaactgttgttattcttttaaatgttttttagaaaaaaattctaatcatttgtatgcttttgaaaacatcctatttccaaagtgaagcaactggttgaattcacttgtggaagaaatctaaaaattagtttctgatgttaaaacaaataaatttagaagtgtaaggaagaattaagtaaatcaaccaataaagatatatatgaatcccctaccaatctcaaggctt

SEQ ID NO: 395659 - DNA, 575 bp, Homo sapiens
ggaaaggtatgttcatctttaatctttaactaatcttcactgttcctgacactgaactgtcaggtttaaacagactctaatcaataacctatcattcaggggacaaatcccaaagtagtatgcatagtcccatacatactactaactcctaagctctgagttaatgtcttcagaagctctgaaatcaattgttgagattatatctagcaagtttgtgatatcaagcacgtgttctcccacagaagaacrgcagatttcggactctgctttctgtgttttccctaagtggtcttatatcatcttatctttcattctttatcaacagttctttatcttgacccttccccactcacgagtggatgagaaaagcaaagattttatgttttgaaaacatgtcagtagaacatatacctgccgtggaaggccttttgtggatgtgacaggttgttttagacactttaatatttttttctttttgcactttaaatctccatctcatcctgtctagcagagtagatcaaatataatgaacaagattatacaaaagttacctgaagtctaagcaagtgtaggag

SEQ ID NO: 395660 - DNA, 572 bp, Homo sapiens
ttttaaaacctccctaggtgcttctaatgtgaagccatgttgagagccacaaggctaatggtgttataatcttagtgatagatttactagaagtaaattgatatctgtgacaattctgccctatctggccttagaatgtgcctgatttctttgaattttaaaggaaagaagctcaaaatattagaagttctcaaaaatcaaattatgacaaaattactagaaataaaataaaaagcattaaggactgaatctttgtgtccccacctcccccagattcatttattacagccgtaactttcaaggtgayagtatttggagatggggcctttgggaggtgattaggtttagatgaagtcatgaggttggggcctcattaggggatgcgtgtactcataagataaagagattagagctctctgtctccgccatgtgaggatacaacaacaacaacaacaacaaacacagttgtttgcaaaccaggaagaagaacctcatcagaacctgaccatgctgccaccccgatcttggacttcccagtctctagaactgtgagaaatatgtgtctgttgctt

SEQ ID NO: 395661 - DNA, 572 bp, Homo sapiens
ttttaaaacctccctaggtgcttctaatgtgaagccatgttgagagccacaaggctaatggtgttataatcttagtgatagatttactagaagtaaattgatatctgtgacaattctgccctatctggccttagaatgtgcctgatttctttgaattttaaaggaaagaagctcaaaatattagaagttctcaaaaatcaaattatgacaaaattactagaaataaaataaaaagcattaaggactgaatctttgtgtccccacctcccccagattcatttattacagccgtaactttcaaggtgacagtatttggagatggggcctttgggaggtgattaggtttagatgaagtcatgaggttggggcctcattaggggatgcgtgtactcataagataaagagattagagctctctgtctccgccatgtgaggatacaacaacaacaacaacaamaaacacagttgtttgcaaaccaggaagaagaacctcatcagaacctgaccatgctgccaccccgatcttggacttcccagtctctagaactgtgagaaatatgtgtctgttgctt

SEQ ID NO: 395662 - DNA, 582 bp, Homo sapiens
aaaatgtagccaggcatggcggctcatgcttgttaccttagcactttaggaaacgaaggtggaaaaatcacttgaggccaggagctcgagaccagcctgagcaacatggcaggrcctacaaaataaataaataaataaataaataaataaataaataaataaataaatgttattttatgtaaataatgttcaattaaacattaattaagaaaatgtttcattgctgaaaagaaatcaagaaggtacagacttaaaatctcatgagtgatttttagtatgctctgaaatacaagacccctaaggttgtacatccaaaagattattataaacagcattacagaaattaccaaaaaggcaagtctgttaaaaccaaatgtcatattttatttgaaaattttattaatgcaaataaaaacagaagttaaactctgcaatgactttggggggaaaaaagtacaatttcaaatgcagaactccaggtgtacaaaagcatgtttgatagagccaatgagttatcgatcaaaaaacactcttttcctaaattatcttccaaacagataacagagactgacaaaaaaccca

SEQ ID NO: 395663 - DNA, 640 bp, Homo sapiens
actgacaaaaaacccaagacttatctttcacctcagctattgtgacttttacaattggttcctcttaagagaatggatttctgttttacctgactttgaatttcacaaaatagtaaaatccccaaattaccctcctcaaaaaacttttaactagtgaggccttttaattttgtcaaattagtgggtttattaaaagtgaagaataaaaataaataaataatagcatatatcatcccttagtgaaaaaaagaaaatactttaataccaaaaaggaaagaccaaatattattaacataataaagaataaatgtttaaaattaactttatgacaaactcactacattgaccttttttcattgccacactgtccaagagaaatttcatttagaaattgctttccagaatgtttggaaccattggttaaytttgttgtgttcctgtacctagtttttggagagaagctgctatgttcacaaatcacaaagcctgcttcttcatttctaagcttatatcatcgttttttcctgatgaccatctagccaatatgaaaagtattgttggtctgtggaaccaattgagattagtctcaagaataccaaatgttgacaatgatgtagaacaactagaactctcctgcatc

SEQ ID NO: 395664 - DNA, 325 bp, Homo sapiens
gatagcctgggctatcccaaaccaaacctagaacttggaacaaaatcgaataactcaggctagtctccatgttcattgacactaaaagctctaagatccctttttgtyttcagtggtgcttttttggtcaactccaaatacacactttcacctggtcaatatagtccttttacacatactagctagtataataggttatttgtgtagtgccattttaaacaaagggcaattgatttaataaaaatgcactgtcagcatgcttataacaaggcatttgacaagacatattcaaacctctttcttgaccctcactgtatctttgatt

SEQ ID NO: 395665 - DNA, 536 bp, Homo sapiens
cagctgtgaatggcctagcatgacagtgtttgcagagccatgcccctgagaatttttcatttcatacatcatttacagctgactcaagtgataccatatattctggacctatattctttcaccacagaaaactgaaatgaaaatatatatttatacataatccagagcaatcatgcattgcctctttatttctmgcatttcacctcactccatcagattgctttctaactggaaaaaaaagaagcctgaggctcccctaagatacaaaccaaatttgagatttcagtactgctatttgtttttatgaaggaattcatctctctcttgtattgtgacttgctgtctcaaaaccctagctgaaaaagaaaaacaaaatgttgggagagaaatggcatcaggccattgcccagttaaacatttctctgcccacagtccaagataagttctttgtcaagtcaacagcttagagtcaccttgactgaaggggccatacgtttcctgtgccttgtatgattgaagaggttttagtccaaaag

SEQ ID NO: 395666 - DNA, 536 bp, Homo sapiens
cagctgtgaatggcctagcatgacagtgtttgcagagccatgcccctgagaatttttcatttcatacatcatttacagctgactcaagtgataccatatattctggacctatattctttcaccacagaaaactgaaatgaaaatatatatttatacataatccagagcaatcatgcattgcctctttatttctcgcatttcacctcactccatcagattgctttctaactggaaaaaaaagaagcctgaggctcccctaagatacaaaccaaatttgagatttcagtactgctatttgtttttatgaaggaattcatctctctcttgtattgtgacttgctgtctcaaaaccctagctgaaaaagaaaaacaaaatgttgggagagaaatggcatcaggycattgcccagttaaacatttctctgcccacagtccaagataagttctttgtcaagtcaacagcttagagtcaccttgactgaaggggccatacgtttcctgtgccttgtatgattgaagaggttttagtccaaaag

SEQ ID NO: 395667 - DNA, 537 bp, Homo sapiens
gctgtaagctgtgatcacgccactatactccagcctttgctctgttgcccaggctggtgaagagtcattaaaacataagttatagaggtattastcttgttcctacatgtatatcaatgagataccaaaacttaatattttgctaggaaacacacaataacaaaataaaacataatattaatggtatactcaggaattctggaatgcaaataactgccaatatctcagaaactattttttgtaatatgtttctgaaacattttgcatgtaaatttagctgatatttttcatacctggtatagaatgacacatgcctgttttcttatgtgtttttttatcttaatgagtatccagtataatgtcaaattatatctgatccctgttcctaattgggtgtacttccctctgttcccctgtcctagtggttcttcattgtattgcaagtaaaaatatgcaacatatctttggaaagtcagcaggtctaacccagactcactggtatagatcttgtgcagctgatattattgttaatgatca

SEQ ID NO: 395668 - DNA, 571 bp, Homo sapiens
tttttaattaaatgcctacaaaagatataaattatcaatggccaacctcttgctcatgtacctagtcacattcttgacattgttactttttattaatatccaagtaaaataaagacataagcaaatgtagtcaggattttattttatggaagattattcaatatgatctctcaaattacagtaagtcagcagtcacactccacatacatatcgtaccatcctgtcttactaggacgttgaaaatgtatttgtttttgttttggttaacagtaaaaatgatcaaatgttgcttgggacttatacaaggaaaatcccaagtaaaaacctttcaaaatagaaaatgtatattaacgtatagtggtaagaagagaaagttgattacaacggggcatggagaaaatttggaggtrattaaaatattatgtgtcttgattgttgtgtgagtacagtgtacatatttgtcaaaacttgataagcatacacttaaaatgggtgcagttcattttatataaattataccacaatgatgttgataaaatagaagagaacattagaaaaataagtcagttca

SEQ ID NO: 395669 - DNA, 578 bp, Homo sapiens
caattctatgagaatatagtgaatgaagraacatttattcttcaagaaagcttacttcaagaataacctttaaggataactataaaagctactaaaattcagtagaaatcaggtgcaaaggaaagcccatgtgaagacataggaataatatggccacctacaagcaaagcagaaaagattgagaacacaggactcccttttccccagatcccagtcagagggaaatcatatctttataaaatggggatgtcagcatttctcatcctttccccagctgccagttgcagaggctaacttcttagcaattacaaccaagagaggggtttttttctctgctcaggcgccgctgataaaatggaagctctattttaggtgcaacacattgagaatattggggttctcatccccgtgctgtagactgtttgtaaagctgagattccttgttaggagaagcagtctaagaagtctgtgaagcagtctaagtttagtttatgaagactagactacagttgccttccattctgctgagtaccagctcaatacattacattgaataggagaaaatatttgcaaattat

SEQ ID NO: 395670 - DNA, 578 bp, Homo sapiens
caattctatgagaatatagtgaatgaaggaacatttattcttcaagaaagcttacttcaagaataacctttaaggataactataaaagctactaaaattcagtagaaatcaggtgcaaaggaaagcccatgtgaagacataggaataatatggccacctacaagcaaagcagaaaagattgagaacacaggactcccttttccccagatcccagtcagagggaaatcatatctttataaaatggggatgtcagcatttctcatcctttccccagctgccagttgcagaggctaacttcttagcaattacaaccaagagaggggttyttttctctgctcaggcgccgctgataaaatggaagctctattttaggtgcaacacattgagaatattggggttctcatccccgtgctgtagactgtttgtaaagctgagattccttgttaggagaagcagtctaagaagtctgtgaagcagtctaagtttagtttatgaagactagactacagttgccttccattctgctgagtaccagctcaatacattacattgaataggagaaaatatttgcaaattat

SEQ ID NO: 395671 - DNA, 578 bp, Homo sapiens
caattctatgagaatatagtgaatgaaggaacatttattcttcaagaaagcttacttcaagaataacctttaaggataactataaaagctactaaaattcagtagaaatcaggtgcaaaggaaagcccatgtgaagacataggaataatatggccacctacaagcaaagcagaaaagattgagaacacaggactcccttttccccagatcccagtcagagggaaatcatatctttataaaatggggatgtcagcatttctcatcctttccccagctgccagttgcagaggctaacttcttagcaattacaaccaagagaggggtttttttctctgctcaggcgccgctgataaaatggaagctctattttaggtgcaacacattgagaatattggggttctcatccscgtgctgtagactgtttgtaaagctgagattccttgttaggagaagcagtctaagaagtctgtgaagcagtctaagtttagtttatgaagactagactacagttgccttccattctgctgagtaccagctcaatacattacattgaataggagaaaatatttgcaaattat

SEQ ID NO: 395672 - DNA, 578 bp, Homo sapiens
caattctatgagaatatagtgaatgaaggaacatttattcttcaagaaagcttacttcaagaataacctttaaggataactataaaagctactaaaattcagtagaaatcaggtgcaaaggaaagcccatgtgaagacataggaataatatggccacctacaagcaaagcagaaaagattgagaacacaggactcccttttccccagatcccagtcagagggaaatcatatctttataaaatggggatgtcagcatttctcatcctttccccagctgccagttgcagaggctaacttcttagcaattacaaccaagagaggggtttttttctctgctcaggcgccgctgataaaatggaagctctattttaggtgcaacacattgagaatattggggttctcatccccgtgctgtagactgtttgtamagctgagattccttgttaggagaagcagtctaagaagtctgtgaagcagtctaagtttagtttatgaagactagactacagttgccttccattctgctgagtaccagctcaatacattacattgaataggagaaaatatttgcaaattat

SEQ ID NO: 395673 - DNA, 616 bp, Homo sapiens
ctttccactagaatgtaagctccatgggcaggggctttttctaggtttggattttattcatttccacctttatttytcttagcaaaaatgcttgagatactgagctctaacaatgccatttaaaacaagccttgcttccctaaaccctatagggcagtatttctcaacctctgcattatcgacgtttgaggctggaaaattctttgtgtgaggagctgttttgtgccttgtgggatgtttcatagcctctatagcttctacccactaaatgccagtagcctcttccttccagtggggtgacaacaaaaatgtctccagacatagccaaatgtcttcttgggagcaaagtcaccccagtcatagacactgctataggaaatttggtaacatcattttagttgatgataagaaagttctccacacctggattctgaagcagttaagagagagaaaaaaaataaattaaagggtgaaatcacacaaagatcaaatatagaatgcaacttggatcggcaggcaagttgcttattcttggctcaaggattaaccacatttacctaccctgatacaagcagtcctggtaagtgcaggcctctactccctggggcaaacctgc

SEQ ID NO: 395674 - DNA, 682 bp, Homo sapiens
actgtgttgctatttatgcttacacctcctgtggtttctgctttatgtgtttctatatgttatttggcacaaagttgttcttatgtgaatattattacttttgcattatgaagtgtctttcttcggctcatttaatgcctttttggcctgaattcttccttactgcatgtcaaaatactctgctttctttttgtttgcatttatttgatatattcccattctcgactcccctcctttttatctgcctttctgagtcactttgttttagatgtatctcttatgtacagcctagagctgggttttgctttgtaagctagtctgaaagtcttttttatttagttagatgagtcatgtccatttatataattgatatgactgatatgtttagtctcagatttgtcattttattttatatttactgtgtgtcttctactatttatttgggtttttttcgtcttggtatttagaaagatttttatttttgttctaatatttatctttatagtaatacacttaagctagtattttyggcccctcttttttccttttttaaaaatttgtccttctgcttttgatttgctacctctaaaattatgctctgactcctccttgttatatttgaggcaatcaaaaaacttgttctactttcacttttttccctcccttttcttgtcgtttattt

SEQ ID NO: 395675 - DNA, 561 bp, Homo sapiens
ttaaggcttttgtgttttaggttccaagttagggagctgcttgagtgtcttttaagagttggtataaaggatgagctatttcaccataccctggtgcccacattttgcaaaattcagtaatgcccacattttgcaaaattcagtaatgcccaataattttcttaactcttaaaggaaacggggttaatcctttcctcacctggtactctggttccttctgtgctgtgtctgtcccacagacyttggccgatgggtgaaatgagtactcagacacaggtatgcagtgtaagagcagctaggtgactgcctggctccagtggccagacagcagtcccgagaagctggagctgtttgcttttattcagtgcaggcacaatgccgaaaacctggagccaacacaacctgcaggtaattaacatttattgttcccctttcagggaatgttgcatggggatgatccaaggtcagttcctggtcaacataagtaaacaaaccggtttaagataaattcccccacactcccttgtacctactccttgccctctgccttagggttataga

SEQ ID NO: 395676 - DNA, 561 bp, Homo sapiens
ttaaggcttttgtgttttaggttccaagttagggagctgcttgagtgtcttttaagagttggtataaaggatgagctatttcaccataccctggtgcccacattttgcaaaattcagtaatgcccacattttgcaaaattcagtaatgcccaataattttcttaactcttaaaggaaacggggttaatcctttcctcacctggtactctggttccttctgtgctgtgtctgtcccacagaccttggccratgggtgaaatgagtactcagacacaggtatgcagtgtaagagcagctaggtgactgcctggctccagtggccagacagcagtcccgagaagctggagctgtttgcttttattcagtgcaggcacaatgccgaaaacctggagccaacacaacctgcaggtaattaacatttattgttcccctttcagggaatgttgcatggggatgatccaaggtcagttcctggtcaacataagtaaacaaaccggtttaagataaattcccccacactcccttgtacctactccttgccctctgccttagggttataga

SEQ ID NO: 395677 - DNA, 531 bp, Homo sapiens
accattgccaaattcaaagtaatagagatttgcccctctgttttttcctaagagttktatagttttatatgttaggtctttgatcgattttaaattttcatatatggtgcgaagtcgtgaagtaaggatccaactttattgttttgtatatagatatattattgtctcatcatcatatgttgagaagacttttctttcttcattggatggtcatggtaccgttgttgaaaactgattgaccatagatgcatgggtttctttctgaactcccaatgcttttccatggatctgtatgtctatacttatgccaaacgcagtttggattactgtagctttgtagtaaattctgaaatcaggaaatgtgaatcctccaattttgttcttttccaagattgttttggctatttggggtccctttgcaatatgaaatttaagattggcttttgtatttctgcaaaacaaaaaatgtcatttgatagggtttacatggaatctgaggattactttgggaagtattgtcatcttaaccat

SEQ ID NO: 395678 - DNA, 613 bp, Homo sapiens
ggaaatgtagaaaagaaacttcttattcttttgttagtgctttgatctggtcacagtcagatatatacaagaaggaaatgaatggcctcgatcaaagtccttagaaaatgctagtataggggatgggttgcaggagtgatcccattttgttttccttctttgtttaaagctcttgtggaaagtgggaaagggaactgccagtcaccgagcaccagccaccaccttacccacttttcacgtcaatgctgcaaggtgggtatgaggaccagctctgttttacagagattgtaaagattatcaagatgtaagagtaggggagccaggattttaacctaggtctaaaccatatgcctgtgctcttaaaagattttgctttaggaatagaaacgtataacttatttttgtttaaaggttacttagctattttattatttttacatattatygtctaaaccttttttagtatggaaggttttttttaacatatacaaaagaagcatgaagtgtatagtgaacccctttgtatgcatcactcaattacatcaatgatgaactcataactaatattgttttatttattctctttattctccccattattttgaagtatttc

SEQ ID NO: 395679 - DNA, 566 bp, Homo sapiens
ttttctttatatctttaactgctgaaactccagctgagggaacagtgggaggggaataaaaagatggttaaagtcatttygtggactgtgagggtgcatgaagaacatgttcttcaaactcagttccacatttaagctgcccagcgagccttgcccttgctattctctctctccctgaagccagaaagaagaagcaggcgactctccaaaggaccccatcttacctgtcacatcacagatgtacctttttagcattctcacaattgagataggattcagagccctgaaacctggaggaaggaaagaaaactctcttttatttagtttccatcatacaaggatgttataaatatcccccatctttaaaaagatcctaagatccctcttagctgttgccaattactctgctcccttttacaacagagtttcctagcattaacgttaatggctgtttccgtttaccctcgtcctgtttctttctttaaaaaaattttttttacatatgtgatatatccaactgattgtcctttttttagaacccactgaaaatagtccttcatcttcac

SEQ ID NO: 395680 - DNA, 579 bp, Homo sapiens
ggatatgcttctctgtttttttccttgtatattactgcattccctaggagctagtccatgatggcagtcactttagggacttgaaattcaccaggaatgggggtttggggagtcgtggtggtaccttcatgagactaactttatggcctgttttttggtatygactctcctgtttgtcctggtactccttctggaaagttatttttcctgtgtaggtttcctagaattcctagaatatatcatattgaagtactttgttaactatgccataagttgtgggaaactagagttggcctcacttttcccttcttcctaatgtggatgggaaactgactggcagaaagaaaatcttccccccttcctcttgggtttcttctttttcttttcataatctcttttaagaattttctattaccatttcattcaatttctttcttctttaatttttcgcttcttcctgttacttactctgcagcctataagtggtagatgtatctgtggtagtggttagtaacctgggttatggagccaggttgattggatttgaattctggctctccaactttaccagttatgtga

SEQ ID NO: 395681 - DNA, 534 bp, Homo sapiens
attaagcatggagaagggtgttaattatggttttataattattatatcttatcacatgataatttctatatgtttgaattttcaagtaccaccttgaaaactgtcactgtctacttatcttttacatatttttttttttttttagagacaggggtcttgctttgctgcccaggctggagtgcagtggcatgattatagctcactctaactacataaaaagagaagttttttttggctcaagtgatcctcctacctcagccttccaaatagctacgactacagctacttggaagtgagccactgtgcccagctaaatttwattttttttttttttaagatataaggatctcactatgttgcccaggctagtcttgaattcttggcctcaagtgatcttcttgcctcaatctcccatagctgggattaaaggcacgagccactgtgccaggtttacttgtcgtttgaaaaggtttttcatgttaagttttgggggtacattccttaacagatctaattttatcagaaaaccaagtt

SEQ ID NO: 395682 - DNA, 479 bp, Homo sapiens
cacacagaacattgttatctctctcttctgagcaaaggaacccaaaactcaaagcacaaagacctggctgtattttttagattggaacagggaaatagcattctttttcttttttgttgatgagtctacagcagccccaaagacacaaattagttatttattatctactctgatrtagtgctataaagcttctaaagcaagtaagagaagcttctcttttcatcagaattaacccattgacccaaatggatctttgacacttcctaagtccaaaaaaacccacaaaaaagacaacaaaaaacatctttactgaagaggtttgaaattagacactgtattagttctctgataagtaagtacaaaacctcaatctttaatgaagttcctctgaaacagtttatttttcatggactattcttcaacaaatcttccataccattttaggtttgtttttatgagacttcttgagtattaacagt

SEQ ID NO: 395683 - DNA, 541 bp, Homo sapiens
ttctacacaaaaacaagtagaaaatgggccattcttcagtcatgggagcagttaagtttcagaagacaccaaagacacttcaaaatcaagtgttaaataactattggaaaataggagtttatattgagaccttcgtccggagaaatcaacagcgacaaaatgctttggagccctcatctattttttgcagattttctccatgacttttctctactactctgtactactctctacttttcatactcttacaytgattccaacaaattacccagagttagtgcattcaaaaaattgttaatccaaatttagcatgtccatttggaaatatccctaaattttgacaagaacactgtgaaaattatttctgtagatagttgtcgcctacttttgtggtaggtaattaattaaaagttaaatgtccaagccaatcaaatgtaggcatagcatttattccacaattaaaggtgggtgacatgatagcctaggcaaagtaaacaatcaatcaattaaaaaatattaataatggtcaccattaatcgac

SEQ ID NO: 395684 - DNA, 581 bp, Homo sapiens
aaaatatcatcaagtcagaaacaatttccaaatttatcagagtgaagtgaggagaattttaaaattgtagatactaataacaggggttagtaattctatattgtacaactcagtgattcaataaatattgtcactatcaacttctttggattaagatagctatgtttaggcaactggttagtgttatttagttaagcatgtattttttaattattactaaatttcttaaacacccttgaaatataattgttgaaaatgtcttaaaaacacagctagtatcaaccagagaaataatttagcaaagagttaatttatttcactaagtagtgatatatttttgaaygcatgtggaatagatgtgtgcctataaacttgactttgtgaattaagttttatttttctagttcagttttactttgaatatggatatgttgttgttttgtgaatcttagacatcagaaagatttagttgggaagagaagtaataatgtaaaataaaagtaataataaaatactcaaatttctgtattaaattagcttttgggggaattagctacataattaggttattttaatagatt

SEQ ID NO: 395685 - DNA, 428 bp, Homo sapiens
aatcaattgtcttagaaaacttaaaatgttgctatctttgagccagaaattttattttctccttgtgaaatcaacaagttaagaaaaacaktggtagtaatctatgtttaaaaggtgaaatatatttcttccctttttttctcccataagttaccttggcatttcatctttataagcttatttactctattccttttcctatattcctagatagatcatcaatttcttgagaaccatagcttatacttttaaagtcctcccaaagtgcatgtaagcaaaggtgcatttgttgattaattgactccaaagatttcctaaactcaagatgttccctgtaagaaattacacactgcctacagttcaacaaatctgtaccctactttaaatgctgcttgggacccacctcccccatcttgagtttccactaa

SEQ ID NO: 395686 - DNA, 428 bp, Homo sapiens
aatcaattgtcttagaaaacttaaaatgttgctatctttgagccagaaattttattttctccttgtgaaatcaacaagttaagaaaaacagtggtagtaatctatgtttaaaaggtgaaatatatttcttccctttttttctcccataagttacyttggcatttcatctttataagcttatttactctattccttttcctatattcctagatagatcatcaatttcttgagaaccatagcttatacttttaaagtcctcccaaagtgcatgtaagcaaaggtgcatttgttgattaattgactccaaagatttcctaaactcaagatgttccctgtaagaaattacacactgcctacagttcaacaaatctgtaccctactttaaatgctgcttgggacccacctcccccatcttgagtttccactaa

SEQ ID NO: 395687 - DNA, 521 bp, Homo sapiens
cagaagcctcagtgcactcacactcagaggcaccaggtcctaacaaaggcaggggcgaggaactaaggggctcagataaagcaagataaggagcaatccaatgcctaggtccctcccagatcctgagtgtcacgccactcctctatctcctctaagggaccacagattttctctggaggagctgaagcagaatggctatgggttcaaggcacagtcctcaacacagaactgagatggatgtggaactgagtacaggaggattataggaatactgaaagggcgccctcagctccctttcctctgcccactcccagaacagaccaccatctccccacatcttccccttaccccaagaaggagaatgaaggcatctatgaaggagaaattaatcacccccagaacagaccaccatcttcccacatcttccccttactccaagaaggagaatgaaggcatctatggaggagaaattaatcacccccagaacagacmaccatctccccacatcttccccttacctc

SEQ ID NO: 395688 - DNA, 511 bp, Homo sapiens
ctgttgataaattgagtaaattggatttgatatattagataatggagtgaggagatcaagtgtgaaaatcactacctataaaaattasttaattgcaacatttccccatcagtttcatttttcatatgtgtgattttaaataattgactttgaagtgttttataaaatgacttttgggtctctattttgtgttcttttcatgatgtgtttaacttggtattttagtttggcaaaaacaaacaaatccccccaccccactcctcaaaaatgggacttgtaataaaagttgcttaagaaatagcattaattatatatattttcaaaacaggcaatatatattgttctgataatttcctcctaaatactcagtctctaaatttatatttttcttttctccatagcaatatgaaactgtctgtaagaggactgttctttatgattgttataatttttcaaccagaagatactacctttacaacctcagatactaagggagacaaatgtactgaac

SEQ ID NO: 395689 - DNA, 511 bp, Homo sapiens
ctgttgataaattgagtaaattggatttgatatattagataatggagtgaggagatcaagtgtgaaaatcactacctataaaaattacttaattgcaacatttccccatcagtttcatttttcatatgtgtgattttaaataattgactttgaagtgttttataaaatgacttttgrgtctctattttgtgttcttttcatgatgtgtttaacttggtattttagtttggcaaaaacaaacaaatccccccaccccactcctcaaaaatgggacttgtaataaaagttgcttaagaaatagcattaattatatatattttcaaaacaggcaatatatattgttctgataatttcctcctaaatactcagtctctaaatttatatttttcttttctccatagcaatatgaaactgtctgtaagaggactgttctttatgattgttataatttttcaaccagaagatactacctttacaacctcagatactaagggagacaaatgtactgaac

SEQ ID NO: 395690 - DNA, 569 bp, Homo sapiens
ttttgtttttgtagatactggctctcactatgttgcccagggtggtctcaaactcctgggctcaagcgatcctcctgcctcagcctcccaaagtgttgggattataggcgtgagctaccttacctggcctcaagtctgtttcttgatcagtaagcctggtaatattgggctgtcttgtgtgcatatatgtagatgtacatgcatgcatacacatatattccactttgggtggaatggatgaatcttttgtttccagtggaaggagttctttgagttacaaatagtagaataagggctttcagtttaaacagaacccacatgagtgtttcattaatcatgttcacgtgttaatggattctcttgaggcctttggagtcattgyttttgcaatatttccttagggcctttttcttcagtccagattaatctaaaatacattgcactgatccagagatgtcaccaaattctcctgaaaagccctttgactgtatttgggctggcctgtgcttttatggaaaaatgctatctcactgctgatgaggtttctggcattagcaaagatggcctta

SEQ ID NO: 395691 - DNA, 539 bp, Homo sapiens
tgtttctaattatatcttattatacgatgtcttgaaaagttgtcrtatttattatttttgattggttcatcatttaatctttccacttaagattagagtagtttacagaccacagctatagtgttgtaatagtctgtgtttttctgtatacttactattaccagtgtactttcaggtgattacttactgctcattaatgtctttttctttctaactgaaatactacctttagcatttcttgtaggacaggtcgggtgttaatgaaatccctcagcttttgtttgtcctggaaagtctatatttccctttcatgttttgaggatattttcaccagatatattattctagggtaaacatttcttccttcaacactttaaaggagaacattatcctactctctcctatcctgtaaggtttccactgagaagtctgctgccagacgtattggagctccattgtatgttatttgtgtctgttctcttgctgcttttagggtcttttctttatctttgatctttgggagtttgattattaaatgc

SEQ ID NO: 395692 - DNA, 568 bp, Homo sapiens
atttaaaaccttaaattttagtgctcatgctctttaaaagaaagtgttacatttaaaaagagtctatacactgggaaaaatatttgcaaattatatgtcttataaaacacatatctagactattaagaaaaacaaaactcaaacaaaccccaacaataacaaaacaacaagccaaataataaatgaatagactatctgaagagacatttcatcaacaatgatgtttatgtagaaaataaatattggaaattatgctcagcatcattagtcattaagaaaatacaaaatcaaatcacactaagatactatgtaaaccttattaaaatggcaaaaacaaagtaaaacaacaacaacaacaaacaacaaaatattgacagtataaaatattggtgagagtatagagcaacacaaattctcacttatgttttgtttcagttaaaaatgtcactgtcaatttagaaaataatttgacaactttttaaaggaaaccttatacacacasacagacacacaacacacacacaaacatatgtttatcataagactgaggacttgcacctgcagattt

SEQ ID NO: 395693 - DNA, 498 bp, Homo sapiens
tgttcctgaatttggtttccaagtattttgttgtgaatttttgcatctatgctcatcaaatatattgggctaaagtttttgttgttgttgctgttgtttttgtttttctgccagattttcaaatcatgatgacaccagtattatagaaggagtttgggagttctttctcctcagagtttccataggaatggtatcagcttttttatatacatctratggaattcagctatgaatccatctggtcctgggctttttctagttggtagacttttcattaccgattaaattttagaacttattaatgatctgttcaggaattcaatttcttcctactgcaatcttgggagactataggtttccagggactgaatgacttttgagtaaacaacaaaattagggaaaatatataaaaagaaatttcaaattaataataacacaaacacaacataataaaaattctggaatgcagtaaaagcagtgttaagtggaaagtgctaa

SEQ ID NO: 395694 - DNA, 642 bp, Homo sapiens
gtattctcactgtttagctctcacttataagtgagagtgtgtggtatttgttcttctgttcctgtgttagtttgcttacgacaatgccctccagctccattcatgttgtgtctgcatagtattccatagcgcatatgtgccacattttctttatccagcctaccattgatgggtatttaggttaagaatcattcattttctttttttatcataaaatttatatattaaagtaattgcaactaacctactagtatgtattaaaggtctaatgtgggtatcacatcttcccaaaccaatctcctcacacacaaacgctcwcactcacaattttcttgaataggatttatagatcctaaaattgcagtatttcaaaggacactaaatatcattacatgtaactacttcattgaaaaatgaggccattataacaaagatgttttaaaataaaatcagctgattagcatgagaaacaaaaaaagaattgcactaaaaccgttgtcgtttccaaaatattaacctatttattattttcttttataaagaaaatcccactaccataatctataagaaaaacaactggccatttcacattttcttccaaatatatttcatttctgcattatatgataagctccttaaacc

SEQ ID NO: 395695 - DNA, 642 bp, Homo sapiens
gtattctcactgtttagctctcacttataagtgagagtgtgtggtatttgttcttctgttcctgtgttagtttgcttacgacaatgccctccagctccattcatgttgtgtctgcatagtattccatagcgcatatgtgccacattttctttatccagcctaccattgatgggtatttaggttaagaatcattcattttctttttttatcataaaatttatatattaaagtaattgcaactaacctactagtatgtattaaaggtctaatgtgggtatcacatcttcccaaaccaatctcctcacacacaaacgctcacactcacaattttcttgaataggatttatagatcctaaaattgcagtatttcaaaggacactaaatatcattacatgtaactacttcattgaaaaatgaggccattataacaaagatgttttaaaataaaatcagctgattagcatgagaaacaaaaaaagaattgcactaaaaccgttgtcgtttccaaaatattaacctatttattattttcttttataaagaaaatcccactaccataatctatmagaaaaacaactggccatttcacattttcttccaaatatatttcatttctgcattatatgataagctccttaaacc

SEQ ID NO: 395696 - DNA, 642 bp, Homo sapiens
aataatctatgaaaagctgctaagtggagtgccccagaaggcactcaccaaaatggaaaatgtgcaacatgaaggaatggtgttgggtggggccttgaaagagagggaaaatattgctacsaatcacaagagtccacagcaaaatccattgaatacctgctctgggacagggagtgaagatcatagtaagtaaattgcccaagattcctctgctatttagatatagaaacaatatacaaaacactcagcaagcccaaggcaaggcacttcataatggttatgctcttagcaattcacaatgatgaactggaaaaagaagggaaattaggtccatgagaaatttgtggccaactttttacttctataacatattccaccccagacagcaacagaccatggcagaacagacactgttggttctctaatcaacaggtattccctttcttcttttggaatagaaccttaattgttttccagtattgccaggaataggaatgtgtttcaggtggggctgtgtccatgcccagccccaggaggtaaatttggattaatttaaaccagccatgatcattctatcttccttgacagtggaagacttggaattcagtcctggccaataagatattaagtgcagtcccctgg

SEQ ID NO: 395697 - DNA, 642 bp, Homo sapiens
aataatctatgaaaagctgctaagtggagtgccccagaaggcactcaccaaaatggaaaatgtgcaacatgaaggaatggtgttgggtggggccttgaaagagagggaaaatattgctacgaatcacaagagtccacagcaaaatccattgaatacctgctctgggacagggagtgaagatcatagtaagtaaattgcccaagattcctctgctatttagatatagaaacaatatacaaaacactcagcaagcccaaggcaaggcacttcataatggttatgctcttagcaattcacaatgatgaactggaaaaagaagggaaattaggtccatgagaaatttgtggccaactttttacttctataacatattccaccccagacagcaacagaccatggcagaacagacactgttggttctctaatcaacaggtattccctttcttcttttggaatagaaccttaattgttttccagtattgccaggaataggaatgtgtttcaggtggggctgtgtccatgcccagccccaggaggtaaatttggattaatttaaaccagccatgatcattctatcttcyttgacagtggaagacttggaattcagtcctggccaataagatattaagtgcagtcccctgg

SEQ ID NO: 395698 - DNA, 614 bp, Homo sapiens
attttcttaagtgaaagatttctactcctaaatccttttaagtgtgtcctagttcccagaagagaggtttaaaattgctcccaggcaccagacacacatttcaaagtgcaatattcagtgagcccttcagaatctgcttaataatgaacacatgtgtgttgacacgaggctaatatagttgatatattgattatagtccctctgaaatatgaactttttctgcctaaccaagtgtcctcaagaaagaaatgcagaatctctgtctggaccaattagaaggtacacaaatttgacttgtcctacaacatcacagacctcatattaataaaataactgaattgaattttcctctttttgtttttcccttgtgcaaattaagtaaagaataactggccaagggccaggaggcgtgcctgtgattaactaatgaggaatccttacaaggacggtgtcaatcagagtgtgtkgggggggaacagagttccaataaatgggttttgatttgagctagaaaaaagagcacggctaagatgagaggcagaaacaagtaaagagcagtctcattcctcaaacagtctgccataatcatgtttggaaacaattttaaacataaa

SEQ ID NO: 395699 - DNA, 614 bp, Homo sapiens
attttcttaagtgaaagatttctactcctaaatccttttaagtgtgtcctagttcccagaagagaggtttaaaattgctcccaggcaccagacacacatttcaaagtgcaatattcagtgagcccttcagaatctgcttaataatgaacacatgtgtgttgacacgaggctaatatagttgatatattgattatagtccctctgaaatatgaactttttctgcctaaccaagtgtcctcaagaaagaaatgcagaatctctgtctggaccaattagaaggtacacaaatttgacttgtcctacaacatcacagacctcatattaataaaataactgaattgaattttcctctttttgtttttcccttgtgcaaattaagtaaagaataactggccaagggccaggaggcgtgcctgtgattaactaatgaggaatccttacaaggacggtgtcaatcagagtgtgtggggggggaacagagttccaataaatgggttttgatttgagctagaaaaaagagcayggctaagatgagaggcagaaacaagtaaagagcagtctcattcctcaaacagtctgccataatcatgtttggaaacaattttaaacataaa

SEQ ID NO: 395700 - DNA, 614 bp, Homo sapiens
attttcttaagtgaaagatttctactcctaaatccttttaagtgtgtcctagttcccagaagagaggtttaaaattgctcccaggcaccagacacacatttcaaagtgcaatattcagtgagcccttcagaatctgcttaataatgaacacatgtgtgttgacacgaggctaatatagttgatatattgattatagtccctctgaaatatgaactttttctgcctaaccaagtgtcctcaagaaagaaatgcagaatctctgtctggaccaattagaaggtacacaaatttgacttgtcctacaacatcacagacctcatattaataaaataactgaattgaattttcctctttttgtttttcccttgtgcaaattaagtaaagaataactggccaagggccaggaggcgtgcctgtgattaactaatgaggaatccttacaaggacggtgtcaatcagagtgtgtggggggggaacagagttccaataaatgggttttgatttgagctagaaaaaagagcacggctaagatgagaggcagaaacaagtaaagagcagtctcattcctcaaacagtctgycataatcatgtttggaaacaattttaaacataaa

SEQ ID NO: 395701 - DNA, 613 bp, Homo sapiens
tttaagatatttccatttgcagctgtaagtgacattaatctattgttttctttgtgtgcaattttatcagattgtgctactactctgctgctacatcctgtcatgtatctcactgagttttataactctctattttaaacttaagatttcacaaaaacctgcaaagacaggatagacaatgtccatctaggcttcacccatacttatccatattatttgatttttaaaatttactgattggttttatccaactttattgtttttacttgcaaacttggctattttttccatgatactttgccctttttcttataccaagcctatttttatagcacttatgttttaaatgtgtaatttttttaagttttgtggtattcagcatcaactttkgtatgttttatgatccttatgcttggtagattacttggtcatatcatctgtaatttctgtgcatgcatatgaagccatatttacacatggcttcttctttagtcgatctttcccttggctatgatagtgtttctgttaccagtgatgaaaacatatgaggctgcagcaaacttcatccttgactcctcaaagaaaagaattcagccgaggggcagaagtaggt

SEQ ID NO: 395702 - DNA, 613 bp, Homo sapiens
tttaagatatttccatttgcagctgtaagtgacattaatctattgttttctttgtgtgcaattttatcagattgtgctactactctgctgctacatcctgtcatgtatctcactgagttttataactctctattttaaacttaagatttcacaaaaacctgcaaagacaggatagacaatgtccatctaggcttcacccatacttatccatattatttgatttttaaaatttactgattggttttatccaactttattgtttttacttgcaaacttggctattttttccatgatactttgccctttttcttataccaagcctatttttatagcacttatgttttaaatgtgtaatttttttaagttttgtggtattcagcatcaacttttgtatgttttatgatccttatgcytggtagattacttggtcatatcatctgtaatttctgtgcatgcatatgaagccatatttacacatggcttcttctttagtcgatctttcccttggctatgatagtgtttctgttaccagtgatgaaaacatatgaggctgcagcaaacttcatccttgactcctcaaagaaaagaattcagccgaggggcagaagtaggt

SEQ ID NO: 395703 - DNA, 573 bp, Homo sapiens
tggcaaagatgatattttcctaaaacagttattactagacttcatggcagtatccaagaaacatcatgagaaaggaaagaaatggaaaacaagcctaggagagagaagagcaaaccaaagctcagaagtgggaaagggcaatcagtagcccaggaatggggaggagcccgtagtctgaatctgtggagttgggtagaggacataagtgactgtaggtcttggtggagtttgtgcatcaagagaatggtttggaagttattgtagagtcagagctgcaaagagaaaatagaagcaatygtggaaatataaaatcatccgagtaaatcccgaaagtttgaagattcattgctgttggctttcttcagacaatgtgtgtacagtaataaaaactagttttccactcttctggttggctcttgacatgcaacctaggaaaacacaattatctattctattatgactgtgaattcacaaaggcgggggtcggggggtatttaccaaaacctgccttctaaaattctagtgttcaaaagcaattacaagtattatggttattttgcatttatatagctg

SEQ ID NO: 395704 - DNA, 451 bp, Homo sapiens
tccatttaaaaatgcaaaagatgggcttgcagaagatagcaataaaagaaaaacaaatatattttgcttctagtaaattaagataagccccatttcacattaaaagcatttttaaactccaaagcctccctttccattaatcaggagaatataatgyacttgcttagaccaaaggattttgatgctgagactaaactaaaagagaaaggcactctgcagccttggcaggaaacggaaaaaaggaggcaactggtagaaattaaaggatgtgcaaacaacaaaactcaccaagcccatcattcctcaaaaagaaaaaaaaagttgtacagtaaataaactgtacttcacagttccaatgcaaaaggatggagtttgggtaaaacaatgataagccatggatacattgcattttttttgtcccaatgtctatgaaaacaaacagaaaaggaca

SEQ ID NO: 395705 - DNA, 553 bp, Homo sapiens
agccatggatacattgcattttttttgtcccaatgtctatgaaaacaaacagaaaaggacaggcaaaaatctataaatagcacccgatgctgaggaagaaaaaataaaatagggactaaagttttcaactaatgaaaatacaacccccaacaccagctacaaaacaaagtttttaaaaattaaatattatcaggcatttgaagatattgaagaacatccaaatctagaaawtttaaaaactcagaatagaaatgaacaaatggaaagaaagtgttaaaccaaaattaatggaccaagaaaattgaagaagacacaaccacatgggacatgaaagctgaatcccaaaatgataaaggaaggatagatttgactgagaaagactgagagggtacttcaaaatatgcaaaggttttagaacttgaatgtacaatgggtagtaaacatcaaaagagtttaaaggatagagaaagtaagcaaaaacacccagaaatatataaaaatacctggagaagaacagtgaaacaatatactgcttagtaacagtataaagttg

SEQ ID NO: 395706 - DNA, 553 bp, Homo sapiens
agccatggatacattgcattttttttgtcccaatgtctatgaaaacaaacagaaaaggacaggcaaaaatctataaatagcacccgatgctgaggaagaaaaaataaaatagggactaaagttttcaactaatgaaaatacaacccccaacaccagctacaaaacaaagtttttaaaaattaaatattatcaggcatttgaagatattgaagaacatccaaatctagaaaatttaaaaactcagaatagaaatgaacaaatggaaagaaagtgttaaaccaaaattaatggaccaagaaaattgaagaagacacaaccacatgggacatgaaagctgaatcccaaaatgataaaggaaggatagatttgactgaraaagactgagagggtacttcaaaatatgcaaaggttttagaacttgaatgtacaatgggtagtaaacatcaaaagagtttaaaggatagagaaagtaagcaaaaacacccagaaatatataaaaatacctggagaagaacagtgaaacaatatactgcttagtaacagtataaagttg

SEQ ID NO: 395707 - DNA, 553 bp, Homo sapiens
agccatggatacattgcattttttttgtcccaatgtctatgaaaacaaacagaaaaggacaggcaaaaatctataaatagcacccgatgctgaggaagaaaaaataaaatagggactaaagttttcaactaatgaaaatacaacccccaacaccagctacaaaacaaagtttttaaaaattaaatattatcaggcatttgaagatattgaagaacatccaaatctagaaaatttaaaaactcagaatagaaatgaacaaatggaaagaaagtgttaaaccaaaattaatggaccaagaaaattgaagaagacacaaccacatgggacatgaaagctgaatcccaaaatgataaaggaaggatagatttgactgagaaagactgagagggtacttcaaaatatgcaaaggttttagaacttgaatgtasaatgggtagtaaacatcaaaagagtttaaaggatagagaaagtaagcaaaaacacccagaaatatataaaaatacctggagaagaacagtgaaacaatatactgcttagtaacagtataaagttg

SEQ ID NO: 395708 - DNA, 453 bp, Homo sapiens
ggagtagattgatttggaagagcatcatggaatgcaaggcaacagcagaaaaacaacttcaagaaactcaaatatgtgagccgaagagcacattgacctagaaattagagcaaaagtatcatgaatttctccaccaagtcgtttgtccccacgaaagtaaactatcttgatttccgtcctcagagaccaatttggcctttatctgagcttcatataaatggaatcgtacaacatgtgatcttttatttcaggcttcttttgctcaactgcatatttgtgagattcatagcatattgctgtttcattttcattgctatatggttacagaacactttatttctacattttgtcgtttgtaaatatttagatgattctgtttyggctattaggaacagtgcgattatttgtgtacatgtcttttgttgaccatgtgaacccatttctgcttgaata

SEQ ID NO: 395709 - DNA, 453 bp, Homo sapiens
ggaggcgattaagtcctgagggctcagcatttgtgaatrggattaattcccttataaaggccctgttgcccttctgcctttctcatagcatccatctcttctgccatgtgcaaacacagcaagaaggccctctcaagatatgaaatggtagtggcttgatcttggacattccagcctccaggacagtgagaaataaattcctgttctttatatacagtctgaggtattttgtcatagcagtggaaacagtctaagactaacagtattttccttttcttacaaaaggaaaaaagagatcctgagttctactctgatttctttttatacatgctagtaaaaattatgcagaaatgaaatttaaataactatttgaaagccttgtagtaggaaactatcatcgaaccctgtgactcacttgattatgttgttggttatattattgttttaactgct

SEQ ID NO: 395710 - DNA, 627 bp, Homo sapiens
ccatacagaactgcgagtcaattaaatmtctttcctttataaattacccagtctcatgaagttctttatagcagtgtgaaaatggatgaatacagtatttataaggtttattagtccgtagttttctttcattctagtgtctttggctttcatagcagagtaatgtgttggtctcagtagaatgataatgtgttggtgttaattctttaaatgtttggtagaattcaccattgaagccatctggtcttgaacttttcttttttagcagttttttttagattacctgttcaatctccttactagttatagacctaatcagattttctatttcttcatgattcaatcttagcaggttgtgtgtttctggaaagttatacattttttctaggttgtgcaatttgttggcatataaatgtttacaaaactctttataacattttatttctgtaaactcagtagttaatgtttcctttttcatttttaattttaattatgtgacctttagtcttttgttttcattagtctagttaattatttctcaattttgttcatctttttaaagaacccagcccaggttttgtttttcctttgcattgtttttctattacccaccttatttatagcttc

SEQ ID NO: 395711 - DNA, 627 bp, Homo sapiens
ccatacagaactgcgagtcaattaaatctctttcctttataaattacccagtctcatgaagttctttatagcagtgtgaaaatggatgaatacagtatttataaggtttattagtccgtagttttctttcattctagtgtctttggctttcatagcagagtaatgtgttggtctcagtagaatgataatgtgttggtgttaattctttaaatgtttggtagaattcaccattgaagccatctggtcttgaacttttcttttttagcagttttttttagattacctgttcaatctccttactagttatagacctaatcagattttctatttcttcatgattcaatcttagcaggttgtgtgtttctggaaagttatacattttttctaggttgtgcaatttgwtggcatataaatgtttacaaaactctttataacattttatttctgtaaactcagtagttaatgtttcctttttcatttttaattttaattatgtgacctttagtcttttgttttcattagtctagttaattatttctcaattttgttcatctttttaaagaacccagcccaggttttgtttttcctttgcattgtttttctattacccaccttatttatagcttc

SEQ ID NO: 395712 - DNA, 619 bp, Homo sapiens
catctttcaaaattttgttgctctcattttcggggaacttcagcttccaattatccaattctgtttttcgtttattctaccatatttttaatttctaaaaacttttccagttactacatatttttagcacacagttcactttttaagttgtcatatcttttaaaaatatatttacaaatattcatggtgtagtwtttaaagaactatttctgggacagtagaagttgcacttactttcgtttctttcttttaaattatgtgctttcatcagattgttttctatgtttaataatctatgttatctatgtttaagtttttacagcttcttgcggacaaataaaagtgtgattatcagaattttggtgctaagtgaaggagaatactgtaggtttcaccgtgcattacccacatgtatatctaatcaatctcatttcagtatgctaccctaccttcaatcatacatgaaattgcatgtctgaacacccttccggagaatgtatcttttgcctgatagatctgattgttattaaagaaacttttagctatttccccttctttttgcccatctctttacttccagcagtaagtggcactgacaacgcttgccttttcaaaagag

SEQ ID NO: 395713 - DNA, 619 bp, Homo sapiens
catctttcaaaattttgttgctctcattttcggggaacttcagcttccaattatccaattctgtttttcgtttattctaccatatttttaatttctaaaaacttttccagttactacatatttttagcacacagttcactttttaagttgtcatatcttttaaaaatatatttacaaatattcatggtgtagtatttaaagaactatttctgggacagtagaagttgcacttactttcgtttctttcttttaaattatgtgctttcatcagattgttttctatgtttaataatctatgttatctatgtttaagtttttacagcttcttgcggacaaataaaagtgtgattatcagaattttggtgctaagtgaaggagaatactgtaggtttcaccgtgcattacccacatgtatatctaatcaatctcatttcagtatgctaccctaccttcaatcatacatgaaattgcatgtctgaacacccttccggagaatgtatcttttgcctgatagatctgattgttattaaagaamcttttagctatttccccttctttttgcccatctctttacttccagcagtaagtggcactgacaacgcttgccttttcaaaagag

SEQ ID NO: 395714 - DNA, 566 bp, Homo sapiens
catttactcacatgattccatttactcatatgataccaacaggagaaaaaaatggactcaaagtgtcaattcagagtgattattaaaaaaagcacagattagatcaagtatactacaaattttggtgttttctcccttatattgtttagaaatatcttctagagagaaagaaaaaaaraactgaaaagaaataaccttaaagggtaatttgaaaataaatggactttgatgggttctgcacaaacaagtgaacatttatgatttgctcatttgtcactctggactctatttttttaattatttttagccgtgtcttgatatttaatagttgtgtgttcctgaactgaatcttcagaaaagtataaagaaataaaggaacaaaatgctaacatttgcctaaccaatggcccagaaaccgtcgccttggccagactgttaaaattatgaaacacatgatgtgttttacatttccattcccgagtgcagtgtcctgtcatattttctcatcattgttttctacatggctatttctggcctttctatatgtcttcttagcaaattaacat

SEQ ID NO: 395715 - DNA, 566 bp, Homo sapiens
catttactcacatgattccatttactcatatgataccaacaggagaaaaaaatggactcaaagtgtcaattcagagtgattattaaaaaaagcacagattagatcaagtatactacaaattttggtgttttctcccttatattgtttagaaatatcttctagagagaaagaaaaaaagaactgaaaagaaataaccttaaagggtaatttgaaaataaatggactttgatgggttctgcacaaacaagtgaacatttatgatttgctcatttgtcactctggactctatttttttaattatttttagccgtgtcttgatatttaatagttgtgtgttcctgaactgaatcttcagaaaagtataaagaaataaaggaacaaaatgctaacatttgcctaaccaatsgcccagaaaccgtcgccttggccagactgttaaaattatgaaacacatgatgtgttttacatttccattcccgagtgcagtgtcctgtcatattttctcatcattgttttctacatggctatttctggcctttctatatgtcttcttagcaaattaacat

SEQ ID NO: 395716 - DNA, 600 bp, Homo sapiens
gattggcttagtcataaatcctgtgaagtcatgcataacacatggacggttttctccagcagtaatttgctttttcagacttgatggctttcacagctttttaaaaaaatataacaaagatggtattttcaattcattaatcctatcagactttcatgatattctcttcatcagggttctcttccataatactsacaattctttccattgggtaccacatgtaatgagccttaatggtccttaggactgcctgatctacaggctgaattatagatgttgtgtttggggcaaatagatcactttaatgtctttggtgctgaaatcagagttctggttggccacgggcattgttcaatatcaaaagaaatttaaagggcactgccttactagtaagatactttctgacttcagggacaaagcatcaatggaatcaatccagaaaaaggattctcattgccaaagccttcttgttgtacaatgaaaagactgacagctggtgtttatctttttactttaaggctcaggaattaactgctttatagttaaaggcagtcctcatcataaacctaacagcatttgcacaatagttagcttatccct

SEQ ID NO: 395717 - DNA, 545 bp, Homo sapiens
ttttggagtgtctcatggtaacacagagaggaaaggagrctgccattttcttctttctagatttgcgcacagttggtgtttgaagaaagtttccatttctgaaatgttagtactgacagagtaaaatgaaagggaaaaggcacagagcctgcccttgagttgctcatagatacaacagaattattttagtttaccaatgtttctaatattatttgatactattcttaggctgaaagatatatgtatagacaaccctggaactttattgagtgctacttttattgtatgaaaggaagggaaaaaacatatgtttaaaatacaaattattattgtcagcttttctcagttaatttttatgggatgcctaaattgaattgtaatcatcattccttcctatgtattcattatacccttttctaaaaaggacatcgcagtcaaaaaactctacctcccctcctattttgaaataccaggagttagggtaagtaactatagctacaaccatgtcatcgtgaaccatgtcatcctcctgcagtctcaggtca

SEQ ID NO: 395718 - DNA, 567 bp, Homo sapiens
tataggttatgagacacaaacacagctggggaccactttcttctaattcctcttaccttttggtatgtctctaccagcacccctcaggctgctgagaactgcccttctcttcagaggtagcctggctgggtcattaaaatgagggacgcattcaggtggaggctttcagatgggactcaggaaggtctcctggtggagcctggcaccattctgttagggattcacgggcaatggaagcagacacttctcatcaactgcaaataatataatttgtaccttcatttttttcttcatgaacttcaataattatacagatttttaaatgaaattygaaaatataacttgctaaaatgttgtctccttttcctcagtttgcaaatgtatacttatatctctaccttgtttttcttttagctaccttcataacataacacacacctattcatggagattggacacatatatacttaagcctatatttcttattccatcaattttatgtctcaacttcttttacacattggcatatattaatatcttaaattatctaaagcccattcgttctct

SEQ ID NO: 395719 - DNA, 591 bp, Homo sapiens
gaaaatataacttgctaaaatgttgtctccttttcctcagtttgcaaatgtatacttatatctctaccttgtttttcttttagctaccttcataacataacacacacctattcatggagattggacacatatatacttaagcctatatttcttattccatcaattttatgtctcaacttcttttacacattggcatatattaatatcttaaattatctaaagcccattcgttctctactactacctgttgacttttgtgggctgcattttcataatataaggatgtcactatagtctgctctgtaaccataaagttttctgtattttttctatattttgtttctaacagatgaaaatcatttagtagtgatttattattaatattatataaataatgttcatattatagtctartagattcatgagtcagtactcatgcgttttacaatcatctatggattttattttttgtgcactttagctttcaatgttattgacaaaacatcttatagcaaaataattctcattcttctctcatcctggacactttaaagatattattttattgtgttatacagttgaaacttgtaa

SEQ ID NO: 395720 - DNA, 591 bp, Homo sapiens
gaaaatataacttgctaaaatgttgtctccttttcctcagtttgcaaatgtatacttatatctctaccttgtttttcttttagctaccttcataacataacacacacctattcatggagattggacacatatatacttaagcctatatttcttattccatcaattttatgtctcaacttcttttacacattggcatatattaatatcttaaattatctaaagcccattcgttctctactactacctgttgacttttgtgggctgcattttcataatataaggatgtcactatagtctgctctgtaaccataaagttttctgtattttttctatattttgtttctaacagatgaaaatcatttagtagtgatttattattaatattatataaataatgttcatattatagtctaatagattcatgagtcagtactcatgcgttttacaatcatctatggattttattttttgtgcactttagctttcaatgttattgacaaaacatcttatagcaaaataattctcattcttctctcatcctkgacactttaaagatattattttattgtgttatacagttgaaacttgtaa

SEQ ID NO: 395721 - DNA, 491 bp, Homo sapiens
tgttgcctgtctcagaagcttgcttcaattccaggaaggctcttcttagctgtckctttctctagttctttctgcttaccctctagccacgttaatattttgcttgttgctatcactgtcacggggctataaccttctcttatttacttaccactaggtattcttcaggcataaacttttcacagtgtgtttcaaataaagtcagttcctttatggagcagagatctcctttcttaaagtattccttgtcccctgggaagaatatctctgccattgcactgggcctggggttggagacagtggcctgcttctccaagatgtttatatacatatactctatgaatgaggtattagatggggataatagcccatgatcttcatggcttgcccctttcattgtagaacctctcacttccaagccggttggagcagaggcaaggaatgcccagtatttttggcctggagtgtagcttctgccttatgaatgagga

SEQ ID NO: 395722 - DNA, 491 bp, Homo sapiens
tgttgcctgtctcagaagcttgcttcaattccaggaaggctcttcttagctgtctctttctctagttctttctgcttaccctctagccacgttaatattttgcttgttgctatcactgtcacggggctataaccttctcttatttacttaccactaggtattcttcaggcataaacttttcacagtgtgtttcaaataaagtcagttcctttatggagcagagatctcctttcttaaagtattccttgtcccctgggaagaatatctmtgccattgcactgggcctggggttggagacagtggcctgcttctccaagatgtttatatacatatactctatgaatgaggtattagatggggataatagcccatgatcttcatggcttgcccctttcattgtagaacctctcacttccaagccggttggagcagaggcaaggaatgcccagtatttttggcctggagtgtagcttctgccttatgaatgagga

SEQ ID NO: 395723 - DNA, 566 bp, Homo sapiens
tagaattttatcttaaatgtatgtcttcatagtgcatgctcacagaaaaataatttaaagtagtacttacgattaaacatcatgtgccatattttatataagagaagacgtatttattatttgcattaagaaaataaatattttattattttgaagtttatataattactaataatttatttaccttatatataatttatttattgaacaaacatatatatgtgtgtgtatatacatacatcataatagtataactaagtgacagactattttcaatgctttaaaatttattttgtgtgttttcctatttctcaaaaaaatttcaacttttattttaaatttcggggtacatatgcatatttgttacatggtatgctgtgtgatgctgagattgggatatgaatgaccccatcacccaagtcgtagcatagtacctgacagttttgtaaactttgccttcctccttacttcccccttctagtggtcccaaattattgttgccatctttatgtscactagtactcaatgtttagctaccacttataagtgagaacatgggtatttgg

SEQ ID NO: 395724 - DNA, 566 bp, Homo sapiens
tagaattttatcttaaatgtatgtcttcatagtgcatgctcacagaaaaataatttaaagtagtacttacgattaaacatcatgtgccatattttatataagagaagacgtatttattatttgcattaagaaaataaatattttattattttgaagtttatataattactaataatttatttaccttatatataatttatttattgaacaaacatatatatgtgtgtgtatatacatacatcataatagtataactaagtgacagactattttcaatgctttaaaatttattttgtgtgttttcctatttctcaaaaaaatttcaacttttattttaaatttcggggtacatatgcatatttgttacatggtatgctgtgtgatgctgagattgggatatgaatgaccccatcacccaagtcgtagcatagtacctgacagttttgtaaactttgccttcctccttacttcccccttctagtggtcccaaattattgttgccatctttatgtgcactagtactcartgtttagctaccacttataagtgagaacatgggtatttgg

SEQ ID NO: 395725 - DNA, 596 bp, Homo sapiens
gatcttatgtgacaatcaggatagtaagtggtatcttgaaaacattccttattatttttsgtacattagtaccaaattggcacattagtaatctagatgtgcacgattgaagctgctcaacccctttacttacaaacattccagtcatgcttctcctctaacatcactaaaaagctcagtctttattattctgaatgtccagaatctaataaaaatggtaagaaaaaagtcaagaataaacaaaatcatacccaaacattccccagattttggaactattaggtaggcacattaaaataactatggtatatatgtcaaaaacatatgaaaataagtgatggtgtttacatgtactatatcgacatttgttaaaactcccagaactatccaactaaaagtggtaaattgtatttatgtaaattatgtcacaataagccttaatataaaatatcgatatagcatttgttagatatgctcaaagcctcttttgggtctagctgatctttccctcgggtcactgagggagattgtttagcttccagctcccgttcattagacattgtcttcttcagggacttcatagcaatatagacaaa

SEQ ID NO: 395726 - DNA, 596 bp, Homo sapiens
gatcttatgtgacaatcaggatagtaagtggtatcttgaaaacattccttattatttttggtacattagtaccaaattggcacattagtaatctagatgtgcacgattgaagctgctcaacccctttacttacaaacattccagtcatgcttctcctctaacatcactaaaaagctcagtctttaytattctgaatgtccagaatctaataaaaatggtaagaaaaaagtcaagaataaacaaaatcatacccaaacattccccagattttggaactattaggtaggcacattaaaataactatggtatatatgtcaaaaacatatgaaaataagtgatggtgtttacatgtactatatcgacatttgttaaaactcccagaactatccaactaaaagtggtaaattgtatttatgtaaattatgtcacaataagccttaatataaaatatcgatatagcatttgttagatatgctcaaagcctcttttgggtctagctgatctttccctcgggtcactgagggagattgtttagcttccagctcccgttcattagacattgtcttcttcagggacttcatagcaatatagacaaa

SEQ ID NO: 395727 - DNA, 522 bp, Homo sapiens
ccccagttttcaagaattaaagaaagcctttcttacttctcttctctaaagtcagtaagagttctgcaacaagaaaaaagaatatgagctatggcagagagaaaaatgcagtctcagtggtttagtaatgaagttgatagtttcaggagaaaaagaaaatcccatgtggcagatccatatatggcaggatattctcagaataaatgtgaatcatttctggagttgttccacatgttgttttaaaaggaactttattttattttaattttattataaaaatataactttatttttgttagatatttatgtaactagtagataattaaaatagagtagaaaaaaacctgatcctcaaagaaacacctgaagattgaatattttctttctaataaaacactgaagttaaggaaaatgcacaaactcgtaaagaacatamaacctgttatttagagagtaggggtgggaaacaaatgcgatattgattagcttgttcttttaatgaatttatccttaagagaactt

SEQ ID NO: 395728 - DNA, 522 bp, Homo sapiens
ccccagttttcaagaattaaagaaagcctttcttacttctcttctctaaagtcagtaagagttctgcaacaagaaaaaagaatatgagctatggcagagagaaaaatgcagtctcagtggtttagtaatgaagttgatagtttcaggagaaaaagaaaatcccatgtggcagatccatatatggcaggatattctcagaataaatgtgaatcatttctggagttgttccacatgttgttttaaaaggaactttattttattttaattttattataaaaatataactttatttttgttagatatttatgtaactagtagataattaaaatagagtagaaaaaaacctgatcctcaaagaaacacctgaagattgaatattttctttctaataaaacactgaagttaaggaaaatgcacaaactcgtaaagaacatacaacctgttatttagagagtaggggtgggaaacaaatgcgatattgattagcttgttcttttaatgartttatccttaagagaactt

SEQ ID NO: 395729 - DNA, 668 bp, Homo sapiens
tggattttttgaaacaaagtatgaattattaaggtgatgaatgccttgcttatgctgtgattattacacattgcatgcctatatcaacatacctcacataacctataaacatcaacaactattatgtacctacagaaactgaagataaaaaaagtttaaaactgaagattatgagattatgatgaatgaaatgaataaaaagaagtcacatgatctcagatgtaactcagaaaaagtgaatattaaaaatgtgaaaggggactaacttcttaatgacagtgaaatgtaatgagaagctgtaatatgtataacttatttaatgggcatatagtattatatgccagacatgttaatgaagatgaacttaaattgtaaaagcaacattaaatattttctgcacagcaaagaaaacaacaaaaagaaaagacaagccacagaatgggagaaaatatttgcaaactatatatctgataagggactaatatctgaagtatataagtaactcttacaactaaatggcataaaaacaaagtctaattaaaaattagaaaatcatctgaatagaaatttattcaaagacagagaaatgrccagcaggtatatgaaaggatgctcgatatcattaatgaccactgaagggcaaatcaaaaccacaatgagattatcac

SEQ ID NO: 395730 - DNA, 499 bp, Homo sapiens
aaaatcttcagaggacttataggatttcctaacttattgacatggtatcgtatataatattgccttaggccaacagaaccattttatagccacagaggtgtgagggaaggtctcataggatccgttggtcttgctaagtggctcttacctcatcatgccccccacacatcatcattcataaaagcttcctaattcaaaatgtggaatggcatgttaaaggatcagctatggcactatttcaaagacaaaagccctcagtgttgggatactgctgaaacaatatactaaacatattccagcatgactgaaaaattttatcttgaaaatgttggcagtcctaggaaacattcaagtatcacataaaagattcagaatcactgactcattcagcttttcatgggtggttttctttccaattactgactctaatgraagagtaaattactctcctaatgatagttgaaaataactgcttaggtttttatgtggaaaaaaagaa

SEQ ID NO: 395731 - DNA, 580 bp, Homo sapiens
aattccatggcacctgtgaatatttaccctttgcacagtaaaacttcaggcatagcaatctggaaactgctcccctgaattctgcttaaagcatgtagtcaaaatttctgcacaccaggtgtaggtggctttgctattatcatcattgaaaatgcatgtcctgttttcttgtggcaaggtgacaggtgatatacaaaacaagatgcatccataatccatgcccttgaggatctttcatacaaagacaaaggcgagcactgatttccagacaatagcctcataaagcagcttaaagtaagattttgttttcgtttttattttttgtggggtttttttgcacagaatttaagtgaaaaatatctgtttctgtgaagcaatggtttggtgggatcaatttctccagtgggcagatgtgatggttaatattaggtgtcaacttgattggattgaaggatgcataggtgggtggtaaagtattgtctctgggtgtgtctgtgmgggtgttgccagaggaaattaacatttgagtcagtggaccgggagaggaaaacccaccctcaatatgggtgggcaccattca

SEQ ID NO: 395732 - DNA, 621 bp, Homo sapiens
ctgttttatcaaattctctacatagttctatgtatgataaattttgagaaactctgttgtagttgtgtagaagtgcccaagattttgcatttctgagaagtttcsaggtgatctataaatgataaaagaaataatcttcctctagtatataaccaagattatgtataataatctgtgcttattctaaaatgctgctggtccataattctgagattttttttcttttctttttccctttttcccatatgaaaataaatgcaagttaaaagctgttggaactccccaaatactttatgtcttaagggagatgtgtctatgatctgagtcatatatggttacaatttctgtttctcatattatagattaactagctttcttatttttcttgctctgtacaatgactagagagaattaaatgacatcagggacaaaaacctcctgcctttttaattaatgattcttgttatagattaacttcccctttgttgtcctgctttgcttagaccagatgacagaaaacccatggctattagaccccctgtaaaaggtgttaaatgtaccctttccaaaaggaaacgctgcctataacgaatcaaattgctgtaactacttgtcagtctt

SEQ ID NO: 395733 - DNA, 506 bp, Homo sapiens
agactgctctggctcccagaaaattgtaatcttcatgagggctcaggtggtrtaattaacctttgccatccccagcagtacttgacacagtatttcagcagagttggcacctattattggagagtgaattgtttgttagcttcagtgtatttcattccccaagctagagaaattgctgtcctccaatagctatgtagagaaatgatgtcatggcagggcctataatattttgtcatgatattttatttcaaggctagttgggcaaatgataatgtaggcagagcacattcacaaattggataaacagatgggcttttattgccggaaataatttgttcttggaagaaacatctaacaccagtgactgccatattttgacagaagaatgacatttgggattggagtcataactgacctggcacattttggatggatagcattgctgaaacaaatgagtaggaattatttattaatatagtaaatttagtacgttatttaccggaaat

SEQ ID NO: 395734 - DNA, 551 bp, Homo sapiens
gtgcttactataatttatagatgcccagggctccaggaagggaatggcctctgtcaataccatataaataagacataaggctgctaggattttcaaatcagaggaataaaattattttargttttgtatagaaagagtgacagattatagatttatttattaaagccaaaattgtttgaataacataaatgctacaacatattgagtgtaataacaaaatcagtgcccagagtaaaattgaaaagaaaagaaaaaaaaagaagcacatttgaacattataaagaaatatctctgctggtttatgccgggagaaagtcaataaaagttcaaaccataatgtgatactaaatctcaattactctttgtgaggaaccattaaaacaattatgtagttttatttatttaggagagcatattgatggtttctttcttcttggttctggtacttacctagtagggtagatataaaatagaaggctttgtaggatataattacttccagggttttgtttacggtgccttttcctttatcaagtgataagtttgttgag

SEQ ID NO: 395735 - DNA, 627 bp, Homo sapiens
gcccactattccattcttcggagtcagcaaggccaagaacctaagctcaactccagttacacaagcaggtaattaaaccggcccagcagagtaggtgacattagaaacagtggaaagcaagtagattccagatatatttagacaaaaggattatattcagattaattctccagagtgaattctgtgtcttatacacttaaggatccacagtaaatgttcaccaatcgtgctgagcacatcacctaccgaacattttttgatttayctagcttcttgcttttttgtagaaaaccaagaaaagactgcacagaacattctttctcaagtaaaaagtaagctcaaagctaaattacacaaagcaggtaactaattaagaaacaattgtttagacaactgttgtaaatctccacttttcctggttaacagtggaaggcagagtatttgttttgatatgtataacgtttcctgtggggaaaaacaataaaaaagtgtctggaagtcataaagttggatagtgctatctgagacaccctttcaacaatgaaaattataaccatatgactcctccatcagctaacagctgttggaaaaaggcctaagcctttctttctgtgtactgagtccaat

SEQ ID NO: 395736 - DNA, 627 bp, Homo sapiens
gcccactattccattcttcggagtcagcaaggccaagaacctaagctcaactccagttacacaagcaggtaattaaaccggcccagcagagtaggtgacattagaaacagtggaaagcaagtagattccagatatatttagacaaaaggattatattcagattaattctccagagtgaattctgtgtcttatacacttaaggatccacagtaaatgttcaccaatcgtgctgagcacatcacctaccgaacattttttgatttatctagcttcttgcttttttgtagaaaaccaagaaaagactgcacagaacattctttctcaagtaaaaagtaagctcaaagctaaattacacaaagcaggtaactaattaagaaacaattgtttagacaactgttgtaaatctccacttttcctggttaacagtggaaggcagagtatttgttttgatatgyataacgtttcctgtggggaaaaacaataaaaaagtgtctggaagtcataaagttggatagtgctatctgagacaccctttcaacaatgaaaattataaccatatgactcctccatcagctaacagctgttggaaaaaggcctaagcctttctttctgtgtactgagtccaat

SEQ ID NO: 395737 - DNA, 587 bp, Homo sapiens
catgtggtagttctttttttaatcttttgaggaatttctatgttttttcctaatgactgtacaaatttacatttttaccaacaatgtaaaaagtttcctttctttctattctcactaacacttacctttcaccttttgataataaacattctaatagatgtgaagaaatctctctgatgtttttatttgcatttccctgatagtgatatggaggaacattctatactttatttgttgagaatttttatcattaaaaaattggattttttggactgctttttctgcctcagttgagatgttcatttaatttttattcttgattctgttaatgtggygtatcacatttattcatttgcatatgttgaatcattgttgcatcccagggataaatctcacttgatcatggtacatgattcttctaatacactgttgaatttggtttggagaaaatatcttaataagccttttggtcaaaaagcaaagttctttgggcctgatatagataagagctttataccaaatatgcaaattataccgtattataatataagaaacatgctcaatttcctcctgctatacctttgaaa

SEQ ID NO: 395738 - DNA, 588 bp, Homo sapiens
ttacgtattttaagtgactgtctaaagtagtagagtttggtggtctctattgcctgaggagtccgccttctatttaaaaacctttgtgtgacctatcaagcctgaccataagcaattacaaaggctttgcctagcaggtctcatggagaagaaagctgctctccccactgcagatagggtgcacagccagtgcacggggaggtctctgcagggggttgcagtcaaggattcaggttccccaggcaggtcatgctcttcatgcatttaccttcctagcccaggtgtcttctttcctaggtttctatctgaggccttgggcagagtttctcttcaggtgtctctaccaaggcttccttatggtttgtaggtggggcttaaagacacttttccccactctgacacagcacccagcacttttccacgastactgctctcccttcacctctccaccaaccccagagtctataacattgccaagccttttgttggaggctccctcagctgtgagaggacatcacatctatattgattcacctgacctcccacaggtgctctgttctgtggtggaaaatggagcagagggagtct

SEQ ID NO: 395739 - DNA, 566 bp, Homo sapiens
gcagaaataaggggacagttcagcaaaacttgagtccaatgaccagaggacatattctgtgtaaggtttccaaggacagatacacacattagtctcctattgcttctgtaacaaattacctcaaacttagtgccttaaaacaacatamatttattattttatagttctggagttcagaagctctgaagtccaggtgtcatcagggtggctacattccttctgaaggctctaagggagaaagtttcccttacttttttcagctactagaggctatttacatttcttggttcatgaccctttccctcatgtttaaggccagcagcctagtatctttaaatccttcttttactgcctgacctctgcttccattgtctcatctccttttctgaatctgaactttctgcctcccccttataagaacttctgcaactctattgggctcactcacataatcgaggataatcttccaatattgagatttttaaagtctacaaaatctcttttccaacataaagcaacacattcacaggttctgtgattagatcatgtacatcttttggggactg

SEQ ID NO: 395740 - DNA, 598 bp, Homo sapiens
ttgaatgatggcagtattacttgagagtggcagtatacacacacacatatgtacatatatattcaatatataaatatattttctcaaagtaactgctacaactcattgtgataggtacatttttatcaatgttataaaaatccacaacactagtttatggctgtagattacactggacttatggctgaaacrttatggatgtcacagtatcttcccatcccaccctatgcaatgtcaaattaaagcttacttcttgttgctgaatcataaacgattaagtgtttgtatctgataaccttcttcataggtcttatcatactttattgcaattattaactaacttgtcttccccactagagtctaagcccttggaaggcagagacattagttttcacttctgttttaccagcacctagagcagaatctggaacacagtaataatttttgcaaatatttcaaatatttgctaaaataacatcataaaattaggcaatttattcatatttctctttgcctcctttttcaggaagatgaagaaaacaaggtagaaatagaacccaaacccagatgtggggtgcttaaaattctcagctcgatt

SEQ ID NO: 395741 - DNA, 509 bp, Homo sapiens
aggcccagatgtctgccatgatcttgctaaggtcctgagatttgggggcatctaccttcacagtcaacccaaagctggcaatctgggcttgtaggccttttacttcctcttcatggttcttcatgaagagcaattcctccttgagagccttgatctctgcctccagctgcagctgagtgacattggcgtcatcgacgactttgtgaagcccatgaatgttgctattcacagactgatgaaaggccagttctgtctcatatttgactctaaagtcattagcagaaagatgggctttgtcaatctgcagaatgatgtggccattgttcatagaatttgcaaagatctgagccttcaggtcctcaatagtcttaaagtaatgcccccagtctcttaccttggttccyttcttctccaggttttcccaaattttgttctccagcctctgattctcaatctcctagctcctcactctgtccaggtaggaggcctggtggctgttcaggctttga

SEQ ID NO: 395742 - DNA, 600 bp, Homo sapiens
tatggagatattctactcattaatagttaaaatgactagtatcctgactctacagactcttttaacttctccctcatkcagtaatctaatatgaatgtttgggtaatgtatatattctttatatcataaacaattgctaaagagactaagagatcgtctaggctctttccttacttctggttagattgtatctaaattgttttacagcttattttttctacggtaaaaaaaatattgcttaagtattcatttttttaaaaccatatccagaacaatcaaacctctttattcattgttttgaggagacaaatatggagtggcttacagtttccttaaaattgtaatttattataattagtgtgtatttaaaagagttttctctctaaggagatgcaggatttttttttaaaaactgtcttccagtaatctctgtgactagaaactattctgccctatcaaaataggtagcctgtattacaaaaataatacaacaataatagcagtaataaaaaccaacaacttttctcttgtttgtaattcccttgttttcctgagctttcccttcaggcatcttgactcatggttaatcagatttctgta

SEQ ID NO: 395743 - DNA, 561 bp, Homo sapiens
aaattagaccagaaatatgagtacaacattagaaatattgaaatctgaagcaaaatttttagtaaaaagaggaagcacatgagaaacaggggtatttgttgaactattgaaatactccaaagaaactagtttctatttttatgaaaaacaatgaagtctgtaggtatatatttataagatgagtcatattgggagccatctttaaaaaatcagacattttgtctatttcttttgttgtatgttttacatagttgaggttgtaccccacaaatatattgggatcttgctttccatttaatatgctattatgctatatattttcctttatcattaacatcttttgttcttaatattcagtggttacatggcattacacttttggtgttccataatttaattaaactttctcttattgtttctactttttctttacttttaartaatgtagcactaaacatctttgagcataaatcttaatctgccctattgccttcagacaggaaatactaagatgaacgactgaacatttttaagactcaatacattttgccaagttatctt

SEQ ID NO: 395744 - DNA, 547 bp, Homo sapiens
aaaatgccaacaacttacataggtttcattactagacttaaccgtgcagttttagcatttgataataccacattatcttttgcatgtaaattctttagaagaagatattaaataaaaagataaaatgtatgttggtatgaagaatctgaaacataaatgaaatccctgaaaattaaaaggtgaatatgtatttacctatttactatttacacaactatcaaagattgccaaaataaaaatcctgtataggcgctcatcattttgatgggtggataagtcgtgatacccatagtttggaaggaagattccttcaagagagtacaattttgcttggtaaatcttttgcatgttaaactttttagaagaagaaaktaaataaaaatataaaatgtatgttggtatgaagaatctgaaacataaatgaaattcctgaaaattaaagggtgaatatgtatttacctatttactatttatacaactatcaaagattgccaaaataaaaatcctttttaggcactcatcattttgatgggtggataagtgatga

SEQ ID NO: 395745 - DNA, 600 bp, Homo sapiens
aaaatggtctcaaaaagttaatatgaaaatggaaaaggaaaggtaggcatacattaacacaaaggtttaaattaactataattaaaccaratagacttatctttgtaggttttctaacagtaacaacaaaaacttaggataaataaagcgtccttgtttctacgcttatagacaaagatacactgctgatccatagagaacatacttaggattgtaaggcaaaacaactctttgaatagaagttattaaaagttggcaaagcagactaattgaaaaccaacgcaatgataaatgtagacatagactttattttttctctgtgacatctgtagaatgagtggacctagagagagggagtcattttcccagagcaagctattttactcattgaaacagaaagacagatttttgtagccttaggaaaccttccaaatgactatcagatataccttcagccaaggaataacttgggaggaccaaaaagccaccaataagtctccaaaataccatgtgtaaagacaatattttttaatgtgtcaacttattctctccaagcactattccagtgctaagtaaatgataggaaaatataaacaaaca

SEQ ID NO: 395746 - DNA, 610 bp, Homo sapiens
atgttttaaggcctcaagttttgttcatgctattacatctgatcttggttcagatcttagtgctgccatttaataaccctaggatattttatcagttacaaaatttctgtggacctcagtttccctatcaatatagtgtagataataacagtatctatctacatagcatttgttgaaaaattagattaactaaaattataaagtgcttaattcatagtgcctcaaatccaggaaataagaaatayttaataaatgttcttcttgttgttgttagaatgcaggcctctctccttcatctccatagttttaaatcttatctatccatcaaagttgaacaaagaacatcttccatgaaaccttccttgattacatgcttttggttccacctccctttctcaaagccctttaatcctcaattttaacttcctgactactctgaaacattttcactttcttttaggcttaatcttgtctttcatttacaattattaagatcctcaagacaaatcatatgtatgattcactttcatattcctccatcacacctaataaatacactggcaacatttgaacttaatatatgcttaaactatgctgtgaatcattaaaa

SEQ ID NO: 395747 - DNA, 569 bp, Homo sapiens
tttttttttttttaaagaggctttcaatccaagtggcagatttaagaaagccgtatagatgatgaatcatacatgaggggatgtaataattactatgaaacaggcacaatccatttagtggttattattccatcatccaacatgttgtatcatgtaggttcaagggagaggtaggtatgtgaaatgcaaagaatggaggaggaatttccaaaccaaggaaaaatcagaaacaaaggcctgaagcttttaaaaagtataagaatttgtatgatgaggtaagtctaaaatagcgtggggagagtgaggtctgaaagagaggaataaatttgacacagtaaaatgataagtatatccagaactctagaatctctataaaagaaatagtaaaaaagcaaatgaatacattttcagaacactcaaacttactaacatacaactaaagcaaaggaatgtgaataaaaattagaatgaaatactatttttcatgtctgaaaatggcaattttttwaaaaaatctttgacaagggaaaaggaaattgttatcttgatatgtggtgtgtagctgataa

SEQ ID NO: 395748 - DNA, 510 bp, Homo sapiens
gagtaaacataatttgtgggtaataaacattgtcaacccctgagtacagcacagttctgtgcacaaatgatcaaaggttggtttctggagacaggagtaaacgaatttatctagataagttcatttacattcccttgttatctaccctttgctctcaggytctagataagagaatctggctgctttcagccaaatcctctttcgaagcttttgcaaaacctcccagccttccgtgaatgtttgcatctttccctataatttctcccacaaccctgactgacctcctacatctcccccttttctgtttttttgcatcaggttttgttgattgaagagcacagatgtgtgcagcaacaggtttgtctggcgcaggggttattgctcgtattcccacttggcatcctagaattagtaaataacataagacaaacatcagcataattagcaacattctttaccaatctaaagtgacccccaggagtgggggtctatccaggagagatgttctca

SEQ ID NO: 395749 - DNA, 510 bp, Homo sapiens
gagtaaacataatttgtgggtaataaacattgtcaacccctgagtacagcacagttctgtgcacaaatgatcaaaggttggtttctggagacaggagtaaacgaatttatctagataagttcatttacattcccttgttatctaccctttgctctcaggttctagataagagaatctggctgctttcagccaaatcctctttcgaagcttttgcaaaacctcccagccttccrtgaatgtttgcatctttccctataatttctcccacaaccctgactgacctcctacatctcccccttttctgtttttttgcatcaggttttgttgattgaagagcacagatgtgtgcagcaacaggtttgtctggcgcaggggttattgctcgtattcccacttggcatcctagaattagtaaataacataagacaaacatcagcataattagcaacattctttaccaatctaaagtgacccccaggagtgggggtctatccaggagagatgttctca

SEQ ID NO: 395750 - DNA, 562 bp, Homo sapiens
tttaaagtggagctattttaaccaagtgaacaatttaaacatcatgagtgattaatcatatttatttgttgcatatattcccttgaaaatgatgtgatagcgaagagtacttgcaatcttcaaaactgtgcaggtcatgaaaaatgaagagacaatggttaaatgcagtgtggtattctggattggatcctggcacagtcagaaaacaagtgaaatccaaacaatatggagtttagtttataaaaatataaactgttatttgaccagttttgacaaatatgtcatggtaatagaaaatacagacattgaggagaattgggtgaaaggtatactggaacccagtactattgttacaatttaaaaaaaatctaaaatcgctctaaaattttaaaagtgtattaaatacagatgtatcttttatataatyaagacttttattttggaaggcaacttaaagttgtttttcatgcaaacataataattaaggattcacatatgattgaattttaagtcactgataaaatgaagtgaataatggctagacatctagaacctgtgtcta

SEQ ID NO: 395751 - DNA, 578 bp, Homo sapiens
aaatcttcggggtatatacctggcattagaagtttttaaagaatgtcagaggtttctccactagatgataaaatgtattgtaaaactatggcactggggcagtgataaataaacaaactgatgaaaatagagacaactagatcagaaccamatctatgtttggttataatatatgtagatgatatttaattttgtgaaataataaagaaacttttaatataataacaaaaatgggaaaacggagaaaataaacctaatttaaatgcctattcattagaaaaattacaaacaaaaaacccaaatatttcaaataaataactgcaaaagccaaattataaagtatagaaagagaatgtatgattattcacttaaaatgttgaggtagaataagatatatttataataacattaaatatgtatatatggagagagaaagagagcttttagaaagtaaaggtcttttaaaacaaaaactagtatactaaaacaaaaaattaaacattaatagatttaatcatattattttaaaaatcacatatatgataaaatataccaggcagagtgcaaatattaggttg

SEQ ID NO: 395752 - DNA, 594 bp, Homo sapiens
tttcctgtttgcataaataaatggacaagagtaatgtaagttgacttcttggaatgggtacagaatatgtaaatatttatgcctaacagaaatgcttacaaagtgctacaaagaaaattagaaataatcaggagtacactatgacccaccatttgactgttattcagctttcttatctaacatgacaagccttgtccaacacagccatataaaaaaaaatggtagtaggtgtggaggttgcatacatgtttaatatttaggagttccttctctggtttgaatgcatactctccaaaataatggtgttgctaatgggataggatgaagaggtgggactttcacaagaggtgattaggccatgagggcagcatccaccttaatggcattaagcctattttaaagggtatttctcrtagtgttcacttacttcaccctcctgccttctgctatgtaaagatgcagcaggaaggcctcagcagaccaaatgtgtgagtgcattgatcttggacttcccagcctctagaattatgaaaaataaatttctgttttttataaattacccagtctcaggtattttgttatgacagcacaaat

SEQ ID NO: 395753 - DNA, 588 bp, Homo sapiens
tgatggttattgaaaataagaaagaaatgagcatgtgttgttttaaaacacttatatttggggttccattgtttccccggtatcctagctacttaactgaaacaaagtggcaatgccttacttgttacaccttataagccactcataaaatatttgattcacagcactttaaccctggtctgatggttcagaggtcttctatcccactgcttcctgtaggagcacaacaacagtttccttgggatggaagctaaagcggccaactggttatattaggctccatacaattgtggacaaacacagaaarggttcactgtactggctgaggaccttaatcctaaagctgtgaaaaaatcagtttccttcatcacagtggagacaaaaagatctacgcctgaaactttaagaattttctggaaattctcttacggtttccatgttcagtgaaaagtggttgaaagacgacgtcaaactaaaaaatcaagaccactaaaaatttatatttttcaaagtgcagatttagatcacctcaagagatcaaaaactatgaccaactttagatacccccttagcataaagggaacatgg

SEQ ID NO: 395754 - DNA, 588 bp, Homo sapiens
tgatggttattgaaaataagaaagaaatgagcatgtgttgttttaaaacacttatatttggggttccattgtttccccggtatcctagctacttaactgaaacaaagtggcaatgccttacttgttacaccttataagccactcataaaatatttgattcacagcactttaaccctggtctgatggttcagaggtcttctatcccactgcttcctgtaggagcacaacaacagtttccttgggatggaagctaaagcggccaactggttatattaggctccatacaattgtggacaaacacagaaaaggttcactgtactggctgaggaccttaatcctaaagctgtgaaaaaatcagtttccttcatcacagtggagacaaaaagatctaygcctgaaactttaagaattttctggaaattctcttacggtttccatgttcagtgaaaagtggttgaaagacgacgtcaaactaaaaaatcaagaccactaaaaatttatatttttcaaagtgcagatttagatcacctcaagagatcaaaaactatgaccaactttagatacccccttagcataaagggaacatgg

SEQ ID NO: 395755 - DNA, 493 bp, Homo sapiens
tataagtttcaggatatatttataaaatatattaatatattttgatgctgcatgattatttctaccttaatgaaataatatgatatgggttataatatttcaaaaattggaattatctaaatgtctgcccttaaaaaattatttaataaattatatatatatatcaataagattaaatattctgaagctactaagaatctcattttaagtcgtgaatgacaggaaaatgcttctgataattgcttttgataaacagaaaattactttacaaaaccttctccctgagtgtatgtgtgtatacatattcatatgtatatactacatatatgtctatactatatatagtatattttgagtattcacatatgtacatgtatatatttatacataaatattatatatttacaaaaataaataagtttatatatgtaatgtgtatatatatgccctcattgatggttactraatcctactgttggaatattgttgcatt

SEQ ID NO: 395756 - DNA, 577 bp, Homo sapiens
ttatatagtccattggcataataccaaagtaaaatgtattagaaaacccttagacatatgaatttcaaaatgcacccaagtaaaacctaaccagataatctagggttaacttgtattagmtactgttctaagtttggaggaagagatacaaaatgttcttgcttcttggtgataccagatagacttaacctttgaattaaaaaaatatgtattattattttttattttagagaggatcttgctctgtcactcaggctagagtgcattggagagataatagctcattgcagcctcactaattcctgagctcagctgatcctcccacctcagtctcctgagtagttgggttacaggtgtgtgccaacatgcctggctaattttttttttaattttttttgtagagatggagtcttgctttgttggccaggctgctcttgaagacctggccttaagcaattctcctaccttgacctcccaaagtgttgggatacaggcataagccactgcatccagctaaattttttcaagtttttattgagataatttcagattcacttatggttgcaaaaaaaatgaa

SEQ ID NO: 395757 - DNA, 577 bp, Homo sapiens
ttatatagtccattggcataataccaaagtaaaatgtattagaaaacccttagacatatgaatttcaaaatgcacccaagtaaaacctaaccagataatctagggttaacttgtattagatactgttctaagtttggaggaagagatacaaaatgttcttgcttcttggtgataccagatagacttaacctttgaattaaaaaaatatgtattattattttttattttagagaggatcttgctctgtcactcaggctagagtgcattggagagataatagctcattgcagcctcactaattcctgagctcarctgatcctcccacctcagtctcctgagtagttgggttacaggtgtgtgccaacatgcctggctaattttttttttaattttttttgtagagatggagtcttgctttgttggccaggctgctcttgaagacctggccttaagcaattctcctaccttgacctcccaaagtgttgggatacaggcataagccactgcatccagctaaattttttcaagtttttattgagataatttcagattcacttatggttgcaaaaaaaatgaa

SEQ ID NO: 395758 - DNA, 580 bp, Homo sapiens
tattcacaataacattattcacaatagcacagctgaaggtgaattaacacaggaacagaaaaccaaataccacatatcctcatttataagtggaagctaaataycaggtactcatgggcataaagacaggaaaagtttaattgattcagagttccacatgaatagatattgtggactattagaaaggggaggaagaagaaggagcatgggttaaaaagctacctattgggtactaaactcactatctgggtgacaggatctgtaccctaaacctcagcatcatgcaatatactcatgttacattcctgtacatggacactctatatctaaaataaaagttgaaattttagaaatcaaacccacaaaaattatttctacattggtaaatattctatgacaaaaattctaaagcctctgtattaatttcttcttgctgcaataacagcttaccacaaacttagtggcttgaaaccatacaaatttattatatttctagatgccagaaatacaaagtgaatcttactgagctaaaatctagtcctgaaggcagggctgggttcctccttgagtctctaggctc

SEQ ID NO: 395759 - DNA, 617 bp, Homo sapiens
aggggatgaactcgttacactggtgtcaagaaagcactgccccctccagagtcgtggaccatagtcccaggggaaaacctgtaccaaactaaaactaagaaaaatttaactctctttcatctattctgttactctttcttctttcctcgctctattgctgaccatctagttattaacataaccaagtcattttcacctcaaactattgtatttaatgcttgccttgttataccctgtgggaacgtgycaagtcaaagacagctctctacttcagagaagcacctctatctctcctaactctcctcagactgggcattagtgaattgggaccatttaatctggggagattttgataaagatcccagtgtcaactaggagtcttgcccctctgatgtagagcttttatgccacagtcgatccaacattctgtgaaccactaaagagcaaggatggactgccccaaccggtttttgtaatttcctaaaaccatacattcattttactagagggacagccccaccccctaactgtcagctaaaccagtgcaatcttacacaggttattatctcaaaccctcaaagttcttcccattttctaagccagttccctttaagccg

SEQ ID NO: 395760 - DNA, 617 bp, Homo sapiens
aggggatgaactcgttacactggtgtcaagaaagcactgccccctccagagtcgtggaccatagtcccaggggaaaacctgtaccaaactaaaactaagaaaaatttaactctctttcatctattctgttactctttcttctttcctcgctctattgctgaccatctagttattaacataaccaagtcattttcacctcaaactattgtatttaatgcttgccttgttataccctgtgggaacgtgtcaagtcaaagacagctctctacttcagagaagcacctctatctctcctaactctcctcagactgggcattagtgaattgggaccatttaatctggggagattttgataaagatcccagtgtcaactaggagtcttgcccctctgatrtagagcttttatgccacagtcgatccaacattctgtgaaccactaaagagcaaggatggactgccccaaccggtttttgtaatttcctaaaaccatacattcattttactagagggacagccccaccccctaactgtcagctaaaccagtgcaatcttacacaggttattatctcaaaccctcaaagttcttcccattttctaagccagttccctttaagccg

SEQ ID NO: 395761 - DNA, 591 bp, Homo sapiens
  misc_feature (1)...(591): n = A,T,C or G
ttctaagccagttccctttaagccggttttatggtataggggctgaggtttcagggacagaccccattggattctttgatatgcatttctttgattcctcgccacctgcaccttcctctaagccttcttccaaaacctctcacaatggaacaattgcttctcttgcatctaagatcaagatagctacsgtagaagttaaagacttaaaacaaactttggcaattaagacaggataccaagatgcaaatgcctggtcggaatggatcaaatattccatccgcatgttaaacaaaagcaattgttatgcttgtgtaaacagcaggccagaggccncagactgtcccctttccactagggggttcttcttgtcaactgggcatggtagctcttttctaggattctacagcctgaagtaacaaatcatgccaagctctctctctgctatatcctgaaatctggcaccttgtgggtcagtccccaagggccatcctccttctgtctcccaacactaagttcacttcatgtctctcatgacagggaggaaacagcattccttggagacctgaagggatgcagcgagcttaagaattt

SEQ ID NO: 395762 - DNA, 580 bp, Homo sapiens
tattcacaataacattattcacaatagcacagctgaaggtgaattaacacaggaacagaaaaccaaataccacatatcctcatttataagtggaagctaaataccaggtactcatgggcataaagacaggaaaagtttaattgattcagagttccacatgaatagatattgtggactattagaaaggggaggaagaagaaggagcatgggttaaaaagctacctattgggtactaaactcactatctgggtgacaggatctgtaccctaaacctcagcatcatgcaatatactcatgttacattcctgtacatggacactctatatctaaaataaaagttgaaattttagaaatcaaacccacaaaaaytatttctacattggtaaatattctatgacaaaaattctaaagcctctgtattaatttcttcttgctgcaataacagcttaccacaaacttagtggcttgaaaccatacaaatttattatatttctagatgccagaaatacaaagtgaatcttactgagctaaaatctagtcctgaaggcagggctgggttcctccttgagtctctaggctc

SEQ ID NO: 395763 - DNA, 597 bp, Homo sapiens
tactataataatttggagcctggaatctaagaacagagagcagatatttatagtcacaatagtgggattatataggagtggtcatgactgcataggattttcatcctgaaaagatacgtgggttacaaggtgaagaacaacttgaaaaagcaaccaagatgtcctttagtaggtggatggataaactgtgatatatttgtataatgaaatattattcaatgataaaaagaaatgtgatatcaagcgatgtgaagatatggataaagtttaaacatatattggtaagtgaaagaagccagtctgaaaagataatgtgttctacatttccatttatatgacattctggaaaaggcaaacttayagagactgcaaataaaacagtggttgcagagattcagaggaattgaatagttgaagcataggggagattttagggtggtaaaattttccatataatattgtaagggtggatacatgatattatgtatttttttcaaaatccatataactttatagcacagagtgtcttaatgtatacaatttcttaaagttatttaactggttaggggttcccagaatgggatgcaaactgtaaaa

SEQ ID NO: 395764 - DNA, 597 bp, Homo sapiens
tactataataatttggagcctggaatctaagaacagagagcagatatttatagtcacaatagtgggattatataggagtggtcatgactgcataggattttcatcctgaaaagatacgtgggttacaaggtgaagaacaacttgaaaaagcaaccaagatgtcctttagtaggtggatggataaactgtgatatatttgtataatgaaatattattcaatgataaaaagaaatgtgatatcaagcgatgtgaagatatggataaagtttaaacatatattggtaagtgaaagaagccagtctgaaaagataatgtgttctacatttccatttatatgacattctggaaaaggcaaacttacagagaytgcaaataaaacagtggttgcagagattcagaggaattgaatagttgaagcataggggagattttagggtggtaaaattttccatataatattgtaagggtggatacatgatattatgtatttttttcaaaatccatataactttatagcacagagtgtcttaatgtatacaatttcttaaagttatttaactggttaggggttcccagaatgggatgcaaactgtaaaa

SEQ ID NO: 395765 - DNA, 588 bp, Homo sapiens
agtcaaactataccactactatttattgcttgcttctgatatggaaaacactgagttgacattaagcatgtgttatttcttagcctcatgagtactctgtagtgatagcctttccattttacagatgcaaaatgtgcagtttagaacattcccaagatttcagaactagtaaattttataaccagaagtcacatatggttaccttcaaacttgtcactagtttgatgactccatactacattctaaaatagaatatatcagtttattgtcgccaaacttttagtttctccttcattccttatttcagttaatagcagcttcctcaacccagtcagttttgcctgaaaaatgcccaagattatcctcttattttcttttaaaaccagctgctcaaaaaatactgctamtgattctctcaaatatctgcctatctcccccttacctcaagccattgacagaattgaggtcacattttcttttacctgaattatatcaatagcctccctattggtcactttgtctttaatctcctccacatacctgatgcattcttcatagaaataaatcaaatctgtatatgtgggtccc

SEQ ID NO: 395766 - DNA, 568 bp, Homo sapiens
atgttgcattcttatatcaactgggctgtgacagttgctcagacattcattgtgtttgatcatcttggcagttttgagaaatgctagtcakgtattttgtaaaatagctctcatttgggatttatctgatgttttaatcatgattaaacaggggttatatttttattggggggaaagagaaaaaccacagaggtaaagtgcgttctcattgtatcatatcaaatgattatgtttccatcttctgcactgcttttacaacctgctcatagcacaattttacctttttaattgatattatttttacctcatgttcttctttcaattatgaattcccgaggataggttctcttaacacacggtagctgctcaattaatgttctgtttccttgaatgaaaattacagtgaaaagttttagaaggtgtttctgatattatgagaagttataaattacataataagtaaattgttaaaggcaaataatcagaaatgatatcttttccacaaaagtgtatacatattttctattggattacacaagacaaaggatatacaagagaaaaaataata

SEQ ID NO: 395767 - DNA, 586 bp, Homo sapiens
ttttttaaaaaaccacacagttataatccactgtcactatggctcctagtatagtctttatcaaacatattaattatattttttacctaaaataactaacttctatttcatagacaaaatcagaaaacagatcaatgagaactctgttatacaaaagtatttttgcagactcacagaggtcataaatacaaatgtcacaacttctttattgatgtgcaattgatatacaaaactgaacatattaattgcatacaatttgatgagttcagacatctgcatacacctgtgaagtcatcaccataatcaatgtaacagacagccattacatccaaaaattttcttgagtcttttttttatttgtgcrtgctaaaaacacaatatgagaatcactcttttaataacattttaggtgcacatgaatgtattgttaactatagtcattatgtcatgtagcaaatctttagagctttatcttgcattattataccttatacaaattgaaatattttttcttacaggcatgaacattcctgttacacctcttaaaatggccaaaaaaatgaaaacattcattagcatgaactaa

SEQ ID NO: 395768 - DNA, 600 bp, Homo sapiens
atctttcaatttttaaacctgttagaacagagattgtttaatttaaaagatgatatcatctaatgtattaatacttcttggaggtagaaaaattattcatactcacgtcatgagagtttaagccattttcaattagagacacacagacagaaagaaactctgaaacaaagacaacttagactttcaattcgaccattttagtcaaatgtcaagttaaatacagaagcataaagtcttcccatttgatatttccacttctgggaagataaagtagtcacactattccagatccctaccactaagtacagctaaaagcctagaacattwtatataaacaaacatatgaatactctgaatggtgaagaggagaaatgagacctactagagcccttaagacccaaggaacaaggaacacagcaatgaattccgtgggttttctttccccctcacatatcccagatatagaggtgaggaagctggaaactggggatcactgatgagtgcagacaaaatgaataaataaacccaacaaaaacctgcgcttcctatccaaagaatcgggcatggagcagattagcaagacttgaaattttaaatagt

SEQ ID NO: 395769 - DNA, 434 bp, Homo sapiens
atgtattatttttatattttccctagagaaaagaaaaaattcaagggtaaagtgctttagctttaaaatgaccaaagttcccctggatcaattattaaaataaataaacatttatcttaaaaataaaactaacaaaaattgtcctaagtacaaaataaagcaaacaaaaagttcttaatctactaaaagagtttcataaaccatagttaacctgaaaatagtaactctcaaattatgttttaccaaatatgatgaatgatatagacaggtctggkcataggtaaggttgtatgtaattcttcaaactcctagctttaatttcaacctttgctcgcccacaaaaaggagcaaattcaaatgtacatgatgatgaaatggaatcccctctgtttttagaaatgccgaatgcacacatttaagtttaaaattggtaa

SEQ ID NO: 395770 - DNA, 515 bp, Homo sapiens
aatatttacatatgtagaatacaagtcacatagagattatctaaaatcaaaaagattaaattggatacagttggatcaactctttagtgtgttttatttcttagagataaaatattttacctggacactaatataaaagttaaaaaaaggggagtctgatttagtctcatattacaattaatgccacmtactaagttctctccttgtctccttaagattgaaggaaaaggcttggaggcaatggtggttgtggggagtgtctgccaacaggcacccacgttcattcattgtacactgattgtcttgaatctgcaacttctttaaggacaataaaagtatttaaaacagaaaaaaaatatgtagtgcctcccccaaaaaatcaccccacaaaattgaaagcagtgaatgtttatctacaaaaaagaccaatgtgtcaattttattcacttcatctcaattcttgtatctaaattatctttaacatgagcccagggtattttttaacaggttttgta

SEQ ID NO: 395771 - DNA, 515 bp, Homo sapiens
aatatttacatatgtagaatacaagtcacatagagattatctaaaatcaaaaagattaaattggatacagttggatcaactctttagtgtgttttatttcttagagataaaatattttacctggacactaatataaaagttaaaaaaaggggagtctgatttagtctcatattacaattaatgccacctactaagttctctccttgtctccttaagawtgaaggaaaaggcttggaggcaatggtggttgtggggagtgtctgccaacaggcacccacgttcattcattgtacactgattgtcttgaatctgcaacttctttaaggacaataaaagtatttaaaacagaaaaaaaatatgtagtgcctcccccaaaaaatcaccccacaaaattgaaagcagtgaatgtttatctacaaaaaagaccaatgtgtcaattttattcacttcatctcaattcttgtatctaaattatctttaacatgagcccagggtattttttaacaggttttgta

SEQ ID NO: 395772 - DNA, 593 bp, Homo sapiens
tttaaaatcacatacacctgcaccttcatatattatgtatgtgtatgtgaaaatatgtcaaattcaagacacaattttatttgaatttttgtctttactgttagagctgtgtgttgactctaacacagttgtctagaacatgtcacctttactgcagtctttgagctcttctagttttaaaatctataaatgtcactacctttggaaatttgaacccaaaccaatagtattcatttttataatattaagtttttaatatctataataatattatcctgaatgcaaacatcaagtcctgtaagcagagaagattactgttattcacatatatacaaatgtacctgatcccctttaatagtaataaaaagatataatttataatgggaaaatkgaacatttctactaatataaaaatacatttttgagtgaataaaatatttaattatatatcttcatatattttcaggcaccgtggctcatgcctgtaatcccagcattttgggaggctgaggtgggaggatcacgaggtcaggagtttgaaaccagcctggccagcatggtgaaacccggtctctactaaaaatacaaaaatt

SEQ ID NO: 395773 - DNA, 593 bp, Homo sapiens
tttaaaatcacatacacctgcaccttcatatattatgtatgtgtatgtgaaaatatgtcaaattcaagacacaattttatttgaatttttgtctttactgttagagctgtgtgttgactctaacacagttgtctagaacatgtcacctttactgcagtctttgagctcttctagttttaaaatctataaatgtcactacctttggaaatttgaacccaaaccaatagtattcatttttataatattaagtttttaatatctataataatattatcctgaatgcaaacatcaagtcctgtaagcagagaagattactgttattcacatatatacaaatgtacctgatcccctttaatagtaataaaaagatataatttataatgggaaaatggaacatttctactaatataaaaatacatttttgagtgaataaaatatttaattatatatcttcatatatttycaggcaccgtggctcatgcctgtaatcccagcattttgggaggctgaggtgggaggatcacgaggtcaggagtttgaaaccagcctggccagcatggtgaaacccggtctctactaaaaatacaaaaatt

SEQ ID NO: 395774 - DNA, 567 bp, Homo sapiens
ctttgactagtctgggccttcctgaaggactaacacaaaaatcttgcctttattttgcataactgggaattctttcatggtgaacaatcagaaattctgagaaccttccttgaaatcattgaacagcaaatgaacaagctgttgccaacctggggtagaagacagcaggtgagtcaaacagcacatatgctgaaagaaagctggggacagtaagactttggggaattcaggctttgaaaatctcccatgtataccagggaatataggttgcctrcatgccctgagtggcaaacatgctcagaaaagccctgagaagtcatttatttctgcattttttcttcttttttttaaacaattttcactatttttaaatgtatggattagtagtgttaagtacagtgggccctctgtatccacatgttgcacatccacagattcaatcaaccacagattgaacatattagagaaaaaagacaaaaatagcaatccactactcagaaggctgaggcataaggattcacttgaacccagaagtttgagaccagcctgagcaacatagtaagaccc

SEQ ID NO: 395775 - DNA, 592 bp, Homo sapiens
ttttgtgaggttttctgaagtgagaaagtctgtttctaaacagtgtcatatacacttgacaaaatggtgtcttcgatattatataggcaaatggcaaagtgtcattcctaattctattcccatgagcatgttaagtcctgacataattagaaaataaatcatatttatgaatatcatacattcctactgttaaccagaatttttattggtaaatatgtgactacagttctgaaaaataataacagccttaaaatttaaaaatgaaatgcattaggaatgttaactattagctaacatgtttcttcaaaagtggaaatattccaaggaatctaattagagattaacaaatacatgtatayatatataatatgtatatatatatatcttttaatacaacaaccaacaagttgaattttctaagaccaaatcccctttgctttttttgttttgaaaactaacccaatacagaagagattgtactacaatagctattccaacttaacattctgcacatcttatgacttagactttcacacctaagtgaacactcagcagatatgtgttcttatgatcaccaaaagacatgcaagaa

SEQ ID NO: 395776 - DNA, 586 bp, Homo sapiens
aaaaaaatttaaaagtcagccaggtgtggtggtacatgacatgcctgtggtcccagctccttaggaggtagaggtgggaggattgcttgagcccaggaagtcaaggctgcagtgagctgagatcgtaccactgcatgccagcccaggaatctaagtaggacctgtctaaaaaataaaaaactaaaaagaaatttwaaaaaaaaaggcagaaagaggctttcttctttttctcctgagggtcagctttctattcataccttcaattgattggatgagggccaccactttagaaagagcaatatgctttactcagtctaccaattccaatattaagctcctgtcaaacactcacacaaacactcccagaaaaacacttgatgaaatatctgggtatccactctcccagtcaagttgacacaaaattaacgatcataaaagcaaacagaaacatttccattttcccactggcttcggacaaagattttttccttcattaaatcattataattcagtgacttgaagaaaaacattattatgaaagatttcaaaaccatctcaaattttaaaaatcactatattgttggta

SEQ ID NO: 395777 - DNA, 554 bp, Homo sapiens
ttatatctgtttgcatatgtatatccatgataaacagyttaaagataataaaagtctatttcatttgactaataaataaatttgtaaaagtatttttagaaatttgtttagtaaagggctgccaaacaaaaatggcagacattaaaaatgacaaatcaatagttgaaaccaacaattgcttacctcttaaaagcatagaatcatcttttattttagaaataaccaattaccaaaaatatcaaacatttcattacaatttttaaagtagtttagattgtccagatgtttgtaatcatgtacaaaaaagcctcctgattgtctatatttggtctcacatggcatcatttgaaagtagcatccatggcatataaaaatattccataaggcaataatttggtgggtggtgacttgaggctagcagattcatttgattagacttcagtactaatgaggcctaggcaatcagttttgacccacaattgacccctttgatttagttaattttaattaagatttccagttagcctcagctaattttcttgaaaatatatgct

SEQ ID NO: 395778 - DNA, 522 bp, Homo sapiens
aaacaagctcagggctccctctgattctacattatggtgaattgtataattatttcattatatatatatatatatatatayacacacacatacacacacatacatatatatatatatatatatatctcaatgtaataaagtacataataaatgtaatgtgcttgaatcatcccaaaaccatccccttcccccagtttatgaaaaaattgtcttccacgaaactggtcccttgtgataaaatggttggagattgcttggtgtagggaattatataagtaggtgattggataaatggggtttaagcgcatttctcgggaaagaagactgagtttcatatacggtttggggacatgatggtcgatgctacagcacagcatacagagttggaaggctgaagtccaaatgctggaaaatatttaaatggagggaatgtgattgcagagtaatcagtatagaattgtatacacagtgaagtacataacaaatagagaaaatggaacagttaaaataattgtaaaaaat

SEQ ID NO: 395779 - DNA, 632 bp, Homo sapiens
actactgcaagtataaagaatttgtttttccaatcttattattttcctattcctatgtggaaaaaggaacagaaatagaaatagttcactttcacttaggatgaatgattacatacaaatatggttttattcaagggctatgttagtattccaatccaatgtcatattgtagttcaaagagatctagactatctggaacttctgcagaatatcacattagccccttttatgacaccatgttaataacaccatgttaattaggccacatgagaaaagagtgataaatacattggaagccttagcaagacacsaaatgtactccaaaagatggaaaataaattccactcatgtttaagagccaactgccttaacaaagttcttacaggtgcagaggtctgggaagactccccaaaagtaaagaacaaatgattgcactttatacctgcacccaccaaaaggaaagtataaaattgaataggtctctttgggtacaggaaacaacatattccagcttgggagttatttctctcgggacatggaagtttgcaagccttgagtggagtccagtggatctaggctctagtgcaagcaaccctgtcacattggccatacaatctggctgaccctatgat

SEQ ID NO: 395780 - DNA, 544 bp, Homo sapiens
tcagggaagtccaaaagttttaggagctttgtacctagaattgggggacaaagaccaaatgccattttgtgataccacagtactggaagagaaagataatgataatcagttgtgctccagttgtggtacatgtgtgtatacatgtgtgggggtcagtgcaagggaggctgtatttatcccattaattttctcataaatatttacctgaagataacaatagtgattctgtagaaartgttgacagaaagaatagaattattaagtggatcaaagtcataaagttgtggattattactagttaatatgctatgtgacataattctcaccccttaagaccaaagtgcctagacacctagctattgcaagtgttattttttgatagatcacagctagctaagttccttttcgggctgggtgcaatggcttacacctgtagtcctggctactcaggaggctgaggcaggaggatcgctgaatctaagagttagaggctgcagtgatctatgattgtgccactgagctccagcctgtgcaacagagccag

SEQ ID NO: 395781 - DNA, 592 bp, Homo sapiens
gaatgaatgcatcacttctacttaccatatcaggggagatacaagtcaaggaagtaygacaaaagaaaccaacaaaacgcacatggatgagaaaggaagaaacaaaaatatcattaacgttttacatactttataaaatcgtatatgtttctatataaatgagtgtattataaatctaatgatacaatgctattgctttagtcaactgacttatagaatttaagaataaaaataaaatactatttcatatttacccacacaaagaatcatatatgcatgaggctatattggttataaatacatgaatatcatgaatataatatacatgggaataaaaagtatgcatcaaattcaggattattgttaccgtgaaggagagaaggaaaaaggatgggtaatggtcacataggtagtttcaaagtatctttagtattttataactaaaataaaaaataaatctaaagcatatattgcaagattttacattttgaaaatactatgtggtagatatatggatgtttattgttttaattgttataaatttatttataattttttaaaatacaaagagagatatatgtatatatacata

SEQ ID NO: 395782 - DNA, 505 bp, Homo sapiens
ttcttaattttttaaagaaactaaaactaaatttcagggaagtttgtaagttgggtttttgtttgttttttcaaagaccctctcagttaagtgttatcactgtttttctcatgattttgagccatctaattatatatgtatcaagaatatataaaaccaagagacatttctctcagctatattggatataacttsacttgacctcctaggcaacatattcacttagttttcctcctaacacactggtcactcctgctaattatgtattaggggtgattcctttctttgacccttttctacttgttggagtgaccaggactttaggactatttgcctacaccttctcctttggcaatctcaataccatatacatgccattgaatcctgaattaatgtctccagcacagacatcatctctcctgaactccaaactactacatccaaacgcatattcacaaaatttacatttggaggactaataggcatttcaatagaaacatatcct

SEQ ID NO: 395783 - DNA, 419 bp, Homo sapiens
tcatttggcagttaatattccttacaatatctcttcactctaaggcccaaaaagctgacataattttcacattttctaagaattttgagaagatatttaatttgtagctttaaaaagacaaaggatatttaaaacaggattaatcattattgatgaagtatattttacatgcaatatactaagcagtttacttaagttctttgtatataatgtatactatagtacatatgtctttacctatgtraataccacaagtataactaaaactaacataaagataaacttgatattaattcatcatctctactcactgaggccagtatccttttgttctttttttctgggttaatttattcctgccagcctgccatcccattttctctagcattatacttctctggactgtattttaactgttg

SEQ ID NO: 395784 - DNA, 560 bp, Homo sapiens
gtaaaatgaactctcacctaatcctaagtgtggacaataacataaacttaataagcaccacaaatatgccctacacatcaatatactcttcatcccctaggggtaagcaacagtctttaacaccattcatcctttgcttttyaaactaagcatacctaaaaaatatagtttaatattgctgtttttgaattgtatctagatgaaattatacatgatttattctactgtgcctcagttcttttgttcaaaattgtatgggtaagatttgttcatgttgttacttttcattgtgttttattcattgctagaatactacttcatagaaagaatatctcatcattttttattcataatattatggtaaactttggggctgtcttcatttttttattgtaaacattaatgtaacagacatttttgaacatgtatctctgtgcaaaaaagcatgaatttctatgggctgtaggcataggaatagcattacagtgtcataggtatgtacatctgcacattcactcaatactattgctttaatttggatatctgaccctccaaacctc

SEQ ID NO: 395785 - DNA, 533 bp, Homo sapiens
attgccttctcctatgctgatcacctgcctcctccttatgaaaacccctgtgattacattaggccaatgcagagtaatctctccawctcaagatcctgaacttaatcacatctacagagtccattttgccatatacgataatattcacatgttccagggatcaggatacagacatggtgggaaggtggtgattactcagcttaatacacagtgtgtctttcccactaggatgttagtgatcagggtctttgtgcagctaatttagtctttatgctccaggatccagcacagagccagattcactgttcagaaaatgaatgaggaaatgaactgaagagtgaatgtgcaaatagagttcttctctcaactcttctacacttcctttgaactcttttttttttttttttttttttttttttttgagatggagtcttgctctgtcacccaggctggagtgcagtggcacaatctcggctcactgcaagctccgcctcctgggttcacgtcattctcctgcctcagcctcccgaata

SEQ ID NO: 395786 - DNA, 533 bp, Homo sapiens
attgccttctcctatgctgatcacctgcctcctccttatgaaaacccctgtgattacattaggccaatgcagagtaatctctccatctcaagatcctgaacttaatcacatctacaragtccattttgccatatacgataatattcacatgttccagggatcaggatacagacatggtgggaaggtggtgattactcagcttaatacacagtgtgtctttcccactaggatgttagtgatcagggtctttgtgcagctaatttagtctttatgctccaggatccagcacagagccagattcactgttcagaaaatgaatgaggaaatgaactgaagagtgaatgtgcaaatagagttcttctctcaactcttctacacttcctttgaactcttttttttttttttttttttttttttttttgagatggagtcttgctctgtcacccaggctggagtgcagtggcacaatctcggctcactgcaagctccgcctcctgggttcacgtcattctcctgcctcagcctcccgaata

SEQ ID NO: 395787 - DNA, 539 bp, Homo sapiens
tggctttgtggtcagaacagcatgggctcaaatccagcttggtcttgccttggcctgcgtagcccgggcagctcttctgcctcccccaacccagggaagtggggttgatgttctgaatctgcagggctcttggagaagttacagggtgcctgacacatgggagccaggctctgcccacagtcacccagccagcatgttgcagagccaggattttaaattagatccagccagttccagaatcattactttttccgttccgtatgcataccaggctgcctctttctagattatcctccaaaaagccctggggaggcggcasgagcatgagcggcagacaggcggccaagaagtgaggccccagacagggatctgagcgtgatctttgcccttgggacgcaaggcatccatccaagaggtcacagaaatcagcagctttcaccgggaagccccaagtcctgggattggggtgctgaagggggatccaaaaaaaacagtcattgatttggaaggagatgctgttctccatctcagccagctgt

SEQ ID NO: 395788 - DNA, 539 bp, Homo sapiens
tggctttgtggtcagaacagcatgggctcaaatccagcttggtcttgccttggcctgcgtagcccgggcagctcttctgcctcccccaacccagggaagtggggttgatgttctgaatctgcagggctcttggagaagttacagggtgcctgacacatgggagccaggctctgcccacagtcacccagccagcatgttgcagagccaggattttaaattagatccagccagttccagaatcattactttttccgttccgtatgcataccaggctgcctctttctagattatcctccaaaaagccctggggaggcggcacsagcatgagcggcagacaggcggccaagaagtgaggccccagacagggatctgagcgtgatctttgcccttgggacgcaaggcatccatccaagaggtcacagaaatcagcagctttcaccgggaagccccaagtcctgggattggggtgctgaagggggatccaaaaaaaacagtcattgatttggaaggagatgctgttctccatctcagccagctgt

SEQ ID NO: 395789 - DNA, 577 bp, Homo sapiens
atccttctcacagttcatttaaacagggttagagacttgttataaatgtagatttcatattcatataatttgagggcttccacataagacactttttaagtatttttaaatatcattttcaaatgtttgttttaaaaacttcagtatgctatccaaaaattatggttagaacattaattttccaaaagcagagtgttattcacatagtttagtatgtgaatatagtttactattagtaattactattactatatagaatataatagtttataaccaataaaaatctttagtcctacccaagtatttattctgcaagtggttattcacactgatatgcagcttatccttccagtcttcattgtgtagaactttacatttagttgatttggatttcactgcatttcttgaacaagtttataccaggttgttcctgtttctttatgytctttttttctatctaacctgtcataccatcctctctcctttaaaccctagcttatccgtcctttacagcctaactttatgccaattctttcttatcttgccctttcttctccttcctctgaacctttgaatg

SEQ ID NO: 395790 - DNA, 580 bp, Homo sapiens
ggcagagctggtaacacttgtggctttactgagtactggccaaaatggtgccttcaacattttccatctttatacttgcttcagtgcatctattacagtcattagtaagaacactgcatggggagaccatttcttccctctttcaactctagctatatgtcattttaagctagtcacagtctgtctctctgggcctgacttcctcttatgtaaaataatagagctggtttaactcttgcagcagccctgtctggcctatcatgatrtaaatgatttaaatctgtgctgtccagtgtggtgaccattggttacaacatgacttaaaatgtggctagtataactagggaattgtgtttttcattttatttaattcattttaactttaaattgccacctatagctagtggcaactgtgttgtataacatatctctagagaatgatttcaaaatgctgatccagcccaagcattaaaggaccctgactgatctgaccccacataggaactctttctcttggactattcagtaaaacatttcctctcttaaattaaaaaaaaaaaaaactcaacaaattcgggag

SEQ ID NO: 395791 - DNA, 580 bp, Homo sapiens
ggcagagctggtaacacttgtggctttactgagtactggccaaaatggtgccttcaacattttccatctttatacttgcttcagtgcatctattacagtcattagtaagaacactgcatggggagaccatttcttccctctttcaactctagctatatgtcattttaagctagtcacagtctgtctctctgggcctgacttcctcttatgtaaaataatagagctggtttaactcttgcagcagccctgtctggcctatcatgatgtaaatgatttaaatctgtgctgtccagtgtggtgaccattggttacaacatgacttaaaatgtggctagtataactagggaattgtgtttttcattttatttaattcattttaactttaaattgccacctatagmtagtggcaactgtgttgtataacatatctctagagaatgatttcaaaatgctgatccagcccaagcattaaaggaccctgactgatctgaccccacataggaactctttctcttggactattcagtaaaacatttcctctcttaaattaaaaaaaaaaaaaactcaacaaattcgggag

SEQ ID NO: 395792 - DNA, 592 bp, Homo sapiens
gaaagcttactgggatttcctcatcgaaagtagagattgcagctaatcctagtaccttttgttagtaattacttaaggcacagtgcaaagttgaaggactgttttggtacaaactcaagccagctacatgtatgcttgccttggtatccttgctagagcacatgcgagtataataccgtattatayacaacaaggccaccctgttgtatctgtgttacaattaaacatcagtcccagaaagtgaaccctagtcatttattataggtgcccacctctgacttggaacaaaatgccactccattcatgttcatttttgtcctggagaggatttatttcctaaaagattctgaaagccaacaaatcaatgtagttcttcatagagaacttaagagtaaggctcaaaatggcctcaaaatgggcttcttggatgacttccaacagtgactggcctcaacactgcagatgtctgagcactaccataacctaacgaagtggggaaggaggaggcaaattggtatttttaaacaagaatttaagtggctctttctttcaagtctaaaaaaacctttggctttaaagattataaactgat

SEQ ID NO: 395793 - DNA, 610 bp, Homo sapiens
tacttatgtatttgtaattttgtgttggcttggcgttgggagaaggcaagggtagggagtggtaaaagatgatgtgacactagagagaaagtctgaacccaactgaaaagctccatgtacactgtgctcaggagttttgatttataagtagaagtctttcagtaagggattggtattcaggcttaatgagatcctgaactgagtacttgacaatgaaaaygaagaaaataaacctggatttggaaagatttcttcagttgaaataactagaattagatgactgattcgaagggatgagggagagggttgtaagggaagtctcgtcatacactacagtcgcatctagcgattagacttaaatttgagattgtgacactggcacacacttcaaaggttttgaaagggtatgcaatgcagctttctcctaacctatgctaaagctgaggcttggatgccctggaaggcctgctgatcacaatctcccaagcagtagagctgaaactatggctataagttacattatatataagtctagagaagtgagtgtgtgccaggttgcgatatgtgttcagtgagtaattatatctgtttgtgtgttttctcaaatgtt

SEQ ID NO: 395794 - DNA, 566 bp, Homo sapiens
tctttattggctataaatttttagtacarttagaatttatcttaggaatgagatgtagaaatcacaaaaggagttaattctgatacgttctgttcattccaaagaagccatattcagaagagaagtaaaatttacaacgttttcaagttctacagctatattagtttgtgaacatagcatgagattcctttctccatctctctccttttatttccaacttgcaagaattgaaagcataaaaactttataagtctaataagtgctgtgaaatagctatttctgatttggcatttttgtgtgtggtgctgtgaaatgtttgctttgtgagaatttaatgttacccttgctgaagaatgtcagtgatacgctgtgagaattgtgcttttagaaaatgtaaaatagtttggttaatagtggctaaaggagatttgaatgaaagttgagcctcaagttaaaccttttacatagaaggatttaaaagaaataatgtgtgttttagtctaagtaagcaagttgcaaaacataaatcaggtagtactggtatctatttataatcagatttcata

SEQ ID NO: 395795 - DNA, 596 bp, Homo sapiens
ctctcctgccaccttgtgaagaaggtgtttgcttctcatttgacttccaccatgaatgtaagtctcccgaggcctcccyagcaatgtgggactgtgagtcaattaaacctctttcctttatcaattacctatctcaggtagtatttttttatttttatttttttgagacagagtctcgccttatctcccaggttggagttgcagtggcatgatctcggctaactgcaacctccacctcccaggttcaagtgattctcttgcctcagcctcccaagtagctgggattatagatgtgtgccaccacactcagctaatttttgtatttgtagtagagatggggtttcgccatgttggccaggctggtgttgaactcctgacctcaagtgatgcacccgccttggcctcccaaagtgctgggattacagatgtgagccactgtgccctgccctcaggtagtatctttgcaggagtgtgaaaacggactaatacaccatatgactcaacaatcccactcctaagtttttacttaagagataaaaacgtatatttgtaaaaaggcctgtaggcaaatgtttatagaagcttttttacataat

SEQ ID NO: 395796 - DNA, 596 bp, Homo sapiens
  misc_feature (1)...(596): n = A,T,C or G
gttgccagggtctgggagaggagagaataggggatgactgctaatgtgcttggagtttcttttggggatgatgaaaatgttctgaaattagatagtggtgatggttgtatgactctaggactatactaaaaaactactgaattatacactgtaaaagatttcatggtatgtggatttagttcccaaacgctattatttaattaaaagaaacaattaattaattaaaattaagaatttagtacatgggtttaacaactgctgagagaattagtgaactggaaaacttctcaggaaaaaaaaattccaattgaatcacagagaaaaaatataatgraaaatgtagggaaaaaacataaaagatacagggaacattgtgaaaaggtttacatatgtgtaattggagtcttcaagaaagagagaaggcagaagaagtatttaaagaaatactaacaatttacaaaaaattggtttaaaaaaaccacagattcaaaaatttctttgaacaccnaggcaatttaaatacaaaacaaaaccacatgttgatccatctagcgaaactgctgacaaacaaagatcaaagagacattcttaaaaga

SEQ ID NO: 395797 - DNA, 514 bp, Homo sapiens
gatatgaacacttttatatacacaacactttgtggagctattttatgtttaactacccataacaccactatgtctatgctttccagagaaacaagctctgaaattttattgaatataacctatttaaaaacttctttaactacaatgaaagtctctccttgatgcaccaaaatcttcagaaataacttgtgaagrcttgaaaatatgtcagtaattgacatgaaaaatgacgcattgacataattttttgcaggtataaataagacaagctgagatccttactatatccaagaagagcaaagtacattagacaggaaataaatatggaacagaaacattttcatttgtaatgaaaattcctccatttacagttttcagaagagaaaaaaatacacacacacacacacacacacacacacattcacacacaaaaaccagagcaatatggctttacagggtgtttcttcatcaaaggcctatttgtcatttcacatccgggaacactctataggga

SEQ ID NO: 395798 - DNA, 514 bp, Homo sapiens
gatatgaacacttttatatacacaacactttgtggagctattttatgtttaactacccataacaccactatgtctatgctttccagagaaacaagctctgaaattttattgaatataacctatttaaaaacttctttaactacaatgaaagtctctccttgatgcaccaaaatcttcagaaataacttgtgaagacttgaaaatatgtcagtaattgacatgaaaaatgacgcattgacataattttttgcaggtataaawaagacaagctgagatccttactatatccaagaagagcaaagtacattagacaggaaataaatatggaacagaaacattttcatttgtaatgaaaattcctccatttacagttttcagaagagaaaaaaatacacacacacacacacacacacacacacattcacacacaaaaaccagagcaatatggctttacagggtgtttcttcatcaaaggcctatttgtcatttcacatccgggaacactctataggga

SEQ ID NO: 395799 - DNA, 514 bp, Homo sapiens
gatatgaacacttttatatacacaacactttgtggagctattttatgtttaactacccataacaccactatgtctatgctttccagagaaacaagctctgaaattttattgaatataacctatttaaaaacttctttaactacaatgaaagtctctccttgatgcaccaaaatcttcagaaataacttgtgaagacttgaaaatatgtcagtaattgacatgaaaaatgacgcattgacataattttttgcaggtataaataagacaagctgagatccttactatatccaagaagagcaaagtacattagacaggaaataaatatggaacagaaacattttcatttgtaatgaaaattcctcyatttacagttttcagaagagaaaaaaatacacacacacacacacacacacacacacattcacacacaaaaaccagagcaatatggctttacagggtgtttcttcatcaaaggcctatttgtcatttcacatccgggaacactctataggga

SEQ ID NO: 395800 - DNA, 570 bp, Homo sapiens
aaacatggctctaaggagtaatgaatatagtcaatacagctatggcagtgtacatagctatattcagggtatctgaaatacttctatttaatttcttatatagtacaaatcaataaacgcaaccacataagcaaatctatgttggtatgtcatcgtatttatgttcattttgtatcagcatgaagagactttaattaattgtggtgcagtcataaaatggcataccacaagaccacacaacaaatcaaagatgaccaaattgtgtcaacctgaatagatctgaaatatataccactgattagaaaagccgagttgcagctattatgtacrctgtgtgaaatcgtatagaagacttgatacttggaaacagattctacacattacctatgaaagtgcaagtatcttgtaaagtatttttaatgtgcattgcagtgatttaaaagaaaaaacgttaattcaggctgttggttacctgtaggcaataaattgtagtagaagaaaatattctaaggccaaaacagctcagaatcattgttttaaaacactgtatctaccaaagagttacaaaag

SEQ ID NO: 395801 - DNA, 535 bp, Homo sapiens
tcacatacgtgcttaggattagtggaatgagaatgagattcagagccctacatgcaaggggaaatgtttttaggctccttgcctctgcaatacaggaaagcacacaggaagaggctgaaacagaagtcggggagcaaaagcacagaatctcctgcatgtagacacccttcatcttgactttacccctgattggaggtcttggaatcctacccagattttctgggactttgctaatccagtgtgatctgtggactagtaaattaaacacctcttgggagcttttagaaatgcagacacccgggccccatccctacttcattagaatctgcattttagtaagatcttcaggtgatttttatgatattaaagcttgagaagtaacagtttggttctcaaacttgacttcacattggaatcactggggaaagtttaaaaactaccaatgcctgtttcccatcttcagagcatctaattttattggtctggggtagtctgagcatcagctttttraaatatgatatgctcaaagttagag

SEQ ID NO: 395802 - DNA, 567 bp, Homo sapiens
gtttagaaatagcccacatttattcagacaagttctagtgaaaatctaactgagcaaactcttgagcgggggataacttctgcagtaggtagataacccccgttatctgctccccctccaccaggactcacatagcaacatgtggtacaaaccttaactttctaaaagaaggaaaatgacttttgtctaattcaaaggttataaaggtaaagtggtatttctggtaaggaaggctataaagaagagatattgtagaacaaaaaaaaatcttgtatggtaaattcttgtcctaaagtaaaatgactggtggtttaaaaagagggatgtttaggacaagtaaaaaagtccaagcatgttgtaggtggtctgtgtaagttgttaaaaaagatttgtgaaagggaatttatgaaagaactactacacaattttaaaggttactatgccatctaaatgcttcacaaactgccactatagctcttaacagtacaaattccctgctttaaagctaggtaaggcctkggaacatacagagttagccatgccccctgagctatgctgaaaacagtc

SEQ ID NO: 395803 - DNA, 566 bp, Homo sapiens
cttagcttttttgtggaacttgcctgtctccattagaattttcccataaaaagtcacaacacgccatctctggcacttcttgagactaacataagaatatcctcccagatactacaaaacccccaacctgaagaccaggggttccagggctggctaactagccagctctgtctgtgacaagtgacttaggctattcaggcctctttctcctctgtaaactgacagcttatttaactttaattagaagcactttaatggagtcaaagccagcaaagactccacataggaagctgttgccagagtcacctgtcagccactttccccacccatgactcatctcttgcccacctgcccaccatgttcctccactacatcattcytctgtcaaggtgcctgtcaggctcaccaggctggaagcctctggagcacgaggaggatcttactcatctgtgtcccaccctctcccgaactggcccatgatgggagctcaaacagtctgatcaatgaagaatataaaccgcttaatgagaggttgtagctgaaaccaaactgaatagatttaattc

SEQ ID NO: 395804 - DNA, 431 bp, Homo sapiens
ggcgcgcgggcccagtgtgggactgcggctgggagcccgggccctccgggagtgaagatacctttggaggtgagacggcctctctagcgcgttgacactgttgatggaagggattaaaggggtatcaggttattttartttattgttgaagatgatgactgccccctccccgatccgcataccgtcctcactttcccaccccaaccctagacccgacaacaccgttcagccctttgccccgggcagcggaaatggttagcttcatctaggagtttctgctgaggaaggcgcaggcaaccctagtcggcttagagagagacaaccgcacgcgatcaccgagcacgatttctcccaacaaaaaaactaacaataatagcgatccacacactcaagaggtctcaaacctccgaagttttgccccgagtcttgtg

SEQ ID NO: 395805 - DNA, 618 bp, Homo sapiens
tgttgcctgtatcattcttttgggcatgtgatcattcctgttctaggttgttctgtaacrggtgtttctagtctttcctctaagatggtaagcttttcaagatagagtaagtggcttctttctttcatgagttatagggttaagaacagaactgagtacttaaatggaattcaaaaaatagcaactgagtgaatgaatatgtgaataaatgacagaaatttgatgacacacttgattcaaggctgtgcggtgccccactggttttcaaactctgtttcgtaagggaaaagccaatgtatctaactgattacaatggagaagctctgaaccaggatgatccaggatggagaaactgataccacctctgcctctaagtttctggaagcctccctaaatcattccagactggagcatgtgttctaggatccaaacccccctaagaaattcacaggactctccctggctaccgggaacgtctgcttgtctaacttccatctatgtccctatagtaaagagaggaccacaaatcataagacactccctttcctaggacaagtaattcccattcatttacctttccccttgatgttcatcttaaaaccattaatagacattgtc

SEQ ID NO: 395806 - DNA, 584 bp, Homo sapiens
acacatatatcatttatataaaagttctaaaaccacaaagcaacattatatatgagtcatggcaacatacatatgtcacatggatggaaatcataaatgccagattcagattagttcttgcctctggagagaaagagagatgtgggaccagagttgggtacrtagagtttttagccactcagtaatactttatttcattataaaatatctgaggcaaacatggccaaatgttacattcaataaaactaaataattacattgatgagtgtattattgagtatatgtacaactgtccatgcattttaaatattttaaatatttcataataaaaaatttaaatttatgagtaatcattacaacactgaaaacatgtcatttccaaattagcagagaaaacaaaaatagttgggatgaaggaaatgtcatcaatcaaatagtggacagaaaaagaatagaaaaataacccaagggaaaacatggagaaaaggaaaataaaaagtacatagaaataattccacatgtcagttataatcataaatataagcagtctaaactcgaactataaaaaacatgagactgttaca

SEQ ID NO: 395807 - DNA, 579 bp, Homo sapiens
tgtttagctagaaagtctgatatgacctttgctcacttagaaattgtcatctacaacagtgtactcctttgtgaaaatttggttccagaatgtattagtccattctcacactgctataaagaactacctgagactgcataatttatgaagaaaagaggtttaattgatgcacagttccacaggtttaacaggaagcrtgactgggaggcctcaggaaacttacaatcgtggtggaagggcaaaggggaaggaagcagtgtcttcacatggtggcaggaggggaaggggaagtgccacacacttttaaaccatcagatcttgtgagaactcactccctatcatgagaacagcatgggggaaatctgcccacatgatccaatcacctcctaccaggtccctcccgcaacacagggaattacaattcaacgtgagatttgggcggggacacagagcccagccacctcacagaagcttacacctctgtctttctctgctgtgtactcactatgctgactcctatctgtgtcatatagataagcaaacctcatctgaattatctgtgtgatgtacgtgtctggt

SEQ ID NO: 395808 - DNA, 579 bp, Homo sapiens
tgtttagctagaaagtctgatatgacctttgctcacttagaaattgtcatctacaacagtgtactcctttgtgaaaatttggttccagaatgtattagtccattctcacactgctataaagaactacctgagactgcataatttatgaagaaaagaggtttaattgatgcacagttccacaggtttaacaggaagcatgactgggaggcctcaggaaacttacaatcgtggtggaagggcaaaggggaaggaagcagtgtcttcacatggtggcaggaggggaaggggaagtgccacacacttttaaaccatcagatcttgtgagaactcactccctatcatragaacagcatgggggaaatctgcccacatgatccaatcacctcctaccaggtccctcccgcaacacagggaattacaattcaacgtgagatttgggcggggacacagagcccagccacctcacagaagcttacacctctgtctttctctgctgtgtactcactatgctgactcctatctgtgtcatatagataagcaaacctcatctgaattatctgtgtgatgtacgtgtctggt

SEQ ID NO: 395809 - DNA, 579 bp, Homo sapiens
tgtttagctagaaagtctgatatgacctttgctcacttagaaattgtcatctacaacagtgtactcctttgtgaaaatttggttccagaatgtattagtccattctcacactgctataaagaactacctgagactgcataatttatgaagaaaagaggtttaattgatgcacagttccacaggtttaacaggaagcatgactgggaggcctcaggaaacttacaatcgtggtggaagggcaaaggggaaggaagcagtgtcttcacatggtggcaggaggggaaggggaagtgccacacacttttaaaccatcagatcttgtgagaactcactccctatcatgagaacagcatgggggaaatctgcccacatgatccaatcacctcctaccaggtccctcccgcaacacagggaattacaattcaacgtgagatttgggcggggacacagagcccagccacmtcacagaagcttacacctctgtctttctctgctgtgtactcactatgctgactcctatctgtgtcatatagataagcaaacctcatctgaattatctgtgtgatgtacgtgtctggt

SEQ ID NO: 395810 - DNA, 608 bp, Homo sapiens
ttgacagggaaagacccaggcttggattgtcaacctaaataacaagcagaaagagtctttctaaaaatattgagtataattggaaataagcagaggatttgaaaatccaggatattcaagctatgaaagtttttatgtattcacaagatctccttcaaatgtaagtagaaaaaaagtatgttagcttattactctgtaccacaaataaaatctctattccttcttaattgataaacatattaattaataagtcactctatctatccattcacccaaacttcyattaattaatttaacagtatcttttattatagacatcacaaggcagatactttaatagctgctttgaatacaaaggcaaagaagacataatatctctgtcctcagtccttgttttccattaaggaaaagatacagaaaagcagacgtgcacttataacacgtggttaaagtgttgtggaagatccaagatcccctgggacagagacttccagagatgacttcctgtaaaaagaaatatgtcagctaaattgcctccagagtctaaacgtataactatgtacatgcgtagttcagataattataaaatgactgtttgataagtagcc

SEQ ID NO: 395811 - DNA, 608 bp, Homo sapiens
ttgacagggaaagacccaggcttggattgtcaacctaaataacaagcagaaagagtctttctaaaaatattgagtataattggaaataagcagaggatttgaaaatccaggatattcaagctatgaaagtttttatgtattcacaagatctccttcaaatgtaagtagaaaaaaagtatgttagcttattactctgtaccacaaataaaatctctattccttcttaattgataaacatattaattaataagtcactctatctatccattcacccaaacttctattaattaatttaacagtatcttttattatagacatcacaaggcagatactttaatagctgctttgaatacaaaggcaaagaagacataatatctctgtcctcagtccttgtyttccattaaggaaaagatacagaaaagcagacgtgcacttataacacgtggttaaagtgttgtggaagatccaagatcccctgggacagagacttccagagatgacttcctgtaaaaagaaatatgtcagctaaattgcctccagagtctaaacgtataactatgtacatgcgtagttcagataattataaaatgactgtttgataagtagcc

SEQ ID NO: 395812 - DNA, 619 bp, Homo sapiens
attcgctttttcgatcacattccctaacagatcattagacttttgcctagagatatcgatgtggtctttcttttcttttttctttctttctttctttctttytttctttctttctttctttctttctttctttctttctttctttctttctttcctctttctttctttcttttctttctttctttctctctttctctctttctctctttctttctttctttttctttacttccttccttccgttctttccttctttctttctttctctctctctttcctttctttctctctctttccttccttccttccttccttcttctttttttttttttttttttttgatgatgtcttgtctgttgcccaggctggagtgcagtagcaccacttcggctcactgcaacctccgactcctgggttcaagcaattcccttcctcagtctcccgagtagctgggattacaggcacccaccaccatgcccggctaattttttgtatttttagtagagacggagtttcaccatgttggccaggctggtctcgaactcctaacctcgtgatccacccgcctcggcctcccaaagtgctgagattacagggatgagccaccctgcccggcctg

SEQ ID NO: 395813 - DNA, 557 bp, Homo sapiens
ttgtttaattttttatgataattagagtcttatccatgttggttcatgtggatttagttaattattttaatagtcatgtaatagttcactgtgtgaaaaggcacaatattcaataaagtctctgttactattaaaatacaagaaatatatttttaatgagaatattaataagaataaaggagcaaaataattataaaatggttttrttagcacaatcacacatatacatattcataattatattaattaaagcactgcaagtatcccaacaattatcagttgaactcaattctcaaatattacaatttaatatctagttcaattgcatggattgtaaccatttgagcaaatatatttttaaaacttgttaacttgagacactgagagataatagagagtcctattttgttaaagggtgcttttattttgatcattatttgtaatcaccattttaatgtatgctttcttgtaagagattccttaaaatcattcatggtttgtggttctggaagtcctccaaatgggttacatatgataggcattttgccctgtttatg

SEQ ID NO: 395814 - DNA, 598 bp, Homo sapiens
tgggaacagggatttcccaatgccagcataaaggatcattatttataagctaactgatcccacaaattctacacttagctcaacatttccgttggaaatactgaaagaatctttttaaaaatgttatatttcagccttcatactgtatgctaaattacataagctaaatgataaaacattttccaggaaaggggaattttaaagtctcacatactaggcttcaaatcaagctctgaaatgcagcttattattacatttttcttccatttatttttaattcttcccctttggctctgtcttacaggtgtccctagttacaaccatcagtaaaaacaaaacacatgtgtaggctataaatctgtatttgtgctaattcataggagaaaaatatcttcagttcctccttccaatttcctttccttttaccacttagaagctctctatagtgctctgcgcttacgattrcagaaaccaaactctgtctcacgtgatgggttaacaggaaagtttttgcatgtcatgtctcgttggaactaaagaagtcaaggtgaaaatccccaggttaatttagattttgaaaggacttagaaagggaatc

SEQ ID NO: 395815 - DNA, 601 bp, Homo sapiens
cccacaatgagactttctttcagcccataaacaatagggttatgagtttcataaggtaagcatcaggctggaaaattgttataatgtgagttctgattccaaatctataatttcctggcttgttgagtgacaatgggcatataacttcactgacgtgccttttctaaagtttagttttgaaatctgtattagttacacatttgatcatagtaaaacagatcattctaaagaataaaattctaaaaaaaaacctagtttaaaaccaaaaggctaagtagagmctctgaaaacaaaaaaacacacactataattatgagttgaaataagccactcataacacctttaaacaaaaagagctggtagaatcttgagctataaaatattaaaatgtattgctcaatgtaaatattttaaagtgtggacttctgtaaaatcaataaacagatcaagatatcagatttgtgtcagaaaaaaatcagtgtacaaaaatagacaatatgattcaatggtttccagaatgaatatactgaaacattaaatatttctagatctcaaatatctgtctttatccaatgctaaaattatttcccaattggttaaa

SEQ ID NO: 395816 - DNA, 560 bp, Homo sapiens
gactacccaatacattctcattagcaatccaatcaataagtttaaatagtataaatatatttaaatatttaaataaatttaaatcaaatatttttaattcaaaaatatatttttctagaatggacctcttctagactaccagtaggtatattagtcttcataagctttataaaaaggtagaaattattgaaaatattattaagaattttaaaattgttatcccaaaawtttatatcttttgttgcattaattctacttccagaatttatcttaaagacattttccgactcaggctaagattcatatatgaatatgtttattgcaacacttagaataataaaccagtggaataacaaaatgcccatttattgagttgaattcaggcccaagtacagtgttctatagtggaatagcatgaactcaaccaaaatcatgtaaaaaaaatttttctaaaaggaaaaaatatgtaaaatgcagtttaattagaaaataacctcataaaattttacatttaccaaaatttgctttgggcttcaacatttatataggtataaagaaaa

SEQ ID NO: 395817 - DNA, 583 bp, Homo sapiens
cagagacataaaaaagtcactgacactgagtgtgtttcatgaactaaatttgagtcagattcagggtgacaatcttaaaggaaatggtggtttctaatttctggtgaccaatgtagtgtgcctgatctgggctcggaccattgaatgccttttagaagaaatgaccatagggcaaggaatagcccccaatatacattctgatcctctttgaatgcattgaggggagaagaygctctgggaataattttctctgcatctaatctcccacttcaagatagagaaaaagcagtttctgggagttgcaaatcgtaggatttctattcaggcctgctactaacaagccacttaacaaacatctcaattcctgtggcttaagccttttctttagttataaactgtgtttacatcccctgaatctgccagggtccccaaatgaaacacatggcacacacagaatttgatatttctgaaaaggtttctttatagacaggctgttcgcaaaagttcaagaaacaggagggagtccacaggatcattgtggtactaccccgggttggtagtaactaaaacactcctaagaaag

SEQ ID NO: 395818 - DNA, 538 bp, Homo sapiens
gtgataattataatgacatctgtatatatatagaaagaaagataaatttagtggaacctaatgataataggtgtatacattgtaattatactcaagaaacttttctggagggtgaacatgttaaattttaaagaaagaaaaaaagtcctctaatatttaattgcagttatatattgaaagtacattcaatgcattattcagtgtattcaaagtatattaaatgtatattacttttattttatttcatgggtatgaaaatatttgtagaagataatggtaacttattcctcattatcttatttaaattacaatcaattctctactagcttagtgattgttcagtgccctttagaaaaaaaaatgttattgttccccaagatattgttttgcattacattgataattaggatttattgtgaaatactaaactactggctttgttgagttgtttgacagcccaatttcttgcttctgtgcctattctcacctttygatatctgacactatttctcctgaatttattttatcaagacatagt

SEQ ID NO: 395819 - DNA, 619 bp, Homo sapiens
gggctgaattgtgactctccacaattcagatgctaaagctttaacccccagcattgtatttggagacagtgtctttaaatagataattaaggtaaatgagatcatatgggtaggccttagtccaatataattggtgtccttatatgaggagattaggacacacacacagggaaggccatgtgtggacactggaggcaatggccatctacaaggtggagagaggcattagaagaaagcaaccctgaggacaccgttgatcttgaacatctagytctcatttgtaagaacgtaaatttctgcggtttgagccacccagtctgtggtcctttgttaccatctagcaaacgaatgcaggtaaaatttgcaaagcactgatgatacaataaaagtcaaaagggcataatggtctgtgtgataagaatgaagtaaagaaattcaaagagaaaataataggtaatatggcaaacaaattaagaacagtgagttttggtggaagtgcaaagtgaatggaaaataatagggacactgaattttactaaccagattggtattatgtgagagaagatcttgattgtcaagcaaagaaaatgcttttaaacattattctgaaagtaaggaa

SEQ ID NO: 395820 - DNA, 619 bp, Homo sapiens
gggctgaattgtgactctccacaattcagatgctaaagctttaacccccagcattgtatttggagacagtgtctttaaatagataattaaggtaaatgagatcatatgggtaggccttagtccaatataattggtgtccttatatgaggagattaggacacacacacagggaaggccatgtgtggacactggaggcaatggccatctacaaggtggagagaggcattagaagaaagcaaccctgaggacaccgttgatcttgaacatctagctctcatttgtaagaacgtaaatttctgcggtttgagccacccagtctgtggtcctttgttaccatctagcaaacgaatkcaggtaaaatttgcaaagcactgatgatacaataaaagtcaaaagggcataatggtctgtgtgataagaatgaagtaaagaaattcaaagagaaaataataggtaatatggcaaacaaattaagaacagtgagttttggtggaagtgcaaagtgaatggaaaataatagggacactgaattttactaaccagattggtattatgtgagagaagatcttgattgtcaagcaaagaaaatgcttttaaacattattctgaaagtaaggaa

SEQ ID NO: 395821 - DNA, 580 bp, Homo sapiens
atatctttgctgattcaataatgtttatttttacctctgcctcattcttaagtaatgttatgtaccaactaccaattatgaagtaattaaataaaaatgaaagaaagaaaaagtaaagttagaagaaaattaaaaaccaaaccacagtaagttaaggaccttaacacgttgaatggttttccaatggcatttagcttgagggctgcaaatcggaccacaggcatctttgtggccaatgtaaagtgaaacataatcatttgttttattcccagtaccaaaaatgtttgtaaagaaatcagaacagttgctcagcacaataatttttttaagagacagaagctgtggataaaygaagtaaaaaaataaatccactaataaaatttcataaaacactgcaaattctgttggcaaggatggatattcttaacactttaatgcaatgatttgcttgggaggaatgaaacaagtatgcaaaatttagtaaaagaaaacaaaatatcttctaaaagttttgaccaggaatcttgactactgtttattatatgatttcagctctgtaaaacattataaattgggtagc

SEQ ID NO: 395822 - DNA, 571 bp, Homo sapiens
tcaaactttaacttattgtggtatttattgaaatatcatatcatgcccttttccttttaattttttatttgatttggagtacacaaaatttttttttttttgcatattcatgtgagagatggacttgtgatttcactttcttgttttccccttgttggattttgccataaatattatgcatgccttataaaataaatattgatacatttcattataaatgaaaataaatgttggtacatttcataaacatgataaaataaaaataatatttgtagttttcatcaccaatctcatcagaaggtaagtattggggagctatcaagttaatggtattagagataagttttcaataattctaattttttcttgagagttcaaattttatgattggcagcaagcactcctaaytgttttgtttctagtgataagttcacttgatttattcataagaaaatatctgccatacaccaggtttgaatttccatatttctttgtcagtcattcttttaagtaaaaagtaatgcttcatgtaaaaaatagttcagttcgcaacccaaataattgcatatgt

SEQ ID NO: 395823 - DNA, 588 bp, Homo sapiens
ccatagttagtagtgtgtcttttatatcaagaatataaaaaattttcggggaaaactgacatgtattatacaatgaattttttagaactaagaagcacaagataaattctggaatgataaagatgaacattgttttttctcacatatgattttatactttgctcaatttacgaagtatgcatgcatttacatatgaatgtacacatgaatgtatatatgctttagaataatctgtttactttaataactaatttgaagtcatagcctcacattaaacctggttatgttaaggagtatcacctatactaacttttttytactctctgtttttaatctaggaaaatgttgaggttctaaaaatctgataggttttgctgagactgatttctaaatttagatatcagagcttttgttatgtatataattcataaccatctcttccataaaataacaatttgcatcccactttaaaatgcagctaccgctctatatatctgattttaaatattatcttttaaacttctggaaaaaagatatgatgtatttttaaatcattttctatgtggtgagaagtacaaactctctgac

SEQ ID NO: 395824 - DNA, 590 bp, Homo sapiens
ctaatggcatttaatatatacacactttttaatgactgtgatgctttatgtcaaaaaaactcttaaatattttttttaaaacactggaattatcagcattttgaatgacttgggagaaaaagtgcattcatttttagaaagttttcactagtaaatacaattcttcttaattagatatcccagcttttatacttttatttctttatttcttctgttttgaacatttcaaacwttttaaaaattaaaaaataaaagtttaaaaatctagtctcttaaaaaacttttaggtcatatgagaataaactttttgccaatatattgtttaacatctttccttcatttacttgcacattcagtccaaaaagatatatttagaaatttatggcaatatttcttcaagtataatgactacaaatggtactacataactcataaaaaattatcagaaaaaaacatgtaatttaaaatattacaaataaaattaatgttactaatatcgctaaataagataacttacacaatatttattagactacccaaatgtgtaggtatgagctaattttttaaagtgcataagtttacaaggctac

SEQ ID NO: 395825 - DNA, 627 bp, Homo sapiens
attgtgggacattattaaacaccaacatacatataatggsagtactagaagaagatcatttttaaaatggaaaaaattgaagaaatactggcttaaaactttccagattaccaaaaaatgtaatatacagatgcaagagtctcaataaatcccaagtcagataaaagcaaagagagccacacccagatatatcatggccaaaaggctgaaatccaaagacaaagcaataatattgaaaaaaagagagaaaagtgactcattatgtaaaagtgagactgaataagagtgaaaactgaattctcactaaaagcaatggatgccagcaatgggataacatattcagagtactgaagcaaacaaccacaaacaaacaaacaaaccctgtcaagcaaaaatctacatttttgaaataaatcaaaacttttattaaaaaatgtgagatgatatttccagataaaccaaaactgagagaattgtttgctagcagacctcccttagaagaaacatcacaattcagggtgaaacttcaggttgaaatcaagagattccataatatcttaaatccatgaaaaattcaagcactctggtaaagtaattatgtaattataaaagatagcataaatgcat

SEQ ID NO: 395826 - DNA, 590 bp, Homo sapiens
gacaaaatcttggctgcttttttatataaatggatacgctgatcctaaaactcatgtggaaatgcaagagacctctcctccacccaaataataatcttaaaaaagaagaccaaagtctgaggactcaaatttatcagtttaaaaatttgctttccagtaaccaagataatgtgttactgtctcaatagatatatagaccaatgaaatagaattaaaggtccagaagtaaaytttcaaatttatggtcaattgattttctacaaagctgccaagaaattcagtaagaaaaagaatagtctcaacaaacggtgctgaatacgaacatgcaaaataataaaactggactcctgcatcagaccacatacaaaaatgaagtcaaaatgaaccaccgacccagaaacaagcactagtactataaaactctcagaagaaagcttatgcataaatctttatgatttgtggtaggcaaaatcttgttagatacaatgcttgaagcacaagtgacaaaatcaacaaaaatacataaatttaatgttgccaataataaaatatttatactgcaaacaatgctatcaagaaagttaaaagag

SEQ ID NO: 395827 - DNA, 604 bp, Homo sapiens
gttgtacaaagaaaaacttttgggaaaatacaattacctaggagctgtaagccaaacaattccctgaactcaaaagggccaggaaccattcatgttcttaccaggcagagtgaagagatcttgttgaatacatagcctattgaataaagacctgaaaagtactggacataggagtggggcaaactatcactggggtaaagggtaatgtataaatatccaaacaaagcttgaacaatgagcctcaaaagaatcaacctgaaatgcatataacaactcatgtagaaacaaagtcaaataatttagtataagaaaacctagcactcaataatgtaaaattaataatgctaaagttttaattaaaaaattttttttaaaactggacaagacaataatcatgaaaacaatgacagactcttagaaaagacttcagccaaacacccaaaaatgacatagttgatggaattattaaataaagacatcaaaagaacttctgtaaatagkctcaaaatgttcactgatttaaaggaaaacatgggcatgatgagcacagaaataaaatatatatagaaaaaacaaatagaactttgagatttaaaatataaac

SEQ ID NO: 395828 - DNA, 597 bp, Homo sapiens
tttcctactgcccaggaggagagttatagtctacttttgttatgaccccttgatgaagctaactaaagatcgcataccagatcattacacaccaccaccgtgaartataaaaaggcacttagcatttttggatagggagtcacattccaagtctctcatagtctagaatgaaagacttcctttttttttttttttttttttaacaaagacaaaaatgatgatgtcattggtaccaagcgatgaatgatcagtatcatactctctattttgaactaatctaccggtttctaaacaattatttaaagaaataaaatggaaagtccatcgaggtagaaaaataaaactcagaaaaaaagaaagaaggaaagaaaaaacgggaagagaagaaaagacaaaaaaggggggaaaaaagggagaaaaaaagaaatcacagatgataccttgttcccagggatttaaagccacttacatagaaattattcttagagtaagctccatgaagaaatgttttcaggcaaatgaggtaatattataaaacattgcattgtcttattatatttgatgtttctagtagttgaaagaaaattgatactaacc

SEQ ID NO: 395829 - DNA, 583 bp, Homo sapiens
tgctactgtgaaaaccataatgcctaacatatattttcaaatgactttgtattaataatatattgagaaagctattcagatacattagaatgttygttgttcagaaaaatcgtgagcaaaacgattgccttctaaaccacatagtaggctgggtcagtagcagctacatttgggtggggtgaggtaagaggaagagaacatccctaatacatttcctatctgtttacattaagtggttgtcctcaattagcacttatgcttttatacagaaatggtagattgattgttttatctaagggttaaaaccttttatctgacggtggttacgtaaaccaccaccactgcctttttatgtctgtagatttaaagtttctactattcagaatctgaaaattttcacttgcctcaacatatttacagtgcctttttgcaatttgtgcttccaaaagtttatttcactaccttagtataattccccctgaagtacatatattttctgtgaattatttttcacttggatgtccagcattgattacctcaggatacaacattaagaaaaatggcatcttaaactcagcacgac

SEQ ID NO: 395830 - DNA, 583 bp, Homo sapiens
tgctactgtgaaaaccataatgcctaacatatattttcaaatgactttgtattaataatatattgagaaagctattcagatacattagaatgttcgttgttcagaaaaatcgtgagcaaaacgattgccttctaaaccacatagtaggctgggtcagtagcagctacatttgggtggggtgaggtaagaggaagagaacatccctaatacatttcctatctgtttacattaagtggttgtcctcaattagcasttatgcttttatacagaaatggtagattgattgttttatctaagggttaaaaccttttatctgacggtggttacgtaaaccaccaccactgcctttttatgtctgtagatttaaagtttctactattcagaatctgaaaattttcacttgcctcaacatatttacagtgcctttttgcaatttgtgcttccaaaagtttatttcactaccttagtataattccccctgaagtacatatattttctgtgaattatttttcacttggatgtccagcattgattacctcaggatacaacattaagaaaaatggcatcttaaactcagcacgac

SEQ ID NO: 395831 - DNA, 583 bp, Homo sapiens
tgctactgtgaaaaccataatgcctaacatatattttcaaatgactttgtattaataatatattgagaaagctattcagatacattagaatgttcgttgttcagaaaaatcgtgagcaaaacgattgccttctaaaccacatagtaggctgggtcagtagcagctacatttgggtggggtgaggtaagaggaagagaacatccctaatacatttcctatctgtttacattaagtggttgtcctcaattagcacttatgcttttatacagaaatggtagattgattgttttatctaagggttaaaaccttttatctgacggtggttacgtaaaccaccaccrctgcctttttatgtctgtagatttaaagtttctactattcagaatctgaaaattttcacttgcctcaacatatttacagtgcctttttgcaatttgtgcttccaaaagtttatttcactaccttagtataattccccctgaagtacatatattttctgtgaattatttttcacttggatgtccagcattgattacctcaggatacaacattaagaaaaatggcatcttaaactcagcacgac

SEQ ID NO: 395832 - DNA, 594 bp, Homo sapiens
ccatacctagtttagaaaggcaaattagctgagtgactgggtttcttatttcacacagagattaagaagkggtcagaaagagtgggaaaattggcaaatttagaattaagagtagagagcagatgaccgtgggacttcctttctgatttagaagacaaaagaaccacaatcatggattatgaatagaagataagtgtaagattctgcaacatttatgacaaggactcagggaggttcatgacatatgccaaattgtgtgtgcgtgtgtgtgtgtgtgtttgtgtgtattttccaaaaaggtttcaacaaattaccaatgcatttccgtgcttttttttcccttttccatttccaactctgaaaaggaaaaaaaaaaaaggcaaggttcaatattttaaaattagtatgttttcattttttacaatcatctttgtctccagtggagttttcattttttttttttttttgatgcaatcctatatgttcaagaaagtgagaaagctagggagctaggaaagttgcattcactttcagtctgcatttggaagaattccaaaagctaaaacataatgaagtacctactgaacaaagaga

SEQ ID NO: 395833 - DNA, 594 bp, Homo sapiens
ccatacctagtttagaaaggcaaattagctgagtgactgggtttcttatttcacacagagattaagaagtggtcagaaagagtgggaaaattggcaaatttagaattaagagtagagagcagatgaccgtgggacttcctttctgatttagaagacaaaagaaccacaatcatggattatgaatagaagataagtgtaagattctgcaacatttatgacaaggactcagggaggttcatgacatatgccaaattgtgtgtgcgtgtgtgtgtgtgtgtttgtgtgtattttccaaaaaggtttcaacaaattaccaatgcatttccgtgcttttttttcccttttccatttccaactctgaaaaggaaaaaaaaaaaaggcraggttcaatattttaaaattagtatgttttcattttttacaatcatctttgtctccagtggagttttcattttttttttttttttgatgcaatcctatatgttcaagaaagtgagaaagctagggagctaggaaagttgcattcactttcagtctgcatttggaagaattccaaaagctaaaacataatgaagtacctactgaacaaagaga

SEQ ID NO: 395834 - DNA, 594 bp, Homo sapiens
ccatacctagtttagaaaggcaaattagctgagtgactgggtttcttatttcacacagagattaagaagtggtcagaaagagtgggaaaattggcaaatttagaattaagagtagagagcagatgaccgtgggacttcctttctgatttagaagacaaaagaaccacaatcatggattatgaatagaagataagtgtaagattctgcaacatttatgacaaggactcagggaggttcatgacatatgccaaattgtgtgtgcgtgtgtgtgtgtgtgtttgtgtgtattttccaaaaaggtttcaacaaattaccaatgcatttccgtgcttttttttcccttttccatttccaactctgaaaaggaaaaaaaaaaaaggcaaggttcaatattttaaaattagtatgttttcattttttacaatcatctttgtctccagtggagttttcattttttttttttttttgatgcaatcctatatgttcaagaaagtgagaaagctagggagctaggaaagttgcattcacwttcagtctgcatttggaagaattccaaaagctaaaacataatgaagtacctactgaacaaagaga

SEQ ID NO: 395835 - DNA, 602 bp, Homo sapiens
ctgcatcaatttaatttcaaaagcaaggctttgaggtttgatccactggccttcccttcactaccttgcagccaaaagctttcttttataatggctgtgattctaggctcctggggtgcttctgatgttatggcttttagaggaataccaccattaatgttgtaatgcagagaagtacaaagacaatgttttccacttgtgtgcatgtattagtagttgccaagagtcttcacatcagccttgaggaaaattggtatttgtttatttttaatgtgttcccagggaattagatttttctcctgcatttgcagcatttgtgagaaaggtatacatacgccaatgacctttccwgatgtaataaactttgcatagctgttaagtgagccaacatagcatcaaagcctcgataatgaacaactacatggctgaccagcatgattttcctcatatttctgttttaactaacactgcaattgatgtttaaataagaaaaccacttttatatgtgtgtgtttcacttttcacttatacatgattctgtaataaaaggcatcatcttgtacgatctagcattttaagattaaaaacagcaaagaagacaa

SEQ ID NO: 395836 - DNA, 602 bp, Homo sapiens
gagaagaaggtagaagttatttataaagtataaatgtacattatcatcacctcattatgaaatgtttaggtttgcatgcattaaaatcatttttcctatgttgtcattaattcaataaaatacctgcagggacaaccacaagagagatagctaaactaaagaagtttatcttggtgcatatatatgagttttctaaatagattgtatgtcttaacgtttttgtaaaacatcaaaaaatggaagggattaaaacataaaagtataatatggctctaagagtggttccaggaagaataaagatgaaattaattgataattacaaaaacaccaaagaaatcagaataagaatttaagttgtttacagaatcaaataatatgaatagacatagatctgttacttagcatatgtgatacaattaacatataacaagaagagtaatgacttaaatcctatttaggaggttgggacaaagagaaacaacatcaatgcactattacaggcagaattaartgatacactttatttggcaatttgggagaacctaccaaaatttaacatgtatgtatcttgacccaagattttctcttttattttttacaca

SEQ ID NO: 395837 - DNA, 631 bp, Homo sapiens
atgacgagcacaagcagtctcctattaggctaaagaatattgtagttgaaacattacactattgaatatctgcagaagcattccctttttctagaaggtttgcttgtgtaacttctcagaaagttttccatttaacatttttttcaagtgcactgaaaaacaaatcttaactatctaagtttgaaatatgtgtttcttgtctcctaagagactataatataattattgaataaaaactcaaaaaggtaaattgttccaaactaacaaaataaayacaaaaatgtcaaatgtaatgctacaatgtctttagataagacactcaatttgttgtgcctttgtctccttttctgtaaataagattaggctgtagtgattttatataaaacgagcaagataaaatgcttaatgtggttcttggctaataatgagcaatcacaaaaatattgttatcattagtatcatatgggaaaattagtaaacatagtgtttgaaacagttaagaatgatttactttttttaagtctaagtattgtagttaatggcaagttcgtttgatccaagagggtgaaaataccacaaagcagataatagactttgacattgcattaaatataagtttaatagtgctttc

SEQ ID NO: 395838 - DNA, 631 bp, Homo sapiens
atgacgagcacaagcagtctcctattaggctaaagaatattgtagttgaaacattacactattgaatatctgcagaagcattccctttttctagaaggtttgcttgtgtaacttctcagaaagttttccatttaacatttttttcaagtgcactgaaaaacaaatcttaactatctaagtttgaaatatgtgtttcttgtctcctaagagactataatataattattgaataaaaactcaaaaaggtaaattgttccaaactaacaaaataaacacaaaaatgtcaaatgtaatgctacaatgtctttagataagacactcaatttsttgtgcctttgtctccttttctgtaaataagattaggctgtagtgattttatataaaacgagcaagataaaatgcttaatgtggttcttggctaataatgagcaatcacaaaaatattgttatcattagtatcatatgggaaaattagtaaacatagtgtttgaaacagttaagaatgatttactttttttaagtctaagtattgtagttaatggcaagttcgtttgatccaagagggtgaaaataccacaaagcagataatagactttgacattgcattaaatataagtttaatagtgctttc

SEQ ID NO: 395839 - DNA, 566 bp, Homo sapiens
tatgaggtcattagagtgtgaacacataaattacagatatgtacattctagagaccctgaagaattaagagaaagttaaaattagccaattcatttgaaacatagaaatagcttaactaacccccaaaaatctaatttgattttcttctttttacctttcaagttttttcgtctattttaagaaggcattgaaactgctagtctaaacatacaagattagagatagggctcacactaaggtagattggtcagaactggtttagagaagtttttgtttgatttccacatgttttcttattttaaatttgaacatgatgccaacaattaaaaattaaggtactttatattgaaaagaaaatctatattttggatgtttcttgagaagtcaggactagctcttaacgtggaccacggcagctatctgctagggctgtgcactggtggcttattttacctgggcacttctccccaggttgcccaagttccatttccagtatttatcatrtaatacctatctcccataagattttagcttctgtctcctaggctagcctgagacccaaatg

SEQ ID NO: 395840 - DNA, 616 bp, Homo sapiens
gttctccaggctcccctagtttgcacttggttctcaattttgtcactctaatgaattcccagttgtctttcaatgatatctcttcagatgcaacaagatagaaataatcacccacagcttctctattagagcagcatcaaaatcttctccatgcatctgttgatattgcttcttggactataagctgtttgagctataccttagcgtttctccagcactgatgcaatatctgcaggatgccagaagagaaggagtaacattatttgaaaaatacaccctatggaaaagaaaggagagttctaatacctaaatgggaggtaataaaacattgtcaaaagttagtagaagtccaccttttaagaaggaagagttgcagtttgtgctaatgttcctcaatcctttgttttcaggttagaactctcamatttgttttgctggttcactctgcccgtgttctacaaaagccccagttgcagtctgagctgtggctcagcttcctctcctcatcatagaatgttggctctgggtaatcctcccctaacctgcccagtctcaggtaatttaggcagtgaaaagaatgcaattccagtgatctagacatttaaaagtaattctt

SEQ ID NO: 395841 - DNA, 616 bp, Homo sapiens
gttctccaggctcccctagtttgcacttggttctcaattttgtcactctaatgaattcccagttgtctttcaatgatatctcttcagatgcaacaagatagaaataatcacccacagcttctctattagagcagcatcaaaatcttctccatgcatctgttgatattgcttcttggactataagctgtttgagctataccttagcgtttctccagcactgatgcaatatctgcaggatgccagaagagaaggagtaacattatttgaaaaatacaccctatggaaaagaaaggagagttctaatacctaaatgggaggtaataaaacattgtcaaaagttagtagaagtccaccttttaagaaggaagagttgcagtttgtgctaatgttcctcaatcctttgttttcaggttagaactctcacatttgttttgctggttcactctgcccgtgttctacaaaagccccagttgcagtctgagctgtggctcagcttcctctcctcatcatagaatgttggctctgggtaatcctcccctaacctgcccagtctcaggtaatttaggcagtgaaaaraatgcaattccagtgatctagacatttaaaagtaattctt

SEQ ID NO: 395842 - DNA, 528 bp, Homo sapiens
ccttggttaggtatattcctaaatttttcgtttgtttgttttttatttttggtgctattgtaaaaggagttaagttcttgatttgattctcagcttggtcactgttgacgtatagcagtgctactgatttrtgtacattgatttcttatcctgaaattttactgaacttactgatcaaatctaggatctttttggatgaatctttagggttttttaggtatacaaagatatcaccggtgaacagcaacagtttaccaatttggatgcccttcattcttttctcttgtgtgattgctctggctaggacttccagtactatgttgaatagaagtggtgaaagtgggcatcttgtcttgtcccagttcttgggggggaatgctttcaacttttccccgttcagtataatgttggttgtgggtttgtcataggtgacttctgttaccttaaggtttgtcctttctatgccaattttgctgagggttttaatcataagttgttgctggattttgtcaaatgctttttctgtgt

SEQ ID NO: 395843 - DNA, 632 bp, Homo sapiens
ggtataggctattagtaacagtgcctgccatttaatagacaatcattattttctaaatgttgaaggcataaaatcatgccattctattataattatttttgtatttttataggaacataaagcactaatttcagaaaaacaaagtatcagagatcaagctatgaataacttaattaaaatgttatcatcctgatgtagactggcatatttctaagacaaatccccaatatatggcctgtttaaataaaagagaaaaataaatckactatgctatttatttgtaacagaatcctctgttaatggtggagaagctatggcagcacagatttttaaagtcataaattaaaaaatgtctttgccattagtaaacatcttacatatcaagaatttgttataatccttaacaaaaacagggatgaggaaaaatgattttttaaaaaatgtacccatttcattttaaccataaaaacagaataaaaagttttttttacagataattattttagtttaaattattaaaaggatatattagatggttctacattgaattaaatttaattaaaagatgtgcacactgctggccaaattgtacttttactatatatgtgatatagtcataatttaaaagaaca

SEQ ID NO: 395844 - DNA, 632 bp, Homo sapiens
ggtataggctattagtaacagtgcctgccatttaatagacaatcattattttctaaatgttgaaggcataaaatcatgccattctattataattatttttgtatttttataggaacataaagcactaatttcagaaaaacaaagtatcagagatcaagctatgaataacttaattaaaatgttatcatcctgatgtagactggcatatttctaagacaaatccccaatatatggcctgtttaaataaaagagaaaaataaatctactatgctatttatttgtaacagaatcctctgttaatggtggagaagctatggcagcacagatttttaaagtcataaattaaaaaatgtctttgccattagtaaacatcttacatatcaagaatttgttataatccttaacaaaaacagggatgaggaaaaatgattttttaaaaaatgtasccatttcattttaaccataaaaacagaataaaaagttttttttacagataattattttagtttaaattattaaaaggatatattagatggttctacattgaattaaatttaattaaaagatgtgcacactgctggccaaattgtacttttactatatatgtgatatagtcataatttaaaagaaca

SEQ ID NO: 395845 - DNA, 600 bp, Homo sapiens
aagtagtattgcccaggctacagcttacatttggtttgttgcaaaataatkctggtgcaggtatggccatttgttcctgcccagggtctactggatcaagcaactgtttaattcagccttttatttagccatcacctttaattttatatgttctcttggaagtcaaaatgataggagcagggtcctcctatattgttttaaaggataatgaaatattctattctttgtgttattgattttaaacagcttcaatatagcaaataattctttttgctgttgttgtaaatgaaggaaacaacttagcttcttttagcgaccacagcataaccacgttctcctgcaaaactatttgtgcagagcaagcacaacatccttcggaagattagcaattcctcaaaagaagtcagaagacagattttcacattcaattccaacctgtgtggtttgaaggccgtgaaactttcaacaacaatataaatactgcatgtgtctctctctcccgaggctggattttaccgactggtatgtgaaaggccaattgtataagcaggtgtaggtctgagttgaaaggatttgatggcattaatctccctttaagag

SEQ ID NO: 395846 - DNA, 401 bp, Homo sapiens
attttgcgaaaattttcccaggtgattctaaagtctagcctgtactgaacatcactaccttaagtaaataaaatttaataacttggttataattttttcatgagctacatgtcagtagccataaccaattttctgggagaaatagtacacaagcaggtagttgctgagttgccagagacaaaataaagcagctgaagttaaagagaaacagaaagagagtcttcaatgtgtgaaataataaattatattgttatctcactgtatcctcttaagaaytagtaacacacagcaatctcactcaacaaattgatggtataacggtacaccacgtgtttaaagtttcttttaactcctcttccatgtaaacacatcgaagagatagaaatgggactcactttggc

SEQ ID NO: 395847 - DNA, 506 bp, Homo sapiens
tgagaatatgcgatgtttgtctttctgtgcttggcttgtttcactaaacatgatgatctccagttccagccatgttgctrcagatgacaggatctcattctttttttatgactgaatagtactctattatgtataagtaccacatttttttatccattcatttgttggtggacacttaggtttcttccaaatcttgactattgtgaacagtactgcaacaaacaggaagtactgatatctctttgatatactaatttctttcctatggggtatatatccagcagtgagattgctggataatatggcagctctatgtttagttttctgttatccataatggttgtactaatttacattcccactaacagcgtacgaaagttcctttttcttcacatcctcaccagaacttgttattgcctgtcttttggatctaagccattttaattggggtgagattctatctcattgtagttttgatttgcatttctctgctgatcagtgatgtt

SEQ ID NO: 395848 - DNA, 548 bp, Homo sapiens
gcttcaggatgggaaaacatatcttaatttctctctctttctctctctctctctcctcatctctctctccctgctgccacaagaagcagaaacataaaaccaaataaaaaaatttctgtttcttaatatcttaagtccaacaacagtataaaagtatgactgaggaaaaggaatttgacaactaacagttaaaacatgatacatgaargtaacattcttgtaatgagaattctagagaacatctgattgataaaaattgtggggctttgagatttaaaaaaaaattagaatgaatcatgaaatggaccagtcacataaacttgccgaaggggaaaaaaagactgagaattaaacatagttagggcaatcacatgtcaattttgctggaactgtcctggtttaacccttaaaagtgatataatcctagtcactttcaaaggaatacttgtttggacaaaatacatctgtggtcgccctagccatagaggatgaagcaatgttatttctatgcatttcaaaaagaaaaaaaaaacacgggaagtgtgtca

SEQ ID NO: 395849 - DNA, 548 bp, Homo sapiens
gcttcaggatgggaaaacatatcttaatttctctctctttctctctctctctctcctcatctctctctccctgctgccacaagaagcagaaacataaaaccaaataaaaaaatttctgtttcttaatatcttaagtccaacaacagtataaaagtatgactgaggaaaaggaatttgacaactaacagttaaaacatgatacatgaaagtaacattcttgtaatgagaattctagagaacatctgattgataaaaattgtggggctytgagatttaaaaaaaaattagaatgaatcatgaaatggaccagtcacataaacttgccgaaggggaaaaaaagactgagaattaaacatagttagggcaatcacatgtcaattttgctggaactgtcctggtttaacccttaaaagtgatataatcctagtcactttcaaaggaatacttgtttggacaaaatacatctgtggtcgccctagccatagaggatgaagcaatgttatttctatgcatttcaaaaagaaaaaaaaaacacgggaagtgtgtca

SEQ ID NO: 395850 - DNA, 381 bp, Homo sapiens
tgagtgaatcatccttagattgttgcatggttttggttaactttcagagttctgaaaaaaagttgattttgacaacttgtgctagtgttctcattgcttttataaaataatagtttgatggaagtctatattttgcaattctggaaattgcttttgggtcagcgcttccttaaaactcactaaaacttgacaagtggtaggttgttaataattagttgcatgtaatttctgaaactgtagtagtagatttttttgtactctgtttaacattaaatcataaaatttatttttttctagatagatcacattaaattttattcattcaacaaatacatattgagtcacygagttgcattagtcactgtcccaggcaccagaaat

SEQ ID NO: 395851 - DNA, 570 bp, Homo sapiens
cagcctttgaaccacaatgcaggtctgacaccgaagaaggagggaagaaggaaagtgcatggggtaagaagagttctagactgcagcagtccctggcatgtttcaactagaccaatgccaacttctggagtcaaactcaccagtttaaggaggtctgcatctcactggggtyggattgccttagtacttctgttatgtgcagcccctggctgggagcagccatgggaagcgtgacctccgtacaaacatgatggtggttctagaaggacagttgcaggtgctgtcagtcaatcatattccctgcagagaagatctaaatagtgcattttcttacccaccacaatctgtataactcagactatattttccaaaggagcaatgcatattgttatacagtcatgcatgaataaaatattcactaaaactgagtttttcaaagttattcatattaactgtggtttctgattccacattgacactaatatttaagtagtatttaagaaaccaccagttgttggctttgatgtagtatcaaagatagccatagtcatttgaaaaggctattaaaat

SEQ ID NO: 395852 - DNA, 507 bp, Homo sapiens
ctttgatgtagtatcaaagatagccatagtcatttgaaaaggctattaaaatactccttcttttaaaactatacatatgtgtgaggccagattttcttcatatactgtatttcaacaaaaagaccatgtcccaacagattgaataagagcagaatgagcatacaggtatcttatattaagccagataataaagagagttacaaaaatgtaaaacaatgtcactactctatttttctgaaaaatagttattttttactaaaatatattatttatgttaacatgcaatggagtcattactgttattttaaaaaataagatgatacatttttcaaaagtttctgttttaattttgaatacaatacaactagatattacctatatattagattggtacaaaggtaattgcagtttttgccattatgttcaatggtraaagccgcaacttcttttgcaccaacctaataacagaaactctctttgaggtcttcaataattgtaagggcataa

SEQ ID NO: 395853 - DNA, 579 bp, Homo sapiens
atataaaaatgtatccattttagtgtagtgcagtacacctcaaatttgggttctgtaaccaaccagcaggaagacattgagcaatttacttaaccatatggcgattcagtttccttgtctgtgaaatgggtaaatatcaacctcacaagattattatgaagattaaatgaattaatatatgtaaaccaatgggaatacagcctcrtacatagcaggcactgtagaaggttagcttatttttattaaaacggtaacacggatgaggagcttaagtatccctaggagttttgttaaagagagctaaagtgtaaagatgtgacacatgggctaagaggagaggtagaaagaagagagtgaggagttggaaaaaacattacaggtactgagaacagcttttgtcagatgcaaagatgaaagtataaactcctggtaagtttggtatttctagaactaaagtgaagagacaggggaaaaatgctaaaagattaggccaaaaaggataggacctcatcattaaaggccttgtgtgccaactaatacactttattttattttgtgtggatggagagatcctaaata

SEQ ID NO: 395854 - DNA, 579 bp, Homo sapiens
atataaaaatgtatccattttagtgtagtgcagtacacctcaaatttgggttctgtaaccaaccagcaggaagacattgagcaatttacttaaccatatggcgattcagtttccttgtctgtgaaatgggtaaatatcaacctcacaagattattatgaagattaaatgaattaatatatgtaaaccaatgggaatacagcctcgtacatagcaggcactgtagaaggttrgcttatttttattaaaacggtaacacggatgaggagcttaagtatccctaggagttttgttaaagagagctaaagtgtaaagatgtgacacatgggctaagaggagaggtagaaagaagagagtgaggagttggaaaaaacattacaggtactgagaacagcttttgtcagatgcaaagatgaaagtataaactcctggtaagtttggtatttctagaactaaagtgaagagacaggggaaaaatgctaaaagattaggccaaaaaggataggacctcatcattaaaggccttgtgtgccaactaatacactttattttattttgtgtggatggagagatcctaaata

SEQ ID NO: 395855 - DNA, 576 bp, Homo sapiens
tagtcaccaattacttttagtgattttttaattctattcaaaatacagtcacattgtttttaaaaattaataatgtttccaataagacacagagtttaaataacaatggcaacaatgttggagtttctctagtgaaagagccagagtttaaaaaatagtttaaaaaacagatttatcaatttcagaaatcttaaacatgacttcccataatcaatctttttgatgtgttcattacaaagtacctgttcacaataagctgatggcagtggagattaccatactgaaaaaggtagaggttctactttttataatttaaaatagtatttgttattaggtggattttttaaattcaacttttatttacatcctattatatagaagatgctaagctactttttaacttttagctttttaacttttactttttactttttaactttttacttttaactttttaactttctacttactttttaacttttaactttctatttactttttaactttttactytttaactttactttttaacttttactttttaacttttatatggttaggctaaatttatatatt

SEQ ID NO: 395856 - DNA, 582 bp, Homo sapiens
ggcacggtggctcacacctgtaatcccagcactttgggaggctgaggcgggcagatcacgaggttaggagatcgagaccatcctggctaacacggtgaaaccctgtctctactaaaaatacaaaaaatgagccgtgcrtggtggcaggcaactgtagtcccagctactcaggaggctgaggcaggagaatggcatgaaccggggaggcggaggttacagtgagcggagattgtgccactgcactccagcctgggtgacagagcaagactccgtctcaaaaaagaaaaaataaataaatacaaataaataatgtatcatgaatatgcttctattgagttccactgaaactgcttttattaagatcaccagaaagcttcacagagcaaactggaggggccttcctttgctgcactcatctcacttgacttttctgtaggaatcttgtatctagctgaccacactgtcccctttgaaacaccttgttgaacttgtgacaacacactttcttagttctttctcctctgcgctaaatgctccagggatctccatttttcatccacactttttacctaagtaactgca

SEQ ID NO: 395857 - DNA, 621 bp, Homo sapiens
atgtttatattatagtgattaatgaaatcactataatatatgttttgtacaaaaataatggtgggtagaagcatgtgcttgtctctctcctttcttggataatttctrtggaagttactttcactcattcaacacttattttatcaatcaccatataaggtaggcccaatagtaggcactggggttataatggtgatgtaagcagacctgagctctggcttcacaaagttttcagtctggttgggggatggagattcacaaataaatgtaaaattaaaaactgtggtagaagctttaaaggaaaatcttgggttgctatggaaacatatggcagaaagatgagacaaagtctggatgatacagaattctcacttgaggaagggacatttgacctgaggttagaaagaattaactgcatcattgtaggttggggaaatggtgtacaaaaatgagtatacaaggcagagagaccacagggactttagcgttcaggctaggaatatcatggctgtggaagagccagtgtagaactgtacatactgtaacatctatgtggggacctgcccaaacagcagggctagtgtccagggagatcttgtcacccagagaacatcctctgca

SEQ ID NO: 395858 - DNA, 592 bp, Homo sapiens
ttttacccactaaaggtgttcaatttaatggtttttggaatactcacagaattgttcaaccatcaccaaaactaattttggagcatttttatcaccttagaaagaaacccagtactctttagatatcactccccattctccctttctragcaaccactaatctgctttttgtcctgtagatttgcctgctatattttttagatactttatatatattgagtcatataacatgcggccttttatgaatgacttcttttacttagtataatgtttgcaaggttcatatatgtcatagcacatattctacaacgttctttttttgttgctgtttatatttcattgtatgtatatacctcattttgtttatctacttatctgttggacttttttgttttcagtttttactattatgaatattgcttctctgaacattcatatacaggcttttatatggacatatgttttcaattagtctgcatatacacctaggagtagaatttctggatcctatagaaattctatatttaaccttttgagaaattgccagtctgttttccaaagtagttgtcctattttacactcctaccagcag

SEQ ID NO: 395859 - DNA, 592 bp, Homo sapiens
ttttacccactaaaggtgttcaatttaatggtttttggaatactcacagaattgttcaaccatcaccaaaactaattttggagcatttttatcaccttagaaagaaacccagtactctttagatatcactccccattctccctttctgagcaaccactaatctgctttttgtcctgtagatttgcctgctatattttttagatactttatatatattgagtcatataacatgcggccttttatgaatgacttcttttacttagtataatgtttgcaaggttcatatatgtcatagcacatattctacaacgttctttttttgttgctgtttatatttcattgtatgtatatacctcattttgtttatctacttatctgttggacttttttgttttcagtttttactattatgaatattgcttctctgaacattcatatacaggcttttatatggacatrtgttttcaattagtctgcatatacacctaggagtagaatttctggatcctatagaaattctatatttaaccttttgagaaattgccagtctgttttccaaagtagttgtcctattttacactcctaccagcag

SEQ ID NO: 395860 - DNA, 546 bp, Homo sapiens
aagcaataactcattaaaggagtgctttttggtatttatttttcactgttgattagtattttaaaagctttttctgtgtaaagatgttaaaattttccttaaatacctctaaagatcaatataattccacaagtattttcaaaccaatttgaaattaaacaatgtgattcttactatttaattttcttcctcatcgatttggatttctctaaaattgactgggccttaggtaacagtattgccaggacagaaaagaggaggaacacattggtgctgaagtaggacaaatgtggattcaagtttggctctgcgttttttgatctgggggcccyagacacatcagtctatctaagccacaatttcctcacctatgaagtaaggataacagtattacccatctttatagggctgcattgattgagagatagcgtgtctctcatttaaagccacacagggcttagcagagtgcacacactcaatatatgttagcgatcttccaaggcagcccagattagtttggttgcagtagggtctggttcagtatat

SEQ ID NO: 395861 - DNA, 642 bp, Homo sapiens
aatttatttgttaaatttacctcctaggattctgaattccttttcagtgttatcttaaatttcattgagtttcttcaaaactgctatttttagttctctgtctgaaaggtcatatatctctatctctccaggattggtccttgatgccttatttagtttgtttggtgaggwcatgttttcctggatggccttaatgcgtgtggatgtttgccagtgtctggtatttaagagctaagtatttattgcagtcttcacagtctgagtttgtttgtatgcatccttcttggagaggctttccaagtatttgaagaacttggctgttgtaatctaagtttttggtctctgcagcctgtctgaattaaggggcactccaagcccagtaatgctgtagctcttgcagacttgtaggggcactgtcttggtggtcttggataagatgtaaaagaattctctggattatcaggcagatactcttgttctcttcccttactttctcacaaactaatggagtctctccctctctgtgctgagttatctggagctgggggatgggtgacacaagcaccaccactgggactgcgctgtgtcagacctgaagccagcatggtgctgggtcttgcagaaggcctgcagtaaccactg

SEQ ID NO: 395862 - DNA, 642 bp, Homo sapiens
aatttatttgttaaatttacctcctaggattctgaattccttttcagtgttatcttaaatttcattgagtttcttcaaaactgctatttttagttctctgtctgaaaggtcatatatctctatctctccaggattggtccttgatgccttatttagtttgtttggtgaggtcatgttttcctggatggccttratgcgtgtggatgtttgccagtgtctggtatttaagagctaagtatttattgcagtcttcacagtctgagtttgtttgtatgcatccttcttggagaggctttccaagtatttgaagaacttggctgttgtaatctaagtttttggtctctgcagcctgtctgaattaaggggcactccaagcccagtaatgctgtagctcttgcagacttgtaggggcactgtcttggtggtcttggataagatgtaaaagaattctctggattatcaggcagatactcttgttctcttcccttactttctcacaaactaatggagtctctccctctctgtgctgagttatctggagctgggggatgggtgacacaagcaccaccactgggactgcgctgtgtcagacctgaagccagcatggtgctgggtcttgcagaaggcctgcagtaaccactg

SEQ ID NO: 395863 - DNA, 642 bp, Homo sapiens
aatttatttgttaaatttacctcctaggattctgaattccttttcagtgttatcttaaatttcattgagtttcttcaaaactgctatttttagttctctgtctgaaaggtcatatatctctatctctccaggattggtccttgatgccttatttagtttgtttggtgaggtcatgttttcctggatggccttaatgcktgtggatgtttgccagtgtctggtatttaagagctaagtatttattgcagtcttcacagtctgagtttgtttgtatgcatccttcttggagaggctttccaagtatttgaagaacttggctgttgtaatctaagtttttggtctctgcagcctgtctgaattaaggggcactccaagcccagtaatgctgtagctcttgcagacttgtaggggcactgtcttggtggtcttggataagatgtaaaagaattctctggattatcaggcagatactcttgttctcttcccttactttctcacaaactaatggagtctctccctctctgtgctgagttatctggagctgggggatgggtgacacaagcaccaccactgggactgcgctgtgtcagacctgaagccagcatggtgctgggtcttgcagaaggcctgcagtaaccactg

SEQ ID NO: 395864 - DNA, 547 bp, Homo sapiens
ttgtttgtatgcatccttcttggagaggctttccaagtatttgaagaacttggctgttgtaatctaagtttttggtctctgcagcctgtctgaattaaggggcactccaagcccagtaatgctgtagctcttgcagacttgtaggggcactgtcttggtggtcttggataagatgtaaaagaattctctggattatcaggcagatactcttgttctcttcccttactttctcacaaactaatggagtctctccctctctgtgctgagttatctggagctgggggatgggtgacacaagcaccaccactgggactgcgctgtgtcagacctgaagccagcatggtgctgggtcttgcagaaggcctgcagtaaccactgcctggctatcacctatgtttgctcaatgycctggggctctaaaatcagccccaggtgggctggcggcaaagccagccaggcttatgtccttcccttcaaagtagtgagttctctgcagccctgggaacgtctagagatgccatccaggagccaggatctgagtcagaaa

SEQ ID NO: 395865 - DNA, 547 bp, Homo sapiens
ttgtttgtatgcatccttcttggagaggctttccaagtatttgaagaacttggctgttgtaatctaagtttttggtctctgcagcctgtctgaattaaggggcactccaagcccagtaatgctgtagctcttgcagacttgtaggggcactgtcttggtggtcttggataagatgtaaaagaattctctggattatcaggcagatactcttgttctcttcccttactttctcacaaactaatggagtctctccctctctgtgctgagttatctggagctgggggatgggtgacacaagcaccaccactgggactgcgctgtgtcagacctgaagccagcatggtgctgggtcttgcagaaggcctgcagtaaccactgcctggctatcacctatgtttgctcaatgccctggggctctaaaatcagccccaggtgggctggcggcaaagccagccaggcttatgtccttcccttcaaagtagtgagttctctgcagccctgggaasgtctagagatgccatccaggagccaggatctgagtcagaaa

SEQ ID NO: 395866 - DNA, 607 bp, Homo sapiens
cggccaccttgctccacttctgtattttttttctcactgttctatcccctgaatctacaacaatgcttggaatgttggaagtgctctatagatacttgttgactgaatcataratgaatgaattttcctagatgacttttagcagtttgtagtcataatgaacatttctaattttaacatttaaacttctagggtaaattatattgtctgaaaggggttttctgtttttctgctgattgacaagtaaatgtcaaatgccaaatatagctatacacttgtattactccagtatcaaggaggtaaagccaaaagccaataaaatggtagagttacatttagaatttggttgctggtatgaaagcacagattgacagtactgaggtatctagttcatgaatgcttctgctggatttccaaaggtcaaccctactcttaaaagcttggtcttccgtcaggggctagagagcaaagagaagtgtgaagtatgcttaagatccattatatcagtagcatctcatatttacacacccagcacttcatttttcatacaataccttttattatagagggtaaatggcagttttctgctgaattttaaaatagtgca

SEQ ID NO: 395867 - DNA, 444 bp, Homo sapiens
ttagtgtgcatgagaatcamctggaaggcttattaaaacacagactggtgggttccacttcagagtttatgcttctgtacgcctaggaggaggcctgaaaactggcctttcttacaagtcctcatgtggtactgatgctgctagttcagggacatcaatttgagaactattctttaaaaaatgtagattcagggggtacatgtgcttgtttgttacatgagtattacctgcatactggtgggggttgggcttctagtatacccatcatccaaatattggccattataccaaggaggtaattttcaacccttctagagagaactactcttaaagaatgtacccataagaatcttgagaacttgatccccctaaatagggaggaaagttagcattagctatgctaggagccttctaatcacacgtttctcccgtgctcactctctc

SEQ ID NO: 395868 - DNA, 607 bp, Homo sapiens
tggtaattataaacttttattacagaccttctataaacagtgckctgagaataacctatggaggccacaaagatgagaaaaatgcattctctaaattggcatcttctgaatctagtatcagttccatgtatttaggactttaaaatcttatttttgctaagttttcctaactcctatgacaataagctaattttggcagatcggtaaagaatatgaactaatttactaactactttaatgtgagtcttacagtcatatattcataaaaaactaaaaagttcagcttcaatatgcataccaattatttaagactttgttgagatggctttgtattcctgaggccttctctaatttttgcattcagaaataatctcttttctctgtgcttcagtttgcattttctttgtacttttttaaaaagcatctttcacattatgctctgcactagtcttagttgtatacatgtctggtgttttccctagatttcaagttgtttgaggactagatactgtcctttattttctctggcacagtgtcttaggcaaaggagatagttagtgtgtttgctgaattgaaagagtctataatactacttgatgtcttggat

SEQ ID NO: 395869 - DNA, 608 bp, Homo sapiens
gtttccttctaaaggggctttcatctgcaaccatattttttaaaaattggcagcctggtagttgtttctatgctttcctcaagatcacctctccttaggttcactagaaccagcccaagtacaactcatttcatcatctcttcctttctctcycacctctcatttttaagagcctacttgcacttcaagtaaattagcagtaacatttatcaggtctttcctatatatacacctttatttattttctctaggtatttgctatctttccacttccccaagtccaacaccctgtaccccatcagctgtgcttaatccctggcttcttacagtgattcttcccagaagggtctggaactccccaccatcacccgcattttgtggcttatctttactaggatgttctttactatgaactttcaaggtgtagaagtgattcttctacctctgcacaaagtagacatttcacaaatacctaaccattttaatatttctgtttggtgctccaaatactaggtcttctgtctttctagtttactgctaactcaattgtggattgttgtaggaaaactaataggacctcctcacatacatgaagcaagaatagtact

SEQ ID NO: 395870 - DNA, 608 bp, Homo sapiens
gtttccttctaaaggggctttcatctgcaaccatattttttaaaaattggcagcctggtagttgtttctatgctttcctcaagatcacctctccttaggttcactagaaccagcccaagtacaactcatttcatcatctcttcctttctctctcacctctcatttttaagagcctacttgcacttcaagtaaattagcagtaacatttatcaggtctttcctatatatacacctttatttattttctctaggtatttgctatctttccacttccccaagtccaacaccctgtaccccatcagctgtgcttaatccctggcttcttacagtgattcttcccagaagggtctggaactccccaccatcacccgcattttgtggcttatctttactaggatgttctttactatgaactttcaaggtgtagaagtgattcttctacctctgcacaaagtagacatttcacaaatacctraccattttaatatttctgtttggtgctccaaatactaggtcttctgtctttctagtttactgctaactcaattgtggattgttgtaggaaaactaataggacctcctcacatacatgaagcaagaatagtact

SEQ ID NO: 395871 - DNA, 425 bp, Homo sapiens
cacaactcagaatgtatacacatagacatgcatgcacacytgaaacataagtttcacaaaacagtatcttttctatgtgtggcatactaatattttctattttgttccattttctttcttaaaacatacttcttaggagccactgaatttatgataaatagtactgttttaagaaaacaggaagttcaaatttccaatggccaaatattttaattttctgagggtaaaactattcttttaaagatcaaaggagatgggatagatgatacagcacactgcctcagatggaggatacagcatactgcttcttatctcctaagtatttgctcagaaatccaaaatacgtagatttatgattcatgcaactcttccttagaggggaaaatacatccttaagttgtattcccagtaggaacacatcaacc

SEQ ID NO: 395872 - DNA, 425 bp, Homo sapiens
cacaactcagaatgtatacacatagacatgcatgcacacctgaaacataagtttcacaaaacagtatcttttctatgtgtggcatactaatattttctattttgttccattttctttcttaaaacatacttcttaggagccactgaatttatgataaatagtactgttttaagaaaacaggaagttcaaatttccaatggccaaatattttaattttctgagggtaaaactattcttttaaagatcaaaggagatgggatagatgatacagcacactgcctcagatggaggatacagcatactgcttcttatctcytaagtatttgctcagaaatccaaaatacgtagatttatgattcatgcaactcttccttagaggggaaaatacatccttaagttgtattcccagtaggaacacatcaacc

SEQ ID NO: 395873 - DNA, 494 bp, Homo sapiens
cagccttggtgggagtattcacatgttgcaaactggtaaatactacaaatcagggcttttttcttcagagagctatttactagcacactactgcctataatatttgtatttaatattttacaaatgtcaaaattgggtgtttytattgatcaagttttttttttccaaaaacaaatagtagcaagaaagtgtaggtagagtatatttcagcatttgcttcccacatttactttctatgtctctttgcctaccatgaaacaaacttagatattttagttatctaaaagtagttacaataatagaaatcctcatgcctctgttatcgagatttaatatttatcaacatatggccaaccttatttcattgtacttttcaaacatgtttttttccttctccccagctggattattttcaagcaaatctcagacattatatcattttatttgtaaatacatcagtttgtatttctaagagataagctcattttaaccat

SEQ ID NO: 395874 - DNA, 494 bp, Homo sapiens
cagccttggtgggagtattcacatgttgcaaactggtaaatactacaaatcagggcttttttcttcagagagctatttactagcacactactgcctataatatttgtatttaatattttacaaatgtcaaaattgggtgtttctattgatcaagttttttttttccaaaaacaaatagtagcaagaaagtgtaggtagagtatatttcagcatttgcttcccacatttactttctatgtctctttgcctaccrtgaaacaaacttagatattttagttatctaaaagtagttacaataatagaaatcctcatgcctctgttatcgagatttaatatttatcaacatatggccaaccttatttcattgtacttttcaaacatgtttttttccttctccccagctggattattttcaagcaaatctcagacattatatcattttatttgtaaatacatcagtttgtatttctaagagataagctcattttaaccat

SEQ ID NO: 395875 - DNA, 591 bp, Homo sapiens
caaatcaagatccagactatctggatgaaatgtctttaagtattaatttattttaatctgttaattaattttttgatagtcctcccmcttttttatcttttgccacttatttcagtcatttgtcctgtagaatgtcttacattttggattttgctgattggtttccatggtgtcatgtgacatcttcctctttcttctgagtttcttgaaaatgggtagacctagaggtttgaacagatacatgtcctattttttggcaagtatatttcatgagtggggttgtacttctatatcacatcagaaggtgagtaatttctgctgtctttcttttgctaattagtaggttttgttcttctcatcctaattcatcttataaaaattctccatcaacctttcatttaattgtatgggcagtaattgatgatcatttcctagattcattagttgagaaaccgtgacaaaagagtgatggtttaggtctttttttccttctccatgtattggctggaattcttctgtagagcagacattttacgtatcaactatttggttaacaaactgaattacagtttgtacaggaacgacagcata

SEQ ID NO: 395876 - DNA, 463 bp, Homo sapiens
tttttaaaactttttgctatcattatgcactaacagatgttaataagtttgatgtgtttccataaattgcagtcattatttttttgattattggaaattatttcctgtgtctttttgacatgaccccagtatttctgatagtttccttgctttcaggtatattccaggctcttataaatttccagacccagtcctagaaatagacatttttaggaggagactgatttcttacaatgggaagtggctctgcccaccattgaaactgattatgtctaggagaaattctcarccagaacaggccgagccctcacagaacacagatgacacctacagagtactgtcagccagcatctgaaattttattacttagagcaaatgttgccaatttattacaggatctgtcatggtaaagtatacaatataatctttactcataacctaacattttactgataacctcaaa

SEQ ID NO: 395877 - DNA, 590 bp, Homo sapiens
gaaaaaattcttcaatagactatattaaaaaacaaatatgagaaaaattgattatgaaagatgaataaattcgagaggtcttctgtacaacattgtacctatagttacaatactatattgtgcacttaaaatttgttgagtgtcgatctcacattaagtgttcttatcacaacaaaatcaaatgaaaacaatgacaacaaaacccctaagcctctatcaacttgttagaagaaaaaggaagaaytaatttacaagtttattttttaaaaatcttctgactatatgtagagagacaaatattctaaggacaaaaagaattttaagaattttcgaatctggctcagtaagtttgttcttggtagcagtcccggtgtagcaaatctgaaactatttcgtgtgtgttgtaggactgaggaaataaataaatatgttgatattgtggtgtaccaggattcttacttgggagaatggaaatgcaaatatgaaatgtagacccagtaatgctgaaatgaaattgagggtagcagtatagcaacactataccatatggctataatactgctgtgtatgtgtgtgttcattctattatc

SEQ ID NO: 395878 - DNA, 583 bp, Homo sapiens
atcaacaacgttggaaaaaattcttcaatagactatattaaaaaacaaatatgagaaaaattgattatgaaagatgaataaattcgagaggtcttctgtacaacattgtacctatagttacaatactatattgtgcacttaaaatttgttgagtgtcgatctcacattaagtgttcttatcacaacaaaatcaaatgaaaacaatgacaacaaaacccctaagcctctatcaacttgttagaagaaaaaggaagaactaatttacaagtttattttttaaaaatcttctgactatatgtagagagacaaatattctaaggacaaaaagaattttaagaattttcgaatctggctcagtaagtttgttcttggtagcagtcccggtgtagcaaatctgaaactatttcgtgtgtgttgtaggactgaggaaataaataaatatgttgatattgtggtgtaccaggattcttacttgggagaatggaaatgcaaatatgaaatgyagacccagtaatgctgaaatgaaattgagggtagcagtatagcaacactataccatatggctataatactgctgtgtatg

SEQ ID NO: 395879 - DNA, 572 bp, Homo sapiens
atagttgttgccaagggtgagggatggagagacagtgtaagtaagtacaagggtataggacaaaataagtttttagagtgatggaactgtttgaatkgtgactgtggtggtagtttcatgaatctctctctatatatatgtatcaaaactcctagttcaaaaaagttcattttattgtttattaaaaaatgaaaagaaatcatatagcacaatgttagctcacagatgatacttcaataaatgttatgtttataaatgttaaaaacattcaaaatcctgcgcaccactctaaatctgcttaatttgattctctgagaagattctactcttacaaacaaaacaccccccaccccacaactattttccctgacgatactaaagtttaaccatatttgagaactgctagtctggcaaaaagaatatggaatctgaaatcctggagtttgcttccagtttggcttctaactactatataggaaagcagacataatccattctatcatcacttcaaaatatcctagatattttgaagctcgctttgttagtgccaccagcattcgatgaaggtaatg

SEQ ID NO: 395880 - DNA, 572 bp, Homo sapiens
atagttgttgccaagggtgagggatggagagacagtgtaagtaagtacaagggtataggacaaaataagtttttagagtgatggaactgtttgaattgtgactgtggtggyagtttcatgaatctctctctatatatatgtatcaaaactcctagttcaaaaaagttcattttattgtttattaaaaaatgaaaagaaatcatatagcacaatgttagctcacagatgatacttcaataaatgttatgtttataaatgttaaaaacattcaaaatcctgcgcaccactctaaatctgcttaatttgattctctgagaagattctactcttacaaacaaaacaccccccaccccacaactattttccctgacgatactaaagtttaaccatatttgagaactgctagtctggcaaaaagaatatggaatctgaaatcctggagtttgcttccagtttggcttctaactactatataggaaagcagacataatccattctatcatcacttcaaaatatcctagatattttgaagctcgctttgttagtgccaccagcattcgatgaaggtaatg

SEQ ID NO: 395881 - DNA, 572 bp, Homo sapiens
atagttgttgccaagggtgagggatggagagacagtgtaagtaagtacaagggtataggacaaaataagtttttagagtgatggaactgtttgaattgtgactgtggtggtagtttcatgaatctctctctatatatatgtatcaaaactcctagttcaaaaaagttcattttattgtttattaaaaaatgaaaagaaatcatatagcacaatgttagctcacagatgatacttcaataaatgttatgtttataaatgttaaaaacattcaaaatcctgcgcaccactctaaatctgcttaatttgattctctgagaagattctacwcttacaaacaaaacaccccccaccccacaactattttccctgacgatactaaagtttaaccatatttgagaactgctagtctggcaaaaagaatatggaatctgaaatcctggagtttgcttccagtttggcttctaactactatataggaaagcagacataatccattctatcatcacttcaaaatatcctagatattttgaagctcgctttgttagtgccaccagcattcgatgaaggtaatg

SEQ ID NO: 395882 - DNA, 572 bp, Homo sapiens
atagttgttgccaagggtgagggatggagagacagtgtaagtaagtacaagggtataggacaaaataagtttttagagtgatggaactgtttgaattgtgactgtggtggtagtttcatgaatctctctctatatatatgtatcaaaactcctagttcaaaaaagttcattttattgtttattaaaaaatgaaaagaaatcatatagcacaatgttagctcacagatgatacttcaataaatgttatgtttataaatgttaaaaacattcaaaatcctgcgcaccactctaaatctgcttaatttgattctctgagaagattctactcttacaaacaaaacaccccccaccccacaactattttccctgaygatactaaagtttaaccatatttgagaactgctagtctggcaaaaagaatatggaatctgaaatcctggagtttgcttccagtttggcttctaactactatataggaaagcagacataatccattctatcatcacttcaaaatatcctagatattttgaagctcgctttgttagtgccaccagcattcgatgaaggtaatg

SEQ ID NO: 395883 - DNA, 602 bp, Homo sapiens
acataaatactggtgtcaaatataagtactaaatcaggcatcagttccttcctactaaaaacattaaaaaacaattcagcaaaaattcrtactctgcaggatcatagagtgctttgataccctcatctacagcagtgtttctcaacctttttattcattgttgctctcctaagggaccttcttagacatttttttcatacttgtctcccaagaaattttaatactatagatataccatatatctatgtaccatatgtatatctgtgctcatacataaaaagaataagtttttgctccttagaataatttttttgccctttgggagcaatgaatatgtatgatttagatattatacctctatgtttctccaaaacctttcaagtcactcttattgcttacaattgtatgggcttagagctttagatttttagcttaaagtttttcagtgtgttaaaatgcaaatatatagaaaacgttgatgaaccacaacaagccatttgtatcctggtgtaaaatagaagctcagaaagccagtttgataagggaaaggagaagaatgggaggtcactctgtattggggcagggaaggggaagagcggaga

SEQ ID NO: 395884 - DNA, 602 bp, Homo sapiens
acataaatactggtgtcaaatataagtactaaatcaggcatcagttccttcctactaaaaacattaaaaaacaattcagcaaaaattcgtactctgcaggatcatagagtgctttgataccctcatctacagcagtgtttctcaacctttttattcattgttgctctcctaagggaccttcttagacatttttttcatacttgtctcccaagaaattttaatactatagatataccatatatctatgtaccatatgtatatctgtgctcatacataaaaagaataagtttttgctccttagaataatttttttgccctttgggagcaatgaatatgtatgatttagatattatacctctatgtttctccaaaacctttcaagtcactcttattgcttayaattgtatgggcttagagctttagatttttagcttaaagtttttcagtgtgttaaaatgcaaatatatagaaaacgttgatgaaccacaacaagccatttgtatcctggtgtaaaatagaagctcagaaagccagtttgataagggaaaggagaagaatgggaggtcactctgtattggggcagggaaggggaagagcggaga

SEQ ID NO: 395885 - DNA, 558 bp, Homo sapiens
catacttgtctcccaagaaattttaatactatagatataccatatatctatgtaccatatgtatatctgtgctcatacataaaaagaataagtttttgctccttagaataatttttttgccctttgggagcaatgaatatgtatgatttagatattatacctctatgtttctccaaaacctttcaagtcactcttattgcttacaattgtatgggcttagagctttagatttttagcttaaagtttttcagtgtgttaaaatgcaaatatatagaaaacgttgatgaaccacaacaagccatttgtatcctggtgtaaaatagaagctcagaaagccagtttgataagggaaaggagaagaatgggaggtcactctgtattggggcagggraggggaagagcggagagcctctggtgttgaaatgcctgcgtcacaactgtacttcagtccagtcccgttgaacatattaacacaagtatttgaagaaaagatgctagctcctattcatgatgaacaagaaaacttagtcataagccaccttagtggccatcacccta

SEQ ID NO: 395886 - DNA, 625 bp, Homo sapiens
ataaacctttttatgcaacataaaatcatgcagacttttatctgaaaatgaaatgtttgatataactatcaaaagattaaattagatgtattgatcttagaagcacagttactatatatgttattatatatcattgtttatacagaactatatcctaaattatcaatagtttttgtaaggccagggacaacttgcaatgctattattatatattaaaggctaatattgcattcctttgaaaaaaagtatttatctatttaacaagatttaaatgaacatctactctatgcctggtactacaatatgcactgtagataattaatgagcaaaaaatggtcgcaattcctgctctcatggagcttttaatgtagtgaaggagacggattattattaatcaagtaaatgtagaattgtaattgagcaactatgacgtatttttcttgactgtagtaaaaatacattggctttatgaccttttaaaataatatttaatttgtcaaaagttagggggcartgggtggtttagtcttatgaatgaattcattcttataaatataacccaaatttcacatgggaaaccttcacctgatactgatttctattgaattattttaaagtcattatc

SEQ ID NO: 395887 - DNA, 638 bp, Homo sapiens
atgaccttttaaaataatatttaatttgtcaaaagttagggggcagtgggtggtttagtcttatgaatgaattcattcttataaatataacccaaatttcacatgggaaaccttcacctgatactgatttctaytgaattattttaaagtcattatcaatcttgccaatattctagaattttcaggatcctttccttataactccaaaagacaaactgaatttatcagcttcaacaatttagcaaattgtgtttttatctgcttacaaactatgaagtcacacatattatgtgaaatattttaatagattttgaagatttcttcttttccttatgttaccattactgcattttaaggaattttaaacttgattctgactccagctgtctgctagatggagacacaggtcagcacatgggtggtctagtcccagagagggaaaactgaatagagggacagggctcacaggtagggagaaagccttataacccccaaatccccaaatactaactcctcacaatcctcatagttccctaaaatcctatctaacccatgcaaaactcactgtaggaaacactatacagagtaaaaagaaaatcaaggttgtgttaaatttgtatacagttacccttgaatac

SEQ ID NO: 395888 - DNA, 507 bp, Homo sapiens
aaagaagaaatacatttctgttttgcttaagccattgttattttgggttttctgtcagtatagatgaccttaatctaaacaaacacaatgccttctcaagtccactttcctaaccagctgtgtcctctgccatactctctgttattttaagttttaaacagttatcagtggagttaaggttatatgctctttgggaagtcatccaacctcctatccccacggaaatttccctctacattgaactaagatttgctatccacacattcccacatgatgttgagcattaacaataatgtgtatgaaaatttattaatttgaatttaaccaatgttcccacaaccaaattataatttccttaaggttagaaattgtgctttcttagaatacaaagaacactttgtattctcaatgctttgcagtgttagamgctcatgtaattgtcagtagtctaatatatagaaggaactacagtcaagtaccacataatgacatttcagtcaatgactg

SEQ ID NO: 395889 - DNA, 597 bp, Homo sapiens
tcataaaaaaaccttcagctaacatgacaggaagagtttacaaatccatttatataaacatatttccctccctttacttgagcactaaccatcagttgttcatgttgctgtgtcccctttaacagctgtagtgagggacaacctctccataggtgctgattccttaggcctctatattataagcagccccagtgtcactgagctgtggtctttgggctgttcttaaaaacaactgccccatattgtgagcttctggagcactccatgctctctatattctaagtgcttgccacagtgcctacgatgttataaaaattcaataaaattgacattgaaaagagacgttagcctggaaaggggaggatttacattagaaattggcttggggaaaggaaggctgaaggagatctgggttctaccatgtgctcttttatacactatgtccctgagtctcacttccttcacctgtaaagttaggtggtaggacaggcagaagggtaaacaatgtgaatgactggtcrgcagttaggacaatgttttgagtttatgatttagtatacctttccatgatcccaaaagcatggttccttcaacctc

SEQ ID NO: 395890 - DNA, 520 bp, Homo sapiens
cctttcaactaaaaaaattgaaattttgtttagaaatacatatcttagaaaattacctgaamtctacagcacagttcatctgtgggctcctgagatttatttcacaacttttgtgtgtgtgtcaattctctcgaggtaactgactagcctagccaaaatttgtactgtttttttttttttcaaaatatcttcatattttattcacttcagaattagtaggctaatttcagtgtcatgactcatcttccacaaaattatcacagccatattttcaactgaatgcagtatacttccttaccttctactctgatattatttggtgtgactaagagctgtcaagaatacccatgggtgcttgagtgcagtccagcacaaaacaggagccaatcatggaggaaatgatccacacaactgggaaactctccagggggaagacgactattactagatgatctttaaaggaatattgtgaatcttcaacctcttccaaatctgagaatgggctaactgataaacatca

SEQ ID NO: 395891 - DNA, 587 bp, Homo sapiens
tacctttcaactaaaaaaattgaaattttgtttagaaatacatatcttagaaaattacctgaactctacagcacagttcatctgtgggctcctgagatttatttcacaacttttgtgtgtgtgtcaattctctcgaggtaaytgactagcctagccaaaatttgtactgtttttttttttttcaaaatatcttcatattttattcacttcagaattagtaggctaatttcagtgtcatgactcatcttccacaaaattatcacagccatattttcaactgaatgcagtatacttccttaccttctactctgatattatttggtgtgactaagagctgtcaagaatacccatgggtgcttgagtgcagtccagcacaaaacaggagccaatcatggaggaaatgatccacacaactgggaaactctccagggggaagacgactattactagatgatctttaaaggaatattgtgaatcttcaacctcttccaaatctgagaatgggctaactgataaacatcaacttgaggaatctacattttgtaatttttcttctagttccaggtccacagactcatctgctattt

SEQ ID NO: 395892 - DNA, 587 bp, Homo sapiens
tacctttcaactaaaaaaattgaaattttgtttagaaatacatatcttagaaaattacctgaactctacagcacagttcatctgtgggctcctgagatttatttcacaacttttgtgtgtgtgtcaattctctcgaggtaactgactagcctagccaaaatttgtactgtttttttttttttcaaaatatcttcatattttattcacttcaraattagtaggctaatttcagtgtcatgactcatcttccacaaaattatcacagccatattttcaactgaatgcagtatacttccttaccttctactctgatattatttggtgtgactaagagctgtcaagaatacccatgggtgcttgagtgcagtccagcacaaaacaggagccaatcatggaggaaatgatccacacaactgggaaactctccagggggaagacgactattactagatgatctttaaaggaatattgtgaatcttcaacctcttccaaatctgagaatgggctaactgataaacatcaacttgaggaatctacattttgtaatttttcttctagttccaggtccacagactcatctgctattt

SEQ ID NO: 395893 - DNA, 581 bp, Homo sapiens
agctgttcattactgctccaaatccccgtttccctcagtatcccttatagataatcttgatgtgacctccccaaccccatgtcagttgatttgcccaaggctattagattaatgataagtgccctatatttgagtagcactttacgtttcacaaagtgctttcacatgtattactgcactttgatatgccaatttcctgtatttcactcagaagctggttgctaaagttgtctttcatgccactgtgtaaataatgtttctcatttacctctccaaatattagcaactttctgagagacmatctctcaaaagaagtctgctctcattggtgaagattttgcagggattctgactcatcactcttccatggttagtgcctctccctcagtgcttgctggagcttcctccttgccccttctgttcacaggagcaagtacttgcctcctcctgcagcaggccctgtcatttcacctttcaactccagtaccctaaggggaccactgcaaacctggacctcatagaccctggctactcggtgtggtccctgcaccagcagtgtctatctcctggaagtttgttag

SEQ ID NO: 395894 - DNA, 577 bp, Homo sapiens
ttctagaatatataaaggtattatatatttattataactcaagaataaaaaaaccaaaaagtacaattggaaaatgggagagagatttaaacagatatttccccaaggaagatatataaaagkccaaaaagcacattttaaaaatgtttgacctggttagtcattagggaaatacaaatgaaaaccacaatgagatatcactttacacccagatgcccagaattaataagtcaaataataagttttcatgagaacatagagaattggaaccctcatgcagtactactgtgaatgcaaaatgatgcagccacagacacacacaaaagcttgtatgcaattgtttacagcggcattgttcataacagccaaaatgtggaaacaacccaaatgtcaatcaacagacaagtgaataaacaaaatgtggcatatgtatacaaaatgtggtatatgtatacaatggaatagtattcagccataaaaaggaatggtgtgtggatacgtgccacaacatggctaggtcttaaaagccttacgctaaatgaaagaagtcagtcacgaaagaccagacactgtatta

SEQ ID NO: 395895 - DNA, 214 bp, Homo sapiens
aatgctgggaccatctaccattcttaattcagccccgtaaagaaggaaagggacaacaatagtcgaaccacaatgycgaagcttggcatggtcacagacagaagctcacagcaaggaccagtgataatcaaagaccaaaacaacattcccattccctagtttctctgtgtaagaatttggtattttccagagatcttcggggtgtgtgggagcc

SEQ ID NO: 395896 - DNA, 613 bp, Homo sapiens
actcaacattgatatactaggtttggaaagcttagtatgactcttatgttaattataatattctcaatgctgggaccatctaccattcttaattcagccccgtaaagaaggaaagggacaacaatagtcgaaccacaatgccgaagcttggcatggtcacagacagaagctcacagcaaggaccagtgataatcaaagaccaaaacaacattcccattccctagtttctctgtgtaagaatttggtattttccagagatcttcggggtgtgtgggagcctccagttaattaggattaagtgtccccaccccttgaagtctgatttaattttgcttacgaaaataagcatatgtgccttttttgttttgkacaactgattttgtgaagtaaaattcatactcggtccactacctatgtccatctgactatgactgttttgtgttcccacccaaacctcctcttgaattgtattccccaggtgttaagggaggaacctgatggaaagtgattggattatgcgggctgtctccccactgctgttctcatgatagtgagtgaactctcatgagatctgatggttttataaatggtagtttttcctgtgctgtcatgc

SEQ ID NO: 395897 - DNA, 517 bp, Homo sapiens
tcatcttaaataggttagtaggaaagccagaaaacaatggatgtttaccctggatgtcctttgaaacctggggtgggctcatgggtggaggcaggaaggggagacttactagactaggttgtccatgggcaacatatagaaacttaggagactgaaaatggtggcatggtatggttaggagggcgagacatgcagaagttcctggcagttcatgataagctggcttgtgaggaggatttctgaggaagatcaggtagattatagaaaaaaaaaatatatatacacacacacacacacacacagagttttaaagtgtgagtagatttgtaatcttcacattatcttcyccttctgctgtctgcttctatgagtgattacctttaaaatgaaaatagaaatttggcttttgggttttttttttttaatagatacagggtctcactatgttgaccaggctgttctcgaactcctagcctcttctctaggtctaccaaagtgctgtgattacaggcatgag

SEQ ID NO: 395898 - DNA, 606 bp, Homo sapiens
caaatggcacattcttacatgcaacaaccaatagatcttgcaagcataacgttgaagaaaagaactaaaataaaggagtacatgctgtatgataccatttatataaagcgtaaaaccaggcaaagtaatttattctgttaggatagtggctttccttatagaaaggatgggatgaggtggagggtgagaggactaaaacagggcattcagagtgtcttctaggatgccagaaatgttctttccttgatctggggggccagctacacatgtatgctatatttgtgtacattcattcaactrcacacttatgtgcacttttctgtatgttataaatgagcagaatttttaaaaaatgcagtcaatgctattaattctaataaaatgttttgacaaatataggcaaaatttcccaataagaatatcttcaaatactgtcaagtttgtataattttaggatgacaatgatgctttttgagttcttttttttctactgccagcttgattttgctcaaaatgatttgtgagcaaataaaatttctctttaatgctgatgcttccttgctgaatttaggaagtgaataggggagactaacacagactctagtg

SEQ ID NO: 395899 - DNA, 606 bp, Homo sapiens
caaatggcacattcttacatgcaacaaccaatagatcttgcaagcataacgttgaagaaaagaactaaaataaaggagtacatgctgtatgataccatttatataaagcgtaaaaccaggcaaagtaatttattctgttaggatagtggctttccttatagaaaggatgggatgaggtggagggtgagaggactaaaacagggcattcagagtgtcttctaggatgccagaaatgttctttccttgatctggggggccagctacacatgtatgctatatttgtgtacattcattcaactgcacacttatgtgcacttttctgtatgttataaatgagcagaatttttaaaaaatgcagtcaatgctattaattctaataaaatgttttgacaaatataggcaaaatttcccaataagaatatcttcaaatactgtcaagtttgtatarttttaggatgacaatgatgctttttgagttcttttttttctactgccagcttgattttgctcaaaatgatttgtgagcaaataaaatttctctttaatgctgatgcttccttgctgaatttaggaagtgaataggggagactaacacagactctagtg

SEQ ID NO: 395900 - DNA, 590 bp, Homo sapiens
tgtgtacattcattcaactgcacacttatgtgcacttttctgtatgttataaatgagcagaatttttaaaaaatgcagtcaatgctattaattctaataaaatgttttgacaaatataggcaaaatttcccaataagaatatcttcaaatactgtcaagtttgtataattttaggatgacaatgatgctttttgagttcttttttttctactgccagcttgattttgctcaaaatgatttgtgagcaaataaaatttctctttaatgctgatgcttccttgctgaatttaggaagtgaataggggagactaacacagactctagtgatgccaaagagaaaaatgtatatctagaactctgagtctataaaatctaacaattggcagttacgtgcctgaatttcccttagggaagctcagggttctccctaaagagctccgacagcagccrccatggcagcagcctggcagaatgttacatttaaaaataaatccttttgagcactgcactgaagttgataagcaataatgaagtgctgcatcaaaaaacatcaaagaagccgcatcaggagggatttaaagccacaatgt

SEQ ID NO: 395901 - DNA, 403 bp, Homo sapiens
tatatacatgttatatatgtatgttatatacatgtatataacatatacatgctatatatgtatatatgtcatatacatgtttttaagtatatatacatattttagattcatagggtacatgtataggtttatataatgggtatattgtatgatgctgaggtttgggctgctaatgatcctgtygcccaagtaatgaacatagtacctgataggttttcaacccttgtccccctcactccctccctgcttttggaatctccagtataatgcctcattttaatacttcttttaatattccctatggggaaaaaaagagatgaacaaagctcattacaactatgctttaaccatactgttttgatcaatataactaatttaaatagcctcatggtaggaggcacac

SEQ ID NO: 395902 - DNA, 444 bp, Homo sapiens
tcagtgcacccagctgctgctataaattctagctctagggcacaaaatgttttttctcctagtttcagagaatttcaattcctgctttcaatgtctaggctgtggtatttaagaaacaaaaggagggaaaagaaaagaatagtggtttatacaaattatcctttttaaaaggatatttcccccatcccaagcctgttyaatttgagaaaacagagttaatatttgctctgctagtgctttctactcccactttggcagagaaaaaaggtttctttagcttaaatattaaccaaacacttcatagctattcaaaagtaggtgcccatgttaaaaataacaaaaaaaagtaataaaatcccagaaagcacaacttgggaataaatagaaacagtaaaatctgctctaaaccctttttgcatatgtatcccaaggccaccagaatta

SEQ ID NO: 395903 - DNA, 444 bp, Homo sapiens
tcagtgcacccagctgctgctataaattctagctctagggcacaaaatgttttttctcctagtttcagagaatttcaattcctgctttcaatgtctaggctgtggtatttaagaaacaaaaggagggaaaagaaaagaatagtggtttatacaaattatcctttttaaaaggatatttcccccatcccaagcctgtttaatttgagaaaacagagttaatatttgctctgctagtgctttctactcccactttggcagagaaaaaaggtttctttagcttaaatattaaccaaacacttcatagctattcaaaagtaggtgcccatgttaaaaataacaawaaaaagtaataaaatcccagaaagcacaacttgggaataaatagaaacagtaaaatctgctctaaaccctttttgcatatgtatcccaaggccaccagaatta

SEQ ID NO: 395904 - DNA, 567 bp, Homo sapiens
gtaaaattggagctacaatgggaaaaaatggtgagggatgatctggagaaggaagaaagagcagtgagtttggcttagttttgcaaagtggattagaattagtacgaatttcttgttagaaatttcctaatatcttactcccaaaatgattttcctccctttcgcctcttcactgtatgacagaaatctgtataaaatgaagtagagtagagcaaaaactgcatgagcaggaacaacytagtgaagcagggcatctaagttcttcaaacactcctgtgggcgactggaagacaatgtgagctcacccttttcctgagaaacatggagtgttctgtgacccaaggaatgctggtactctaaaaggtctctagtgggtatttaacagattgggccaatagttggcctggcttcttgaaactctgccattctcctgacatcctagagcttcagtcaggtaggcagcttctggggcactagcgatgtgcaaaacatctccaatgaacacccaagtattttctgcacatgaaggccctcatcataaatgactgccccagccctgtgcatcat

SEQ ID NO: 395905 - DNA, 567 bp, Homo sapiens
gtaaaattggagctacaatgggaaaaaatggtgagggatgatctggagaaggaagaaagagcagtgagtttggcttagttttgcaaagtggattagaattagtacgaatttcttgttagaaatttcctaatatcttactcccaaaatgattttcctccctttcgcctcttcactgtatgacagaaatctgtataaaatgaagtagagtagagcaaaaactgcatgagcaggaacaacctagtgaagcagggcatctaagttcttcaaacactcctgtgggcgactggaagacaatgtgagctcacccttttcctgagaaacatggagtgttctgtgacccaaggaatgctggtactctaaaaggtctmtagtgggtatttaacagattgggccaatagttggcctggcttcttgaaactctgccattctcctgacatcctagagcttcagtcaggtaggcagcttctggggcactagcgatgtgcaaaacatctccaatgaacacccaagtattttctgcacatgaaggccctcatcataaatgactgccccagccctgtgcatcat

SEQ ID NO: 395906 - DNA, 443 bp, Homo sapiens
attcaatgctgcactgagctcaccgtgttgttttttaatctcatacatttagttctctgttggagaaacgcataacactgggtgatcttacctttggggttgtaatacagaatcatgatgagatgatggacattttatgatgaattctcttgcttctaggrgtttaatgctgagttagaatgttaatttaactcattctttttgtttaataagctcaaaatcccagctgagcccaaatgggagtgattttatcttatattcaacatcagcttgcagaactgaagcatgaaaggtttgattaatattatgatcagctgactattgattatctagctattttccttctgtcttctaattggtccaaattggctggactgctgctctttgaaatatgttcttctttgcatttcaagatgatgctattggattttcaccaagtcata

SEQ ID NO: 395907 - DNA, 544 bp, Homo sapiens
aaaacaaacaaacatattttcactgttacttttgcttccaccatcactgagcaagacattatggtaaattgaaaagtggggtcactggtcctaaaggtgcttttctatttagagaacaaaaataatatatccaaaacaattagagactaatacaaagacacataaaatttaatgcaaattagtggcacagatatagaagtggtacaggacagatcataacatccacagggcaggaagctttgtttcattcactaatgtatcctaagcaccaggaacaatgccttgcacatattgtcagctcaaagccactgcaatcaaaggagagacaaaagtgggctagaagagctggagaaagtttcactgtgaaggcaggacttgagcaagaccttaaaatttgtgattctttgattcctccttagcttccacctacatccagactattggcaagtcstgttgtctccaattccaacataggctgcaaatcttcctgcttccatccatgtcactgtcacatactagtccgagacaccaacatttgtctgga

SEQ ID NO: 395908 - DNA, 502 bp, Homo sapiens
gttactaaaatataatctccacagggataaaaactatattcccagtttctagagcagggccaggcctatggtaggtactcaatacatattttgaatgaatgaatgaccatacttttccagcattttcaaatgtgaaaatacaattttagcatcaaatagtttcaaggacttctcacatagtattagtgttattttttccctcagtattcactgatcatattcaaagctgttatgaagttagcaacatttaaagtatggtggtatttcattatcacagcagggctgacatacatttggcaaaaatatgttgggtgtgtgtgagaaatggtatttattcaatctgtcaaactgaaatctattaaacttagtacacatttccatttacaggtatgtgaggatcctcagcccacagatgtcagtgaagccattaattgatactcagatttgrtataagaggacagaaggaatggcagaggtcttagctagagctttcttaagacca

SEQ ID NO: 395909 - DNA, 545 bp, Homo sapiens
ggaagggctttacctaaggagagaagctccttgcttcccttgctctctcactccttccttcttgaacttcttaaagccctgmcttctaggatatttctctctccaggccctcctccagtctctctaatcaaattgctttctctttttagaactgcccttctttcgtttctgtgtatgttgatgctgctcaggtaccaacatcggtcttctgctggtggccctctaccctctctggatggtctgcttgcctctcagggtattatctctctgccaatgactgctactcagagctcaggcctctgccccaggcctcagctctgtatatgcagatacctcctgggtattgccaactggatgtcccagaaccacgctgaaagccaaatttatttgggctgggagaattcgctctgcgatatgacaataaaattactcatcctgtgataataaaacatatatgtagaagaagaagagagtcagtgccaaaaagtgagaaaaaaataaaaacaagatttcgtacaaatcttcactataccagaattatatat

SEQ ID NO: 395910 - DNA, 545 bp, Homo sapiens
ggaagggctttacctaaggagagaagctccttgcttcccttgctctctcactccttccttcttgaacttcttaaagccctgccttctaggatatttctctctccaggccctcctccagtctctctaatcaaattgctttctctttttagaactgcccttctttcgtttctgtgtatgttgatgctgctcaggtaccaacatcggtcttctgctggtggccctctaccctctctggatggtctscttgcctctcagggtattatctctctgccaatgactgctactcagagctcaggcctctgccccaggcctcagctctgtatatgcagatacctcctgggtattgccaactggatgtcccagaaccacgctgaaagccaaatttatttgggctgggagaattcgctctgcgatatgacaataaaattactcatcctgtgataataaaacatatatgtagaagaagaagagagtcagtgccaaaaagtgagaaaaaaataaaaacaagatttcgtacaaatcttcactataccagaattatatat

SEQ ID NO: 395911 - DNA, 545 bp, Homo sapiens
ggaagggctttacctaaggagagaagctccttgcttcccttgctctctcactccttccttcttgaacttcttaaagccctgccttctaggatatttctctctccaggccctcctccagtctctctaatcaaattgctttctctttttagaactgcccttctttcgtttctgtgtatgttgatgctgctcaggtaccaacatcggtcttctgctggtggccctctaccctctctggatggtctgcttgcctctcagggtattatctctctgccratgactgctactcagagctcaggcctctgccccaggcctcagctctgtatatgcagatacctcctgggtattgccaactggatgtcccagaaccacgctgaaagccaaatttatttgggctgggagaattcgctctgcgatatgacaataaaattactcatcctgtgataataaaacatatatgtagaagaagaagagagtcagtgccaaaaagtgagaaaaaaataaaaacaagatttcgtacaaatcttcactataccagaattatatat

SEQ ID NO: 395912 - DNA, 645 bp, Homo sapiens
ccagttttaatctctttggatccatctcccatgccgctgccagatcaacgtatctaaaaatcaaaagtgaaccacattactcctctacttagaatcctttttttccatttatccatttgacacatatgtcctgagggttagggcctatgagccacatctatgcgtgatgttgggaatgtggcctaaacaagacagttggggtacccatgcccatggagcttcaccttcatcatgtcatttacactaacatggcctacatggtcataaatctgactatttctatgcatttttaagagaggaagtatctttttgactcactaagsttggatgaagtattccttcactttgttcctgtaatacctatattccacatcaccgtagttactgcattatactgtgagcatctttctataagtgcacaatcatatacccagttctggacaaatatttaatgactaacaaatttgaacatgattcataaattctatatagtctataatgacttcagagaaaactggtggcaagagataccgataatacagagatgtaattcagggaagagaccaggaagcaggagctgtttggatctcagctctaagccatatccacatgggcttataaaattcaggcagttcaacaaacaca

SEQ ID NO: 395913 - DNA, 571 bp, Homo sapiens
acactacaagttaagccatatcttaaaactgtaacaattatacacaaaagcaaactaatgtagtaggcacattcatcttgccctctcaaatcaagatggttagaggatgtgtgtggtgcctatgtgtatacagtcactctgagactatgaggcatagaatgaaaataattttgttataatctacctcactcatatacacattcatagttgccttgcccagatactgagaaccattttggatcaacacaagtcatttgcattattaattgccaatcatgatgatgctcagaattgaatcacttccatccatacctagtgggaaacagttcttttgccttttaaggtcattagattcygttcctaaagcttgaaagtcacagtggcccttcactgtttgttcagctgatcacgaatcagaggtaatgacatttacattgctaataaactttgcatcaagtgtgttaactcttggtttggtatagtttcttctacctgagaaaagcttatttgacctcctctatgaaatctgaacattctcttacttatatatccataaacacacactcatatt

SEQ ID NO: 395914 - DNA, 555 bp, Homo sapiens
agagtgctctacaaacatcattttatcacattttaatttcttaacatyttataactcccagggtattctgtgggtccaaacactgccattaaaccagagatctcattagaaaaagagagtttaggaagccactaacgtaatcttccaccatagaaaactttaggcaggttgcccagaatggcatagggaaaatactagaaaaaacactcactctttgtgggtatcataataaatgaaagaaagaccagtgttatggactgagtatttatgtcccccttacccccataattcatattttaaagtcctaaccaccaacgtgactgtatttgtagacaggccaggaggccaggtaagaacgtgataaaggtcaaatgaggtaataaaggtgggccctaatctaatagggctagttcccttataagtagaaagagatatcagagcactctcttaacattggagcacacagtgagaagggggcatctgcaagccaggaaaagagccctcaccagaaactgaattgcctgaagacttgttcttggacttctcagtcttcag

SEQ ID NO: 395915 - DNA, 462 bp, Homo sapiens
taataccatttctgaattgttaggtgagacagaaacaagcctctgtcttatgaaaaccactttattattgtgctcttgttatagtaaactatcctgtattttcattaatagaggactgtacatatgccttgtaaagtctcactactccaaktttgctagcaaatttaggcttagagagattttaaaacttcctcataaccacttcggtagtaagtggtgaggctggtttttaaatcaagtacttttctcattagatattttttacactaatagagagaaaagactaatttatagaaaattagaactgtgcagttttcaacccctgatctattaatctcacaggattataaaaagactttaatttccttagattagcattagtgctacagacccttatttttctaataaagtgtctagcagttggttaccagctcctccaggacttatatttcataaaatgtt

SEQ ID NO: 395916 - DNA, 462 bp, Homo sapiens
taataccatttctgaattgttaggtgagacagaaacaagcctctgtcttatgaaaaccactttattattgtgctcttgttatagtaaactatcctgtattttcattaatagaggactgtacatatgccttgtaaagtctcactactccaagtttgctagcaaatttaggcttagagagattttaaaacttcctcataaccacttcggtagtaagtggtgaggctggtttttaaatcaagtacttttctcattagatattttttacactaatagagagaaaagactaatttatagaaaaytagaactgtgcagttttcaacccctgatctattaatctcacaggattataaaaagactttaatttccttagattagcattagtgctacagacccttatttttctaataaagtgtctagcagttggttaccagctcctccaggacttatatttcataaaatgtt

SEQ ID NO: 395917 - DNA, 462 bp, Homo sapiens
taataccatttctgaattgttaggtgagacagaaacaagcctctgtcttatgaaaaccactttattattgtgctcttgttatagtaaactatcctgtattttcattaatagaggactgtacatatgccttgtaaagtctcactactccaagtttgctagcaaatttaggcttagagagattttaaaacttcctcataaccacttcggtagtaagtggtgaggctggtttttaaatcaagtacttttctcattagatattttttacactaatagagagaaaagactaatttatagaaaattagaactgtgcagttttcaacccctgatctattaatctcacargattataaaaagactttaatttccttagattagcattagtgctacagacccttatttttctaataaagtgtctagcagttggttaccagctcctccaggacttatatttcataaaatgtt

SEQ ID NO: 395918 - DNA, 510 bp, Homo sapiens
taagaaaccaatattttttgttgttgttgttttttgagatggagtttcgctgttattgcccaggctggagtgcartcatgcagtctcagttcactgcaacctctgcctcctgggttcaagcgattctcctgcctcagcctgctgattatctgggattacaggcatgagccatctcgcctggctaattttgcatttttagtagagacgggggtttcaccatgttggtcaggctggtctcaaactcctgacctcaggtgatccacctggaaggttctttcaaagagaggaggcatgaccttcttcaccctgtcctatagtctgctgcttgccacatagacatgacaggcattttgagtaccacggtcacactttaggcatagtaaaatgttgaggctaaaaagggctgggatttcttaatgactctgaggagtcatcaaagcaatcctgtatttcagacctccagacttcttttatgtgggagaaaaataaactatcaatttaagccattat

SEQ ID NO: 395919 - DNA, 529 bp, Homo sapiens
gtaagtttcctgaggcttcccccaccatgtggaactgagtcaattaaaactctttcctttataattatccagtctcaggtagtatctttatagcagtatgaaaatgaactaatacactgacctacatttacttataatgactatagtaccaacagtcctagaaagttaaggtttaatgggatgtttgggattttctaattattcactacctgttacaaagataaagtatcttagtcccagagtggttcatgrttcatttacacacacacacacacacacacaattcaaacccctagaaagtttctttgtaataatagaaaattattttatgttatttttaaacttcttttaattgtatatttcctattattttcatatgattacaaacgttccctctgttctttctatattatctgtatagtgtggtttcaaaactttttttttcagctttccagtagttcttagattaaggaaaaatgggaatatttatattagaacatgtcttactttgaatagaatatatacctta

SEQ ID NO: 395920 - DNA, 529 bp, Homo sapiens
gtaagtttcctgaggcttcccccaccatgtggaactgagtcaattaaaactctttcctttataattatccagtctcaggtagtatctttatagcagtatgaaaatgaactaatacactgacctacatttacttataatgactatagtaccaacagtcctagaaagttaaggtttaatgggatgtttgggattttctaattattcactacctgttacaaagataaagtatcttagtcccagagtggttcatgattcatttacacacacacacacacacacacaattcaaacccctagaaagtttctttgtaataatagaaaattattttatgttatttttaaacttcttttaattgtatatttcctattattttcatatgattacaarcgttccctctgttctttctatattatctgtatagtgtggtttcaaaactttttttttcagctttccagtagttcttagattaaggaaaaatgggaatatttatattagaacatgtcttactttgaatagaatatatacctta

SEQ ID NO: 395921 - DNA, 502 bp, Homo sapiens
tcccatatcttactgagcccctaccagcagagtctttaatgtccatatttctactaagtctgttcaaagcaatcaaggatttttctatcatgctcctctaaattgttccagcctctatccactttctgatttcttacatttttagctacttgttatggcagcacgccacttcaggtacctaatttatatcttcagaaaagttctacttcccttggtggttatatttttaacagccacaaatctgggttttatatttttatggtgagtttactgcatcattttgtcttaaaaggtacagcaacactttaatacagtttagtgstagccaaagtctaggatgtatatattactttgactgttttttacatataaaatgtactatgttgacacctaagtttggatacaggcataacttaatatgtcaatgactgcatatacaaagttaatctgtatccttcacagtcagtagctttactcttgaaattatgatttcattagtctt

SEQ ID NO: 395922 - DNA, 560 bp, Homo sapiens
aaacacccttcccccatcctattgggctacgaggcaaagctgctggctctgggctgctctgtccaggtggatgcttcatggtacatggattgcgttaaccattttgaatatgccattatgactatgtggaaraaagaagtaatcatgaactgcatccactaacctgtattgtgatctctcatttgtttattggttcattagtaaacctaaatggaaacaactctaaatgatgtctgattcttcaattgtgccaatcttccagcccagaacagatttaatggtctggcttagcctaaggccaaccatcattgcttagaaaatgtctgcaaacataagggttatataatgacagatataatctgaattgcaacaatgggctcaataaagaaacgccagcatgttgagaactaaagacatcacttaaaaacaattgacatttctttaaaatatcattttgatatgcaattaaagaaggaggtttagcatcgtgactaaaaaaactacaaatgtaagttggatgctgacaagtttgacaataaagtgaattacttctgcaggca

SEQ ID NO: 395923 - DNA, 612 bp, Homo sapiens
aatctaataatattctagtcaaaggagagttgcatagcttcctaaggtagctactccaaatgagaaaatatttctctgaatatgtaagccaaggtatccatttctatatcttytgggtcaaataatttatctctcaaatctctgcacagggagactccttcatactgaaagaataattaatgtaatattttatttttggtcctacaggggcattgccatttaagttgcttaacagagctaaagtaatagtcttgcaattattattttgtatgattccatttgtcagtcttaactacttcattgtgagctccttgaagacaagaaccaaccccgtgttatttacttttcttcctccattacagagtgcctaaagaaagttcccagaattatattactctagtagaaagacccacattacatttagaaaaaaacatttccaactctgactttcttacataatagcagcatttagactctcactgaaggaaatggtgtagtacagatgagtttctcaaaagttttataaatatatgtggatagaaaagaggacaaagtgaaggtgacattataaacacataggccatttcattcttggatgaatgaatgcatata

SEQ ID NO: 395924 - DNA, 577 bp, Homo sapiens
cctagctttcagcctatcttggctttcaactagtctttctcactaagctcaataaattttagcttttgactgcaagtgagaaatgtacaactcttcccttcacttgaacacttagtggccattgtagggttatttattggcttcattttaatttttttgtgttttacagaatagagaggctgagcgggagagagataggtgaatggccagccagtaaagcagtcaaaacacacaacatatttatcrattaagtttgcagtcttatatgggcatagtttgtgatgcccccaaacaattacaataatagcataaaggatccctaattgtgacgcagagacatgaagtggcacatgctgttggaaaacagtgctgatatatttgctcaaggctggattgtcatgaattttcgatttgtaaatatgtaaaatctgcaaagcaaaataaagaaaataataaagtagttattctgatagttgaccagtgctatcacataataagttctggtatactgctatgccaccttgtgttataagagacaactaaagcctagctaatggctttgcttgaaacttttttt

SEQ ID NO: 395925 - DNA, 577 bp, Homo sapiens
cctagctttcagcctatcttggctttcaactagtctttctcactaagctcaataaattttagcttttgactgcaagtgagaaatgtacaactcttcccttcacttgaacacttagtggccattgtagggttatttattggcttcattttaatttttttgtgttttacagaatagagaggctgagcgggagagagataggtgaatggccagccagtaaagcagtcaaaacacacaacatatttatcgattaagtttgcagtcttatatgggcatagtttgtgatgcccccaaacaattacaataatagcataaaggatccctaattgtgacgcagagacatgaagtggcacrtgctgttggaaaacagtgctgatatatttgctcaaggctggattgtcatgaattttcgatttgtaaatatgtaaaatctgcaaagcaaaataaagaaaataataaagtagttattctgatagttgaccagtgctatcacataataagttctggtatactgctatgccaccttgtgttataagagacaactaaagcctagctaatggctttgcttgaaacttttttt

SEQ ID NO: 395926 - DNA, 577 bp, Homo sapiens
cctagctttcagcctatcttggctttcaactagtctttctcactaagctcaataaattttagcttttgactgcaagtgagaaatgtacaactcttcccttcacttgaacacttagtggccattgtagggttatttattggcttcattttaatttttttgtgttttacagaatagagaggctgagcgggagagagataggtgaatggccagccagtaaagcagtcaaaacacacaacatatttatcgattaagtttgcagtcttatatgggcatagtttgtgatgcccccaaacaattacaataatagcataaaggatccctaattgtgacgcagagacatgaagtggcacatgctgttggaaaacagtgctgatatatttgctcaaggctggattgtcatgaattttygatttgtaaatatgtaaaatctgcaaagcaaaataaagaaaataataaagtagttattctgatagttgaccagtgctatcacataataagttctggtatactgctatgccaccttgtgttataagagacaactaaagcctagctaatggctttgcttgaaacttttttt

SEQ ID NO: 395927 - DNA, 577 bp, Homo sapiens
cctagctttcagcctatcttggctttcaactagtctttctcactaagctcaataaattttagcttttgactgcaagtgagaaatgtacaactcttcccttcacttgaacacttagtggccattgtagggttatttattggcttcattttaatttttttgtgttttacagaatagagaggctgagcgggagagagataggtgaatggccagccagtaaagcagtcaaaacacacaacatatttatcgattaagtttgcagtcttatatgggcatagtttgtgatgcccccaaacaattacaataatagcataaaggatccctaattgtgacgcagagacatgaagtggcacatgctgttggaaaacagtgctgatatatttgctcaaggctggattgtcatgaattttcgatttgtaaatatgtaaaatctgcaaagcaaaataaagaaaataataaagtagttattctgatagttgaccagtgctatcacataataagttctggtatactgytatgccaccttgtgttataagagacaactaaagcctagctaatggctttgcttgaaacttttttt

SEQ ID NO: 395928 - DNA, 591 bp, Homo sapiens
tttatcactatattaactttttattattttgtataaatatttcagtaaagtttccagagtgtctgaagtttttttctattgttgttacagacatcttagtttttacattttaaatttatgagtgatgattatttttctaaagctattgctcacaaagaatgcaaattcacaaatagtattttgacaacagagctggagtaatatcataaaattaatgacaaccatgttttatataattacataaattctatatgacaactttgacttcatgttaaggaataattgcatagaayccgggcaaaattttaaaatgtaataaaataaaatttattaacaataaaagttattaataataaaagcattgcctaaaacaaatagatcaaccaggtaaaaagttcaaaaatatttgtctatgttaagctatagcatttcatagcatacaatggaaaattaaagaaataggaaaaagttaattgaatagattttcaaaaatgaaaacaatagtcattaggataaagtttaaatcatataaaaagaagactgaataaaatagatttaattttatggttgattaagatgttagtgcaagtt

SEQ ID NO: 395929 - DNA, 620 bp, Homo sapiens
  misc_feature (1)...(620): n = A,T,C or G
actactgagttaggttgcagtttattacaaaacaaactgaagacttaattcaggmatttgtttttgcaaaaagtagctgactctcagccaataacagcagccaagtggccaactacctgtttctgtacctcactttcttttttgtatattattttgctttttctgttcanacaaattctttagctatatgggagcctggagtagctctgaacctattctagttctgggcccacggaattcacaagctgttgtttgctcaattaaatactattaagtttaatttgtataatgtttcctttaaaaagggacaatataattgaaaaataaattgagcataataaggaagtgttcatttttaaaaatctgatctatttaaggcactaaaaattaagctagacaggaatatttatttttcaatattaaaaaataaaactccgacacattttaatgttttctaacatatgttttattcaaaaacctcacaaacctttagcatacttatattaaccagtcattggttctaaaggaaaggaaacaactggccattataattaattagaatatgttaatacatataatttttaccttctataattattttttaagaaatcacacatatt

SEQ ID NO: 395930 - DNA, 620 bp, Homo sapiens
  misc_feature (1)...(620): n = A,T,C or G
actactgagttaggttgcagtttattacaaaacaaactgaagacttaattcaggaatttgtttttgcaaaaagtagctgactctcagccaataacagcagccaagtggccaactacctgtttctgtacctcactttcttttttgtatattattttgctttttctgttcanacaaattctttagctatatgggagcctggagtagctctgaacctattctagttctgggcccacggaattcacaagctgttgtttgctcaattaaatrctattaagtttaatttgtataatgtttcctttaaaaagggacaatataattgaaaaataaattgagcataataaggaagtgttcatttttaaaaatctgatctatttaaggcactaaaaattaagctagacaggaatatttatttttcaatattaaaaaataaaactccgacacattttaatgttttctaacatatgttttattcaaaaacctcacaaacctttagcatacttatattaaccagtcattggttctaaaggaaaggaaacaactggccattataattaattagaatatgttaatacatataatttttaccttctataattattttttaagaaatcacacatatt

SEQ ID NO: 395931 - DNA, 505 bp, Homo sapiens
tcagctgacagaagagcccttaggctttgaatgaatatcagtggcagccaggcaatacatgtgattggcctggggtagtggtggcacagggagagatttctttctttctggaarggggagggaagagagataaagactttgtctggtggctcaggtgcccactcagccatagtagaacagagcaccaggtagattgataagttttgtgatactaggttctgactttcaggcagcatatctagacctgccccaaaccatgggaaactcactgctctgaagggaaggacacaaacgtggctggcttcaacacctgctgattgtatagccctagagccttgggtagaaatatggcaggtagacagtggttaccactagccttggatgagacccagtgctgtgctggtttcaggtctgattcagcaaagtcccagtggtggtggcaactggggtgcttgtgtcacccctccccaatctccgggtagttcagcacagagagagagattct

SEQ ID NO: 395932 - DNA, 460 bp, Homo sapiens
tagttgagccctcatggtaactggttttaacttcaaatgacttaaagagtcactgaagtgattaaaaaaaacagtttttaatctcctatgccaccaatcttttaccctcagtgrcagtggtgcactgtggagtgcctgtgggcactgggggagggagaacacagcaactgtgaggcattaaactaagtactgtcctgttagagtagaaataaaaactgaaccaaacttgactgatgccagcccacatagggagcattttaacaagctctagccagagggaaatcttcaatcccagaggtcagaacttgagtgcccatataccttgccactgagggccaaggtgctgtcagtctgtaagtaaacttgaaaggtagccttggccataaggactacaactcttaggtgagccctggggcttaagtacacccagagacattgcactggggagggcatgagacat

SEQ ID NO: 395933 - DNA, 506 bp, Homo sapiens
attaagaagaaccaagcagaaattctggagttgaaaaatgcaataggcatactaagaatgcatcaggactctttaataacagaattgatcaagcagaagaaatcattattgagcttgaaaagaagctatttggaaatacaatcagaggacataaaagaaaaaagaatcataaacaatgaagcaaacctacaggatctagaaaattgcctcaaatctaagagttaactggctttaaatagaaggtagaaaaagatagtagttgaaatgttattgaaagaaataataacaaagaacttctcaaacctaaataaagatrttaatatctaagtacaagaaggctatagaacaacaagcagatttaacccagagaagactacctcgagcatttaataatcaaacttacaaaagtcaaggataaatagcagaaggtcctaatagagctccaatacatctggcagcagacttttcagtggaaacgttattaggccaggagagagtggcatgac

SEQ ID NO: 395934 - DNA, 550 bp, Homo sapiens
agaacatcctaagtcagaaacytttggcatttaaatgctgaatttagtggtgcatagatgtgccatctagattttttaaatggtaattacataccagtcacattaactaaattctaatgtatttaaattataaatctcatgtttcaatgttaaaaaattgtaaatattaaacttttaataccacaggtattcaatgaaatcattacattcccaataaattgttttctcaaattgtcttacagttttctcctttgtcagcactatgaaagaattcctgatttcataatgttcattgaaaatagaaatgattttgactatgttacttctccttccagaattttttacaaagtcatatttgtcttttgtcaggtatattgatatataattgtttgtatacatcaggtgaggggcaacattaccataaaagcagaaataaatcacaagctgccttcttcaaagatgcttttgtcaaactaattttgctacagtagaaagcaaattcatgcacgcatatgtgttaagggatttttcacagtatgatagcataata

SEQ ID NO: 395935 - DNA, 569 bp, Homo sapiens
aaaattttctctttgcctttggtttttagactttacaattatatatgtatatttttaaaattgtttttgttttgtatttrttctacttgaagatcaaagattctcttgaatctgtggctagatatcatcagttttaaaaatatctcaatcattatcatctgaaatatttgttcttctctacttattcttcttttccttgggcaccaattatgcaccgtttttcctgttcagcatacttatatgtcttattcttctaactttctattattttatatatttgcttcagtcaggcaattttcttctgacccatattacaggttagcaattactccttcagcttcctcttatccactattaaaccctttatttccatttaattctttttcatttttttagttatgtgccattttttatcctattattaataacacctttttaaaagtcaaatgtgtgattactatttgatctcttataggtctgttttcattgtttcttttattttttctattaatatctcatcagccctcgcttccttgtatgcttcattattttttaaattgcattgtaga

SEQ ID NO: 395936 - DNA, 600 bp, Homo sapiens
attcaatctggctgcagaaatttgcataagtaatgaggacccaagtgttaatcaccaagccaatgggaaaaatgtctccagggcatttcagagatcttcatggcagccccttttatcacagtcccagaggcctaggatagaaaaatggtttcttggggcaggccagggccctgctgctgtgttaagcctcacgacacagcgcttggcatcccaaccactttagctccatctgtggctaaaaggggccacgttacagctcagatccttacatcagagggtgcaagccccaagccttggtgaytcccaaattttgttgggtctgtgtgtgagcagaagacacgaattgaggtttggggacctccacctggattgaggatgtatggaaatacctggctgtccaggcagaaatctgctgcaggggcagaaccctaatggaaaatctctactagggcaatgcagaggaaaaatgtgggatcagagccccacaaagagtcccttgtggggtactgcttagtggagctgtgaggagaagactaccatcttccagaccccagaactgtaggtccaccaacagcttacaccatgcacctagaaaagttg

SEQ ID NO: 395937 - DNA, 535 bp, Homo sapiens
aggagctactcccaacacccctgtttgcttttagacctataactaaagtcctagcagatccctagaggtgaggttgagagtgtgatccataaggaggcatgctacactcaaaaataactgcttgagttttctaatttatataaacagaaatctggagaataggcatgggaatggatattaagggtgtgtgataatggtggaagaaacatagagttggatctggctgaattttttgatttgggccctctaagtagggactctgcacttaatgttgyagcttggggagttaaaaaaatgttctaatagtttatttgcttggttagctggaatatggattaaaagatggcccactataagtgagctggaaatgccttatctcccttagcttaatgaagaggaaggatccaaaggcttaggaagattgggataatgcagtgaattagtcacttttgacccactcattccagctgggtgggtccagaagatacaccctttaccaatgccttgtgcaacagatttgtgagggcagcacctg

SEQ ID NO: 395938 - DNA, 526 bp, Homo sapiens
tttccccatggtgcactctacattgctttgtcaaaggttacttaactctatatatgtgtcagtttatttctgtgctttctcttctgttcattggtctatgtgtctgtttatacacccataacatactgctttgattactgtagctttataatataatttaaaaatcaagcactgtgatgtttccaactttgctactcttgatcaagattactttagctattctcgatttttggtagtttctattatagaattgcgttttcaatttctgtgaacagtatcatggagattttgatargcatttcattgaatcttattattttaagtaatgtagacaatttgataatattcatttctccaatccatgaacatggggaatattctcattttttgtcttcattttgtttcattaatgttttatcatgttaattatacagaatattcaccatttttgttaaatttgttactaagtattttaccctttttgataatattgtgaatggagctatattccattaagcctaatgtt

SEQ ID NO: 395939 - DNA, 608 bp, Homo sapiens
ctcaaaattgttggaaacttcaattatggatatcccactkttagttatggatagaaaaatcagacagaagatgaaaaataatagagatatttcacaacactacagatcaattggaattaacaaatatatacagaatgtttgatttaacagtagtggaaaatatattttttaagcacacatggaatatttttcaaaataggcaatagaaatgcaaacaaatttaggattgaaattacacaaagtatcttctttctcagcagaagaggataaataataaatgttatagcagaggtaagtgaagtagagaatagaaaagcaatatgaaaaatcaacaaaacagtttttttttaatttaactaaattgacaaacccttagctagactaaaaagaaggtaaaaggctcaaataaataaattcagaaatgaaagagtaaacattaaaactaatgtcacagaaataaaaataattatgccactattatgaatgtgaataagttggacaacctagaagaaataaattattagaaatacatggtatatgaagactgaattatgaagaaaaaagagagcaaatcgataattagtaaagagattaaatctgtagttaaa

SEQ ID NO: 395940 - DNA, 605 bp, Homo sapiens
catgtgttactggtttagaaatattgaccaatggaatggaatagagagctctgaaataaacccacatataaatggccaaatgctgtttgacaagagygccaagactgaacaatggggaaaggatagtatcttcaaaaaatggtgtcagaaaaaatggatattcattgacaaaagaattaatttggacctttacctcataccaagtacaaaaattacctcaaaagtgattgaaaacttaaattcaagatctgaaattattaaactcctagaagaaaacataggagaaagattgaagtcactgtatttgacaataatttattggatatgacaccaaatgtacatacaataaattcaaatatagataaatgggactacaacaatctatggaatgggagaaaataactgcaaattatatatctgataatgagttaatatctagtatatataagaaatttctataacaacaaaaatgaataacttgattaaaaattgggcacagaaattaaactgttttccaagaagagatacaaatgtccaataagtgcatggaaagataatcaacatcagaaatcattaaggagatgcaaattaaaattacagtgaga

SEQ ID NO: 395941 - DNA, 556 bp, Homo sapiens
tacagtgggtccagaggtttccctgactcatcctatgttcagttccccagtgtctgaatgcataattggcrtagacatacttagcatcttgcagaacccccacactggctctctgactggtagggttagggctattatggagggaaaggcaaaatagaagccattagaactgtctctacctagaaaaaatagaaaatcaaaaacaatatcacatccttggagggattgcagagattagtgcaaccatcaaggacttgaaagacgcatgggtggtgatttccaccacatcctctttcaatgctcccatttggcctattgagaagacagatgaatgttggggaataatagtggaatatcatacacttaaccaagtggtgactccaattgcagctgctgtaccaaatgtggtttcatttcttgagcaaataaacacatttcctggtacctggtatgcatccattgatttggcaaataccctttcctccattcctgtccataaggcccaacagaagcaatttgccttcagctggcaaggccagcaatatacctttactgt

SEQ ID NO: 395942 - DNA, 556 bp, Homo sapiens
tacagtgggtccagaggtttccctgactcatcctatgttcagttccccagtgtctgaatgcataattggcatagacatacttagcatcttgcagaacccccacactggctctctgactggtagggttagggctattatggagggaaaggcaaaatagaagccattagaactgtctctacctagaaaaaatagaaaatcaaaaacaatatcacatccttggagggattgcagagattagtgcaaccatcaaggacttgaaagacgcatgggtggtgatttccaccacatcctctttcaatgctcccatttggcctattgagaagacagatgaatgttggggaataatagtggaatatcatacacttaaccaagtggtgactccaattgcagctgctrtaccaaatgtggtttcatttcttgagcaaataaacacatttcctggtacctggtatgcatccattgatttggcaaataccctttcctccattcctgtccataaggcccaacagaagcaatttgccttcagctggcaaggccagcaatatacctttactgt

SEQ ID NO: 395943 - DNA, 522 bp, Homo sapiens
tggtcccactgcctcctcctcaccccctgatattgccaacatcccaggacttagaactcaggacaagtcagctaaaagtttagctaaagaggtgtggcaatagctaaatgctaccttgaggcagcagagcagggtctctggactcaagagagtagatttaagtcctggccctcctacttccctgctagctatatggcctggacaaatcgcttcagtgagtctcagttttcttatctgcagtatgggggtgataactttatcaaaccaccttatggggcttgaaggcacgaatgggatgatggatatacaagggctttgtcaaaactttgtacacggaaaagtgaggtataaagaccataaaytgtcattaggcttattttaccatatcatcccctgttcattcccacaaaacagctttgtggaggaggcatttctgaagacaaattcctgtgccactccattgtgggctgaattttcactagactttacgtttttgaaagctaaagagcaactcttggctca

SEQ ID NO: 395944 - DNA, 520 bp, Homo sapiens
ggatgatggggactagaaaccagaatgacatccacccagcatccagtctcaacagaataaatggaagaaaggctggctctgagaaagaggtctctgggaattagaggaatatatgcgatgtttgagataatggaaarcattactgatggagttgaggctgacttgttggggcattaggaaaaattaatggtgggtgtgtagaaaatcagacaaatgaaaaaaaggtggcaaatgaacaactctagtaaaaatgaagaactgaggaagaaaggtgttatgggcattaagttactggttttctagtgaatgacatctgcacaatcataataaagtatatcctaactactgatataactaacactgttttataactatattggggggatggtgaagaggaagtggggagatatgggagatcagagaccttattcatcattgtgggaactcattcacagtctcaaaatgtacatgaatatgcgaaggaatagggataactccagccccacgactttaactaaca

SEQ ID NO: 395945 - DNA, 555 bp, Homo sapiens
tgacaggcagcttttcttcattgtgtgctttttgctwttgctcacaaaagtgcattcactattctatagtatgttgaaacttttaaatggaaacggcttttcattaacaaaggaagcattttcttccccccttccatgccttagctttctccgctaagtcttggcttcttcagcagctgtacctccaccagaaatgacaaaaggtgcaattgtgctaggagatggcgatgaagatatgccagtggagttttgtgtgtgggctgctggggactgttttccttctgtgtttggttttgttttatttttgttattccagaaagttgagagcacatctaaaaaccaaaaaaaaaaaaaaaaaaaaaaatgctttaaaaacccttttcaaacctttatcccagctgagctgtttctttccattaagttgttctgttagtatttcagtggcccctctgtcttaataacaacaaatctggcaaaactcacttaaagcagagggacatggaatacagagagtgttgatgtggtttttctttttctaagcaggccgtgagagtc

SEQ ID NO: 395946 - DNA, 519 bp, Homo sapiens
gtcttgtttaatgtgcataaacatatttgcaaaattaggattgaagcatgtatacaaatttgtctcctgcattttaaaaattgagcattgtactatgaatattttcctaaatcataaaacagcctatcaaagcacgttttcttagctgcttaatatgatgcatgatatgtrtatctaacataaatatccagtaataaggaaatgatggattcataaagaagaatgttttccagtcactcaaaataatgttctcacaggctatctcgtggcattagaaaattctcacaaaacataatgttaggtcaaaattcaggagatgaaactatattcctaatccagtttgtacaaaagctctcagacaggcaggagcttagcctaagagcagtgtaaactattagagggattttagtaggggaatgacataccagattttcattttgtaatcttaccctgggctgcatgcagtggctcatgcctgcaatcccaacactttgggaggccaaggcaggcaaattgcat

SEQ ID NO: 395947 - DNA, 582 bp, Homo sapiens
gcaggggaatggaagggaaggaagagaaaagaagtctctggaatcggcatgggaaatgaagagactcccccaaggccctgtcctcatttaccctctgcgcctggcccttccctgccctgccggctggatgtccagggacccacccagcccgacctgctctctgccgcgctgctcacactcggctgctgtgcgctcctgccctctggtggcaagatctggaagcgcgttgtcactgcatcccagcacctctagaggggaaactaggagcaagtcagttcaccacccactgtgtgcragacactgagctggagacctagggaggagggaacacagccccgtttctgagagtgcaaagtttaggggacaagacagacaggcaaacagaccacggcaacacaatgagatagggacttggctgggggaagctcaggttgttttaaacctaaaacaagcagcccccaaatctatgaggaagagcctgcctagcagaaggtcccaccatgcccaggaacatttgggcagcacctgctctgagggctctgggctgcctggctggggtgggacagacccagagtcctttct

SEQ ID NO: 395948 - DNA, 555 bp, Homo sapiens
gccaggctgggaaccacaggtgagatgtgggagttggctcagtcagtcctgacccatccacgccaccggagcaagcgttgaggaaggcagggcagcctgggaggggagttcaggttttatctatttagagtgtaggtctctgttgctcaggctggagggcagtggctcagtcatggctcactgcagcctcaagctcctgggctcaggcaatcctcctgcctcaacctctcaagtagctggggggaccacaagcaygcgctaccactcctggctaattttatttttcgtttttgtagagacagggtcttgctatgtttcccaggttggtctcaaactcctggcctcaagtgatgctcccgccttggcctcccaaagcactgggattacaggcatgagccactgtgcccagcccagagcccggactttaggcttacactccaggctgcagtcccaggtgtgaatctccaggtgtgagtcccaggtaagttctgtgaccttggctacttcatgtctctgagcctcaacctacctatctgtaagacagagacaataaca

SEQ ID NO: 395949 - DNA, 555 bp, Homo sapiens
gccaggctgggaaccacaggtgagatgtgggagttggctcagtcagtcctgacccatccacgccaccggagcaagcgttgaggaaggcagggcagcctgggaggggagttcaggttttatctatttagagtgtaggtctctgttgctcaggctggagggcagtggctcagtcatggctcactgcagcctcaagctcctgggctcaggcaatcctcctgcctcaacctctcaagtagctggggggaccacaagcacgcgctaccactcctggctaattttatttttcgtttttgtagagacagggtcttgctatgtttcccaggttggtctcaaactcctggcctcaagtgatgctcccgccttggcctcccaaagcactgggattacaggcatgagccactgtgcccagcccagagcccggactttaggcttrcactccaggctgcagtcccaggtgtgaatctccaggtgtgagtcccaggtaagttctgtgaccttggctacttcatgtctctgagcctcaacctacctatctgtaagacagagacaataaca

SEQ ID NO: 395950 - DNA, 595 bp, Homo sapiens
gggttttttttttttggtacggtttgcaaaactcttttgaggtaaatattagggtgttttatgtagttctgataacagtgcatagcatatagaaatgttctttatggtttctcctgtctccatctgggcatgtcaaagttcaattatggtttaagccatagaggaccttttatcacttctcggccttttggctaagattaagtacaacagtggatcttttgtctcaatcaaattaccatacttaactatttcattccagagggccaatgaaaaaaatgtatttacaaggattatattaaaatcatcaagtacatgggccaggcgcagtggctcatgactgtaatcccagcactttgggattctgaggcagacagaaggattccttgggcacaggagttcgagaccagcctgggcaacataacaagaccctgtatctacaaaaaacaaaaaagttagctgggtgtggtggcacatgcctgcagttccagctactcagggggctaaggcgagaggttctcttgagcccagragtttgaggttacagtgagctatgatggtaccactgcacttcagccttagcgacagagcgagacct

SEQ ID NO: 395951 - DNA, 638 bp, Homo sapiens
atgcattaaaaatatcctttttttgacacacaaagtagaaggatgcaaatttatgacatcaacttaaaagaggtgtgaatgaacctataatggtgtagcattttggtatgttattgaagttaaattggcatcaatttagagtgttgtaactttaggatagtaaatgtaatctccatggcaattataaacaatacagcaagagcatatacacaaaacaaaataagaaggaaatttaaatgtttcactacaaaaagcaactaaaagcaaaagaacacagtaatacaggaaatgagggacaaaaaagctataaggaatacagaaaacaaacagcagaatgccggaagatcctccttatcagaaattactttaaatgttaatgcattaaactcttcaatcaaaagataagacatctgacwtttaatttgaaaacatgaggatttccccatatttttataaagtggaagtaccagatataaaagcattatgaactggaagctggaacccacggctaagaagaaaggagccaaacatcagatgtcattagatgaaacaaaatctttagtcaacttgtaaaaactgtaatgttttctgccgcgacatgtgggcatgttaggaaaataagaaaaaaaaatgatgtc

SEQ ID NO: 395952 - DNA, 439 bp, Homo sapiens
ggaatcaggaagtcatttgtcttagcaactgtatacccttttaaatttcaaagttctttatggacaatcacatacaaaaactgatctaaaaatgaaaaaagtacctgagaacttaaacatactcatctcgtatcttgaggttctctggcctcaagaaacaaacattttgtttagttccagaattttcttgcttaytcccaccatatctaacaaccttcattttcaaagtgaaagaaactaaaatcttacacactgacacaggcaataaaattataaaataagggaaaccagagttgaagggccacaatgctcaacagataaaataatccaaaggaaacataaatattctaattagctcagataagcaggctgcttccccacaattcacaaggaaaacccacattcaagaggttaaacaccttaacatgcttgaggtcca

SEQ ID NO: 395953 - DNA, 500 bp, Homo sapiens
tgtgtacatcatatggccttggccagcatccattcttctctggcctcggcttttctgttggtaaaagggagggagggtgatctcagggccctccaggcccatcaaggaaggaggtggggttggagacgtcggggagccactgtgtccagtctctcctaacggggagggtakaagaccagctgggaacaggagaagcttggctcccaggctctgtgctgaagaaggaagcctaagcagggccatgttacatttggtggaggagggagagtgtaggggaggaacagacgccggccgctcccgctaaggaaggcaaattgaggaaaggacccagtggggtggggaaggtcggccagaggtatccagagaaccagagaaagtgagtgtgagggagtccttggtgatccatctgcgctggggaaaaaggttttcagcagataaacagccgggacctcgggggattgtgcctcagcctaggcccggtagtcgaagacatatggaca

SEQ ID NO: 395954 - DNA, 575 bp, Homo sapiens
ttaggtgctcctgcagctgacctggccttctgcrcagggaggaagacaagttagacttccaaacaaggtgacatacaagtgagaactctgttggaggcagttagcagaaacccaatccaaattagcttaagcaaaacagaaatttcattttaaggatatgggagagatttgtccattacagctcaataaaactggggaaaaaaaagaatatgggggaggagcatgtctcatggaatccagtggaatccatgcttggactttgggaatgacacaaatccaaaaacatgaatgttgtcaggactctgctgccaatattcatataattaataatatttgtggagcatttattatgtcctaggcatgctttctgcttaggttcattgcattttatttatttatttatttttacaacaactctgtaaaatctgaactaaaattattccatttttcagaggtggaagcctggggaagtaaaggcatgtgtccaatgtcacacagctattgtagtaagagagcgagtgtgaatccatagcctgtactggtgaccctaaccacattgttgtcccctgccttgg

SEQ ID NO: 395955 - DNA, 575 bp, Homo sapiens
ttaggtgctcctgcagctgacctggccttctgcayagggaggaagacaagttagacttccaaacaaggtgacatacaagtgagaactctgttggaggcagttagcagaaacccaatccaaattagcttaagcaaaacagaaatttcattttaaggatatgggagagatttgtccattacagctcaataaaactggggaaaaaaaagaatatgggggaggagcatgtctcatggaatccagtggaatccatgcttggactttgggaatgacacaaatccaaaaacatgaatgttgtcaggactctgctgccaatattcatataattaataatatttgtggagcatttattatgtcctaggcatgctttctgcttaggttcattgcattttatttatttatttatttttacaacaactctgtaaaatctgaactaaaattattccatttttcagaggtggaagcctggggaagtaaaggcatgtgtccaatgtcacacagctattgtagtaagagagcgagtgtgaatccatagcctgtactggtgaccctaaccacattgttgtcccctgccttgg

SEQ ID NO: 395956 - DNA, 336 bp, Homo sapiens
tcgtggtacagtggagggaacasgaccaaaacaaaagattcgtggaactgtgttctatttagaataagacggagcctctgcagaagtgacacaaaacactctaaaaattacaaagtcaaaatggaattaattttgattcactttacaagcttacatgtcctgctacacctgatggctatgatgaacacaaatggaatcagagctctgcagcctttaagaatgacgttctctgcttcacttcagctctcgccactagtcccttccttatgtaagctgtccctcctgcctgggaagtgttctcttattcctttaaattgttttccttcccgtcttcaa

SEQ ID NO: 395957 - DNA, 534 bp, Homo sapiens
ctacatgatcaggcacctgtagtgctccatttctcagctcacttttcctctgtgctttcaggcaggctttcctgacgctcatgagctctccaggctcactctcattggctcacaaccttggcgaaaagagagcaaagtctagcaactgagtctcactggaatgatttggttcatattcccattgctgatcccatcatggtggaaggtaagacacagcactattggctttatggagtgagactggaaaaggaatagctctcctgtagaaaattaccagaagraaggagatgtatgctaggctgaccaccatcaggtgccctgtcctagacctaagctatgattgtcctcccaagctctatccttcgtggattagcatctcccattgaggcccgagttctgagtgcaatgcccactgaattcccaactcaagacagaaagtgtctttttgaaagtgaacaatgagggtgtttcttgaggagctttaaagaatactttctcctccactctctgcttgaatttaatcttttatatttc

SEQ ID NO: 395958 - DNA, 576 bp, Homo sapiens
ggctggtttctggacaccagacctcttctggaggccctgggtctatctctcttgctgaactgcaggccactgtcctgggtagcagaggctgtagctgccatgcctatgcattcacccacaattcccatggcaatggcatgaagctgcatgacctcaytgagcctcatgccccctgtctgtaaaatgaggctactggaagcaaccacttcacaggactcttgtgaaggttaaataataatgcacaaaaaaaatctggtgcactacttatcacagagcgagcacttgataaacgacagtaagcatcatccctccagtcttgtctgagcatggcctgtgtcctcctaagtgccacagtcatgaaaaggtaaatatactactctatgcttgagaaactcaggagagaaccttatgattttctttaactccttgaaagctggtgctaacttacttatgcctctttcattagcattaaaggaatgcctcgcactttctcaaatctggaattaaaatcagaggctgcagtcattgccctgagttatactaggcataaataaaacttccctgagaaagttggaa

SEQ ID NO: 395959 - DNA, 576 bp, Homo sapiens
ggctggtttctggacaccagacctcttctggaggccctgggtctatctctcttgctgaactgcaggccactgtcctgggtagcagaggctgtagctgccatgcctatgcattcacccacaattcccatggcaatggcatgaagctgcatgacctcactgagcctcatgcyccctgtctgtaaaatgaggctactggaagcaaccacttcacaggactcttgtgaaggttaaataataatgcacaaaaaaaatctggtgcactacttatcacagagcgagcacttgataaacgacagtaagcatcatccctccagtcttgtctgagcatggcctgtgtcctcctaagtgccacagtcatgaaaaggtaaatatactactctatgcttgagaaactcaggagagaaccttatgattttctttaactccttgaaagctggtgctaacttacttatgcctctttcattagcattaaaggaatgcctcgcactttctcaaatctggaattaaaatcagaggctgcagtcattgccctgagttatactaggcataaataaaacttccctgagaaagttggaa

SEQ ID NO: 395960 - DNA, 576 bp, Homo sapiens
ggctggtttctggacaccagacctcttctggaggccctgggtctatctctcttgctgaactgcaggccactgtcctgggtagcagaggctgtagctgccatgcctatgcattcacccacaattcccatggcaatggcatgaagctgcatgacctcactgagcctcatgccccctgtctgtaaaatgaggctactggaagcaaccacttcacaggactcttgtgaaggttaaataataatgcacaaaaaaaatctggtgcactacttatcacagagcgagcacttgataaacgacagtragcatcatccctccagtcttgtctgagcatggcctgtgtcctcctaagtgccacagtcatgaaaaggtaaatatactactctatgcttgagaaactcaggagagaaccttatgattttctttaactccttgaaagctggtgctaacttacttatgcctctttcattagcattaaaggaatgcctcgcactttctcaaatctggaattaaaatcagaggctgcagtcattgccctgagttatactaggcataaataaaacttccctgagaaagttggaa

SEQ ID NO: 395961 - DNA, 621 bp, Homo sapiens
ccagaacgtcttttctattcctctataaatgttttcaccctatgacaattgccaagggctttttgtttgtttattttatcaaactaggttccatcaaatactcttgtaattaggaacagttggtgaagtgcaggcgctgggagaggagccgactctccatcctcrtccaaaatgagagtcatggagaccaagagtttggctccttagctgctgctctgggtgggaattagaaatatctggacattcttgccatggcctaaaattcaagagctctagaccaaggcatgggagcttgctgcttcagctttcctcatctgcaaatcgatgataattactagttagtgactgctagatgaatggcactattgaactgcaaaatattagtattattgcttttcctctttgatctcatggggcaagataaatttatgacatcataattgtttctatggcagcaaatcatattgtcccaaacaggggacttcatgacttcatggctggattgagaaaaagaagaaatcagattgggagtgagaattttgctcaaacataaatatcttcaatgctgcacggggaatagagcaaattacagactggcaaaattgcttttgctttaaatgt

SEQ ID NO: 395962 - DNA, 527 bp, Homo sapiens
tgtagtatttattatcattctcaagtattatgtactgtacataattgtatgtgctatacttttatatgactggcagtgcagttggtttgtttataccagcatcaccacaaacatataatgcattgcactgtgatgttggaatggctacgatggcactaggtgattggagtttttcagctacactataaccttatgagaccacttttgtatatgaggaytgtcatttactaaaacgtcattgtgtgacatgtgactgtattgcacatctcacttacctttttttctatatgtctttctgttaaaagcatcccattttttttttacaaagcactagcctcacgatcccaacgtgactctagtcacatgtgcatgagagagtaggtttgttttctcttcttcctccactaacgtgtatacaagccttgttaatcaacacctgtgcattctctgaggggctgttctgtgcgtgctaaggtgctgccaatgccccccaccatggatggagggacaaagaggtgccaggctct

SEQ ID NO: 395963 - DNA, 517 bp, Homo sapiens
actgtccggctccaacctgccatgagcccctgcggacgctagatggcggaatgggttaagggactagccctgctctggggtccgggcgcccctatataaaagcaggcgcttcctctgccgcagagccctgcattattgattgtgacgctgccgcagaggtgggaggagcccgccgccatctcgccaagtctgcagtatcgggaacatggstttaggatccttttctctctctgcaaaaagtccctcgatagctggaaagagagagctctctgtggcccacatgattgttttcattcataggaagatcagaccttcccatagtcagaatcatttttatttcacattgtcattctgaatagcggcaccaaagaatagcagctgtactttctgaaagccactgatttgaatcggcacctatcgtaaaatattaccgcgtcactgaaaggcaaaatagtcgggggcggtgggggaaattcatcatctctttaggtttctcagttacaaaacattcttataa

SEQ ID NO: 395964 - DNA, 558 bp, Homo sapiens
catgatttgccaaagcaatatttcctttctccaacatagtattcttactagattctgtcttttctgaaaatagatccttcctcttccaataacctcagggcattccattcatatcaggtattctatataaattctctcaccatctctaagagcaaaatasaggattggatattacctttctgtagagttgaggacactgtagatgggtactttcctcaaaattacacagctatcagtagcatctgatcatctctccatttattgagctaaaggtattgggtgagctgttcttttatttaacagacctattttgtggtcctactttgtgtcagccattcatgcaagaaatcaaagactgattcttttgtgtacatccatactgtatgtgcccaggctgtgctgagcactggaacaaggcagatcagtcccagtcctaaagaggcagaagccctgcctgccctcaggagtttaagttggtggataaacagcagagtatttgcaagcaaggcatttggcttaagaaacggaagtgaaaattatgtttgagaaatttgggtg

SEQ ID NO: 395965 - DNA, 550 bp, Homo sapiens
attctgacaggttcctactgctttctttataacagcatgtgtcctgagaggtgtctcactgtccctgatctaaagtgatataatgatgacacacatgtgatggatacaactcagacttcatttgtgcccttcatagtatgtaattccactgcyggtgagaccagcaatgcctcccagtgacacaggccccctgcccagctggctctgcctgcctccagcctgttacccactagggtgtgttcctgtcttggtgtggaaagaaaataaaagcagaagcatgcctgctaagcaaaaggatggtttaaaaacccttaactgggaaaaaaaaaaaaaaaaaatccttagctgcattcctgagaacactgttgatcattttctctgaggcccttcatttacataatttatccaagtatacattttcaattacttgtaagaatttcaaccaagaatcttacaaaacagcaacacaaaattcattagtctcaataactgttgtaatgagtagcagattgtccttatggcaaatcaaatatgtctgaggtttttttaa

SEQ ID NO: 395966 - DNA, 493 bp, Homo sapiens
gctgttctgcagcctccgctagtgatacccaggcaaacagggtctggagcggacctccagcaaactccagcagacctgcagcagaggggcctgagtgttagaaggaaaactaacaagcagaaagcaatagcatcaacatcaacaaaaaggatatccatgcagaaaccccatctgaaggtcaacaacatcaaagtccaaaagtagctaaatccatgaagatggggagaaaccagcacaaaaaggctgmaaatgccaaaaaccagaacgtctcttctcttccaaaggatcacaactcctcgccagcaagggaacaaaactggagggggaatgagtttgacaaattgacagaagtaggcttcagaaggtgggcaataacaaactcctctgatctaaaggagcatgttctaacccattgcaaggaagctaagaaccttgaaaaaaggttagatgaattgcttcctagaataaccagtatagagaagaacataaatga

SEQ ID NO: 395967 - DNA, 588 bp, Homo sapiens
gataaaattcatcttagaacataggctctgtggagaatgggtctcattttagaatggtgttggaagccaccttggtccccraactaaagtcaagagaaaaatgtggatttgcatgggatgcgtgttcgtgggctgacacttctccctatagtcttgtaaacagtgaagaaagctgattttcaaatgtcacatgttccaagttttccttcagagacttcatatctttgctattcaatcctcactcctcactgacagagatcttgatgacaggaaacacgtccccggtgagcacagcttgatggcaggtaagggataaggggtgccttggagaaccaaacctgaacacttttcccctctccataagtggcccttcctgagagactaaaaaatgtgagcttccttattccagtggtcaaaggctggccgccagcatttcttcctggccccggacactgttccatgaccctggagctcctcgggacaagaagtcacacatgatgtggctgagacagagccgtgatttcagagtgctgctctcctctctttgtttcaccagtgctggctgagatcctagagcagtttctgctg

SEQ ID NO: 395968 - DNA, 588 bp, Homo sapiens
gataaaattcatcttagaacataggctctgtggagaatgggtctcattttagaatggtgttggaagccaccttggtccccaaactaaagtcaagagaaaaatgtggatttgcatgggatgcgtgttcgtgggctgacacttctccctatagtcttgtaaacagtgaagaaagctgattttcaaatgtcacatgttccaagttttccttcagagacttcatayctttgctattcaatcctcactcctcactgacagagatcttgatgacaggaaacacgtccccggtgagcacagcttgatggcaggtaagggataaggggtgccttggagaaccaaacctgaacacttttcccctctccataagtggcccttcctgagagactaaaaaatgtgagcttccttattccagtggtcaaaggctggccgccagcatttcttcctggccccggacactgttccatgaccctggagctcctcgggacaagaagtcacacatgatgtggctgagacagagccgtgatttcagagtgctgctctcctctctttgtttcaccagtgctggctgagatcctagagcagtttctgctg

SEQ ID NO: 395969 - DNA, 613 bp, Homo sapiens
tctcttcccctattattaccatcttacactaggatgaataacatatttttcacaattaataaacagatatcaatacattatcattactaaagtcaataccttatcagatttccttagtttttagcttaatgtcttttttctactataagattacatccaggctattacattccattcagtcatcatgtctccttaggccctttctggctgtgacagtttctcaaacttatcttgtctttaattaccttgacagttttgaggagtattgtttagatattttgcagaacatccttatattgagatttacatggctttattttccatgattacactggagttataggtttggggaaggaagactacagatataagataccatttccttcacatcatatcaaggatatakagtataaacattctttatcactattgatgttgacctgattccctcactgagttagtgttctcatgtttctacacagtaaatttactcttttcaatgttgtccattttggaaagaagtcagatttaatgaagaaggaattatgttctgcctatttgaggatgggtatctatagaaattaattttattcttcacagaaaatctgctaat

SEQ ID NO: 395970 - DNA, 327 bp, Homo sapiens
ttttctccaaccacatttttttttttttttggtggggtggtttagacatttgtaatactgtcagattgttttctgtattctgagtttcatccttggattccattaactccttaaatgattgttgtaaatataggcatacattatgtttcactgtgttataaagttcaacaggttctgwcaaatgtgaggtgtcatgtatctactattgtaggatattaagagattgtttcaccatcctcaaatttcccttctgcttcacctattcaaccttttttcccttctgctgaagctctgacaataactaatattttcattgtctatgtagtg

SEQ ID NO: 395971 - DNA, 258 bp, Homo sapiens
acctacagcaaggtttaatgccagaagatggcagaacagtctataaagttttcagtgaaaccctgaaccacgtacactacaagccacagtttttgacaaataaaaagacgacaggtagacattccaaaacacgaatgaactggtggaataaaaaaatgagatgttttgtaggtattaatttcaaaatctrtgcaattatctgattactaaaaataaaaaattgaggaatgggaaagccgtgctaataggccagtagtg

SEQ ID NO: 395972 - DNA, 563 bp, Homo sapiens
gttacctgctcgaattttcaaaattggaacacagaccaggggtaggcgagttggtaaggaatgtgagcccacagtttttggtagccatgattatattaaagtctccactttgcctaagcaagtttaaaacagatttctgctgctcacagctagatgcctcaagactaacacagatttctactgcttataactagatgtcycaggtctaacacatgtattactgaatgcatatcatttttgcaacatcataaagtcaaaaaatcataagtgataccattgtaacccggggactgtctgtgttgaaaacacaattaacaaaaaggccgatattatatatagctatacactaaaaatatggattccgctgtgattttcatcttagcattttaatacccttcatgtcagctaaaaattttaatctacgtatatcacttaatacggcaaagaaaacctatatataaaaatgtttcttccattaaatctcacaatttcaccatattgcagattagttgtgattgctgttaccctcttttacttcaaactgtgtatacaggtaacccctt

SEQ ID NO: 395973 - DNA, 534 bp, Homo sapiens
aaatatatttaaaatatggaactcttggcagtaaaagaaaatgcttaggaacctaagtttctgatattgttaaagctacatgtgaaataataagacattggaaaaaaatccaagataatttttggaatcttgtctacagaataaaaatagaagttcaaaaaatggtaataatataaataaacctagaaaatttcaagaagaaaagtggtaggcacttggtctaaaaagaaaaaagcagtagaatatgggaaaactgtgatgggaagatmttctattttctaaagtctttggtgacatcctaaaactttccaagataatggccatacctcaaatgcctaaagggccagagaaaagacatgaatgaatgaatccatccagatataagagagaaacatggtatttgtctcttggcctcagaatcaacacaatagatagttgtgggaagaaactggaaaaataacttcttttctcaagggaggcagttgttacattgcaaaaacatgcacccgttgtagtcatgttttctgatttgcc

SEQ ID NO: 395974 - DNA, 548 bp, Homo sapiens
ttaatattaattttgttttgtttkttttgatcctcctgagttcttatagctattggctgaaatcttttagaagtcgtataataaaaagaaggattgtcttcagaaaccatgcttattccctgatccgatgacctatcatattttattttactaaaggctgaaacaagtacaaggcaaaacactatcatattttattttactaaaggctcaaacaagtacaaggcaaaacactaatatactaaatatttgtttttgctagttttttaagttaagaatggaaaattatttttattctgtaaacacaatttgaccgcaaaaagcttagtttatttatttattttttttcacagtctcactctgtctcccaggctgaaatgcagtggcatgatctctcgtctcacttcactgcaacttctgcatcccagattcaagcaattttcctgcctcggccccccaagtagctgggactacgggcacaccccaccacacttgactaatcttttttttttaatttttttttgtagaaacaggttctcactatgctgccc

SEQ ID NO: 395975 - DNA, 609 bp, Homo sapiens
gggcgtatccatctaacttcccatttttctatgatgaagcttgctttcactcaggcaaaaaatcacagccaattaacatttatactttaatttctcttaaatgcatktaagtattttagtgtattgttccatattacttagggattaaatatgaattttgaaaaactgagatgaactagtatttataacactgtttctgaatgattcatgtattaacggctccagtcatgacacagtatttacaggtgaccatataatctacaattgagtttttaatttgggagttaccatagcaaatacatttttcattctaaatagtattaaatttttcttggtattacaatctagtgcattcaaaggttaaataatcattggcaagggactttggacaaatgagatggtgaaaatctttttctctgacatttagcaatgacaagcaaaactcagtttcaataatcatgattcatttaataccatatttagaagactggtacttagtggtttgtcaactggcatttgcaaacagaccaattttccctcttttttaatggtacaacttgaagtaatcaaatttaattaagataaaacaatgagaatacaaaataaaaa

SEQ ID NO: 395976 - DNA, 617 bp, Homo sapiens
cttacttcattgtattaagccatcactaattactttacaaataaaaagtgaaacactttcaagaagaaaaagcaaaagatatatgtttggtaattaaactatacacattaaaacagatgacataaacctctacagctcttgcaaatatccatgtatagaagctccagggcgtatccatctaacttcccatttttctatgatgaagcttgctttcactcaggcaaaaaatcacagccaattaacatttatactttaatttctcttaaatgcatttaagtattttagtgtattgttccatattacttagggattaaatatgaattttgaaaaactgagatgaactagtatttataacactgtttctgaatgawtcatgtattaacggctccagtcatgacacagtatttacaggtgaccatataatctacaattgagtttttaatttgggagttaccatagcaaatacatttttcattctaaatagtattaaatttttcttggtattacaatctagtgcattcaaaggttaaataatcattggcaagggactttggacaaatgagatggtgaaaatctttttctctgacatttagcaatgacaagcaaaactcagtttc

SEQ ID NO: 395977 - DNA, 489 bp, Homo sapiens
ccagttccgtttcctggacagtttccctgatgctttcctcttagtagtttcatagtttgaggtcttgtatttaaatatttaattcattttgatttgatttttgtatatggcaattagtagaggtctagyttcattcttctggacatggatttccagtttccccagcaccatttattgaaaagactatcctttccccgatatatgttttttggcaccattgtaaaaaatgagtttattgtagatgcatgaatttgattctgggttctctattctgttccatttgttgatgtgtacgtttttatgccactgctgtgtgatgtttcagttactatagctctgtagtataatttgaagtcaggtaatgtgattcctccagttttgttcttttgctcaggatagtttgtctatcttttcgtggtgacatataaagtttagaattttttttctatttctgggatgaatgtcactgatgttttgatagagtttgta

SEQ ID NO: 395978 - DNA, 527 bp, Homo sapiens
aacacattcacaggtttcagaaattaaggaatggatatctttggggatccagtattttgtctaccacagaagaaaaatggcttaagatgaggctgcacacaccactccttctgtcttgacatttgacattatgcagcatgaaccacagtcagaatctgaagagtcacacttggttgcatagaggatgaacagaatagagcagcctacaacctctaatgccatctttggctgggtagacaaatctgatttctgggctaccaagggagccagaatgaaggtaccaatgtcatakagaaaagagactctggagaaacaacctcaatattctgcatacaatttcctctcaagatataaaatgacctcttgtatgtgtctgtgtagatttagaaaccaattaatcagacaaaagtcaaacagaatgaaaatgacaaaaaggttaaaaactattatagatggaccctaaggttgcccctcatccatgattccaaggtttggtcttcatggtcttgtaaaattcttcctccttc

SEQ ID NO: 395979 - DNA, 527 bp, Homo sapiens
aacacattcacaggtttcagaaattaaggaatggatatctttggggatccagtattttgtctaccacagaagaaaaatggcttaagatgaggctgcacacaccactccttctgtcttgacatttgacattatgcagcatgaaccacagtcagaatctgaagagtcacacttggttgcatagaggatgaacagaatagagcagcctacaacctctaatgccatctttggctgggtagacaaatctgatttctgggctaccaagggagccagaatgaaggtaccaatgtcatagagaaaagagactctrgagaaacaacctcaatattctgcatacaatttcctctcaagatataaaatgacctcttgtatgtgtctgtgtagatttagaaaccaattaatcagacaaaagtcaaacagaatgaaaatgacaaaaaggttaaaaactattatagatggaccctaaggttgcccctcatccatgattccaaggtttggtcttcatggtcttgtaaaattcttcctccttc

SEQ ID NO: 395980 - DNA, 611 bp, Homo sapiens
taagaaatttggtttatctgtagaatcaccctacaaaataatmattatcaccttaatttcaccagaaagaaatatgggacccccaaattttagataaatttcccattaaccacacaattaattcaagagctaagattcgaatgcaactcttttagattcgtaaggctatgttgaacgattagtttaaagttatataatcttatgtccctgttggagataacagaaaacaaattccccctttatcccaaaaagaaaaattgctcaggacagtggcacatgcctatgttcccagctacacaggaggttgaggtagtatgattgcttgaaccctggagtttgaggccagccgggcaacatagtgggaccccaactctacaataaacaaacaaataaaaagaaaaattacaccaagagagggctgcaatactttttatgatctatccttaaaagtctcaggaagttatttctagggcattctattggtgaaacaagccactaacaccagtgcagattcaaaagaatggcagggatagactccacctgttgatggagtaattaaaagaaaaaaggtaaacagcttaatgacattcatcatgaagacaggctaccac

SEQ ID NO: 395981 - DNA, 578 bp, Homo sapiens
ctgggattggtagtgaggttggaagaatcactaaccttgttgcttttcttaaccacgtctatagatttctggaaattgcacacatttatatccatacatttgtagataagatattttttatattatctaattatcctttttcaaagtgccacttgtttacaacctgcctgaagcaatacacagagaaacctcagtagaagttaaattgataaatayatcaaagcaagaacttattataattttatattataattataatttatattcaaaattatcataattttttctggaggttatattgtttttattaggtcacaatttatgtataataaaatataccaaccttaagtgtacagttaaaatatttttgaaagtttatacaactgtggaaccaccaccctaatcaagatatagaacttccatatcagtcaaaaaaaaaaaaaaaatctcatgaccctttccagtcaacctgatctacttttgtacttcctaaagaaaatttatagttgtacaatatagtgcattcaacatccatgtaggaacaccttgtcagggtctttgtcattttaaagcatgag

SEQ ID NO: 395982 - DNA, 614 bp, Homo sapiens
tttatattcaaaattatcataattttttctggaggttatattgtttttattaggtcacaatttatgtataataaaatataccaaccttaagtgtacagttaaaatatttttgaaaktttatacaactgtggaaccaccaccctaatcaagatatagaacttccatatcagtcaaaaaaaaaaaaaaaatctcatgaccctttccagtcaacctgatctacttttgtacttcctaaagaaaatttatagttgtacaatatagtgcattcaacatccatgtaggaacaccttgtcagggtctttgtcattttaaagcatgaggctattttaaaatatgaaaaagggcttgtattggtatggcaagaaacagcaaaattataataatgcagagagaaattgtaattaattgtggaacagctatatgtagagaataaagataaaattgtaattagataagacacacttctgaagttatgtgtcactaaccaaaaaataagctttgattcacctcatctaaatatggattcagcatgatgacagttgaaagtttttatcaaaagtgagctctgtcaattttagaaaggaaatattctgcaaattttcttataaaataag

SEQ ID NO: 395983 - DNA, 578 bp, Homo sapiens
gacacctaggcatttaacattcttattttaagacgtttatgaactayaattagacaattactgctaattggtatgctaggataatagaactattagtgtataagagagttagcaatatgttgaatgtatggcattcatccaaggatcagtggcgctgatgttttctttgctcttttttgttaacattgaataaagaatcactcttgctcttcatcagctccaaaagtgattttgcttacaattttcactagttcatgttttacactattcatgtttatgtcttcgatatattgcttttttccacagttgaagggagttaaacaatttattcactgagagctaaaacctaaagccaaccttgcaaactaaactgtgaggactttttgtattttgaaagttctttctctcttcttaaattgtggaactatttttgaatacatttttataacaaaatcatgcttaaaatcatgaatgctttctagggatatgaccatcatgttaatactgtcattatctcaaatgtgaaggcagcctgaattatgtgtgaaagacaggatgaagataaccaggtgtattca

SEQ ID NO: 395984 - DNA, 545 bp, Homo sapiens
tctactaaaaacgtaaaaacttagctgggcgtggtggtggacacctgtagtcccagctactcgggaggctgaggcaggagaatcgcttgaaccccggaggcggtggttgcggtgagccaagatcgtaccactgcactccagcctgggcaacagagcaagactccatctcaaaaaaaaataaaataaaataaaaaaataaataaataaataaataaaaattaacaaaagacagggaatttatcttgaggtaggagaccatgaagttcccaggacactaagtagtttctggcaggtcctagtgatttgaccaaaaaataacattgtaactgttaaatgttyggactcactccctcaaacttgtcccaagttggttgtataacaactgcataaaggaacgtcatttcctttctccttggttgcaggaatggtgacgtaccagtgattcactggcctgtagagctgacagaagaaagcatgagcttgagcagcagcggctgattgaatagtggaataaaacaaagtttcagatcaaggtaccaactgct

SEQ ID NO: 395985 - DNA, 477 bp, Homo sapiens
attctgctttctcttgttttaaggacaggagagacaacttccatactctttacacaatggacctgaaaccggaaatctcctcaaatgctttttaaatacaaatttcattaatatgtttattataaaaaacaatataagctcaatgtaaacaattttgagacttcctggacaaagagaaaacaaacaaaaataactatggcccatcacataaatccaatcaagtttactattttctatgtttcacatgcattttttaaaaaaaacagttattataagactgtattatcaggcttattacataaagatgtatctatatggcaagaataaagttattggataaagtttcttttttttttttttttttcctggtggtgagttcccttggctgcatctttattttttttttttttgkctttttttttaaatttaattttattattattatactttaagttttagggtacatgtgacaatgtg

SEQ ID NO: 395986 - DNA, 630 bp, Homo sapiens
tctagaataccctgtcttaaatatgtatttgcttaatctccatctatcctttaaagcccagctcaaatgttatcttatttgaaatagtatgcccccattttcttagctggcattcgtatctctgtattctgaatttttacagtttttgttatatatgttttcactaaaaatcaattttattctcaagaaataattttaatttcttaattataattatttacttgtaactcaagacaacaattattgggagaaacaagatgaagtgatgaatatacacaatactagaaaatgtaatcttgatatgttgctttctgttcctctaacgatcaatggcaaaattagatggcataaaatatatatttaacatgtatattacatagtcttcctcaaatattaaaagtagtgagtacttgacaggcgcccatatagaattttgttcttaactaaaaattatgaaaagcatctataatttagatacttattttattattaagttcttattttcccccatacmaattcctggcctgtgttgtgatagattgttggtttggaaaagttctacttttgctataataatattatttacttatggtcacttttaaggtaccctggataaaattaattatttaa

SEQ ID NO: 395987 - DNA, 630 bp, Homo sapiens
tctagaataccctgtcttaaatatgtatttgcttaatctccatctatcctttaaagcccagctcaaatgttatcttatttgaaatagtatgcccccattttcttagctggcattcgtatctctgtattctgaatttttacagtttttgttatatatgttttcactaaaaatcaattttattctcaagaaataattttaatttcttaattataattatttacttgtaactcaagacaacaattattgggagaaacaagatgaagtgatgaatatacacaatactagaaaatgtaatcttgatatgttgctttctgttcctctaacgatcaatggcaaaattagatggcataaaatatatatttaacatgtatattacatagtcttcctcaaatattaaaagtagtgagtacttgacaggcgcccatatagaattttgttcttaactaaaaattatgaaaagcatctataatttagatacttattttattattaagttcttattttcccccatacaaattcctggcctgtgttgtgatagattgttggtttggaaaagttctacttttgctataataatrttatttacttatggtcacttttaaggtaccctggataaaattaattatttaa

SEQ ID NO: 395988 - DNA, 578 bp, Homo sapiens
gtatgcacacacaaacacacacacctttgcacacgcacacatgcacagtgggtcagaaattattaccagttcagagtctaatgagaaaaatatctgttgggaaagtatccttaattctctggaattcattcaggaaaattctcagatgtgcaaaacagcaacatttattggactraattttatcttcagcatgaagcagatgttttaagttgaatattgtctgcttttttgtgtgtgtgagacagacaaatgaatgaaaatagctcttcagggaaatccatttccaaaatgcatttattaggactttactgaagtgcaaggaaagaagatgcaattacaagtcaacttgaatataatatgggtttaaaaaacttttttccaccttgagtgattattagcttaatttaaccaatggtcaatctattactatgcctagaaaactcctgattacgtattaaaataaaataagaatatttttagaaacacaaattttgaagtctcaattttgaattgcagaacttaagaatattcacgctcaaaaccaaactctatatattaagaaaaagagagaaaaggaa

SEQ ID NO: 395989 - DNA, 562 bp, Homo sapiens
agatgattgacttctgctgcctattttaattacgcagttgttaaatatcctaacttgactcagttgttttgtaggcacatacatgccttccacgatttttaaaaattattttgttgtacaccgctattttgaatatgtactttcttagatcccttgtctttctcctttttgtatttctagcttttttatattataaatgaatgaaaatgacatagaactggaaactctaatgaagaatcaagtgaaaattttaaaactaaaaaattgcaatagcaaaaactaaacaaacaaagggtagacaggagaatacacagagatgagaggaagattagagagcagcacattggcaaaaaaatactcacattgaagctgtgtgggtcctccagggagaccctgagacacagctyagcattcagaatgtttatttcagagttcccatgagattcacactttgaatgaggaggaagcaccgtaaggcaaaggaggaagatgtatgggttattttggaaaccttccacatccaagtttctgttcactgctgctaggatgctgatcaagagag

SEQ ID NO: 395990 - DNA, 440 bp, Homo sapiens
cagttttctgtcttttaaacgagctgagaggacaacaaatatatctttgtagagtttgttatattaatcttcttatttaccatttctgattctcctaatttcttcctgtgtaattgagttaccatctagtatcatttccttattctaatatagcttcatcctccacctgcttcctttgtgctgttattgtcaaatatattgtatttctatatgtaatagacccaacaatgcaattatgtaaatattttgttttatagaatataaaaataaggggaaaatgaaagtatactctcttttaaatgaaataggaaattactcacataattacctttaccagcactctttyctctgtgtgtaaattttaattatgacctagcatcacttgctttcagcctgaagaactacctataatattgcttgtaaggtaggtctgctagcag

SEQ ID NO: 395991 - DNA, 531 bp, Homo sapiens
aacttaaaaaatattaatgtgcatagtggaagtatgcctttaaggtaagtgactccaaccactggaaggggtatgcctgttctcttactgctgcctgctaagacaggggcttaggagagaacagatctggcgactgggattgcaagatgcacctaggttgggacactttgaagtgtaagtgcttatgggacctgaggcataggtggccagtgggtagtacaagtgtgcttgtsctggacataaagatggaggaaaactccaggtgctcatgtgcaggtggaagtgtggttcgctgcagtctttctggggatgccatttggctgtatatgtcaaacgtcttaaaatttttcatacccttttaccctgtagttgcacttctagaaatttttctaaaggaaatgttaagagtatatacaaagatttatgcccaagaatgttcatcctggccttttttataatgctgaaaaatggaaataacttttaggaaaacaaatatagctggtcattcaaagcagtcactaacaggctgca

SEQ ID NO: 395992 - DNA, 588 bp, Homo sapiens
tactggatgcctcctacccacagaccagcgtttttgtcaggctgagtggcaggcacatgaccagtggcatctttcccagcagcataaacgtctttgaggaattcctctgagagaaagatatttgtcttggtgctgaaatatttctgcctgtgaatttgagctgaatgtctgacccttaggtaacaacaacagcagtggctccagtgtccaagatggaagtagctcctattgggaccagccttttcccaagctgtcctcttcstgaattttccagcctgaatctttcctgacagaagtcacctgtgttagagggtgctgatcagaagccctgctgctccctgcttctcagtgaatttgcagtgcatgtgtgtgggtgtgtttaagtgtatgcgtgtgtgagggaagtaggaaaatgaacacattttcattcaggctcttccctacctcatcgacagacacactttcttggcatgtatgtttgctggcctgtgtgtctatggcacacctgctggccttgactgtggggctgtagtctggcctcaccacactggttcactaccttttaaggatcaggctcttttcaagttc

SEQ ID NO: 395993 - DNA, 605 bp, Homo sapiens
tcaaaaaaaaaaaaaaaagcatacaaacccctagacctgcccacaaggtgccacccgaggacttcatccccctccattggccttgagggaaaacactgttctgtagcatctactggatgcctcctacccacagaccagcgtttttgtcaggctgagtggcaggcacatgaccagtggcatctttcccagcagcataaacgtctttgaggaattcctctgagagaaagatatttgtcttggtgctgaaatatttctgcctgtgaatttgagctgaatgtctgacccttaggtaacaacaacagcagtggctccagtgtccaagatggaagtagctcctattgggaccagccttttcccaagctgtcctcttcctgaattttccagcctgaatctttcctgacagaagtcwcctgtgttagagggtgctgatcagaagccctgctgctccctgcttctcagtgaatttgcagtgcatgtgtgtgggtgtgtttaagtgtatgcgtgtgtgagggaagtaggaaaatgaacacattttcattcaggctcttccctacctcatcgacagacacactttcttggcatgtatgtttgctggcctgtgtgtc

SEQ ID NO: 395994 - DNA, 598 bp, Homo sapiens
tgatgatggagacagggttccaaccaggtcccactccgaacaccagatgcttagtttaaactgataccatggaaacattggctggcatattaacctgccacacttgatgcagtttagccttcaggtatgtcacgtgcatccatatataactagagtgcccctttctctaatttacccaaaatacagcctctaaccttattttggttgaaaatctgtcttgcctatcgtgaattacatttaacattgacatttctagaagattatttcaaatagaatttttctaaaagtcacttactttactggaaasttgctatttttacttcaaagaaggcagtagcatgaaagtaaatccttttcactcttaaagggcttgcttgaatacattattaaatgaagcagacaagttgctaggctgtgtagaatgttacctcattggtttgtttttaaaaaaggaaagaaaataaaagaaaggcatttgttagtatatgccttagaagaaatataaaaaactatatcccaaactattttttgtgatgacctctagggatagtaggattttatggacctttctattaacaatgtttctgcattctttttg

SEQ ID NO: 395995 - DNA, 598 bp, Homo sapiens
tgatgatggagacagggttccaaccaggtcccactccgaacaccagatgcttagtttaaactgataccatggaaacattggctggcatattaacctgccacacttgatgcagtttagccttcaggtatgtcacgtgcatccatatataactagagtgcccctttctctaatttacccaaaatacagcctctaaccttattttggttgaaaatctgtcttgcctatcgtgaattacatttaacattgacatttctagaagattatttcaaatagaatttttctaaaagtcacttactttactggaaacttgctatttttacttcaaagaaggcagtagcatgaaagtaaatccttttcactcttaaagggcttgcttgaatacattattaaatgaagcagacaagttgctaggctgtgtagaatgttacctcattggtttgtttttaaaaaaggaaagaaaataaaagaaaggcatttgttagtatatgccttagaagaaatataaaaaactatatcccaaactattttttgtgatgayctctagggatagtaggattttatggacctttctattaacaatgtttctgcattctttttg

SEQ ID NO: 395996 - DNA, 578 bp, Homo sapiens
ttttctttcttattgggatgagagttctttcaccaacagaagagcctgcagtttcaatattaagcactagaatttgattagtaaacatcgagaggcaaaagtttgactaagtaactcaacacttgtggcaaacaaatgacagaaagagaacggtgacaaatggaatacagtgcacgtggtgaaatgttgcctctgaaccccatttcccctcttcaccctccagggggattcactaagtagccagggggtctgtgaatatgamcctgtccctctctgcttaagtcacagcacttgccttttggccccatggcttgttgggtaaattatcagccccatggggatgacgatgtgctgtaccttctgccccctgcctctccagctgtttcctgtccatgtccacctcactaaccagccccactggtcttccctcagatcccagaagttccatgttccttcctgcattaaagcctccacactccctgttccccctgcctggaacgctgtcccttcatgcctggtccatccctggtcacctgtcaggttgcagtgtaaatggtttcctctcaggccagccccac

SEQ ID NO: 395997 - DNA, 409 bp, Homo sapiens
ttttgtacctattcaccaaccttaccttccgttctcagacttttaaatttcatcgttcaataaaattaaaacaactacaaaccttgaagatttgcctttttattttatcaagtaagtatattacaaatagaaaacctattatttactgtcaccatcattacttggtagaaaagcaagaaggacacactcagaataaaagatagtcctttgaaacttatcaaatccatctttatattaaaaaaaaactcaccattgttcttttggaggtgagggcatactcagtgaacttttgtctctgaccagtgaccctccatggactggcattttgaaacccctttactaaagatgccacctkggagcccctggggacccaaggatgggatgtttcccaggatgtttcctgagcttg

SEQ ID NO: 395998 - DNA, 575 bp, Homo sapiens
ggtgatctaggtggcatcttagttagagcttagcccctggcctcaacatgccacaatatgtgtcctggtgtacctgtaaaatgcttctatttcttcatctccccattgatcctaggaaggctacacctccctgctggcagatgtgtgaagaaaactaaagagggagtcaaaggaaatattctagttccttgcttctccccagcccctaactcatcttcaagcctgtttgccagtccagagatgggttggcaaaggctrcagaaattgggacattttgctgtaactaaagggaaaagtagaggacagccttatgaagggacccatgctcatttcaatttggatttgaattgcataaactccttcaccctgtccatccttttcaaaatgcagaagataaacctggctcgctcttctgttatcagcccactttctctagcagttgaaacttgaatagaaatttaagctgccctgcttaacattcgggtggcttttcctcttagagcttataaatacagaattcacttttgcttacatgagtgctgggaagatatttgagcatttttaactggaaaagt

SEQ ID NO: 395999 - DNA, 376 bp, Homo sapiens
tttaatgacaaatgatgctgctaaaagtgccggtgctcactgtgcacgtcagcacatccyaggccttgaggcaagctgaggcttctctcctgggcacactgctgaagaggccagagaggttggatgtgaagagtcagcctctctcattccatacactcacccttgttttgccagcaccagtaggagctaccctaaagcttcaggggatgcctggaatgcaggagcccagactggagccctgagcaggctctcagagccctgctccttccaacgacctccagataagctctttgttgtccccagcttggcacggagccacccagagctccaagtggagtgcccgcacttttatttctatttatttttaatacatcaa

SEQ ID NO: 396000 - DNA, 561 bp, Homo sapiens
ggagccctgagcaggctctcagagccctgctccttccaacgacctccagataagctctttgttgtccccagcttggcacggagccacccagagctccaagtggagtgcccgcacttttatttctatttatttttaatacatcaaataagatgagagaaacataagttttagtaataccgaatatacaaatgggacctagtaccctcaacttgggccatagtcaggaccatgtgtcctgaaaagcctgcaagggcaacctgcggaagggtggccagggtgccctaactccatgttcattatcwgcatggaatatggcaatttacagatgcctggtgaagagcatttccaggccacattatctggtttagactaaactaaccgttatagagatggaataagtggctttcaaaattgctgcaaaagatactcaagtcgaaccactctgataccttaaagcataaataaagcccaagagcctgaggctgctgacactcaccctactcccagtaatagctcttcatcagccacacgaagagctaaaaactaggataatctaatcag

SEQ ID NO: 396001 - DNA, 561 bp, Homo sapiens
ggagccctgagcaggctctcagagccctgctccttccaacgacctccagataagctctttgttgtccccagcttggcacggagccacccagagctccaagtggagtgcccgcacttttatttctatttatttttaatacatcaaataagatgagagaaacataagttttagtaataccgaatatacaaatgggacctagtaccctcaacttgggccatagtcaggaccatgtgtcctgaaaagcctgcaagggcaacctgcggaagggtggccagggtgccctaactccatgttcattatctgcatggaatatggcaatttacagatgcctggtgaagagcatttccaggccacattatctggtttagactaaactaaccgttatagagatggaataagtggctttcaaaattgctgcaaaagatactcaagtcgaaccactctgawaccttaaagcataaataaagcccaagagcctgaggctgctgacactcaccctactcccagtaatagctcttcatcagccacacgaagagctaaaaactaggataatctaatcag

SEQ ID NO: 396002 - DNA, 545 bp, Homo sapiens
cctgcctccaaagagctgcccagcaagccaggtgcttctcccagccctgagcccagcgctagatactcaggaggctttgcccatgggcctctccatcccccttccctcacctatgatgcttgggaagatctggggatctgagagctgagcacaggggcacaggaaggccaagatcaatgttctcgggaatccctgtgcagcaaagccccaccctaaggccttcatgggaggctgctaagttcatgtgtttcagggctcctcttcacccctccaaaatgaatacccaagcttggctgtgggagaagcttgagggccatttaacacataagctattctcttttttttaatttaaattttattttattctaagttccaggatacatgtgaaggacatgcaggtttgttacataggtcaacgtgtgccatrgtggtttgctgcacctatcaacccatcacctagttattaagccctgcatgcattagttacttatcctgatgctctccctcccccgatgccaaacaagctattattttagcctaacagt

SEQ ID NO: 396003 - DNA, 545 bp, Homo sapiens
cctgcctccaaagagctgcccagcaagccaggtgcttctcccagccctgagcccagcgctagatactcaggaggctttgcccatgggcctctccatcccccttccctcacctatgatgcttgggaagatctggggatctgagagctgagcacaggggcacaggaaggccaagatcaatgttctcgggaatccctgtgcagcaaagccccaccctaaggccttcatgggaggctgctaagttcatgtgtttcagggctcctcttcacccctccaaaatgaatacccaagcttggctgtgggagaagcttgagggccatttaacacataagctattctcttttttttaatttaaattttattttattctaagttccaggatacatgtgaaggacatgcaggtttgttacataggtcaacgtgtgccatagtggtttgctgcacctatcaacccatcacctagttattaagccctgcatgcattagttacttatcctgatgctctccctcccccgaygccaaacaagctattattttagcctaacagt

SEQ ID NO: 396004 - DNA, 530 bp, Homo sapiens
agtgagttttggagaactgtgatgtaactgtctcagcagatcctctccaaacttttgctactcccatagaagtactttgcagttttaaagcaggttctttttcagagttgaatttataaaggagctacttggatgtgagaatgtacttttccacagaaaggatgttctaagtggtagttgagctgcttcctcaacatggccttggagcctatttattgcttaatgtccttgccaggggtgtgggcatgacaataccagccacagctacccactagttgtcacagttcttgagacaggaacatgggcttagttccatgcttagaccccagaaatccatctttcctgactttggcccrgcaaaagggccttcacctccaaaagggcagttgtttctgagggattcccaggctgggatgcatacttgcagcaggggtaccaataacaggttaactctgtcttaagaagaggttcccaactctatttgcgtgagaaaagagaactatgaacatttgcacaggagaaagtaactg

SEQ ID NO: 396005 - DNA, 521 bp, Homo sapiens
acagagcttgaccatcaggaaggggcagcaggcagcaggtactgggcatgacagaagtgggcatggcctktgggcagctttctggagtcttggaccctcttaagcccacctctgagaagtaaagagccacaccagttccagccgagagcagtcagtactcctcgagtgactctttctttgtcacatacaattgcattcaaaatttcaaatttggaaaagttaaacttctcaatcattttcaccatatcttccacatacatctagaaagaggaaatgacaaaggaggtagacagaagcagacttcagctgctggtccagctttcccagcctcttgcccactgtccaaggctgaccttccctgggactcaggcatcaggagaggagaatcaggacaggggcaggcagcctctgctcacccctcactctggcatggggctgcctttggttctgccttagctcagggtgacccccattcctttcccgttaaccatctgctcagagattccttatttttaacaagt

SEQ ID NO: 396006 - DNA, 568 bp, Homo sapiens
tgtgttctgattcccttgtgcttgtggcctgaacatcttgctgctctgagtgctattaaggatttgtaatttagactgggcttagaactgaattcaccccacccattccccaagtaagagaaaactcttctagtgtgtatctgacaaatttatatgacctagatggtttggggattcctgctggatttatcagcattctaatagctgacaactgtaawtgtctttttacctagtctgcatctctgcagtaatagtgtatatatttattggggaaatatggctgcggggacttgttacacgctgttgttaatttacaaggttcttctttgagctgtctgtcatgcaccgagttgatggtcttctccttagtttgatttaactccaaaccctgcttgctgcccttctagagaagcagggtttgcacggtagtgccatgggccagagggccctggccacgcatctgtgttagcaggtggggtcagatggcatgtcctgtgatgatgttaagaagggaagttggtatgaggtttagggcaatggaggggtctccagtgtgggttggagaaca

SEQ ID NO: 396007 - DNA, 568 bp, Homo sapiens
tgtgttctgattcccttgtgcttgtggcctgaacatcttgctgctctgagtgctattaaggatttgtaatttagactgggcttagaactgaattcaccccacccattccccaagtaagagaaaactcttctagtgtgtatctgacaaatttatatgacctagatggtttggggattcctgctggatttatcagcattctaatagctgacaactgtaattgtctttttacctagtctgcatctctgcagtaatagtgtatatatttattggggaaatatggctgcggggacttgttacacgctgttgttaatttacaaggttcttctttgagctgtctgtcatgcacckagttgatggtcttctccttagtttgatttaactccaaaccctgcttgctgcccttctagagaagcagggtttgcacggtagtgccatgggccagagggccctggccacgcatctgtgttagcaggtggggtcagatggcatgtcctgtgatgatgttaagaagggaagttggtatgaggtttagggcaatggaggggtctccagtgtgggttggagaaca

SEQ ID NO: 396008 - DNA, 473 bp, Homo sapiens
ggaggtcaggctctcctcctttagatgaagaggagtcagtggagactgggctggaaatcctacacactcagcttctcagccccatcctgccatgagcagcacttggtgtcatcatgatcaagtgattttttttcatctgaaaatgggactgttaatgacatccatttataggaatgatatttggagtgatgagatgaatataaaagtgtaacttataggaggctggccatgaagttgattcgctgggatcacaaaacgcttggcccatgtgcagtcaccccccaactgccttcccaggcacactcatccacctagggtaaggtccctctcaccacagcccaccccacagactccggaatcgatgtcagctggcccaagagataacattgatttatttgccttcctrggattaatcagagaggccccaagtcatcatggaacctaaggattatttagtgatgaaacacaggggg

SEQ ID NO: 396009 - DNA, 473 bp, Homo sapiens
ggaggtcaggctctcctcctttagatgaagaggagtcagtggagactgggctggaaatcctacacactcagcttctcagccccatcctgccatgagcagcacttggtgtcatcatgatcaagtgattttttttcatctgaaaatgggactgttaatgacatccatttataggaatgatatttggagtgatgagatgaatataaaagtgtaacttataggaggctggccatgaagttgattcgctgggatcacaaaacgcttggcccatgtgcagtcaccccccaactgccttcccaggcacactcatccacctagggtaaggtccctctcaccacagcccaccccacagactccggaatcgatgtcagctggcccaagagataacattgatttatttgccttcctgggattaatcagagaggccccaagtcatcatrgaacctaaggattatttagtgatgaaacacaggggg

SEQ ID NO: 396010 - DNA, 621 bp, Homo sapiens
cttttaactttttaacttataataacacagactaaaacacaaatacattgttcagctgtataaaaatattgtctattattctataagtatttttctattttaaaatgattttattttctttttactatttaaacttttttgttaaaaatgaagaacacrcacacacattagcctaagctaacacagggccaagatcatcaacatcaccatcttccacctccacattctgtcccactggaaggtgttcagctttatgacacatagagctgtcatttcctgtgtgatgacagtgtcttcttctggatacctcctgaaggacttgtctgagactgttttacagcagctatttttttttaaataagtagaaggagtacatgctaaaaaccacaattaaaatagaatatagtaaataaagcagtagcataatcgtttattatcattatcaaacactatgttctgtacataactgtgtgtgctggactttgaaatgactggaagcacggcaggtttgttttcgccagcatcaccataggcaggtgagtaatgcattgtgctactacattacgacagctacgacgtcactaggcagtaggaatttttcagctccactataatcttatg

SEQ ID NO: 396011 - DNA, 375 bp, Homo sapiens
gctctctagctcagctccacaagcgttcccaagttctcactctcttctgggctgaggaggaaaaagccatctgtgctcacagccttttaggtggctgggctcgtcgccggcagaggagaggcatgcataggacaggccccacagcacagctctggggggcagcacaggcaaaagcrttgctgggcagtgttctccaagttcttgtcaccccacatcactaaccaattcctcctcatgggctgggtgagcctggttgaaactatcaccatccctccctctacctttcaggagagcacaccagtgagctcagggctatccaaagtgtccggatggaaactggaacaaatgttaaggcactgggggacagggaatcac

SEQ ID NO: 396012 - DNA, 593 bp, Homo sapiens
tttcctattctgccagattaatttttcctaactcatttcagatcaccttactcacagctcccagttatctatcaaactaagtccaaactccttaataagcattaagactacttacttatctttccagcattaatcactattatttctctaaatgtttccaatgttcagataaagtatatcatctactttcaccagctcagacctgaaacttttctgcttctatgcttttgttggtgtttttttttttttcctgccaagaatgtcatgcttttacatcttgtagaaatcctatccttgcttcaggacctgttttattttacttttttaattttaatttttttagacaaggtctcattctgtcacccaggctggagtgcagkggcctgatctcagctcgctgcagccttgaaattctgggctaaaacaaccctcacaccccagccacccaagtagctgggaccacaggcatgtgccactatgcctggataacttttgtattttttgtccatatggtgttttgccatgttccccaggctggtctcaaattcctgagttcaagcaatctgcccaccttggtcactgtgcccaaccag

SEQ ID NO: 396013 - DNA, 623 bp, Homo sapiens
aagcccaacatgtaagtggattttgtatatacgttctaaccaaatgctttcacaaatgccacttttaagataaaaacattttatactgggggcaaaagcactcatatttattttagttcataacttcccagtcttcagtcatccaagtaccactttcagaattatcttcatccacctgtactatttacctaatattggtctttgaattgacttacttttcttgtcctttattttttagcaataatatctgtgaaatcagttttgagatgttaagtttttctcctaatttaaattaaatgaacttgtttcattcaaatatgtatgtgtgtgaaaatttggggagaattttttaatgttcatttgcttatcaaattatcttgcatatgtgacagtaccaaagtttgggaaacaataccaatatggtacatattattttattaaaagtgctygctgagggtgggggatagagtgggtgataaaggggatggaatttccgccattttgcctatgccttctacctcactagcagtgttcgacattcctattatgggtgcttgcactgcacagtatgtataagacctcaggcttcacaacagattttacccacatctaggacagggccc

SEQ ID NO: 396014 - DNA, 623 bp, Homo sapiens
aagcccaacatgtaagtggattttgtatatacgttctaaccaaatgctttcacaaatgccacttttaagataaaaacattttatactgggggcaaaagcactcatatttattttagttcataacttcccagtcttcagtcatccaagtaccactttcagaattatcttcatccacctgtactatttacctaatattggtctttgaattgacttacttttcttgtcctttattttttagcaataatatctgtgaaatcagttttgagatgttaagtttttctcctaatttaaattaaatgaacttgtttcattcaaatatgtatgtgtgtgaaaatttggggagaattttttaatgttcatttgcttatcaaattatcttgcatatgtgacagtaccaaagtttgggaaacaataccaatatggtacatattattttattaaaagtgctcgctgagggtgggggatagagtgggtgataaaggggatggaatttccgccattttgcctatgccttctacctcactagcagtgttygacattcctattatgggtgcttgcactgcacagtatgtataagacctcaggcttcacaacagattttacccacatctaggacagggccc

SEQ ID NO: 396015 - DNA, 614 bp, Homo sapiens
tcatagagatataactccagtaaatttattctatactggctgaatcaaggtctgtaaattggtgagtttttttcccttctaggcagaataagggcamgtggggtgaaaagacagattagtaaaaaaaatattcatgtagataaggtattattttgcttaatattgctcatgttaaaattttacagccaagttcccatcattttgtagacatcttttagtatgtaattattttaaatatagcctattattttaattatctctaattaaaagcactttcacatatcaatgtgtattctaataaaaaggaactttgaattctttctattttaccataaggtctctatttctctctttaaagtaactttatatgtaggcaataagtcctggggagttcctttagataagctatgaattttaaaactaactcacatttttattttattgtgctacaaaaataaatgttaaaagacttttcactaagtgtttcttgccttcactaagtacttttcttttatctgattattcacatgctgctttcaatgaatactaactacttctatttgacattctatgtcatagtgagaaggtggattcaccatatcctaattgtcatt

SEQ ID NO: 396016 - DNA, 587 bp, Homo sapiens
gaacagctaaaatttttttaaaaagtgacaatagcaaatactagtgaggatgaagagaaactggatctcacacattactggtgagatgcaaatagtacaaacactctggaaaacagwgtggcagtttctttagaagctaaacacaatcatactcctgggcatttatcccagatagatgaatatttatgtccacacaaaggttatacataaatgttcacagcagctttctttgcaaggctcaaaaccaggaacagccaaaacatcccttaacaagtaaatggttaaataaactgtggtacatccataccatggaatactacatagcaataaaaaggagcaaactattgacctatgcaaaaacctggacggacactaacgacattatgtagagtgagagaggccaatcttaaaggttacatattatatgattccatttatataacattctccaaatgacaacattgtagggatggaaaacaagttagtggctgccaaggtttaggggaggtggagaggggtgtggatataaaggggtagcatgagatgtcttgtggtgatggaatagttctgtattttgattgcagcgg

SEQ ID NO: 396017 - DNA, 524 bp, Homo sapiens
gagatggcatattggtttcctgatcacacagcactattctcttttagaaaactgttatttccatttatgtgagtggaaaacaacatcaggatcaatctggcaaacccctgggaactgtgtttctccaggccatctttaagcctttagattaaaatataaaattgggtaacactaacaatagaagacagtgttcctttgcttctgtccccatcctctacaaagtccctgctgccttttttcctggatgtctccaggtggtgtctcacaggtgattgcaawcacagtcctgccagctcccatatggcacctgtcatgacattccttttcttcttcaatttctagctcagtgcccacagccagagcttcccaggctgcctgtccacgggtgtggcacatctgcagagcctcaggtggctcctgctactgctcaccccacaagccctgactgctaatatctgcccagggccctgtttccttccctagtattcctgtgggctggttagcttgttactcaagagccaccg

SEQ ID NO: 396018 - DNA, 567 bp, Homo sapiens
aagcaggaggatgaagatggcagaggttggaatggcattgtgccaaaaccatgggttttagagatctgagggtatatccatgctgtttactacattatttattatgtctgtctcaaagttgttgaaaacagtagttatgaaaacccatgtaggaaactggaataagacattctcaataaatggtagttctcaaaaaaagaactaaaaaaaaaaaaggctgtagtaataacatttaccaaaacgatggcatttatgggaaaaggaaagcaaaaacataaacaaaraaaagtagtttcattaaaccactctgttcatagcttttactctctattgcctcttctttgagagagttttttaattcaaagaaggacagggagctctcaaatggagctgatcctcttctctcttcttcagtgcttgtcgcattcttaagtcagtcgattttaaaaccatgactttgaaacgtttttcatcaaaggtgtactgctgagtggagaatacagccttaccttaatacaacaagtagatagtggctaggaactcaatggaagtcattcacttgtaagt

SEQ ID NO: 396019 - DNA, 574 bp, Homo sapiens
caaaatttttaaagaggcttcaaagactttcttaagaaacaagtttgaatttacttcaactccaactgagatacaaatatgtctacctataaagacaactggtttgattgacttgactctaaaaaaaaatartaaagttatctagttgaagtttatgaaatagcaagttgagaactagaaactaaggacagaggtgtatgcacactgctggattagcccttcagatctcaggaaagaaggcttcactgcttgcagattgaggagactgatgccttcagaactggattcattcattacaataactggtttagctgacagtttctacatcatgtagctctagagaagaaagtagtagcttgaatgaactttctttgcttcttttcctccacattttcttttaagaatacagcctattcatctgtacttctctgaagcccttctgcttattataagaaaaccactatttttttttaaagtttattttcatgttttttaagttttctctattatagcttagtcgtccaacaaattacttttctttagaatttgatttaagggaggtagggagaaggtc

SEQ ID NO: 396020 - DNA, 581 bp, Homo sapiens
ttacattaggcacttaacctcattattagcagtcctctgttgaccaaccttctgtataaacctgggttatagcaagctatacggtataaaaattcccctctatggggctctctgtttatttgggatccagggtcaaagataaaagacaaaacgaggcaacacaagatttgattgcactaaaggaatttaggagaagatgttgttattgagcactaagacactggggtacaagtaggcgttttctcggtcaaggaagttgtttcacctgctccttgaagraaaaattggatttagcaggatgggagaaggagaaacattttttaaaaaatttaagccagaggaatgatgtgtttcagtatcttaaaacaatagtcagagttggctagatagaagagttttatataaaaaaataatattagttaacatttaaacttaggaggtattagtgacagatgccagaattaatactgttctgctgctagctaatccaatttagtataatccaaccagcaagtttgtggaaaccatcttttaaggtggctcccaaaaattactacttcttgttatccatattcttgtat

SEQ ID NO: 396021 - DNA, 516 bp, Homo sapiens
tcttggactctggacaagaacttgggacccaccgagtatgggcacccagaaaggctgtcatactggccctttgccctcgccagcagagggcagccatcctcctcagtgaggcaagtggccaaatgagctgctaggacacagctgttgttggactgtggatggtggaactaaaagagtgctgtaacacctcctctgggacttcagggttgaaagcaccttcacctgggtgcctgcattccccttgaggcaacacgcttagtctggccgcgggttccacacggagcttgctcctgtgtcagcacgcagagcagccggccagatcctgcactcactcgcttacgtgctcccttctgcaaggggctgagcgtggtgggccaaatagaggggaatgtccctgccgtgagtctagggaaggggtcaagaaaaatcctgcatcagtttcaattttagtrtatgtgctgccgaagtgagcaagagaaaaagttgtttaaaaagttcatgttaatataatgattg

SEQ ID NO: 396022 - DNA, 516 bp, Homo sapiens
tcttggactctggacaagaacttgggacccaccgagtatgggcacccagaaaggctgtcatactggccctttgccctcgccagcagagggcagccatcctcctcagtgaggcaagtggccaaatgagctgctaggacacagctgttgttggactgtggatggtggaactaaaagagtgctgtaacacctcctctgggacttcagggttgaaagcaccttcacctgggtgcctgcattccccttgaggcaacacgcttagtctggccgcgggttccacacggagcttgctcctgtgtcagcacgcagagcagccggccagatcctgcactcactcgcttacgtgctcccttctgcaaggggctgagcgtggtgggccaaatagaggggaatgtccctgccgtgagtctagggaaggggtcaagaaaaatcctgcatcagtttcaattttagtgtatgtgytgccgaagtgagcaagagaaaaagttgtttaaaaagttcatgttaatataatgattg

SEQ ID NO: 396023 - DNA, 456 bp, Homo sapiens
tgcctgcttcctcttcacccttccgccatgattgtaaatttcctgagaacttcccagcygtgctttctgtacagcctgtggaagcgagtcaattaaacctcttttctttataaattatccagtctctttactgcagtgtgaaaacatactaaacatgcttaaacatactcagtacacttacctgggcttacagttgggcaaaatcatctggcaacacagtctactatagagtactgtgtttgtgtggctgattgggagtcatggctggctgctgctacccagcatcaggagagagtgctgtaccacatattgctagcctgggaaaagatctaaattcaaagtatggtttctgttgaatgtgtatcactttcgcaccataattaagttgaaaaattgtaagttgaaccatagtaaatagaggactgactgtaaagagaaagagatttattttaggga

SEQ ID NO: 396024 - DNA, 456 bp, Homo sapiens
tgcctgcttcctcttcacccttccgccatgattgtaaatttcctgagaacttcccagctgtgctttctgtacagcctgtggaagcgagtcaattaaacctcttttctttataaattatccagtctctttactgcagtgtgaaaacatactaaacatgcttaaacatactcagtacacttacctgggcttacagttgggcaaaatcatctggcaacacagtctactatagagtaytgtgtttgtgtggctgattgggagtcatggctggctgctgctacccagcatcaggagagagtgctgtaccacatattgctagcctgggaaaagatctaaattcaaagtatggtttctgttgaatgtgtatcactttcgcaccataattaagttgaaaaattgtaagttgaaccatagtaaatagaggactgactgtaaagagaaagagatttattttaggga

SEQ ID NO: 396025 - DNA, 582 bp, Homo sapiens
ctaaacatgcttaaacatactcagtacacttacctgggcttacagttgggcaaaatcatctggcaacacagtctactatagagtactgtgtttgtgtggctgattgggagtcatggctggctgctgctacccagcatcaggagagagtgctgtaccacatattgctagcctgggaaaagatctaaattcaaagtatggtttctgttgaatgtgtatcactttcgcaccataattaagttgaaaaattgtaagttgaaccatagtaaatagaggactgactgtaaagagaaagagatttattttagggattggctcgtgattatggaggcaggcaagtccaaagtcttcagggtgggcaggcagactttagacaggggaagagccaatgctgcatttaacacctaacgcagtctgctggaagaattccctcttccttacgataggtcagtyctttgttccttccaagacttcagctgattaaataagtctcattcctattatacagggtaatctccttaacccaaagccaaccaatttaatgtaaatcttatccaaaaatacactcacagaagcattcattta

SEQ ID NO: 396026 - DNA, 587 bp, Homo sapiens
gaggaagaagagagaagttcaattataaccactggtggtgattattataccaactatttttttctttttcttttattttgtatattttttatttcaatagtttttggggtagaagtggttttttgttatatgcatgaattgtayagaggtgtactctgagattttactgtacgtatcacccaagtagtgtacattgtacacatgtgtacttttttatccctcactcccttccacctctcccttctgagtccctaaaatttattacatcactctgtgtgcctttgcttacccatagtttagcttccacttataagtgaacacatgtggtatttggttttccaatcctgagttacctcacttagaataatggcgtccagctctatccaagttgctgcaaaagacattatttcattcttttttatggctgggtagtataccatagtatatatataccgcattttctttatccactcatcaggtgatgggcacttagtttggttgcatatctttgcaattgtgaattgtgctgtgataagcatacacatgtaagggtctttttgatataatgactatttttcgtttgggta

SEQ ID NO: 396027 - DNA, 587 bp, Homo sapiens
gaggaagaagagagaagttcaattataaccactggtggtgattattataccaactatttttttctttttcttttattttgtatattttttatttcaatagtttttggggtagaagtggttttttgttatatgcatgaattgtacagaggtgtactctgagattttactgtacgtatcacccaagtagtgtacattgtacacatgtgtacttttttatccctcactcccttccacctctcccttctgagtccctaaaatttattacatcactctgtgtgcctttgcttacccatagtttagcttccacttataagtgaacacatgtggtatttggttttccaatcctgagttacctcacttagaataatggcgtccagctctatccaagttgctgcaaaagacattatttcattcttttttatggctgggtagtataccatagtatatatataccgcattttctttatccactcatcaggtgatgggcacttagtttggttgcatatctttgcaattgtgaattgtgctgtgataagcatacacatgtaagkgtctttttgatataatgactatttttcgtttgggta

SEQ ID NO: 396028 - DNA, 568 bp, Homo sapiens
aggctgaagcaggagaatcacttgaaccrgagagacagagattgcagtgagccaagatcgcgccattgcacttcagcctgggcaacaagagcaaaactccatctcaaaaaaaataaacaaataaaaaagaaaacatcttattttggccgggtgcggtggctcatgcctgtaatcccagcactttgggaggctgaggtgggcagatcacaaggtcaaggtcaggagtttgacatcagcctggccaatatggtgaaactctgtctctactaaaaattgaaaaaattagctgggcacggtggtgcgcacctgtagtcccaactacttgggaggctgaggcagaagaatcatttgaaccctggaggtggagtttgcagtgagccaagatcgcaccactgcactccagcctgggcaacagagtgagactccatcaaaaaaaaaaaaatcttttttttaggagaatcacactgaaatctgcagcaatgaggtgtcataatgtccacatttcactttcaaatagacaagaagtaaaagcaaatggcaaatgtcaagcattgtggaacctaggtgg

SEQ ID NO: 396029 - DNA, 568 bp, Homo sapiens
aggctgaagcaggagaatcacttgaaccggagagacagagattgcagtgagccaagatcgcgccattgcacttcagcctgggcaacaagagcaaaactccatctcaaaaaaaataaacaaataaaaaagaaaacatcttattttggccgggtgcggtggctcatgcctgtaatcccagcactttgggaggctgaggtgggcagatcacaaggtcaaggtcaggagtttgacatcagcctggccaatatggtgaaactctgtctctactaaaaattgaaaaaattagctgggcacggtggtgcgcacctgtagtcccaactacttgggaggctgaggcagaagaatcatttgaaccctggaggyggagtttgcagtgagccaagatcgcaccactgcactccagcctgggcaacagagtgagactccatcaaaaaaaaaaaaatcttttttttaggagaatcacactgaaatctgcagcaatgaggtgtcataatgtccacatttcactttcaaatagacaagaagtaaaagcaaatggcaaatgtcaagcattgtggaacctaggtgg

SEQ ID NO: 396030 - DNA, 568 bp, Homo sapiens
aggctgaagcaggagaatcacttgaaccggagagacagagattgcagtgagccaagatcgcgccattgcacttcagcctgggcaacaagagcaaaactccatctcaaaaaaaataaacaaataaaaaagaaaacatcttattttggccgggtgcggtggctcatgcctgtaatcccagcactttgggaggctgaggtgggcagatcacaaggtcaaggtcaggagtttgacatcagcctggccaatatggtgaaactctgtctctactaaaaattgaaaaaattagctgggcacggtggtgcgcacctgtagtcccaactacttgggaggctgaggcagaagaatcatttgaaccctggaggtggagtttgcagtgagccaagatcgcaccactgcactccagcctgggcaacagagtgagactccatcaaaaaaaaaaaaatcttttttttrggagaatcacactgaaatctgcagcaatgaggtgtcataatgtccacatttcactttcaaatagacaagaagtaaaagcaaatggcaaatgtcaagcattgtggaacctaggtgg

SEQ ID NO: 396031 - DNA, 560 bp, Homo sapiens
gtataccattatcaggaggctgaggcaggagaatggcatgaacccaggaggcggagcttgcagtgagccgagatcatgccactgcactccagcctgggtgacaaggcaagactccatctcaaaaaaaaaaaagtataccattatattattgcagtgcagttggccttccatattggtaggttctgcatcccccaattcaaccaactgtggatcaaaaatatttgaaaaaataaacaataaaaaatagcaataagtcaacaaaaaataattcgaatgttaaaacccgtaccctgtaacacctatttacatagcatttccattgtattaggtattataagtaatctagagatgatttaaagtatacaggaggatgtgcatacattatatgcaaatactatgccattttatataaggsacttgaacatctgcagattttggtgtctgtggcgggggtgggggtcctggaaccaatcatctgtggatagcaaggaacagttttaaggttaggatttaattgagatttatatttgcaactccaacgatatctaggacaatgtttg

SEQ ID NO: 396032 - DNA, 560 bp, Homo sapiens
gtataccattatcaggaggctgaggcaggagaatggcatgaacccaggaggcggagcttgcagtgagccgagatcatgccactgcactccagcctgggtgacaaggcaagactccatctcaaaaaaaaaaaagtataccattatattattgcagtgcagttggccttccatattggtaggttctgcatcccccaattcaaccaactgtggatcaaaaatatttgaaaaaataaacaataaaaaatagcaataagtcaacaaaaaataattcgaatgttaaaacccgtaccctgtaacacctatttacatagcatttccattgtattaggtattataagtaatctagagatgatttaaagtatacaggaggatgtgcatacattatatgcaaatactatgccattttatataaggcacttgaacatctgcagattttggtgtctgtggcgggggtgggggtcctggaaccaatcatctgtggatagcaaggaacagttttarggttaggatttaattgagatttatatttgcaactccaacgatatctaggacaatgtttg

SEQ ID NO: 396033 - DNA, 600 bp, Homo sapiens
ggattttacttattccatttactttcttcagattgacctcaaatatctcargcaattgaatcaggcagaaaaaatatatctctcacactgttatcttcaatgacagtggcaatctgaatgaattttattgaaagtaatttagcattgactggttaaatatacaaactacccatctaaatcagagatagtgccggactacttcaaattagagacaaaaaataaatatttggagattacatcacaaattggaactgtcttagaaggcagttcaaatgtaaaaatgaaataaattatttaaatttaaaatattttactccatccatcagtgacaaaagcagctgcactttctctttctaatcataacaatagaaaacaagctagctattttttaacaaacaagttgaggaaagatatgccttcttagctccattcttttgccccattaaaagtatattttcgaagaggtattctggtgatctttaatccaggcagtaactatacagagaaaaaagtagccacacctgtagtatagttgaacttttaactaccttaaagaccagacaggaattctctggctttttcctgagagttttaatgttt

SEQ ID NO: 396034 - DNA, 539 bp, Homo sapiens
taattccgaattccatacaagtaaaatgatttaatcagaatttccaattcactctcccattgggtttttttctattctttctaattagatgtttatttatttacaatgacaaattaactatgtgcatactgaagaaaatctgtaaattttttaaaaatcacctataattccattacccatagagataactgctatttattttttttcaaatatctcttcagtctttttttcctccyaaaaatgttgagatcacactattttgattttgtggcttaatattacaatacaaaatattttaagctttagtaaataaaaataataaatttctataaaatatttttgatgactaatattacaatgcatggtatcttaattcacttaactatttgccaattgttggacattaaggtttttttttttttacaactttttactatttcacataattctataatgaacatctgtgcataaaacttatttagatcatgtccttagagtcattttcctaatgtagaatgactgcacagattttaaaaaca

SEQ ID NO: 396035 - DNA, 502 bp, Homo sapiens
ctgttttaagacaaattccttgtcagcttgaagtttacatactagttgggagaagtcagggaataagtataggctgggcatggtggctcactcctgtagtcccagaactttgggaggccgaggtaggtggatcaccttaggtcaggagttcaaggccagcctggtgaatatgttgaaaccccatctctactaaaawtacaaatattatctgggcgtggtggtgggtgcctgtaatcccatctattcaggaggctgaggtgggagaatcgcttgaacctgggaggcagacgttgcagtgagccgagatcacaccactgtactccagcctgggcgacagaacaagactctgtctcaaaaaaaaaaaaaaaaaaaaaaaaagagtaagtacataagcaagtatattggtgttatgtcaaatggaaatacatgctatgagggaaaaaaaaaaaactaaaacaagccaggaggattgggagtgctggtgaatattatttaatgtaca

SEQ ID NO: 396036 - DNA, 502 bp, Homo sapiens
ctgttttaagacaaattccttgtcagcttgaagtttacatactagttgggagaagtcagggaataagtataggctgggcatggtggctcactcctgtagtcccagaactttgggaggccgaggtaggtggatcaccttaggtcaggagttcaaggccagcctggtgaatatgttgaaaccccatctctactaaaaatacaaatattatytgggcgtggtggtgggtgcctgtaatcccatctattcaggaggctgaggtgggagaatcgcttgaacctgggaggcagacgttgcagtgagccgagatcacaccactgtactccagcctgggcgacagaacaagactctgtctcaaaaaaaaaaaaaaaaaaaaaaaaagagtaagtacataagcaagtatattggtgttatgtcaaatggaaatacatgctatgagggaaaaaaaaaaaactaaaacaagccaggaggattgggagtgctggtgaatattatttaatgtaca

SEQ ID NO: 396037 - DNA, 521 bp, Homo sapiens
aagcgcttaatagtgcttcagaggggtagacttttactctaatacgctgcaggacgacttcacctcgcttccctttacagctaagcatgtgcctgagttggcagtgcagcagcattcctctggccctacctctccagagcaactcttgccatgtgagtgtttagtattcagcaggcaaatgctgtaagccaaggggcttcaagcttgcttggatttaaaatcaaggtctaattctaatggaaaacacctagtaaagcatcccaaagtacacctgaagataccatctattccatctaatgtgatcatttgagctgcgtgcttcatcaacttagtattgcattggtataccaacaacaaacgcgtgttgcagcaacttctgtcacaggatgattgtgctttgaggaggagcatagctctctcgtaaggtagaggcagggttacttaaggaaaacacgttctggccactcragccagtgtttggagtgttcagagccaacactcgatcacctgtgttcactact

SEQ ID NO: 396038 - DNA, 606 bp, Homo sapiens
gacaaattgagcagctcttcatgttgcctgctcattcaagatgaccatgcttctctccccaaggactgatcactttgattgatgaccgattgaatttgccttatgtacagggtgactcagagacctccaagtattagaaaatgtgtccttagtttagatccaaatctatcttctgctcatcaagtgatatatctatggccatagaaatcagacaaaattcctttccagatggattttttcagatatttttgttaacttgttaaattgaggtaaaacatacatgaaatgcacaaatcataggtgtacaactccattaacgtttacaaagtacacayacctgtataaccatgacccagatgaagaagtaggacattcgctgccacctcaaaacctctcccctgcctcctcccagctgagagtccccaaaaggtaaccactgttctgatttctagtcccatgcatgtgttttgcctgtttttctattctatgtaaatgtaataaaatatagatttttaatgtctggatatttatctcaacattttatctaggacgcacccacatctgtgaaatagcagcccttcattactgtgtagtatcctcttgtat

SEQ ID NO: 396039 - DNA, 503 bp, Homo sapiens
tgatttgcatagctcctgtgagtggataacatgcaaatttgtaaagcattccatattttttattaccactagaccaaccctataagaaatgcctaagtctggccaggcatggtggctgatgccagtaatcccagcactttgtgaggctgaggcaggcggatcacaaggtcaggagatatagagactatcctggctaacacggtgaaaccccgtctctactaaaaatacaaaaaaattagccgggtgtggtggcgggtgcctgtagtcccagctactcgggaggctgaggcaggcaggagaatggcatgaaccttggaggcggagcttgcagtgagtgagccgagatcgcgccactgcactccagacctctgtcttaaaaaaaaaaaaaaaaaaaaaargaaatgtttgagtcctatacctgaaagcaaaaaagaatatctactatcatgaaaacacacaaaacacacttgaagaagatggcagataggaggcagggctaataa

SEQ ID NO: 396040 - DNA, 527 bp, Homo sapiens
ttttgtgtatagataagtgctacaagtaaaggtaaggatcctaccagtgtataagataagaagtacaagcctgctttcaggcattctgcttgattacctcaaccagtaataataattagggtgggagctagtgtggcttcacagataatacaaaatatgattagttctgtggccgtgaatgttataattaaaaatatctgtatccctgctagtactgatatataaaattttttttcctgggaacgattctttggatagattatattggcttgctaaaattataagggatagtagccaggctgttaggattagaaggggtgatgacagtggatcagaamaaaaaaaagttaatgagaagttgaagagttatcattaaattggttgaagaatagcaggctgatgagacagataagtaaactgtggaagctgtattaattcagattgtagagttcttagagcatcacattattgggagtaatataattgttgggataataatttttagcattggagtaaatttaggtttg

SEQ ID NO: 396041 - DNA, 527 bp, Homo sapiens
ttttgtgtatagataagtgctacaagtaaaggtaaggatcctaccagtgtataagataagaagtacaagcctgctttcaggcattctgcttgattacctcaaccagtaataataattagggtgggagctagtgtggcttcacagataatacaaaatatgattagttctgtggccgtgaatgttataattaaaaatatctgtatccctgctagtactgatatataaaattttttttcctgggaacgattctttggatagattatattggcttgctaaaattataagggatagtagccaggctgttaggattagaaggggtgatgacagtggatcagaacaaaaaaaagttaatgagaagttgaagagttatcattaaattggttgaagaatagcaggctgatgagacagataagtaaactgtggaagctgtattaattcagattrtagagttcttagagcatcacattattgggagtaatataattgttgggataataatttttagcattggagtaaatttaggtttg

SEQ ID NO: 396042 - DNA, 668 bp, Homo sapiens
acttgtgcttactctaaggcctttttagggtttgctgaagatggtggtatataggctgagtggcgagagatggcgaggtatatcggagtttaccgattatacaacaggctcctctagagggatataaagcactgccaagtcctttgagttttaagctgttgtttgtagtactctggcgagtagttttgttaatttaactatctgggtttagggctaagcayagtgaggtatctaatcccagtctgggtcttagctatatgttttcaggatatcaaactcacttttgtagcttatgtaacaagtcttcacatgtacctctgagcctaaataaaagtttttaaaagtctattaaaagttaagttctatataaaagaaaatctttgtgtttttaaaaaatataaaatactttttacttaacttttacattgttaagaagacataaaactttattaaataaattaagaaaatatttgttgctgccagtttaaaatggcagactgaaaagatgtagttacctcttcaatgtctctcagttttatttaacttagggtaaagacatataatatgagataaatttataaccaaagtacgttttggagcagagagcccatccctggaccaaatattctgatggctctttcatagctaaaagtagaaggagttataaa

SEQ ID NO: 396043 - DNA, 551 bp, Homo sapiens
gatttctgaaattgaaaactcagcagaaaggtttcctgataaagaaatgtcctagagtacatagcaaaaagacaaagaaatagaatatagcagattttgattcctaataaataggaggttccaaagaaagaacaaagaaaatggagaagcagaaattatgtatgagytctaaattcctagagttaaaaacagctatgagactttatatttaaagggtcactaagtgccaagcagaatgaaattaaaaagacctacacctagacacgtaataatgtaatctaaaatatctagaatgaagataaaatattaagagcttccagaaaaaaaaatagcctataaataatgagttttggtgtagaagatattttcaatgctcctctgtgccacagccccttgctgcagatctaatttcagaacatctgaaaagcacatttcacataaagggacacctcacagatacagcttctcaactcaagtgcatactgtctttccaggggataattctgggtggcattatatgtgcttcaaaaatcctagcagactaaagctcc

SEQ ID NO: 396044 - DNA, 563 bp, Homo sapiens
gtttccccttgtgattaaaccagctaagactggtgggatctaaaatggcaggtcacctgacctctgaagagcttctaacttcattataatctaatttccatgctcagtgacactcccacaagcaccatgaccattgacaatcactatgacaatgaccagaataaaccataaaatgacaaaaaggaaggtggcaactcccgttccaagaagttctctacccactcccagaaaatacatgaatattcctctcctcgtttttaatgcccaaccctttcattaaatatgccctatacctgcacttctagacgctcacttttggttttgcatattgacttygtagcactggacagggaaagaccccattttaagggggaccaactttgttggtatcgctcacatggcctttcctcaatgtgtgtacttgtagagaaatccgtctttcttcctcttcttataagggaactaatctcatcatgatggctccacccccatcagctcatctaaatgttattacttctcaaaggccccacctccaaagatagtcacattggaggttaaggctt

SEQ ID NO: 396045 - DNA, 563 bp, Homo sapiens
gtttccccttgtgattaaaccagctaagactggtgggatctaaaatggcaggtcacctgacctctgaagagcttctaacttcattataatctaatttccatgctcagtgacactcccacaagcaccatgaccattgacaatcactatgacaatgaccagaataaaccataaaatgacaaaaaggaaggtggcaactcccgttccaagaagttctctacccactcccagaaaatacatgaatattcctctcctcgtttttaatgcccaaccctttcattaaatatgccctatacctgcacttctagacgctcacttttggttttgcatattgacttcgtagcactggacrgggaaagaccccattttaagggggaccaactttgttggtatcgctcacatggcctttcctcaatgtgtgtacttgtagagaaatccgtctttcttcctcttcttataagggaactaatctcatcatgatggctccacccccatcagctcatctaaatgttattacttctcaaaggccccacctccaaagatagtcacattggaggttaaggctt

SEQ ID NO: 396046 - DNA, 605 bp, Homo sapiens
aattaagtgctttaccagaagtggtacggtaaataatgctaagtwcctcaaactagactttgtatttcaagtctcattctactatatcaaagttgactagtctggagtttattttatccaagaagtggtgaaatatcattaaaaatttgtattaattcaaaatgaagtattttcttccactcttcaggatatttgtgtcaattgagtgttattacttttccctaacagcataagagaaacaccaaaaatttaattctttcactcaattatttttctaaactctaggtttatgctaggatctgacttcgaacatttaattccaatataagtcggtggcaccaagaaaagtttcttaaatttctaaaactgcatttatctttttcacaatttccaaccatgctgagcagaagttattttttttttaacttaccaattaaaatatttccaactcctctggtttcaacaatcccttttcagtctcttcaaagttaaacatcctattaaggctgtttcaaatttacctctttcacataatgtactattttataggtaagtgctcagtctttcagatttcactctttctctttacttttctcaagtttata

SEQ ID NO: 396047 - DNA, 586 bp, Homo sapiens
ctgtcacacatcctgagaggggagtcagggagcagagaactctcctgtttcagtatgatcaaggataatctcctgtacttaaagtcagctgattgtagatgttagtcacacctagaataactccccaatagcacctagattagtgtttcattaaataattaggtactatagcctgctcaaattgacacacaaaacaaagcatcacatcaaacaaagccccaaatttccttaaaattgcctataaagttccatataatctagctctgtgttatctctgtctccatctcttgtcattcttcttcatattcactctggtccagtcacactgttctccctgcaattgctcaaatttaccaagtaggtttttttctttagaaacttttgtttttctctctgaaatatatatcccctaaaggcctcaacttgctcatattttgctcaaaatctcccttcttccctttacaactttatcacccttcataacactcatcacaatctgacatgtaacatatttwcacgcttctgtgttcattggctatctctttccactaggagctaagctttaggagggcagggatctttgtct

SEQ ID NO: 396048 - DNA, 641 bp, Homo sapiens
atgtttactctgccttcaagacaaaaacaaataatttcttggagaactttgagtagattattatcaccaccagattccagtataaaagtgacagcccaaaaaaaaaaaaaaaaagaattcctgctttaaaaggraaaaaacatgatggggttatttcactttagaatggaggtttgtatttcaagatattgttttctctaggccattccatgaaaaggagttcggtaggaatgatgtctatgacattcagaacattagcttctggcagaatcacaagtagaaaagtcatttcaacataaattattttaaaattaaatgagattcaactttgcaagagatactggattaagcggcttaacttctatgaattcccaagacttatttagaaactgagattgatcacagtaacctatatttcacagggtttttatgagaactgactgggtaaatatatctgatttataaactgtaaaatcttataaaaagtcatttgtcacaattagctcttgctatgtaacagactacccatatttttaaatattaagtggatttataacttaaaaaataaaatttttaagtttgcttttgcttttgtatgtaatcatgtctttctatcttatctctatttcatacagagaaga

SEQ ID NO: 396049 - DNA, 492 bp, Homo sapiens
tgatttccaggcaaattttcgcatgcaccacagtraagaaatgggtttctctgtggtaagagagtaaagcaaatggcagtgctaagtaggagacacaagtactcaaataaccctgactccagcttggattgacatccttactctttatgcactaatgtgaaattcaactcaggctcagctacctccatggggagcctccaactacgtgatttcctcgaattctctctactccctggggtccattcagctctctgatattatatcagtcttataatttcagacccacagaggcccacgaagatcaagcactagcaaagaagataggaatcttgagaaaacatacacttgagctcctctaggtaaaagaacagaaaatgagcaaaaggagtaggttcagttgtacagagcaatgtgcgtgtgagaggttgtgactctctctgtatgaatacctttttcttttttagccttcggatttaatacagatagcacctt

SEQ ID NO: 396050 - DNA, 642 bp, Homo sapiens
gaagatcaagcactagcaaagaagataggaatcttgagaaaacatacacttgagctcctctaggtaaaagaacagaaaatgagcaaaaggagtaggttcagttgtacagagcaatgtgcgtgtgagaggttgtgactctctctgtatgaatacctttttcttttttagccttcggatttaatacagatagcaccttttctggccaatgtacttgaaaaaaaaatttgtgcaatgatttaaaataatttccagaagggtatatcaccctaaaatattcaatgaggcttatttcctttcttatagaacaataaatctctattgtacatacaataggatatttcagatacattttgttgcatrtttggcacccttttgaatattcatattgcccaacaagccatttattagagctttcataagagcactttttaatcttctatacaaaagcgtaaattccaagtcttcaatatgaattcactaaagctgtattcaaatagagtaattatccttaagtgtatatgtttagaatatatctaagatacttatgtattaaatctggtagttctgattgcgtttattttgatagtgagttatgaatcccctacacttaagaggaaatgtgttttcaagccccaaaagtag

SEQ ID NO: 396051 - DNA, 642 bp, Homo sapiens
gaagatcaagcactagcaaagaagataggaatcttgagaaaacatacacttgagctcctctaggtaaaagaacagaaaatgagcaaaaggagtaggttcagttgtacagagcaatgtgcgtgtgagaggttgtgactctctctgtatgaatacctttttcttttttagccttcggatttaatacagatagcaccttttctggccaatgtacttgaaaaaaaaatttgtgcaatgatttaaaataatttccagaagggtatatcaccctaaaatattcaatgaggcttatttcctttcttatagaacaataaatctctattgtacatacaataggatatttcagatacattttgttgcatgtttggcacccttttgaatattcatattgcccaacaagccatttattagagctttcataagagcactttttaatcttctatacaaaagcgtaaattccaagtcttcaatatgaattcactaaagctgtattcaaatagagtaattatccttaagtgtatatgtttagaatatatctaagatacttatgtattaaatctggtagttctgattgcstttattttgatagtgagttatgaatcccctacacttaagaggaaatgtgttttcaagccccaaaagtag

SEQ ID NO: 396052 - DNA, 537 bp, Homo sapiens
gagaggcgctaaccaaagtgattgacagtgaaaataaaatgtttaggatagtttctactggattgagagtgttaaatgtcacatgagaatctgtagaaacaagcggaccaccaaaaggattgaaataagaaaatgatgagctataagcattgtcstagattaatctggaggccggggtaaagaagggtattaagaaactaatgattactttggggactttaaatgtatacaacatactggaaaagaagacaggctctggaatgaatgtggctgggctggactcccagttcttccacttatcagctctgtaatcttggacaaacttttggaattccggtgctacaattttcccatctaaaattttgacataataaagtacctaattcactgggtaattatgaaagtcaaatgggttaatacatcttggtataaagtcttggtataaatctagcccatcataaccactcaataaaatattactatcattaagaattatatgtacatgttgcatattcacataaacacaattttatgtta

SEQ ID NO: 396053 - DNA, 537 bp, Homo sapiens
gagaggcgctaaccaaagtgattgacagtgaaaataaaatgtttaggatagtttctactggattgagagtgttaaatgtcacatgagaatctgtagaaacaagcggaccaccaaaaggattgaaataagaaaatgatgagctataagcattgtcgtrgattaatctggaggccggggtaaagaagggtattaagaaactaatgattactttggggactttaaatgtatacaacatactggaaaagaagacaggctctggaatgaatgtggctgggctggactcccagttcttccacttatcagctctgtaatcttggacaaacttttggaattccggtgctacaattttcccatctaaaattttgacataataaagtacctaattcactgggtaattatgaaagtcaaatgggttaatacatcttggtataaagtcttggtataaatctagcccatcataaccactcaataaaatattactatcattaagaattatatgtacatgttgcatattcacataaacacaattttatgtta

SEQ ID NO: 396054 - DNA, 563 bp, Homo sapiens
taatttggagggagcaaatacagtgacatagaaagaaattctactttccaagaaatcctaagtgcttttaaaccatgctcttcttcttgagacactgaaagcacctggcccttccatctttcatcccatattccttttcagggtctaggacttatttagggaaatacatcagcttttttgtcacttgcttcttaagacttctttgtgcttcccatactagtggatcctttctgccttgttaattgcctcagactaatcaagtaaactaaactctcattctctcaatgaacaataggtaagcattaactgaaatctcataaatatctgtatttaatctttctatgaaaacagacatgtagcctctgtttctcactgrgaggtgaagccggctgggcttctgggttgggtggagacttggagagcttttctgtctagctaaaggattgtaaacacaccaacaagcgctctgtgtctagttaaaggtttgtaaatgcaccagtcagtactctataaaaatgcaccaatcagcactctgtgtctagctgaaggtttgtaaatgcacc

SEQ ID NO: 396055 - DNA, 591 bp, Homo sapiens
  misc_feature (1)...(591): n = A,T,C or G
atgttgtatgtccttgcctttcattccattttcatgactctatattgtcaagatgtcagttcttcccagcttgacttatagattcagcgcagtccccgtaaaaatcccagcaaattattgtgtggattgaaaaaytggttttaaaatttatatagaaaggtaaaagacccaaattagccaacacagtgttgaaggagaaggagaaagttggaaggctgacacaactttacttcaagacttattatcaagctacagtaatcaaaaagagtggtactggtgnaaaaatagacaaataaatcaatatataagccatccagtctatggtattgtgttatataagcccgaatgactaatacactacacaatcagagtgtggaccaatccaaatatatttccttattattttcctttattttaatcaacctaactactgagaatgtagccttttgtgttttatgctacagtctaaattaggaatgttaactttgtggattcaaggcaaaatgtcttgtcctctttgtaattattagaaagcaaggcaataagtagcacagaataataaatgacctaagtttgctacaagtaaatgcc

SEQ ID NO: 396056 - DNA, 591 bp, Homo sapiens
  misc_feature (1)...(591): n = A,T,C or G
atgttgtatgtccttgcctttcattccattttcatgactctatattgtcaagatgtcagttcttcccagcttgacttatagattcagcgcagtccccgtaaaaatcccagcaaattattgtgtggattgaaaaactggttttaaaatttatatagaaaggtaaaagacccaaawtagccaacacagtgttgaaggagaaggagaaagttggaaggctgacacaactttacttcaagacttattatcaagctacagtaatcaaaaagagtggtactggtgnaaaaatagacaaataaatcaatatataagccatccagtctatggtattgtgttatataagcccgaatgactaatacactacacaatcagagtgtggaccaatccaaatatatttccttattattttcctttattttaatcaacctaactactgagaatgtagccttttgtgttttatgctacagtctaaattaggaatgttaactttgtggattcaaggcaaaatgtcttgtcctctttgtaattattagaaagcaaggcaataagtagcacagaataataaatgacctaagtttgctacaagtaaatgcc

SEQ ID NO: 396057 - DNA, 528 bp, Homo sapiens
caatttcttgggcttctgatttcttccaaatgaaatacattttacaatgtgtttacatccccacaaattgaaagtaacttctgtcaacatagagactaaatgcttggtacagacatcttgcatggatgctaccaagaattccaaagttgtaaattatctcccttttcttttcttctatagaatattttatctactttattatgtctatcagatgctgcctggttagatggacatttatgtatgtcttcctattaaactgcaaggtccatgataactgggtcttttcaacctctttgtgtagttgttattactaatcacaatgaataaatcatagaagattttcaacatttgcttactgagtctggaggtaaatattgtgaatrcaagctaatctttctttttaagaatgtacaaaatgctattattctatatgataaggaaccaaatagaaatcagtaaagacagaagaaggcttcttttgtcctctatggatgatatgtcattcctaaaaaacacatgctgtagttt

SEQ ID NO: 396058 - DNA, 522 bp, Homo sapiens
atgagtctgtactagtatgtataacattttgttatttatggacatttaaaaacaaatgaaaacgcttgaaaatagctgaaaattaaatacatcttaaccaatataactaagtcaacttcctccccatggagaataaaatagcaacaaaaaattcagggtttctagttaccaaaagtgtattctcctatctcttctctctcttgtttcacatattttargcattttgccaatgtttaggccagtgatccatttattgccatgagataatataatgatagatgatagtggtcagaagtcttctcaaactgcacagctttctagaacccttagtagatttgggagttttgtgtttcttcccatgataatttgattatactttgccaactgccaaaattcttgtactagagaaatgaataaagtagccctgtagtgaggctcttcatttgaagtcagattttcactaaatacaacaaaatggctgcaggcagatgtttcacagtggccctaaaatgccatgttttg

SEQ ID NO: 396059 - DNA, 590 bp, Homo sapiens
gagtaatagcaagaggagttaaggtttttctgctacacttggcctctaataagcaaaccttctatagtcacacctggggctgccatgtgcagaacacagcagtgaccatcaactgtaatatgtgatccattaagtttaccaactagagatgcaaaatattcacacattcctctagacttttccttgcctactaacacctcatcttctgcatgttgtgagactagtcatattcagccaattaatattcagccaattmggctaaggaaggtttactcaaacagctgtttaacatcttttctgtacttctcactttattccctgcagggaagaagaacaaacaacaaaccaattgcagtgtgtataagaaaataaaggctgggcacggtggcatatacctataatcccaacactttgggaggctgaggtgggcagatcacaaggtcaggatttcgagaccagcctggccaatatggtgaaacccagtctctactaaaaatacaaaaattagctaggtgtggtggcgggttcctgtagtcccagctactcgggaggctgaggcaggagaattgcttgaacctggaaggtggagg

SEQ ID NO: 396060 - DNA, 590 bp, Homo sapiens
gagtaatagcaagaggagttaaggtttttctgctacacttggcctctaataagcaaaccttctatagtcacacctggggctgccatgtgcagaacacagcagtgaccatcaactgtaatatgtgatccattaagtttaccaactagagatgcaaaatattcacacattcctctagacttttccttgcctactaacacctcatcttctgcatgttgtgagactagtcatattcagccaattaatattcagccaattcggctaaggaaggtttactcaaacagctgtttaacatcttttctgtacttctcactytattccctgcagggaagaagaacaaacaacaaaccaattgcagtgtgtataagaaaataaaggctgggcacggtggcatatacctataatcccaacactttgggaggctgaggtgggcagatcacaaggtcaggatttcgagaccagcctggccaatatggtgaaacccagtctctactaaaaatacaaaaattagctaggtgtggtggcgggttcctgtagtcccagctactcgggaggctgaggcaggagaattgcttgaacctggaaggtggagg

SEQ ID NO: 396061 - DNA, 590 bp, Homo sapiens
gagtaatagcaagaggagttaaggtttttctgctacacttggcctctaataagcaaaccttctatagtcacacctggggctgccatgtgcagaacacagcagtgaccatcaactgtaatatgtgatccattaagtttaccaactagagatgcaaaatattcacacattcctctagacttttccttgcctactaacacctcatcttctgcatgttgtgagactagtcatattcagccaattaatattcagccaattcggctaaggaaggtttactcaaacagctgtttaacatcttttctgtacttctcactttattccctgcagggaagaagaacaaacaacaaaccaattgcagtgtgtataagaaaataaaggctgggcacggtggcatatacctataatcccaacactttgggaggctgaggtgggcagatcacaaggtcaggatttcgagaccagcctggccaatatggkgaaacccagtctctactaaaaatacaaaaattagctaggtgtggtggcgggttcctgtagtcccagctactcgggaggctgaggcaggagaattgcttgaacctggaaggtggagg

SEQ ID NO: 396062 - DNA, 590 bp, Homo sapiens
gagtaatagcaagaggagttaaggtttttctgctacacttggcctctaataagcaaaccttctatagtcacacctggggctgccatgtgcagaacacagcagtgaccatcaactgtaatatgtgatccattaagtttaccaactagagatgcaaaatattcacacattcctctagacttttccttgcctactaacacctcatcttctgcatgttgtgagactagtcatattcagccaattaatattcagccaattcggctaaggaaggtttactcaaacagctgtttaacatcttttctgtacttctcactttattccctgcagggaagaagaacaaacaacaaaccaattgcagtgtgtataagaaaataaaggctgggcacggtggcatatacctataatcccaacactttgggaggctgaggtgggcagatcacaaggtcaggatttcgagaccagcctggccaatatggtgaaacccagtctctactaaaaatacaaaaattagcyaggtgtggtggcgggttcctgtagtcccagctactcgggaggctgaggcaggagaattgcttgaacctggaaggtggagg

SEQ ID NO: 396063 - DNA, 606 bp, Homo sapiens
aaggcagtggagctcagtaagaagatgagcatggtgcaaagtggcatcaaataacaatgaattcacagtctgaaggaaaaaattctaaggaagtataagatacaaagagaatgaattagtttaggscattacatccttatctaaagaggttcaagccccactagggcgtggtaatatatagccactgatgacaccctgttttcaagtgtccatgttgaaattattgtgttaaacgtgatcagatgagggagtatgcagttcaatgacgagtccactattgcaaaatatcaaaggcatcttacacgtgcacagtcaacatcattatcctctaatggaaagcagatgggaaagtaaagtgtgagatatcattaggctgatggttgaacagttctgcacctcccactcttcctctgcagcagcactgaacacttcctgtgtattcaatgttcagtcagccaggaaagatagaacctcatgcatccattgcctatacacatacacacacacacacacacacacacacacacgcacaccttagacacacgcatctgccttaggtggaaaaaatctgtgtgagagcgtacattagagagcaggcagaaccca

SEQ ID NO: 396064 - DNA, 606 bp, Homo sapiens
aaggcagtggagctcagtaagaagatgagcatggtgcaaagtggcatcaaataacaatgaattcacagtctgaaggaaaaaattctaaggaagtataagatacaaagagaatgaattagtttagggcattacatccttatctaaagaggttcaagccccactagggcgtggtaatatatagccactgatgacaccctgttttcaagtgtccatgttgaaattattgtgttaaacgtgatcagatgagggagtatgcagttcaatgacgagtccactattgcaaaatatcaaaggcatcttacacgtgcacagtcaacatcattatcctctaatggaaagcagatgggaaagtaaagtgtgagatatcattaggctgatggttgaacagttctgcacctcccactcttcctctgcagcagcactgaacacttcctgtgtattcaatgttcagtcagccaggaaagatagaacctcatgcatccattgcctatacacatacacacacacacacacacacacacacacacgcacaccttagacacacgcatctgccttaggtggaaaaaatctgtgtgagagygtacattagagagcaggcagaaccca

SEQ ID NO: 396065 - DNA, 551 bp, Homo sapiens
aacagggtctgagcatttgtgtcataagcagggaaggagagggacctcagatccagtccatgattggacacacctccctctaacctctggcatcctggcaggcgtctgggaggaggagttagaagaggaaacagctggggccataagtcaggcgagttcacacccaaccacctgccccattacacagcagaaagcacctcccttactccttccacagcccacaccccacaacccagcccccagggctgcccagtactagctcttgacagaggactctagtctctcagatcaagaacagccctcagaaagscaatatggctctcagtgattctaagtgcagacactggcattgggctgcctgattcaaatcctgcctctgccacttgctacatgtgtggccttagacaagttacttaacctcagttcccctacctgcaacatgaggttaatgacatttcctgcctccaggactaatgtgaattgctcacaacggtgcctgacacataaaggtgtgtgataaaggccagatattactggggaccaactaacac

SEQ ID NO: 396066 - DNA, 601 bp, Homo sapiens
atatatgatttttgaattgcttattttatttaaaaataatttttctatgtttatgtggggtgagaattaggagaagtctaagcatgaataaggattgaactgttgagtaatgtcttgaccagatactttcagtaactgaatgaaggttgttttatggcttaatataactggaggactacaataataaaataaagttatgtttcctgacaacttttcatcttcttctcctgaatacatttgagaaaggcaataaaaggtgaaaatgtaatgtttttaaaaaatcttatccaatgagttgtgcttatctaattgactggctacattttgaaaatgctctttaattactaacagctatttcatagatttcctatccaattctcagatcagataaattctgtttcaaatcatctatagatcarcacaaatttgaagcctgttgcacttaggaagttaaacattttacaatctatttgccaaggttgtcccatgactcaagcctggatattgaggaacctgggtgtcaaggaatcactttctgtgcttcaagatctttggtcagagatcttgagaaggcttattatattggtttggtgggaggttc

SEQ ID NO: 396067 - DNA, 588 bp, Homo sapiens
taatttgacaggtttcaatgttaaatttataacttctacccacaagccataaaccataaaaattgctgttccccaatcactgcttccattttcccaaactcacagtttgccccaagctgttaattccacctaaaatcctgtatgtcttagatggcatttctcagatgcagaatctaagacaagaacttgtgggaaatcaatttattaagaaactatgcccaagagaaaccagggaagagtgaggagcatgaccgacaggagaaatcaagcaagggtgtgatttcaggcaaagtataagagagggtaacttcagcttaatcccactggggagctsttaagtgtaaattatccctccaaattacacccatactaatcagtcattgactaagggctgccccagggatgtaaactccaaggtacttgcagctctccacaagtgtgggtagagccaaggctaggcctccaaagaagagacacaggtgctggctttagaaggaaaacagcacggaagccgagagaaaggaatggagagccagtaagagggaaccaaggagacctgagtggagttccaacagtgtctgctattct

SEQ ID NO: 396068 - DNA, 545 bp, Homo sapiens
tgggctgggattaaattagattgaaatattttaaattaaactaagttttctggggtctgttactttcctgaggcacccatttttgtgtaaaattgggagtgggagaagtagagaggaggctagaagggaggctgctgactgcccactgctggctataattcattaagatgtgggaagaactatcaacaggtgaaatctccagagcacagcmttgcaaactcatctcaaaccatgtgctcctgctattctccaggcagcattctgtttacccaaatccttcatcacaactcctgccaccttaaaaaaaacctattattttccttactactctatcgtcaattagatatcattggtgaaagcattcagacagtctagtttatggcaagatgggaaggactgattgatagaaacgctatagcagatgctctctgtacctcaaccctatcctgttccaggacacatccatagagacctactacaaactctgaagactgcctgagagtttggccctagcacggcagacaggaagacagtgttaatgtccc

SEQ ID NO: 396069 - DNA, 562 bp, Homo sapiens
tttgttgttcctttacattgtttttctattctcaattgcatttagtttagctctgatctttgttatttcttttcttctgctagatttgggcttagtttattcttgtttatctagtttatcacattaggttgttaatttgtgacctttccttttttatgtaggcatttaatgctataaacttccttctttgcactgcttttgctgtatcccagatattttgctttttttttctattttcatgcaattcgaaaaattcttaaatttccatcttaatttcatcattaacccaaagaccattcaggagtggttttaaaatttctatgtatttgcacagctttgagagctcatcttggtattgatttctagttttattccactgtggtcaaagaagatacttaatatgttctgtttttaaaaatttattaagacttgttttgtggcctaaatatgrtccattttggaggatgttctatgtgctggtaagaataatgtatattctgtgattgttgggtaaagtgttctataaatatatgttaggtccatttggtctagaatctaattt

SEQ ID NO: 396070 - DNA, 583 bp, Homo sapiens
gttaaaaggaaaatgtgtagaactaagtgttctcatcagaaagctagaagatctcaaatcaacaccataacagcacaattaaaagagctagaggggtaaaagcaaactaatcyaaaagctagcagaagacaagaaataactaagatcagagcagaattgaaggagacagagatatgaaaaaccctccaaaaaaatcaacgaactcaggagttggttttttgaaaaaaaaataacaaaaatagaccactagctagactaataaagaagagagagaagaatcaaatagacacaataagaaatgataaagcggatatcaccactgaccccacagaaatacaaactacctccagggagtactataaacacctctccttgaggccaggagctatatttgatgtgtactttcaacacctagcaccatgcctgacacagagtagaatgtcaagaaataaataaatctggggaaaattcctagtcaggaaagtggaaaaaaagtaaaataaaacataggaataaatttggggaaagcatctgtcctatcccatacccattcccttgctattacattcaatattcacttacc

SEQ ID NO: 396071 - DNA, 583 bp, Homo sapiens
gttaaaaggaaaatgtgtagaactaagtgttctcatcagaaagctagaagatctcaaatcaacaccataacagcacaattaaaagagctagaggggtaaaagcaaactaatctaaaagctagcagaagacaagaaataactaagatcagagcagaattgaaggagacagagatatgaaamaccctccaaaaaaatcaacgaactcaggagttggttttttgaaaaaaaaataacaaaaatagaccactagctagactaataaagaagagagagaagaatcaaatagacacaataagaaatgataaagcggatatcaccactgaccccacagaaatacaaactacctccagggagtactataaacacctctccttgaggccaggagctatatttgatgtgtactttcaacacctagcaccatgcctgacacagagtagaatgtcaagaaataaataaatctggggaaaattcctagtcaggaaagtggaaaaaaagtaaaataaaacataggaataaatttggggaaagcatctgtcctatcccatacccattcccttgctattacattcaatattcacttacc

SEQ ID NO: 396072 - DNA, 583 bp, Homo sapiens
gttaaaaggaaaatgtgtagaactaagtgttctcatcagaaagctagaagatctcaaatcaacaccataacagcacaattaaaagagctagaggggtaaaagcaaactaatctaaaagctagcagaagacaagaaataactaagatcagagcagaattgaaggagacagagatatgaaaaaccctccaaaaaaatcaacgaactcaggagttggttttttgaaaaaaaaataacaaaaatagaccactagctagactaataaagaagagagagaagaatcaaatagacacaataagaaatgataaagcggatatcaccactgaccccacagaaatacaaactacctccagggagtactataaacacctctccttgaggccaggagctatatttgatgtgtactttcaacacctagcaccatgcctgacacagagtagaatgtcaagaaataaataaatctggggaaaattcctagtcaggaaagtggaaaaaaagtaaaataaaacatagraataaatttggggaaagcatctgtcctatcccatacccattcccttgctattacattcaatattcacttacc

SEQ ID NO: 396073 - DNA, 480 bp, Homo sapiens
gttttgtctttaactcttcatttctatagggcagctttattgaataaacaaaatttaataaataaataaataataaaataaaatttatttagttagcaatttttttagcattctacatgtgtcatcccactccttcctggcttgcaagatttctgttgagragtccactgacagccctataagagttcctttatatgtgatgagtttctttccttctgcttcctttgagattatctctttgtctttgacttttgaaaatttgattttaaggtctctcggagtattcttttttgaattttgttgcttggaatcctgagtctgaattttcacatccctcccaagattcaagtttcagacaatatttttttgaataagctttcttccccccttctctttcaggtactcctgtaatacagatattcatatgttttctgatgtctcttatgctttttttactctttttcaatcttgttttctttt

SEQ ID NO: 396074 - DNA, 569 bp, Homo sapiens
ggtaatgaactcccttagtcttgttttgtctttaactcttcatttctatagggcagctttattgaataaacaaaatttaataaataaataaataataaaataaaatttatttagttagcaatttttttagcattctacatgtgtcatcccactccttcctggcttgcaagatttctgttgaggagtccactgacagccctataagagttcctttatatgtgatgagtttctttccttctgcttcctttgagattatctctttgtctttgacttttgaaaatttgattttaaggtctctcggagtattcttttttgaattttgttgcttggaatcctgagtctgaattttcacatccctmccaagattcaagtttcagacaatatttttttgaataagctttcttccccccttctctttcaggtactcctgtaatacagatattcatatgttttctgatgtctcttatgctttttttactctttttcaatcttgttttcttttcgtccctctaactgggtaatctcaaataacttgtcttcaagttcactaattatttcttctccatgat

SEQ ID NO: 396075 - DNA, 584 bp, Homo sapiens
aatgacttaagaaatttttttaaagtccaaaacttatgctccaaaaaactataaaacattgtttaaataaattaaaggatcaaaataaatggaaagacatcccatgttcatagattggaacacttaatattgttaagatggcaaaattccccaaattaattcaatgtaagtcttctttgcagtaattgataaactgatgttaaaattcacatgaagttcaagggacccagaatagccaaaacaatcttgggggaaaaaaaaccaacaacattggaggactcacacttcctgatttcaaaatttactacaaagccacagtaatcaagacactagaataaggacagacagataggtcaatggaatagaattgagagtccagatrtcaatttcatgtttatggttaattgatttttgtcaagtgtgctaaaacaattaaatggggctaagactagtgatttttgtcaagtgtgctaaaacaattaaatggggctaagactagtcttttcaacaaatgatgctggaacaactggatatccacatgcaaaagaattaagttggatcctgtcttagtccattctgtggtg

SEQ ID NO: 396076 - DNA, 589 bp, Homo sapiens
tttcatatggataataaatgctgccacagataagaaaggagcattaactctgccaggagaagctgagcaaggttccacagagaaagtggccattgaactaggccttgaatgggaagaagaggggcagggtaggcaaaygatgtacaggggcagtactccagaggtgcagagtgacaaggtgcctttggaatagcagaagctctgctgcgcagtgggagggatcagaaggtggcggggaaagttcagattctggcagtcccttgggaccctgctaaggaacgcatattttatcgtatgagcagaagggtgctaatagagaactttaggaaagaatgtaataaatcatattcgctctgctaatcatcactcaacttgtgagatgctggacagacacaaatgagtaacaacacactgttcttgctatccagcagctcccagtcaaatacaggaggtcaatattttgcactgaattacaaatacactgtaaaagtgctattgtgatggtaacatccagttgtgcctccctgaaagatgaatgaggtcaggaaaggtttatatattgcatggtgtattagtccgttttcatact

SEQ ID NO: 396077 - DNA, 589 bp, Homo sapiens
tttcatatggataataaatgctgccacagataagaaaggagcattaactctgccaggagaagctgagcaaggttccacagagaaagtggccattgaactaggccttgaatgggaagaagaggggcagggtaggcaaatgatgtacaggggcagtactccagaggtgcagagtgacaaggtgcctttggaatagcagaagctctgctgcgcagtgggagggatcagaaggtggcggggaaagttcagattctggcagtcccttgggaccctgctaaggaacgcatattttatcgtatgagcagaagggtgctaatagagaactttaggaaagaatgtaataaatcatattcgctctgctaatcatcactcaacttgtgagatgctggacagacacaaatgagtaacaacacactgttcttgctatccagcagctcccagtcaaatayaggaggtcaatattttgcactgaattacaaatacactgtaaaagtgctattgtgatggtaacatccagttgtgcctccctgaaagatgaatgaggtcaggaaaggtttatatattgcatggtgtattagtccgttttcatact

SEQ ID NO: 396078 - DNA, 559 bp, Homo sapiens
aagtgcatcatctcattggatcctcacaacaacactccatgcaagatgaggaaactgagacaggaaatttgctcctcactgcacagccagcagaaagagaggcagatccgcttggctccagggaccacgcttcttctagatgtctgtgtcaccctcaaagcctcagattgtattgtgaactaattaactagttgagcagaacgttccccaaacacatggtgtagaattgctattgttctcccagcattgatgaagaaaattaactcgcagtaatatcagttggagatggagtcagtcccatttccacttgattttattcttccttgatagttttctgaataacagcctgttactattgccctgatttctctttgccacctctacattttaagcaaatctagggcaagtcaggaagcaggatggatgcttttgatgctgtattccgaggcacccctggtcctccccagygtgcccagcctaaattagatgaagtggaaatgttgcaaaagggctgaaggggcccccatggagagcagatggtggttggggttatttgagg

SEQ ID NO: 396079 - DNA, 587 bp, Homo sapiens
ctcttaataaatgacataacaaatagaaagaaaatcagtaaggatcaataaggaatcaataataccaattctatccaaacttaaagaaaatagaagaggaggaagtgctttccaattcattctatgagttcagcattactccaacataaagaaraaaaagacaaaagtacatactagtatctctcatgaacacagacacaataattcttacataatttcagcatgtttgaatccaacaatgtataaaaatgataatacatcataattaaggagaatttatcccaggactattctgggttttgttttctttttaaattttttgagacagggtcttgctctgtcgcccaggctggggtacagtggagtgatctcagctcactgcagcctcaatttcctgggctcaggtgatcctcccacctcagcctcccaagtagctgggactacaggcgcgcaccaccacacctggctaattttttgtattttttgccatattgcccaggctggtctcaagctcctgaactcaaaagatctttcagcctcagcgtcccaaagtgctgggattacaggcatgagccactgtgccccac

SEQ ID NO: 396080 - DNA, 572 bp, Homo sapiens
aagtgtgtgtaccatacacaccttcaaatactgttggtgggagtatacattagtgtaacacttttggagaacgatttggtaatatcaataataattttaaatacatgtatcttttgtttaacccaacaattccacactaataaatgtgtcctatactggttaaagtacactaagtcatatgaataagaaagctcattgatgcattgtatatattagcaaaaaagcaaagtagacagacaaaaactaggaacaatttgtatatctaccagtaagaaacatatgtctatataatggacgtggtacagtctgttaagagaataatgtggatccatttgtcctaacagaaagatctccaaaatacccagaagatgctcacttaatgggtcttcacttaacagacttaccacatcgtgtgatgcttagtccctmcagaaaatacaccacgtgatgaacatggcctactctctggcattccaggacccttctcctacaagttgagtagggggcttagcaggagcaattgtgtttgtcgccaggcctggttactcaagttgcatttgttattttttatt

SEQ ID NO: 396081 - DNA, 547 bp, Homo sapiens
tttgttcatttcttcttactctttttttctttaatcttgtcttctcactttatttcattaatttgatcttcaatcactgatatcctttcttctgcttgatcaaatcggctattgaagcttatgtacgcttcataaagtactcatactgtggtattcagccccatcaggacaattaatctcttctttacactggttattctagttagccattcatctaaccttttttcaaggtttttagcttccttgccatgggttaggatatgatcctttagcttggaaagtttgttattactgacattctgaaggctactcctgtcaacttgtcaaattcattctctgtccagttttgttcccytgctggtgaggagttgtgttcatttgggggagaagaggtgttctggtttttggaattttcaggctatctgctctggtttttccctatctttgtggttttgtctacctttggtctttgatattggtgacatatggaggggttttggtgtggatgtcccttttgttgatgctgttcctttctgtttgttagttt

SEQ ID NO: 396082 - DNA, 631 bp, Homo sapiens
tcactgaaagcagggtattgtctacatctatctgtctgaatgagatgactttcaggactttgtaattttgaaaaggtcttcaagccaggctatccttcatcccatttctgttgcattggaatgttagacataacaaggtagacaaaggaaagatataatacagatccttattgacagtcagcaagtacaagtatatgtagaaagagataattttctgctggcattttcccttatctcgattctcttatcctttcatgcattatgttttgcatgaacagaatcggaaaaaaattgacagccttgtatgaagtacaccaagaaagctttctccttcaaagatctttttaggatataaaaactctctaagatytagtaactaagaaggacaataaatgtccatacttagagcaacaaataaaaatgtgattctgatgctgacatagtttttttatagttgaaatgtaaccttgtcaacactgcctggccagttctgccattgaaaaatggcccaggaaaatgcccaaatgccaacagtggtagttatggattattttcctatctgatattattcagctacatctgctgtttagtggaagctaaacagaaaatactccataggatactgagaaaa

SEQ ID NO: 396083 - DNA, 448 bp, Homo sapiens
gtgttcaggagcccactggcactccaagagttattttggcatcaaaaagaccaaagaagrtccccaaattttgatttttgagaagtttactaaatatcaaatgattaaaacacttgataaaaaatagaatcacagggaaatatgaaatgctagtaattcagggtaataactaaaatattttagaagcaaatacaggaagttacattttttgtagaaaaacttatctttaattcagttttcctaaataatcaaaaggcctagtaaagataactgaggcacatataacatgtttctctctttccctaattttttttttctttttgtcctttactccaaaggtgaacataaagcttttattatctcttattaatactacatgaatatccttaaaaagcaatttctagttttgtatcagtgtactattaatgataagtctcaattttaaaac

SEQ ID NO: 396084 - DNA, 552 bp, Homo sapiens
  misc_feature (1)...(552): n = A,T,C or G
tccaatagtcgaccacaggttaaattagaatcgaataatgatagaaaagtcactggtagaataaagagatgaaaactctaattaaacacctaaaatattttgcatcacacatatataattctkgaaactgaattgaattcagaaacaaccctaggaaacagagagagaacatcttgaattggctgagcctgtattctctaactagtataataaaattgaggtttaaaaatacaatttggattgcaattaagaaggaagaaaatgaaataataaatatctgtgatttctatatgcacctgtaatgaaataggcacagtaagaccatttaatggtttcaatggagagtaggctntaatgcctgttatatctgggttcaaattgcatctttctcatttactaaatatcattttgagaaaaccatgtaaagtctctgacttcaagttttcccatctgtataaattagatactattagtacctaattaattagatcattttgaagatacaatagcacaatgaataaatgttaggcaccgtgtttggaacaaagtgag

SEQ ID NO: 396085 - DNA, 627 bp, Homo sapiens
ttgggtcggagagatcatacaaagttgaagcggtcctcttgcactgagttggttcctggataggggccacaagaccagatgagtgagccagtttatccatctcggtggtgccagctgatccatcaagtgtagggtttgaaaaatacttcaaacactaatctcaggttttatcatagtaatgttatctataggagcatttggggaagtgagtgatsctgtggcttccggctgcataacccctgaaccgtaacttctaactttgtggctaatttgttaattttacaaaggcagtctggttcccatgcaaaaaggcagtttcttttgggaaagggctgttatcatctttgtttcaaagttaaactataaactaaatttctcccaaagttagttcagcatatgcccaggaatgaacaagggcagcatagaggttagatgcaagatgagtcagttaggtcacatcccttttactgtcatacttttctcactcttacaatttttgccaaggcaatttcattagaataatctgctaactaagggctctatgtaaagttgctgattttctttagaggttagacggaactgggtacctaatctgcacaggccagtgaaatatacaaatggaaagca

SEQ ID NO: 396086 - DNA, 627 bp, Homo sapiens
ttgggtcggagagatcatacaaagttgaagcggtcctcttgcactgagttggttcctggataggggccacaagaccagatgagtgagccagtttatccatctcggtggtgccagctgatccatcaagtgtagggtttgaaaaatacttcaaacactaatctcaggttttatcatagtaatgttatctataggagcatttggggaagtgagtgatcctgtggcttccggctgcrtaacccctgaaccgtaacttctaactttgtggctaatttgttaattttacaaaggcagtctggttcccatgcaaaaaggcagtttcttttgggaaagggctgttatcatctttgtttcaaagttaaactataaactaaatttctcccaaagttagttcagcatatgcccaggaatgaacaagggcagcatagaggttagatgcaagatgagtcagttaggtcacatcccttttactgtcatacttttctcactcttacaatttttgccaaggcaatttcattagaataatctgctaactaagggctctatgtaaagttgctgattttctttagaggttagacggaactgggtacctaatctgcacaggccagtgaaatatacaaatggaaagca

SEQ ID NO: 396087 - DNA, 610 bp, Homo sapiens
ttgactgatattactttattggttcttttaatcatgtactcatttctatttccttttgaatagtttaataaaatgaagccacctaggactagatattaaaaaccaaagtcagcactagaataaaattagaagatgtagggtgtgaatgaggacatacttgtatctctaataaaaatttttgacctctaggttaattatgtaacatatctcaattgttataaagatacaaggtcagagttgagtattttttttaatagtctagaagaagacattaaactagggttggtattagaaaagggtgagtatattttaatcaaaaatgccaaattacatacacatatatataattatatacatgtacayatatgtgtgtgtatacatatgtgtgtatatgtatatatatggaaagagagagacatgaagagtttgtgttttttgctatagtatatctttgtgatttagtcagaatatataagaaggtcattcaaactgagcttcagtggtaatataaatgagaaaatctgagttcctgaaagtaagtagaatgaagctttgtgttttaagaattttaggggaattttaatgtagtttgttaagaagattatgtttt

SEQ ID NO: 396088 - DNA, 517 bp, Homo sapiens
agctggtaagtattgtttctgggtgtgactgaaggtgtttccaaatgaggttaatatttgaatcagtggactgggagaggaagacccatcctcaatgtgaatggacaccatccaatctgctgtcagcatggctagaacaaagcaggtggaagaatttgggataaactggcttgttgagtcttctggctttcatttgtcttctgtgctggatacttccatccattcatcctgcccttggacatcagaatccagattcttcatcctttggactcttggacttacatcagtgttttgctgggggctttttggactttggccacagacctcaggctgtgctgtcagcttctctgcttttgaggcttttggactcagactgcgccactactagcttcttcctttctcagcttgcaggtgacctatgatgggacttcaccttgtgatcctgtgagccaattctccttaatgaactcyctttgatgtacacatatatcctattagttctgtccctctgcagaac

SEQ ID NO: 396089 - DNA, 602 bp, Homo sapiens
tgaatatacataaatatcaatttagtgaatacaaattggtttttacagatgaatcacaggaagctaatgctgccgtgggtacttctacattgtagatacctaatatatcctgaaaacaaggacatttactttttcaaataaatcattttttgctacatgaatgggaagcttccagtgaaaatttctagtcttattgtgagtacaaggctggagtgaagccacccaaaatagtatcaaagtttaattaaattaacacatcagatataacacatttaatcattctaacgattgaaaccattttacccttatttgacagcaaaactacttatagaccaactgcaagggattttaagatatttaggatttaaaaaaaaaagaaaaytacgaatacctctgcaatcaaaggagaagtaagtgaatttatcacttacttgatgctttacagttttttatagttttctgaaatttgaatattttataatgaaatacatattattttgaatataaaattattctattattaattattctattatatttttacacctcattttttactgaggccatatattatcttgactgcctttgatttgtttctactt

SEQ ID NO: 396090 - DNA, 644 bp, Homo sapiens
tgctaatttgcttatgaccatctcttcagtgccaacttcaatatttggcttacagtaggcaatgaattaaaatttgttgaatgtattcatgttaatgttaattttattaggtagatactaaaagcacaaatttcttgtatccctcattattaattggtacctaaggtacaagaatattcaaatgtataaagaaaaaaacagaccctcttataaatgtagtgtaatacawatctcataatgttttgccgtgtgtcatattggcctagaagtatttgacttcctgtcactatgaacaaaggattagaattagtatcaatttgttattggtattaactcacttctctgaagttattcttgaaattagttgtctttaatttctttaagttaattatatttatttaatgtggctcatccaaatttaagcttcttgaatgtaagaaggatgctttattgttaaaaatttttggaactgcattttgccaaagttccaaatgcagtgctggagatacaggtattgccaataatagcttcttatttgactaaatctatttctaaattacaatttgtttagtgtattctaaaatgtgatttttttcatcaaaagagtagctggttctgcaccttattttaaggaaattatatga

SEQ ID NO: 396091 - DNA, 644 bp, Homo sapiens
tgctaatttgcttatgaccatctcttcagtgccaacttcaatatttggcttacagtaggcaatgaattaaaatttgttgaatgtattcatgttaatgttaattttattaggtagatactaaaagcacaaatttcttgtatccctcattattaattggtacctaaggtacaagaatattcaaatgtataaagaaaaaaacagaccctcttataaatgtagtgtaatacaaatctcataatgttttgccgtgtgtcatattggcctagaagtatttgacttcctgtcactatgaacaaaggattagaattagtatcaatttgttattggtattaactcacttctctgaagttattcttgaaattrgttgtctttaatttctttaagttaattatatttatttaatgtggctcatccaaatttaagcttcttgaatgtaagaaggatgctttattgttaaaaatttttggaactgcattttgccaaagttccaaatgcagtgctggagatacaggtattgccaataatagcttcttatttgactaaatctatttctaaattacaatttgtttagtgtattctaaaatgtgatttttttcatcaaaagagtagctggttctgcaccttattttaaggaaattatatga

SEQ ID NO: 396092 - DNA, 364 bp, Homo sapiens
cttgtaccactaaaaataaagcaacaggcaatggtgtttttaatgccagcgttcgcaggacttcctgcagagtcaggcttgcacagcttccttcggtcscccccacccatctccaccccctcagccatggatttctgcagcaccaggggccagcaaggagcccaggactgaatgagatgcgtccatggatcatgaggctgagatagatttccctctgttgtcccacttcaaggatgcagtctggagcttgcaatccaaacagggagacaggttctgtgtcccttcaggagaacagggtctgagcatttgtgtcataagcagggaaggagagggacctcagatccagtccatgattggacacacc

SEQ ID NO: 396093 - DNA, 560 bp, Homo sapiens
ttcttcatctcaggtcccttttagaaaaacttatgtcatatcccataaaccaggctatcattccttcctaaagattagtagacctaagtaggcaactagaaaaacaacacatccgtctgaggtctcaggctcacctggaaatgcaggtcctggcctccctgcctccaccctcccccaccccttccttgtcaggcagcttgggccacccaccatatgccgctgcagcccataaagactctggaacatttcaaaggccttggcccccatcaggtgtggctccaaaaaacacagggtcacctataaaaggttgagcacaaggaaacagccataaaacccgcagtcctaacagcagacacccagtggccagaacaaagcagccagctgccgggctttccaggaaccacagagggacatccctcccaaggaccgcgcccagccgcagcccaggggcacatggctgaaaggtcmtcagaggccacctggtaagaagggccctgtgttgggtgcttgctagttgccagggactgtcccggatgccctccttgaagagggttaaggag

SEQ ID NO: 396094 - DNA, 596 bp, Homo sapiens
ctcaagttcagactcacccaaccagacagaccagaagtgagcctctgccctgacatcttcaggcactcttttgtcaactactcacaaggatttatcagataggaagggaaaaggacagaaagaactgtgggataaggaaggctctgaatgtcagaaaagggtctgagtaggatgatttgagactgaagaagytacgtggtatcacttaggagcaataaaggaaagattagggcaggtgaggaggataatggacagtggagcctggccagtgccagctgacggactagaccgatcttcctacctctgcttgcaaaaggcattgcttcctgcttagcatgcctcactgattcccataaaaatggcattcatctatatgctgaggtgggctgaatcatggccctagaagatgtccacgtcctcatccctggaatctgtgactgcgaccttaactggcacaagggactctacagacataatttaattaaggaccttgagatgaagagattagcctggatcatccaggtgggccctaaatgcaatcacaaaggtccttcaaagagggaggtagagggagatttgacacagaagagaaagta

SEQ ID NO: 396095 - DNA, 596 bp, Homo sapiens
ctcaagttcagactcacccaaccagacagaccagaagtgagcctctgccctgacatcttcaggcactcttttgtcaactactcacaaggatttatcagataggaagggaaaaggacagaaagaactgtgggataaggaaggctctgaatgtcagaaaagggtctgagtaggatgatttgagactgaagaagttacgtggtatcacttaggagcaataaaggaaagattagggcaggtgaggaggataatggacagtggagcctggccagtgccagctgacggactagaccgatcttcctacctctgcttgcaaaaggcattgcttcctgcttagcatgcctcactgattcccataaaaatggcattcatctatatgctgaggtgggctgaatcatggccctagaagatgtccacrtcctcatccctggaatctgtgactgcgaccttaactggcacaagggactctacagacataatttaattaaggaccttgagatgaagagattagcctggatcatccaggtgggccctaaatgcaatcacaaaggtccttcaaagagggaggtagagggagatttgacacagaagagaaagta

SEQ ID NO: 396096 - DNA, 568 bp, Homo sapiens
aatgttgtctctttttgcgtaagtaatctatgaggtgtctattcaggtaatacagaaagtcttcttgtatctaaatattctatgcactgctacatgctatacagcattgccatcatttcttctttaaaatataaattgaaaggtcctgtaaaaataagtatgcattatgtagcataaacaaaacataaattcatgataacaatagtgtgtaaattagttggaaacagagagcagagttaataattctttacatytattaaaatattcaaacacacattaggttctctaatacaaatccatgttaaatgcaaaatcttggagaagtttgtattacttttattcttttttttttgtttatttcagggtggaagaggagaataatttttattgatacttttctatattttccaggttaaataaaaaatatactttaagttctagaatacatgggcagaacatgcaggtttgttacataggtttacacgtgccatagtggtttgctgcacccatcaacccgtcatctacattaggtatttctcctaatgctattcctcctctagaccccacc

SEQ ID NO: 396097 - DNA, 534 bp, Homo sapiens
gattcccatttctattagaattatcagattaggaggttggctgatttccatttccaaacatytccatgttaaaaaaaaatatttgtacattatgattactgccctttgtggttgtgagagttttaaattcagaataatatcaccaaaccccagctagtcaaaacactgaaaaatgcacactgctgtctaggattaataataataaattccatgtaatgaatgtcttttactgagtgtgaacacttagtcaattatttcatttaaccctcatctccctgagtaaactccttaagtaggtgtcattatcccattttacagatgataaatataagacttagcaaactcgtgtaacttgcccaagaatacacaactaataaatgttgaagttggcatttgaccagcgtcgggtaactcaaaattcttggacaactagtttaaattattttttaaatttatgtcagcaattatcatagaagtttttataagaaagagttttatttaccatactaaaatatcagtgtagcaaacccaatt

SEQ ID NO: 396098 - DNA, 534 bp, Homo sapiens
gattcccatttctattagaattatcagattaggaggttggctgatttccatttccaaacatctccatgttaaaaaaaaatatttgtacattatgattactgccctttgtggttgtgagagttttaaattcagaataatatcaccaaaccccagctagtcaaaacactgaaaaatgcacactgctgtctaggattaataataataaattccatgtaatgaatgtcttttactgagtgtgaacacttagtcaattatttcatttaaccctcatctccctgagtaaactccttaagtaggtgtcattatcccattttacagatgataaatataagacttagcaaactcgtgtaacttgcccaagaatacacaactaataaatgttgaagttggcatttgaccagcgtcgggtaactcaaaattcttggacmactagtttaaattattttttaaatttatgtcagcaattatcatagaagtttttataagaaagagttttatttaccatactaaaatatcagtgtagcaaacccaatt

SEQ ID NO: 396099 - DNA, 617 bp, Homo sapiens
atctggtgcctgttgtcacgatggtgagccagttaacagctgaaggttgagtcatatgtcatcacaaggaattactctgaatcccacctagaattccagtctaggatgcttggctgcaagagccactgacaattaactacatcagctccctcatgttacatctggggagactaaggcctagacagaggcaaggaaatgttcaaggtcatatagctagacaggggtagaggcagtgcaggcattagaacccatgcatttcattacctaatctctataataccgtcctatcctctatttgatacaaaaaagtcaagatctttatcaaaaactcatcctttccaccacgaattcaaaatagaacaaaagcagtgctgcttggacaaaagctgagtcatacayatttcttggtaggcagaaatgaaataagttaataataagttgtaacatcattgccctttagattcatcttttgaccattggcaaatctgtggttttattccactttttttgagaacagcaagtgggaggtagaaatggcaaattaactgtggtctgtcagtcatggtaatgctatttactatttttcttaaaaaatgaatattaaaggtttgagtttt

SEQ ID NO: 396100 - DNA, 610 bp, Homo sapiens
atgtctgcaaatattggctgccttcaagctcacagcctgtgacagcaagttggtttcatttcttaaagttgatcttcaaagccgtgaagcaatcgcaaactgtttgagatcccaaatcaaagaacagattgtgtagactcaaaaaaagcaaacaaacaattacatttaaaaacaaagtgttggaaaaaaccagcaacaacctttctgctcacctgccaaggccttgtggctaagcttctgtttttgccaaattgtagcaaatcacatcagacagtgtccttcttgtactactgacaggtgacccatttcctggtggttaaatctggagggatttgggagttcttgctcttaacatgactttcccactgactggatttgtgattgtaagcacatcacactcatttcctccatttgaaatgcaggttctctgaagccttctggcttgaaggaataatagtgagtaatacctaacattggyattgcacagcatgccactgagggctgcccaatagctctgtgaaagagatgaggaaacaggattagagaagggaccagctcacagtcacaggactagtaaattatgaagtgagaattcaagctttccaatatc

SEQ ID NO: 396101 - DNA, 673 bp, Homo sapiens
tctcacagggctttccaaatagagtccacattggcccatttccatggaacattttgctggtctttaggtattttattaattgctgaattgtttaggggttttaagttgtctaaggagactatatctgaattcaattatttttttcctctttcccctcgagcatgcacattctttgtaatactgtagtgatgtataagttttcaagagctgtcaaggtgtatatatatatatatatatatatttccaaaagcagatagtatagtacatttactacagttgtttcactttgatatggataaaaaatgtataaaaaaggcaaagaattctgtgagtgtcattacaactttaatttcaaaatttttgcccttatgttatttgctatacttggctttcctcgacattataaatcattgatcacaggctggtataaatttagcattaccagtggattctgcgtatttkatatgctctttttattttggttttgtcagtttgctactcgtgagtttatctttgaacagcttcccatggctatgggattaggtctgtactccagagcctgatatctatgggcctttttttcttagcctttctagtctttttaccccatatttcttcatgatatccatagtttgtccaacctaaacaaagagctagtccccaagcacactaa

SEQ ID NO: 396102 - DNA, 673 bp, Homo sapiens
tctcacagggctttccaaatagagtccacattggcccatttccatggaacattttgctggtctttaggtattttattaattgctgaattgtttaggggttttaagttgtctaaggagactatatctgaattcaattatttttttcctctttcccctcgagcatgcacattctttgtaatactgtagtgatgtataagttttcaagagctgtcaaggtgtatatatatatatatatatatatttccaaaagcagatagtatagtacatttactacagttgtttcactttgatatggataaaaaatgtataaaaaaggcaaagaattctgtgagtgtcattacaactttaatttcaaaatttttgcccttatgttatttgctatacttggctttcctcgacattataaatcattgatcacaggctggtataaatttagcattaccagtggattctgcgtatttgatatgctctttttattttggttttgtcagtttgctactcgtgagtttatctttgaacagcttcccatggctatgggattaggtctgtactccagagcctgatatctatgggcctttttttcttagcctttctagtctttttaccccatatttcttcatgatatccatagtttrtccaacctaaacaaagagctagtccccaagcacactaa

SEQ ID NO: 396103 - DNA, 580 bp, Homo sapiens
tgtatattgaccattagatttcaagaaatacacacatgtacttctatatgtatgaaaatatattcacaattcagataacatatagatttgtcaatcatattaggcatggaagtaactagggtgtatgtcttatttcacataagagaaaattagatgagaataatttgytattgtcagggaaataacagaattaggattttttaaatccaaagccctacaattatacataatgaatagcaaagatattttcagattaagtcttacaaatctagaaagtgtgaggcagaaaaagccagtgtttgagagctcagtgatcttaaaaacagctactgtcttacaggggattattgccactttgccacttccaaaatgcttcttactcctttctacacaacacgtctgtatgattgccaatgttatccttccattttacccaaggggaaatgaggctccaagataaccacgctgattaatgtcaccaacgcagtaaatcatggagaaaggacctggatgtctgaaaacaaattattttacaagtggaaaagttaacaaagaatgtacaatgttttctgaaaatgtg

SEQ ID NO: 396104 - DNA, 462 bp, Homo sapiens
acatataatgaatgtcctttcctccaacctggtaccactcagttcaacagtggccatatcaattcaattgtttaaattctgtgtacttaaaggaaatgcaccaattggtttgaactaaagcaaattcctgccctattagaagtgtgcaaagaccaaagaatatcaaagggctacracctttcctgaatcaagtctggatttaaaccaatggccttaaataaaataagaaatactaaaatagagaacattagcctcagtagttaagagcagggctttaaatcagtggaccttgtgtgcttgggggtggaaagtatccagatgacaggcttcttctccaatagggcttctttccaaacatttccatgcatgtctactcactactgaaagctcagggtcctaaaagatcatcacattttattcctcaaatccagtcaatcacatagaggcattttcttgtttggc

SEQ ID NO: 396105 - DNA, 569 bp, Homo sapiens
aactgaatgtaggaagtctgcagcatcgtctaggcagtggtcttgctaaaatatttcagctctatccaaccatgaggaagtaaaaaatgcagatgatgggacatgcttcaagacacctgtcctgaattctgcaacactgtcaatgttataaaacactattctagattaaaggaaattgaagagacatgccattcaaatgcaaggcatgtgtcttgattgaattctggatgaaaaaaaaaaaagctgtaaaggattggtarcaaacttagagaaatttgaatatcaatgatatattagataatacatcaatgttaatttcatgatgatattaatggtgttgtgattatgtaggaaaatcttatttttatgagctatttgttgcagtataaggtgaggtatgattgtgtctacagttttattttgaaatattgatagagtgacagaaatagagagagagagacagaaagagagagagggatgattgacagatatacgtagacaaacagagatagagataaatgtggggaggcagaatcacctcaggttaaaacagctagagatgctataac

SEQ ID NO: 396106 - DNA, 569 bp, Homo sapiens
aactgaatgtaggaagtctgcagcatcgtctaggcagtggtcttgctaaaatatttcagctctatccaaccatgaggaagtaaaaaatgcagatgatgggacatgcttcaagacacctgtcctgaattctgcaacactgtcaatgttataaaacactattctagattaaaggaaattgaagagacatgccattcaaatgcaaggcatgtgtcttgattgaattctggatgaaaaaaaaaaaagctgtaaaggattggtaacaaacttagagaaatttgaatatcaatgatatattagataatacatcaatgttaatttcatgatgatattaatggtgttgtgattatgtaggaaaatcttatttttatgagctatttgttgcagtataaggtgaggtatgattgtgtctacagttttattttgaaatattgatagagtgacagaaatagagagagagagacagaaagagagagagggatgattgacagatataygtagacaaacagagatagagataaatgtggggaggcagaatcacctcaggttaaaacagctagagatgctataac

SEQ ID NO: 396107 - DNA, 523 bp, Homo sapiens
aggggttgtgttccgaggctggttttaatttttacgatttaggaggtaaaatagagcgaagcaatgataagatccagggtataaccaggggctgtagaggctgcagctgaatggagatgagagttacagatgagtgagktgggccctgagcctcccaacaggactaacagcctgggtagtggcaggagagagttgagccacttgtcctgtggtcaatgagtaaagtccaggaccaggacattaatgaatgacagcaatgtggagaaaagaccatttagtcgaatgtctctaaccttcaagcagaatataaacagtactaaattgcaagttaagaatgcaagagagacaatcaactctgtatttaaaactaatacaaaagactgtctgacccactgtggttctgtttccagggcagactggtggagcctatccaggtccaagtgtgcccgaggtaaaatgccagtctgtccacatttactgttccctagacctatcatcacttccagtcaccatctccaacgac

SEQ ID NO: 396108 - DNA, 530 bp, Homo sapiens
ctgggtagtggcaggagagagttgagccacttgtcctgtggtcaatgagtaaagtccaggaccaggacattaatgaatgacagcaatgtggagaaaagaccatttagtcgaatgtctctaaccttcaagcagaatataaacagtactaaattgcaagttaagaatgcaagagagacaatcaactctgtatttaaaactaatacaaaagactgtctgacccactgtggttctgtttccagggcagactggtggagcctatccaggtccaagtgtgcccraggtaaaatgccagtctgtccacatttactgttccctagacctatcatcacttccagtcaccatctccaacgacaatgctggcattctcatggttctgcttgaacctttatgctcttcctggactttttttgccctgaggtatctgttgcttctctaccacagatttaaattctgtagaaaaagactaccctcctgtgatggtccatttgtgtgttaattttttcaggctaaagtctccatttattcaatca

SEQ ID NO: 396109 - DNA, 619 bp, Homo sapiens
ataaccaggggctgtagaggctgcagctgaatggagatgagagttacagatgagtgagttgggccctgagcctcccaacaggactaacagcctgggtagtggcaggagagagttgagccacttgtcctgtggtcaatgagtaaagtccaggaccaggacattaatgaatgacagcaatgtggagaaaagaccatttagtcgaatgtctctaaccttcaagcagaatataaacagtactaaattgcaagttaagaatgcaagagagacaatcaactctgtatttaaaactaatacaaaagactgtctgacccactgtggttctgtttccagggcagactggtggagcctatccaggtccaagtgtgcccgaggtaaaatgccagtctgtccacatttactgttccctagacctatcatcacttccagtcaccatctccaacgacaatgctggcattctcatggttctgcttgaacctttatgctcttcctggaytttttttgccctgaggtatctgttgcttctctaccacagatttaaattctgtagaaaaagactaccctcctgtgatggtccatttgtgtgttaattttttcaggctaaagtctccatttattcaat

SEQ ID NO: 396110 - DNA, 628 bp, Homo sapiens
cttctactgattctgtttttctggcactattttctgtagccatcatccatcatataggctaatctttgacttttggtgggaaacaaaccattcataaggggtgctgatgttgctgcaagaccaatatgtagaccactcttgctacataatgattcccaccctaaatacaacaaatactgcttctgaagaaacatgccttcctagtataagctgagaacactaccagtgaattttcataaggacctttcaataagatggaaactctctgaatcctttagaaggtgtcagccatctcataaggagaaggaaagaaagtacacaacataaaaagctaccccaaatgtcttaatactcgtatagacaatgaggtcatcaaaatcagraagagaccagcaaaaggtagagaaaaacatgattaaagaggcagaggttcttgatcttactgataatcttttataaattttatctgcctataattataattaaatactaaatgttttgagtaagtttttttttttaattgagaaacaattctattgagaaaatacttaatttcaagagtatgactctcatggaaaatttacacaattatgttatttttctgggtaaaaaaggtgtgtggaccctt

SEQ ID NO: 396111 - DNA, 519 bp, Homo sapiens
tttacccagtctattattgatgggcatttaggttgatcccaggtctttgctattttgaatagtgctgcaatgaacatacaagtgcatttgtcttttcattaggtttctgccattacttttaatggcagaaaccacaattacttttgcaccaacttaatagaacaatttatattcctttaggtatatacccagtaatrggattgctaggtcaaatggtagttctagtttacattctttgagaaatccctgaactgctttccacagtgagactgaactaatttacattcccaacaggagtgcacaagcattcccttttcaccacaaccttgccaacatctattaattttgactttttaataatagccattctgagtggtgtcagaaggaatctcattgtgtttttgatttgcatttgtctaatgattactgatgttgagcattttttcatatgcttgttggttaattgcacatcttttagaaatgtctgttcatgtcctttgcccatttttaaatggggat

SEQ ID NO: 396112 - DNA, 591 bp, Homo sapiens
ccagcctcaggaacactggaaacaaatacccaaatgagggtactatttatttaaaataagggtaccatactcaaagtgattcaagaagtatgaaggctagatagagcaaatgaaggaatgaatgaaggagagacaaacaggacagaagacagagatcttactgcagtgggccagagatgatatctgggtgtctggatacgacgtgagtgcagcagtacacatgaacagctcatggttccccaccaatcctccttgatgagtattcattgtctgaaatggaaacctcataagccagttatgagcactaagcaggatctaacttcccatcctgatttggcattatgtaaacctctgtgagctcaatggattcccaggggcctaaggtcttcatctatggagtgggagtaaggcatgatcctttaggagcctttgctagtggtgaaaagaattcaccatccctatgtagcccataaagaytgtagaatcacatgatggctcgttttttctaagtaatacttagtgaaagtttaatctaaagtcaactacatcatgtgctcaagtcaactaaagtactactataatgcagagcac

SEQ ID NO: 396113 - DNA, 657 bp, Homo sapiens
agcaggttggaaagtgttcaaatcagggcaaccacaggatagctggagtgttgactcctgtgtagaggaaagtaagagaggaggctaagaagataaacagtagttctatcaggaaagaatttggacttcatggtaagagcaatgagaactcttgagagattttaatacaggaaggcaatgatcatatttgagttcttaaaatttgattttagaatagagtacgtactagaggacaataagcagtcagtttctttaaaaatacacatatacgtgtgtatgtgtttgttgcagtaagctaggtcactaatcatagtggastggactagggcaccaataagttaatagaagtagaaacattgacggtaactagtagagagaattaacaagctttactgcatcaagaggagaaaaaaaattgtgatcacgtttataacatataatcacattgctaaaatctttaaaatatctgttaaccttgaaacataactgatttatatagtttttgtcaatatacatatgaaccattatcttacttttcttttaaactggtatttcgaattaatgttttctggctttccagctgcataccattccattagctcaatgttctaggattttctcaaccatcctctgatttttcctttaatataaacaagt

SEQ ID NO: 396114 - DNA, 581 bp, Homo sapiens
gcattgttttaatgactgtgtagtattctattatatgactatactgtaatgtatataaacaatcctcatgtattgattatttaaattttccattatcttttagttttataaagtacactattaacacggagcttcttgaaactaaacatttatgctctctggtcatttccataggctaaattttaagaaatgaaactatgggtttaaaaagtataaactttattagggcttttgttacatatcaccaaattacaccactgatttcccataaaaattttatagaaacaaacattaacttcgtccctaaatctaaattatataatcagttttccttctaagacaagtggagtcacaccattatgtcactcatagcccctaaytccaagtgggatttcctgttcggctttagcaacagtatctaaaagtagttttgaactctggttttaactgacaatcacctgccccttcccttttgaatttccagatttcactctgttgagtgggtttatctacaataacttgcatttaaaaagccctaaatgattctgttgtgcagtcagatttaagaaatgcttttctaa

SEQ ID NO: 396115 - DNA, 583 bp, Homo sapiens
tttagttaatgatgtcagataagggtccaatatcattcttttgtatgtgtatttctagtttccctaacatcatctattgaagaaattttctttacctatcatctattctttgccccctcatcaaaaatcaattgactgtatacacgtggatatatttccgggctctctgttctgttggtctgtatatcttgtttttcatgccagtaccatactgttttgattactrtagctttgtaatatattttgaaattaggaattgtaatgcctccggctttgttcttggcttcaagattgataaggctttttgtggtcttttgtggttccatgtgagttttagaattgttttttctatgtatgtaaaacttcattttggtatttagatagggatctcactgcatctatagataactttgggtaggatatacattctaacaatatcaagtctttcaacctatgaacacagatgtttatccgtttgtttgtgtcttgtataatttctttcaccgatgtttaatagttttcagtatataatctttctcctccttagataacttttttccaagttttttatgctactgtaagt

SEQ ID NO: 396116 - DNA, 583 bp, Homo sapiens
tttagttaatgatgtcagataagggtccaatatcattcttttgtatgtgtatttctagtttccctaacatcatctattgaagaaattttctttacctatcatctattctttgccccctcatcaaaaatcaattgactgtatacacgtggatatatttccgggctctctgttctgttggtctgtatatcttgtttttcatgccagtaccatactgttttgattactgtagctttgtaatatattttgaaattaggaattgtaatgcctccggctttgttcttggcttcaagattgataaggctttttgtggtcttttgtggttccatgtgagttttagaattgttttttctatgtatgtaaaacttcattttggtatttagatagggatctcactgcatctrtagataactttgggtaggatatacattctaacaatatcaagtctttcaacctatgaacacagatgtttatccgtttgtttgtgtcttgtataatttctttcaccgatgtttaatagttttcagtatataatctttctcctccttagataacttttttccaagttttttatgctactgtaagt

SEQ ID NO: 396117 - DNA, 586 bp, Homo sapiens
ttttcatttggatttcgagtttggggcatattttatgggtcagagaagagtgtagaggtaatgaactgttgtggtcagtgttgaaggactttaagatctgtaatttctgttaagattaaggaaacagagaatgttcatacactaccactttgaacattccagtagtatgagaatatttaaattaattttatttatttatttatttatttatttatttatttattttttgagagggagtcccattctgtcacccaggctggggtgcaatgacgtgatctcggctcactgcaacctccacctcccgggttcaagtgattctcctgcctcagcctaccaagtagctgggattacaggctcccsccaccacgcctggctaactttttatatttttagtagagacagggtttcaccatgttggccaggctggtctcaaactcctgacctcacgtaatctacccatctcgacctcccaaagtgctgggattacaggtgtgatcccaccatgcccagcctgttttaatttttgaaaagagaaagttatatacattgattgcactctaaagaattgttggcatttggagagagt

SEQ ID NO: 396118 - DNA, 586 bp, Homo sapiens
ttttcatttggatttcgagtttggggcatattttatgggtcagagaagagtgtagaggtaatgaactgttgtggtcagtgttgaaggactttaagatctgtaatttctgttaagattaaggaaacagagaatgttcatacactaccactttgaacattccagtagtatgagaatatttaaattaattttatttatttatttatttatttatttatttatttattttttgagagggagtcccattctgtcacccaggctggggtgcaatgacgtgatctcggctcactgcaacctccacctcccgggttcaagtgattctcctgcctcagcctaccaagtagctgggattacaggctcccgccaccacgcctggctaactttttatatttttagtagagacagggtttcaccatgttggccaggctggtctcaaactcctgacctcacgtaatctacccatctcgacctcccaaagtgctgggattacaggtgtgatcccaccatgcccagcctrttttaatttttgaaaagagaaagttatatacattgattgcactctaaagaattgttggcatttggagagagt

SEQ ID NO: 396119 - DNA, 524 bp, Homo sapiens
cttctaacaccaagaccactgacactttcaaaaaaaaaaaacrcagccagatatcgtggcattctgagcaatttagtggctaatatgctttaaaaaggactgatgtttactaagcatggcagagcctgctaactgctcaccaaaatccatttcctcctcttgctgggcacactgctagactacatttcccatgctccttgcagttagatgtggccttgtgaggcacaggaaggatggagactgggccctgaactaccacatggagataagtcactcgctggccaggctgacctgccttacggcaatacaatatgctcaaaggttaatcgttgaaagtcatgggaaattgaatgctttatattctttctatgtttctgtattttcccttcttaaaataaagattttttttttttcagctgaaaattatctaaaactggttcttctttgccattcctcttttcttgctaggggcccaggtgattgtcattcaagaaaatacttaatatgaagccaaatttacagcc

SEQ ID NO: 396120 - DNA, 534 bp, Homo sapiens
accagttcatcttctgcattatgaatcattcttgaacaaacacacaagttaactgtccgttcctatgttaaaaacacggtgtagcagggataattctttcattagatttcctagatctgttttgtggggatctcaaagaaaagctagtgttgaatatatagacaggtcatccacctcctcacatgggtaatgccagctccaacatgcacgagctcaatgtgcggccattccaaggcatctctctgtcctaagtaaccccctccctgctaccaagcttcagtcttccaaatctgagttacctttgcttaatgtagrtctacctgaactttttacccagaacattataaatcatgaatggcattctcacaggctagaggaaaaacaagtaggaggaaagggtagaaaaacacatgatatgggaaaataatgataggtacatggcactaatatgtgtcccaagtatactgagtcaaaaaatagtcttcattttcccatgtttaaaatgcgaaggatggttgggtaccacaagctacc

SEQ ID NO: 396121 - DNA, 652 bp, Homo sapiens
gcggccattccaaggcatctctctgtcctaagtaaccccctccctgctaccaagcttcagtcttccaaatctgagttacctttgcttaatgtaggtctacctgaactttttacccagaacattataaatcatgaatggcattctcacaggctagaggaaaaacaagtaggaggaaagggtagaaaaacacatgatatgggaaaataatgataggtacatggcactaatatgtgtcccaagtatactgagtcaaaaaatagtcttcattttcccatgtttaaaatgcgaaggatggttgggtaccacaagctacccacttcaattgtttgacatcattatagattaaatattcctctactaggtagaattgaatagctctctatggccatcagaataacttcagaactctttacattagcacgaaacacactttatgactggctgcttcatttcttctcacaatstcagcctccatgcattaacgttgtgaacttatctactttcctaaaaacagactgtgataagcataagaacagccctccccaccccgccaagaatgtacacactctaattcctcgaacttgtgaacatgttgattacaaagactttgcagatgtgattaaggttaaagattttgagacagggagattag

SEQ ID NO: 396122 - DNA, 520 bp, Homo sapiens
gaaagacagaatggcaggtacaaatctttactttttttttttttaaagggcatcttccagattctgtcaatgtactatgtatgcagggaaagatacttctctaggttatggtttttcctcctctagaaaaaagacataaaactagcatccacttttgacactagggcaagccttaagggtgtgcagctatagaaataagagaacagaggaagacagtgctgcttacaaacatgtgactgacaagaagctttaaagggttcacaaagtgtggtccacaccagagcaacacttgaaatacaaattattgagcctcactccagccctactgaattgaaaacataaggtagagcccagtaatggcatttaacaagccctccaggtcaatcagatgaacaataaacttaactattgctttacatgctttagcgtctgggtaggtgaagcgtgacaagaataacttacaycaataggccaatgatagggttagtaaattgtgacaaattaataatctatgagtcat

SEQ ID NO: 396123 - DNA, 620 bp, Homo sapiens
tcacttatcagaggaattatcttgttaaccacagaaacattctagcaatcaacatgtctttcagatggtaggacaagaccattatggctctagctgtagcttttggctccatgcattagaaaccaaagggggctgggcaaagcacaagaacagagagatgtcctcagatatcataagtaagatgcccagctgaaaagaggtagataatctatttcagagatttggatgggacatcaygggccaaatttataagtcaatcttcttatataaaagcagtaactcagacaatttaagaataagcacgcagctaacaataagatcttctaatgcatatggtgctaaatatgtcaaacactgtttcaagtgctttatacatggaaactcatttagtcctcattacaatcctgggagatagatactataatggtcttcattatagagataaaagaactgaggcacaaaatgtttaagtgacatcccaggccacatatttagagtcaggggagtgtgctcccaaaatccatgattttaattactataatatatcttaaactctatgaaattagttccaaattatcctgagcacaatgaatttgggttcacattatcttgaacaacat

SEQ ID NO: 396124 - DNA, 497 bp, Homo sapiens
atgggggtctggagacagatggaaagataaattatatagcttggatgtcccctccaaatctcatgcagagatgtaatcctctgtgctagagttgggaactggtgggaggtgtttgggtcatggcttggtgttgtcctcaagagagtgatttctcaagagatctggttatttaaaaatttgtagcacctccccctgacttgctcctgcactcaccatgtgatgtgtctgttcctgcttcactttccatcatgattaaaagcaacctgagacctcaccagaagtagattccagcaccatatttsctgtaaatcctgtagaactgtaagccaactaaacctttttttcttttataaattacccaaacttatgtatttctttatggcaatgcaagaatggcctaacacagaaactggtactgaggagtcgggcactgctataaagataactaaaattgtggaagcgactttggaaccgggtaatgagcagaggtttaaaga

SEQ ID NO: 396125 - DNA, 497 bp, Homo sapiens
atgggggtctggagacagatggaaagataaattatatagcttggatgtcccctccaaatctcatgcagagatgtaatcctctgtgctagagttgggaactggtgggaggtgtttgggtcatggcttggtgttgtcctcaagagagtgatttctcaagagatctggttatttaaaaatttgtagcacctccccctgacttgctcctgcactcaccatgtgatgtgtctgttcctgcttcactttccatcatgattaaaagcaacctgagacctcaccagaagtagattccagcaccatatttcctgtaaatcctgtagaactgtaagccaactaaacctttttttcttttataaattacccaaacttatgtatttstttatggcaatgcaagaatggcctaacacagaaactggtactgaggagtcgggcactgctataaagataactaaaattgtggaagcgactttggaaccgggtaatgagcagaggtttaaaga

SEQ ID NO: 396126 - DNA, 497 bp, Homo sapiens
atgggggtctggagacagatggaaagataaattatatagcttggatgtcccctccaaatctcatgcagagatgtaatcctctgtgctagagttgggaactggtgggaggtgtttgggtcatggcttggtgttgtcctcaagagagtgatttctcaagagatctggttatttaaaaatttgtagcacctccccctgacttgctcctgcactcaccatgtgatgtgtctgttcctgcttcactttccatcatgattaaaagcaacctgagacctcaccagaagtagattccagcaccatatttcctgtaaatcctgtagaactgtaagccaactaaacctttttttcttttataaattacccaaacttatgtatttctttatggcaatgcaagaatggcctaacacagaaactggtrctgaggagtcgggcactgctataaagataactaaaattgtggaagcgactttggaaccgggtaatgagcagaggtttaaaga

SEQ ID NO: 396127 - DNA, 585 bp, Homo sapiens
gcacttgctgcctcaccttgcacttttatgttatgaagatggtttctttccttcagtctcatgaggcaacctcttctaggttccaacttytctttagcttcttcacctctctcaggcttcatagaattaaagagctttagtagggccttggctctggattaggtttttgcttaagggaatgttgtagctgtcttggtcttctttctacgtcactaaaatttctccatatcaataattagactgtttcactttcttatcattgatgtgttcctttgcattcacaacttggcctacctgtttggcacaatgttacctaaatttcagcctatttcagtttttaacctgcctttttcactaagttaagtcacttatagtttttgatttaaaaaaatgagaaatctgagagagggcggagcaagatggcaaaatagaaagctccatcaatcatgcccctgcaaggacatcaagttaacaactatcaacacagaaaaaataccttcaaaagaaccaaaaattcggtgagcactcgtagtacctgggtttcactctatatcgctgaaagagacactgaagagacttaacagt

SEQ ID NO: 396128 - DNA, 585 bp, Homo sapiens
gcacttgctgcctcaccttgcacttttatgttatgaagatggtttctttccttcagtctcatgaggcaacctcttctaggttccaacttctctttagcttcttcacctctctcaggcttcatagaattaaagagctttagtagggccttggctctggattargtttttgcttaagggaatgttgtagctgtcttggtcttctttctacgtcactaaaatttctccatatcaataattagactgtttcactttcttatcattgatgtgttcctttgcattcacaacttggcctacctgtttggcacaatgttacctaaatttcagcctatttcagtttttaacctgcctttttcactaagttaagtcacttatagtttttgatttaaaaaaatgagaaatctgagagagggcggagcaagatggcaaaatagaaagctccatcaatcatgcccctgcaaggacatcaagttaacaactatcaacacagaaaaaataccttcaaaagaaccaaaaattcggtgagcactcgtagtacctgggtttcactctatatcgctgaaagagacactgaagagacttaacagt

SEQ ID NO: 396129 - DNA, 608 bp, Homo sapiens
caaacaaaataaactttatgttgaatggtgataagtagtatggaaaaagtacaagtgagggtatggatagtgttggaatctggtcagggtagttctcactgagaaaatgacacatacaaagaccgaaggaggtgagcaagagagtcataagaatgtctagggaaagagcatttcaggagaaggactgtcatgtgcaaaatcccagaagcaayagtatggccattctttgtgagggacagcaggatggaccctgtcaggagcagagtgagctaagaaggtagttgaaaatgaggtcagagaagcaacatgtgtccagatgatataggacttaaacgccactataaagaggttagtttttcactctgagagagacaggaagctttgcagttttaagcacaggagtgacctgctctagcatcctaattttaatgggatcactctgactattgtgttgagaataaaccgatggagaagcagggagcccagtttggaggccgttgcagtaatccaggtgagagattatggaccagatgataatgctgggaagataactgcaagggaggatgaaaacagcaacgagaaagataggaggaaaaccagaaataatg

SEQ ID NO: 396130 - DNA, 528 bp, Homo sapiens
ctctcatttattcagttctttgatttctttccacagagttttgtagtttttctcatatagatcttgtacatagttttgttagatttatatctaagtattttatttgttttggcactaatgtacatgataacattaatgtaatgattttaacttcaaattccttgattattgctggttataggaaagtgattgattttctgtatcattggtgtatcctgcaatcatggtacaatcatttatgagtttcaggagttttctggctgattattttagattttcttcattgataatcatgtcatyggcagacaaagacaattttatttctttcttacaaatgtgtatgccttttatttccatttcttgtcttattgtattagctaagacttccagtgacatattgaaaagcaacggtgagaggtaatagtcttattttgcttctgatcttagtgagaaagtttcaagtttctcaccattaagtgcaatgttagctgtaggttttttgtagactttttttaaaaaatgaagttt

SEQ ID NO: 396131 - DNA, 401 bp, Homo sapiens
gtagctactccattaaaaagatgtgcttaccattatatgtactggtatgtttcctctgaagtggtcataaacaattacttagtaatgtttcaaatatcaacaacaagagaaaaattcaataaatataaatgaacatgtcaaaatatacaaacaaccttgctaactttaaaggtgtattacaaaagcaatttatcttcatagcagtttacataattytaataaacctcacaggttttctattagtgctgcatgtacataggaaaaatgatgcaggagaggtgtgagtaactaaaggaagaaaattacccttacactttactgggtatgaaagactcctttctttttttccttcaggctagggcttgctgagctttgaagaagacttccagtgcaagtggatt

SEQ ID NO: 396132 - DNA, 581 bp, Homo sapiens
aaaataaagcacaaagtccagatttgctgcttatcggcagtgtaatcttcgacaagtcatttaaactctagcttcagtttgctcacctaccaaatgcaaaacataatttctctgcagagttatgagaaacaaagataatacacagcaagcatctgacaaagtttggcatagagcaaagggtcattgatgatggctgctcaaactgacataaattgggatgacagtccaggaacatactgttcataccagtgtttcactcaatagaactaattcagagggaatgtattaaggttttaaataccattcttcaaaacttgtatcaacaatgacagcagtagcagcagcaatgactaattgagggcttataatgtgccaggcagtgagtttagtcttttatattcattatttcatttaatccttatgattactttgtagtgcagtatatattatctctagatatattattatctccattatggttgaggaaattgaaagtcaaagagcttaatttacttgcccaaagtcacacatagggtcatttgcaaytctgggagtagaacacatgcctctctggcttgacc

SEQ ID NO: 396133 - DNA, 644 bp, Homo sapiens
gaattcaggtcccctgatttcacatctggacttctttacactcctgcttttcatactgtaatgtgcataaaaattctatagtaatcttgttaaaaatgcagattcagatgcattatgtttgaagcgggacaccagatgcctcatttcaaataagttcccaaatgatgttcataatgctggtccagggacaactctgasaaggatttataccaaaccactagtaggttctcaagtgactgccattgcccctctagtaaattagcagtaagcagtagctcacgtagtcgtaagtggccgcagggctccagagctgtgatggacagggcactgaatttggagtcagattatctgtgtttgatgctgcgctgatgctatgtgagtttgagcaactttcttagccgcttagaatgccattaagtagaaatgatagataataaggtgctttcacatagaacatcaagaattgtttattgaaaaacataatgaaatctaaattcatgtacaagttgtcactgtacttctcaagtacctcacttccctgtatggtatgtgtttaatttaaagcttaacattccaaaggattttgcccaactatgtgtttaccaacattgtttaacatccatagcccaaactctttgattaac

SEQ ID NO: 396134 - DNA, 579 bp, Homo sapiens
tgaacacataaacacagggaagggaacaacacacactggggcctttcggggagagaaggaggaaggagagyatcaggaaaaatagctaatgctggacttaatacctaggagatgggatgatctgtgcagcaaaccaccagggcgcacgtttacctatgtgacaaacctacatatcctgcacatgtacctcagaacttaaaataaaataaataataaagttaagtatatggtctatcttttgcattgtacatttttcacttaaaattagattgtacaaaattttcatattatcattcatctttactattattatttcattggcttaatagtactctatcaatgtgatataactatttcccaattcctggcgatttaaaatgtttctagttttctgtcttagaaatgttgttaagaatattaacataagtattaatttcttcctaagtatcttgccaaattttaaaatcttcccttctttctattatcatttaaaataatttttcattttctatgtggatgagttttgtttatatttatgctatttatttccaatgttataacagtgtagtaaaaaaaaag

SEQ ID NO: 396135 - DNA, 464 bp, Homo sapiens
aaggttagagccataggaacagttatggttctccctttacttaaaaatctaatgggtcacagttcaggatgctttttgtttgtttatttgtttgctttaagttctgggatacatgtgcagaacgtgcaggtttgttacataggtayacatgtgccatggtggtttcctgcagctatcaacccgtcatctaggttttaagccctgcatgcattaggtatttgtcctaatgctctccctcccctttccccacaccccctcgacaggccccagtaggtgatgttcccctccctatgttcatgtgttctcattgttcaattcccacttatgagtgagaatatgcagtgtttggttttaagggtcttcttcggcaaactactgtcttccaaacaaacaaatgaagacaatcaacaacattaataagttttgagaagtgactcacgatttttatcttgagtcggacactg

SEQ ID NO: 396136 - DNA, 623 bp, Homo sapiens
ggcaacaaatactaataatgaatgaaatagtgtttaaaatgaatttgactatagtctaaaccactggaattcaaaatattgccttaattactttcctttttctcccccctgcaggagttttgggcaggatcgatggatgcaggaagcagtaggagtttggagaatgcagtgaataggatctatcatgatcagcttgttccaaagataaacacaagcaagaaaatgtccaccttagcgcacccacctaacatcctggaaatgtcacaagagattaagaaaaactgtggaggtaaacaggtagaaatcacacttgaaagaacaaaaatgacaaagggcatcaaagaaaaacaaagcaatgatttaragaaagcagcctttaaacggaaggcagaaggtgaagaaaagccaactagaaagaaacaggcaaagataacagaacttgacaatcagttaatcaccatgcctctgcctcacatccccttaaagaacataatggatgtggaaatgaagttggtctacattgatgaaatgggtgttcgctatgagtttgtagagtccttcatgtctactgggagtcagccaacatgccaagctgctgaaatagtagaccctttgagtgtaca

SEQ ID NO: 396137 - DNA, 623 bp, Homo sapiens
ggcaacaaatactaataatgaatgaaatagtgtttaaaatgaatttgactatagtctaaaccactggaattcaaaatattgccttaattactttcctttttctcccccctgcaggagttttgggcaggatcgatggatgcaggaagcagtaggagtttggagaatgcagtgaataggatctatcatgatcagcttgttccaaagataaacacaagcaagaaaatgtccaccttagcgcacccacctaacatcctggaaatgtcacaagagattaagaaaaactgtggaggtaaacaggtagaaatcacacttgaaagaacaaaaatgacaaagggcatcaaagaaaaacaaagcaatgatttagagaaagcagcctttaaacggaaggcagaaggtgaagaaaagccaactagaaagaaacaggcaaagataacagaacttgacaatcagttaatcaccatgcctctgcctcacatccccttaaagaacataatggatgtggaaatgaagttggtctacattgatgaartgggtgttcgctatgagtttgtagagtccttcatgtctactgggagtcagccaacatgccaagctgctgaaatagtagaccctttgagtgtaca

SEQ ID NO: 396138 - DNA, 518 bp, Homo sapiens
atttattgagtagttactacattagcaacattgtgctggttactacaggagctacagggaagcattggatttcaaccccacaatcatagctccttatttattctttagttacagctaaaatatagtagacattttatttgccataatccacgtgttgattttaggggaaaacagctagaggggtaaaggtatgagagaatataaagagaaaacaccaaggtaaaataggaaggaattgggtgttcctagggtagtaaatgcagggaagaacaaatagggagaaataaagctgaagaagctggcaggttgtcaggggccatgcatgccttctgagattttatgcagcaggcaacaaaacgccttcagaaaggatcaacatggggaatgatgaagtctaatttttaattttgctttatcactccagtgtatatatagagaaaatatagtattcagtctctgtgttattaccyattgctgggttgtaaaatcaatttaatggattgcaatcagcattatgt

SEQ ID NO: 396139 - DNA, 433 bp, Homo sapiens
tgctatataattccatttatttgacctttggaaaagataacactaaagggacaaaaaacacatcagtagatgccagggtgtggaaatgatccgctgagttgactacagagacatagtgttatttttatgggtgaaagtaatgttttaaatcttgaattgtgtggcacttacaatcaaaacttgcagaactgtttactaggttaaaaaaattttttaaggaagcagagctttgaaggcaggatggagatacatcagtgagaggtagtagggagattatgactactgcagagggattgaaaagcctgttatcacacagcagaggcttcatgcacctcatctcaatcaatccttacaccttaccttgaagygtagtttccccgttttttgcagagaggtaggagagagtgggggtgggaaagtgtgaataagacaa

SEQ ID NO: 396140 - DNA, 555 bp, Homo sapiens
ttgttttgaacttaaaatcacttagaaacccattagaaaactggggtgaaataatagacatagaaatggaaatacccagaaaagcaagtgcaaatgactctgaaatgtagaaaaagctgctcaattcataataagagaaatgcagatttgtcttacactctgattgtctaaacctattattttgggagaggataaaaaatattagtaatacactaaccagtgtagaataaaggaaagaataaartggataagctggtgagaataaaggaaaatagaccttctaatacacagctgataggggtgtaatttagcaatatttattgaatttcaatatgcaacctctttcatttgaatttaggtaatgtatccagcagatatatctgtattcatgcaaaatgacatgtgtacaaggtgacttatcacaacactatttctagggagcaaaacaccagaaacaactcaaatgtttattaaagggaatatgtatccttagcatgatggaatattatacaatcataaaaaggaagaaatttattatatattgataaagtataa

SEQ ID NO: 396141 - DNA, 577 bp, Homo sapiens
catatccatgctctagatgccacccacacatagtcacttagtagccttcttgcttatcagattgactgtccaggcatacagagcttctgtttaagtaacccttattttacttacttaatggcctcaaagtgcaagagtagtgatgcttgcaattcaggtatgccaaagagaagccataaagtactttctttaagtcaaaaggtgaaagttctcaacttaagaaagaaaaaagtcatatactgaggttgctgagatctatggtaagaacaaatctatccataaaattgtgaagaaggaaaaggaaatttgtattcgttttgctgtagcacctcaaactgcaaaagttatggccatagttcatgataagtgcttcattaaaaggaaaaaggcattacatttgtgggtggaaggcatgaacagaaaatgtgttctgactgatggcaacatgttgcgtcagcaagcattgacaaagactttagcaagggatttcytgaaatgaatgacaccaagccatttactgcacgtaagggatggctacacagattcaggaatatgtttgaactgaaaaattataaag

SEQ ID NO: 396142 - DNA, 592 bp, Homo sapiens
gttgaattgtctatttttcctttcaagtctattgtttttgtggtattttggtgctctgtctataagtccatatatacatttataattgtcatattttactaatgtactggcagttctatttttataaaatgtccttatctttgataacattttttatcttaaaatttgttttgtttgacagtaatatagttattgcagctctcttatgtttgcatggtctatctttttacaatatttttttcaacttatatttttcgttgaatctaaggtgtgtctcttatacacagcatatagttggatcttgatttttcatsacaatctttgtcttttcatttagactatgaaggtttaatgcatttattgatatgatttaatttacgtttactgtgttgctatttattttataaatgtcttctttcttttttgtcactctgttcctctttgattcttttgtgttaaatacatattttaattagcttgttcatttttaaaaatatttctgtgagttattttcttagtgatattgttctagtgattatgatatgcactttaacttatcacaatatacttcagattaacataacttgattct

SEQ ID NO: 396143 - DNA, 553 bp, Homo sapiens
gcagtggcgccgtctcagctcactgcaaggtccgcctcctgggttcatgccattctcctgcctcagcctcccgagtagctgggactacaggtgcccaccaccatgcctggctaatgttttatatttttagtagagayggggtttcaccgtgttagccaggatgatctcaatctcctgacctcgtgatccgcccacctcggcctcccaaagtgctggaattacaggcgtgagccaccgtgcccggccaactttttccccatttttaaagttaactaccattaaaattgtttttgaaataattataaatttacagaagtttgcaaagaaaagaagtacagggaatttccatatgcccttaatttctccagtggttaagcatgcctgcttaactatatagcatgatagcaaaaccaggaaattgatgatccatatggtttggtacaatccataggatttattccgattttaccagttatacatgtattcatttttgtctgcatgttgtatgcctatgtatatttatcacatgtatagatttggtgtaaccaccacc

SEQ ID NO: 396144 - DNA, 601 bp, Homo sapiens
tcttttctctttttgagctatggtaaatattattgccctttaattttactgtccatgtgtttgtcactaatatatagaatataactgattttttatgtttatcttttattctgctaacttgttgaactcrttttttagttttggagtttataaattccttaagatttcctgacaattatatgcaaattgaaaccatttcgttgcttttctgatctgttgttattttatttacttttcttgcctttatacactggctagaacttccaaccctacattgaatagagtcatgagagtaaacattcttgccttgctgtcagtcatagagggaaagaatctggtcttttaccattgaatatacagatggtccttcatatctgtggcattttatctgtggatttaatcaacaatggaacaaaaatttttaaagaaacttaatcgttgtgtctgtgctgaacatgtatacagaactttttcttgtcattattccctaagaatacagtataacaattatttacatagcatttacactgtactaggtattatcagtaatccagggatgatttaaagtatatgaaaaaatgtgcagaggctatatgcaaac

SEQ ID NO: 396145 - DNA, 566 bp, Homo sapiens
tgtctgtgctgaacatgtatacagaactttttcttgtcattattccctaagaatacagtataacaattatttacatagcatttacactgtactaggtattatcagtaatccagrgatgatttaaagtatatgaaaaaatgtgcagaggctatatgcaaacactacatcattttatataaaggacttgggcatccatggatttttgtattcatgaggggtcctgggaccaatctcccatggatgttgaggaacaactgtaatgttagctttaggtttcttgaatatactgtttgtcaagttgaagaagttttcaatactctcattttttctgagattttaaaaaaagtatgaatgggtgttgaattatgccaaatggttttttctgcattgattgattatcatacgaattgtcttctttattctatgattatggtgaattagattgattgattttttaatattgacctgttttgcatggtacaataaattccatttgatcatgttgcatattttttgtacaaatatatatatatagtatatacatatatagtacatatatagtatat

SEQ ID NO: 396146 - DNA, 566 bp, Homo sapiens
tgtctgtgctgaacatgtatacagaactttttcttgtcattattccctaagaatacagtataacaattatttacatagcatttacactgtactaggtattatcagtaatccagggatgatttaaagtatatgaaaaaatgtgcagaggctatatgcaaacactacatcattttatataaaggacttgggcatccatggatttttgtattcatgaggggtcctgggaccaatctcccatggatgttgaggaacaactgtaatgttagctttaggtttcttgaatatactgtttgtcaagttgaagaagttttcaatactctcattttttctgagattttaaaaaaagtatgaatgggtgttgaattatgccaaatggttttttctgcattgattgattatcataygaattgtcttctttattctatgattatggtgaattagattgattgattttttaatattgacctgttttgcatggtacaataaattccatttgatcatgttgcatattttttgtacaaatatatatatatagtatatacatatatagtacatatatagtatat

SEQ ID NO: 396147 - DNA, 492 bp, Homo sapiens
ctaaataaagaatagaggaattttgagaattatgaagtattagaaaagagagatggggatgaaaagcaagatctagaggagtctgttttgattcttagataattctgagatgtgttcacagagccagtaaaacgacaaataataatatatgtgaaaggaggcttaaatgcattaaaattcttyaagtgaaaactatttaaatcattaacgtatttcaaatgtgacctctggtgaattatgtattattttcctttcatttccctcgtcttttgaatcagaataacaataatgcttatgttgacaaattgttgtgaggacaagggttacaatattaaaaaagtcttctcagggtgcatcttcaacaactagtaacttttattatgccaattaatttttaaagtatccagatatcatttttgaaaaacttttaaaaacagttaatttagtgaactatactatattacttagcatggttatgcaaatttttttagt

SEQ ID NO: 396148 - DNA, 658 bp, Homo sapiens
tctttcataaacataaatgcaaaaatcctcaaaatacattagcaaatagaatccaacaatgtataaaaaattacacaccacaatcaagtgggatttattgcatgcaggcaagactggttcaacatctgaaaataaattatgcaatccatcacattgacaggctaaaaaagaaaaattgcatgatcatatcaatagactgggggaaaagcatttgacaaaaccaatataataaaaattctcagtaaamtagaaataaagggaaactttgtcaacttgataaaaacaatctacaaaaatcctacagctaacatcatacttaatgataagaaactgtaaactttttcactaatatcaaaaacaaaccaaggatcctctctcaccacttctttgcaatattgtgctggaattcctagctaatgcaataaaacatgaaaagcagataaaaagtctacaaattggaaagtaagaaataaaattgtcttcattcacagatgacatgatcatcaatgttgaaaatgcaaaataagagtaaaaaactctcctggaactaataagtgattataccaagattgcagaatatgaagaataagcttagtaaattgttttcctatatatagcaatgaacaagtgaaattttaatttaaccatataataccaa

SEQ ID NO: 396149 - DNA, 630 bp, Homo sapiens
tttttaattgctaattttctcaacatattattggagcttatatcatttgagacaatgaagaaactaaaattgcaccctagttttgcttcataatgaaacattgctgagaaaaaggagtatctactataaataggaatagcaagtatcaaactacattactatgtgccctggttctgagaacacttccaagtccctaaggcagtgatttgtcatcattcaagaattatgacaccttatttgcttgttttcttttgttatgcttaatatttcctccgttaaaaattacaatacaaaatcttttgaccatttcatactactcaatatggttagatagagacaatttgaagtatgaaaaactcaatggtttaaatatttaggacattttactttggcagtatgatgacacagaatgaaactcaagaaattttgcagtattctggttttataaattcaaaacaatgccattgtatttatttakgcaacattgctttcaatattgttctcagaatctacagtgggtaacatattgaagccagttgctttcctcacctcttattatttaatgaaaaatatgcttacttttatttcctaccttgataagatttgtaaccatagaaaaaattaagggct

SEQ ID NO: 396150 - DNA, 570 bp, Homo sapiens
ttttgcttttactctacctctgactagttacatgacctttttatgccatagcttcataggattaaggaaatcaggcaaaccactaataggttatcagttctctttattaagctttgtcaaggacagatactatattttggtcagcaaggttccaagtgtctgcagctttgggctgtgatttacaccagattctagcttcttagaggtgcttctcctgggcgcaccattaagccgctagaaagccacttctttgagcctttcccatcctctctctctaaagctagggcttgtgctggggatagttaattcctaggaatcasactctggaaaacctcagtcattttgcattctcttagatcgcccctccaccgcagtagtactctgctgcttccttcttttcagcaacatgtcatagacttctcaatcaatttctgatttctcatatgcctggaggaaaagactgcttcacctctcagctatggcaaaaagccctaaagcaataattgcaaactctgggtacctgcttgaactccaagaccatagaaaagatcaggagcacacaatttaata

SEQ ID NO: 396151 - DNA, 570 bp, Homo sapiens
ttttgcttttactctacctctgactagttacatgacctttttatgccatagcttcataggattaaggaaatcaggcaaaccactaataggttatcagttctctttattaagctttgtcaaggacagatactatattttggtcagcaaggttccaagtgtctgcagctttgggctgtgatttacaccagattctagcttcttagaggtgcttctcctgggcgcaccattaagccgctagaaagccacttctttgagcctttcccatcctctctctctaaagctagggcttgtgctggggatagttaattcctaggaatcacactctggaaaacctcagtcattttscattctcttagatcgcccctccaccgcagtagtactctgctgcttccttcttttcagcaacatgtcatagacttctcaatcaatttctgatttctcatatgcctggaggaaaagactgcttcacctctcagctatggcaaaaagccctaaagcaataattgcaaactctgggtacctgcttgaactccaagaccatagaaaagatcaggagcacacaatttaata

SEQ ID NO: 396152 - DNA, 633 bp, Homo sapiens
gcctctcctttacaagttaaagacgttgattcttagaagctstcattaaccacgaaaatcgcatttctagtaatcaagacttttaagccttctcactgaagatcctgatgttataatatggcaaatgtggctgaggttatttgggtgtttcttcaggggatatatttatacatcagaaagaacttacaggactgtaaaaaagaaagtccttctaggagggattgcaatgttgagaggttttctagattaagtggaaactggtgtggtttgttcagtttatctttctaaaatataacacagagaaaatttatttttacttagaaatatctttgtatcagctgagggagtagatttcatatctgaaaagggatttaaagagaagaaagagaaggagaagaagagagagaaaatataatagcgttagtcgtaggagctactgtgtacttcgtgcttttatgcctgagtttatgctacaaccaaaattatcattgctattatattccattagaccaaaagtcacatttatgcagtttcctccaggcaaatttaaatctcaatactgtttttcttctttatgtttaatctcaggaagctctattctataagaggcagcaaatttgcagcacagacatg

SEQ ID NO: 396153 - DNA, 586 bp, Homo sapiens
acactgtagtagaaaaaccttggaagtaatctgaacacccatcagtgcaggaataattgaataaataatgtgcatctatttttggtattactatgaagctattaaagagaatgagttacgtctgttatcactggtctgtagggatgcccacgatatgcagtttagtaaaaaacacaagctgcagagtaatatacatagtaggtgccatcattgctctgaatgtccttgcttcattgcctttgacgattcttttctcatgaaacttgctaacagtctcttaccatctrtatgtctaattcttctttcacattcatattcaccaggagcctcagtttatcagggaagctaaattgaccaacccagattggatacatgtccactacctgtgccttcagtttatcctgagcaggtctcagtcatagacatttattcaactcttggtttcttttagacagcaaactctttgaagccagggatgattgatctcctctcagcatttccaatataatatgtatatgtagtgattgacataagggggtaatttatcaaacttttttgaatgaatgaaaaaaagtgcggtccaacc

SEQ ID NO: 396154 - DNA, 586 bp, Homo sapiens
acactgtagtagaaaaaccttggaagtaatctgaacacccatcagtgcaggaataattgaataaataatgtgcatctatttttggtattactatgaagctattaaagagaatgagttacgtctgttatcactggtctgtagggatgcccacgatatgcagtttagtaaaaaacacaagctgcagagtaatatacatagtaggtgccatcattgctctgaatgtccttgcttcattgcctttgacgattcttttctcatgaaacttgctaacagtctcttaccatctatatgtctaattcttctttcacattcatattcaccaggagcctcagtttrtcagggaagctaaattgaccaacccagattggatacatgtccactacctgtgccttcagtttatcctgagcaggtctcagtcatagacatttattcaactcttggtttcttttagacagcaaactctttgaagccagggatgattgatctcctctcagcatttccaatataatatgtatatgtagtgattgacataagggggtaatttatcaaacttttttgaatgaatgaaaaaaagtgcggtccaacc

SEQ ID NO: 396155 - DNA, 586 bp, Homo sapiens
acactgtagtagaaaaaccttggaagtaatctgaacacccatcagtgcaggaataattgaataaataatgtgcatctatttttggtattactatgaagctattaaagagaatgagttacgtctgttatcactggtctgtagggatgcccacgatatgcagtttagtaaaaaacacaagctgcagagtaatatacatagtaggtgccatcattgctctgaatgtccttgcttcattgcctttgacgattcttttctcatgaaacttgctaacagtctcttaccatctatatgtctaattcttctttcacattcatattcaccaggagcctcagtttatcagggaagctaaattgaccaacccagattggatacatgtccactacctgtgccttcagtttatcctgagcaggtctcagtcatagacatttattcaactcttggtttcttttagacagcaaactctttgaagccagggatgattgatctcctctcagcatttycaatataatatgtatatgtagtgattgacataagggggtaatttatcaaacttttttgaatgaatgaaaaaaagtgcggtccaacc

SEQ ID NO: 396156 - DNA, 595 bp, Homo sapiens
gttattcttgtgtttgctaaaggttgagcactattcaactagacaaaaggaaggagtgcaatgkcgatatgaagatatcagggaataggaagcatgctatctttaaaagaacggttatatcccttacaaagccctctgaggggtagaaaagtaaaagtgataccacttgcctgcagctcttctctattctgttttaattttaggtctttgaagtctgaatttgtcttaattgtttgtttctgtgagggttaagtgagccacatcttaccccatgtcttgcatgtgtaatacttacgtactacttttgaatgcatgtataccctctgttgtcactgaaatacaaattcagtttaaaacatcattgaatttatttaggcttttgattatctgtaccttctcaaaaatatgcgtataaaaagcaaattattatcaaaagaggttatcacattcttcttttttccacttataacagggtcctcacacccaaaaacgttgaaaaataattacctaaatataaagcagtataggcacaagcatcaaacaacatgtttatctgaacataattgagagagatttgcagtccggtgtaaggctg

SEQ ID NO: 396157 - DNA, 631 bp, Homo sapiens
cacaaatactcctttatataaagaatatggaacctatgtggtacttactgttacagtggatgttgggggtgggggtcaagtgggagcaggtgcattggtccattattgtagtttgtcaaaaagtcatcattatagctcctaagacatagctgttgtgtctgtcttcctgcagatataaatgagtgtgctgaaggtctttcttactgtggccactgctgtgtaaactctatgggatctttcacttgtgcctgccaaactggctttgagctgggagctgatagaaaacaatgttacagtaattggcaacagtcacagcccaggtaatgtgtggcattttacaggtattaaacatgagtaatacataagagaattacattgtgtgtcttgctaaagcaggagctcctgagaaggatgtggatggaggcttaaaaatccaacccctttattttataggtgagaaaacagaggcccagagtcaatggaraatggtttgcaaaataatctgtagtgtcattagcaaggattaagcctcaggttttctgacttggggctttgttgggttcatagatctttgtgaaaattctgccttcctttatcagttctgccatgcaatatttattgaacactaata

SEQ ID NO: 396158 - DNA, 614 bp, Homo sapiens
gatatagtgcctccagaaagaattattcagaagtctttaatcagaaattttgttctcattttcagtgccctgaaaccacgtagcttttcttagtacattatctttgaatcaatctatgctaggccatcagtaagaaaaacaactttcaaatatctcccattgtgcaaaaactgtgatctggaacagtacagcaytagtggtgacagaataataaggccatttatacttttctgcttggtaattcataaaaccaagttgcatctaagtaatttttttagcattatgcatttgccatgtccgtgaacatatgctaatgaatgaaatcaacagatttctttttttgtataaacaaaccttatcttttaaaccagaaacgaattcccaagctaagtgtccaaatatactttcctaagcccatgtgaagtagtccattatattatttggggaattatgctacaaagaaaaagatgaaaattttatatttatttaaacctaataagaaaatagtgtgaattgaacacgtgtttatcttcattcttgcctgaaaccacacttaaatgacaaggaattttaaaaagtattaatcaatgagagcatagtaataagagagcaaa

SEQ ID NO: 396159 - DNA, 542 bp, Homo sapiens
ggaggcttcaagtaactatctggggggttactgatgaaagatcagctcactgaactctcagatcctctaatcgctcaatgatagaaggtgtgaggtacctcaggtgtgggtgcaaacagagagcatacctccttcccctcctctcctctttctccaactgagaaaatggacttcgaagactcactaagtgggaacatgggcacaaagaaaagaagtggtgagaagtgaagagctaaaacaaaaatagatgtatttagttaaagtctaaaaactaaatgggaatacccacccctaagccccgtgcccctactccttatccrgatgctaatatccagcacaccactaaccacacacactgtcctatggaagagtagaagccctttcttaggagaaacagtaagattccagagaaaggccgttcagacactgacattttggaggctgtcaaggaaaagccagcttcctacccaatcaccctgcaatgaaagtcaccaggccacaagcactgccatcaattcattaacatgccattcttaaatatg

SEQ ID NO: 396160 - DNA, 581 bp, Homo sapiens
acctagagacaaatgtgacatgtgtctctgtctttaatcagaaattttgttctcattttcagtgtcctgaaaccacgtagcttttcttagtacattgtctttgaatcaatccatgttaggccatcagtaagaaaaacaactttcaaatttttgagacactacatttttatttttctgttgcttttttaaatttttgattcgggggcatatgtgcatttttaaaagaataaactcctccatgctcttcctctccactgtaagacatgcttcattcaaaggaggcaacagtcttgctagggacaacatgaaatacgggacacaggaatcttgggatccaacaactgtagaagttcagaaatgtccaaggcactggccaatgtggccaatgagacgctgtgytataacagctgcacagaaagccttgagacctgctggtctggattagggcaggaggtcagagagcatgaggacagaagaacaaaaaaagaatggagcagatagattttctgacagatgagaccatgtgctattggaagttgtggaaaaaagtatcttcccaaccataagcaagaaaaaaaaat

SEQ ID NO: 396161 - DNA, 604 bp, Homo sapiens
ttcaaaattttgggttggtcactgacttttgtgtaaatatgattaaagcaatggaccctcctcaggaaaatgtgcctacataatgcaaataacattttatacccaacttttgagggctgtagggagtagacaacattaagatttcagaacacatagccaccatagtttctaaatgagataatttgtgaaataatcttactacaaaagttagcattattatatagaattcaatgccaatgtaacacagcagaaasaatgtcaaatgaggagttgaaagaataaagttatgcatcatctctgctgctagctagccatgagagccactgaagcactctatgctttgggttcctcgtttattaatagtgaaaataataaatgtcctgtatactccacaggctgtgataagaatcaaatgaggtattgttaaggaaatattttataaaccagaaaagtcagctcatttgagtagtaattttgactacccattttgcagatagagggaacaaagaacaacagatcctttgtattcagaatgtatttgaaatgcagattctcagggactgaactagacctagtgaattagaatttgcattttaacaagatc

SEQ ID NO: 396162 - DNA, 589 bp, Homo sapiens
  misc_feature (1)...(589): n = A,T,C or G
acaaattaaaaaataaaataaaaagcttttctcccactaatgccacttcagattataggcactcagtatgaytatcaaatagcacagaagaagaatgacaggcgctattctcaatggcaaacagaaaatatgatttttaacaaacaaaagaatattaattcaagacctagcatgtaaaagctaataatttgctacaaagataagtaaaagaacttaaggcatacatttgaaagatctaatagtctagggtaattttctcaaatagaaatgactatgtggcaatactatcatagcagagtccagaaaactctcagtttcttctcccacttggcatttggatctcgacactatgaacagttgcttttcctgtttattttttttgtaatcaagttctggtagattttcctgtttccttggagctaagccagagtcggagcatattagagaaactcactgctgcagtaactaattatcagtcttaactttgcactgctgtgtcacaagctaccacacatctagcagcttaaaccacacacatttcctaaattgttctattaagaccagcattatccttatactnaaacccaac

SEQ ID NO: 396163 - DNA, 589 bp, Homo sapiens
  misc_feature (1)...(589): n = A,T,C or G
acaaattaaaaaataaaataaaaagcttttctcccactaatgccacttcagattataggcactcagtatgattatcaaatagcacagaagaagaatgacaggcgctattctcaatggcaaacagaaaatatgatttttaacaaacaaaagaatattaattcaagacctagcatgtaaaagctaataatttgctacaaagrtaagtaaaagaacttaaggcatacatttgaaagatctaatagtctagggtaattttctcaaatagaaatgactatgtggcaatactatcatagcagagtccagaaaactctcagtttcttctcccacttggcatttggatctcgacactatgaacagttgcttttcctgtttattttttttgtaatcaagttctggtagattttcctgtttccttggagctaagccagagtcggagcatattagagaaactcactgctgcagtaactaattatcagtcttaactttgcactgctgtgtcacaagctaccacacatctagcagcttaaaccacacacatttcctaaattgttctattaagaccagcattatccttatactnaaacccaac

SEQ ID NO: 396164 - DNA, 589 bp, Homo sapiens
  misc_feature (1)...(589): n = A,T,C or G
acaaattaaaaaataaaataaaaagcttttctcccactaatgccacttcagattataggcactcagtatgattatcaaatagcacagaagaagaatgacaggcgctattctcaatggcaaacagaaaatatgatttttaacaaacaaaagaatattaattcaagacctagcatgtaaaagctaataatttgctacaaagataagtaaaagaacttaaggcatacatttgaaagatctaatagtctagggtaattttctcaaatagaaatgactatgtggcaatactatcatagcagagtccagaaaactctcagtttcttctcccacttggcatttggatctcgacactatgaacagttgcttttcctgtttattttttttgtaatcaagttctggtagattttcctgtttccttggagctaagccagagtcggagcatattagagaamctcactgctgcagtaactaattatcagtcttaactttgcactgctgtgtcacaagctaccacacatctagcagcttaaaccacacacatttcctaaattgttctattaagaccagcattatccttatactnaaacccaac

SEQ ID NO: 396165 - DNA, 441 bp, Homo sapiens
agcttcatgatatcaaatcagtttctatatatcttgagataaagcagtgaggggaaacaggaaccatgtggcatttacagattggacctgttatcggattcactggcactgtgaggtgagtgagcrgcatagaactgcaccatggcaggatattgaattaatgatgcaatccatgaataccacctcaatggaggagttacgtggagaacttatgtagaactataaaattcgggaacatggatatccaatcattcgtgctgtcttagtctgttcagacagctttaacaaaactatcataaaactgagtagtttatatatgacaaacatttatttcccacagttttaaatgctgggaagtccaagattaagggcccagcagatgcagtgtctcctgagagactattcctcatattcggtgccttctcactgtgtctttacagg

SEQ ID NO: 396166 - DNA, 168 bp, Homo sapiens
gagaaatctgatttacatctagagcatatctctatttcaacttgctattwttcaagtgttttaatactaccacagccagtgcagatttagaaaattttggtttatgacactatgaagataaagttactctaatttgtctcacctgtttatggtgtaaacaattgcaat

SEQ ID NO: 396167 - DNA, 584 bp, Homo sapiens
catattagaacagatcatttataagttaaaaacacacaaattacacacaaaaacagaacagaaatttattgatgctcgagtaatatatgtggcgacaactgcctttagcagtacagacttagtaaggtttgtttccatttgagcatgtttgaagttgcattttctcatagtgcatgctacattatgttgtaaagactttgaggtcaagaaccatcttttctattattcttatattcctagcactatgcataactggaactccatatacacactttttgaaaaatgaaaatctattgaattgaagatactgaaggcattttggataagcaaatraaaacatattgttggtcttatgtaataacaacacattcctggtgacaggagttttaaaattacagcccttaatctagaagtctttgaattagataagttttatatcactcttgtacacttcaatggttaccattaggtcagtgaagtcttactatttagatgctgagaccataatgaaatggttgccatttacaatgtggcaaaatggcctgaaagaaatagagtttgctgagcttgcaaacctaaacttc

SEQ ID NO: 396168 - DNA, 655 bp, Homo sapiens
aaaagaaatgaagctatcagtatattgttttagctctttttaatgaaacttctagttcaatatcagtaaattattttgcttggatatcaactctaatatgttttaccaacatgattttatgctactggcctctaggattttgaggatagtggactttataaatatttatgtgtgtattttcaaatatctatccctctttacaagcatagtatttgcatatattttcacatatttgtacacaaagtgagataaagtcagaaaaggaggggtaagtggacttttcagactaaatcaagtggagtgggatgtaggatgacattagtctgcctttattaagctccagaaattctgaaacagctgagaccacttgtaactgagctaacagttcagtttgacttgaagttaggtctttcttaggtcaaagagctgttggcaaaacaatctcagatctgtggcagcagatgtaacagggaccrtgctaacagaaaaagaacttctataaggagcccttggggaggcacagctagctgctggcctggacatcttcatctgggctgcaggatgatggcctcccaggcccattggttctctctaattcaattagctctctttagcatacgtctttatgctggaatgctatacacataatataatg

SEQ ID NO: 396169 - DNA, 561 bp, Homo sapiens
ttgattccaaccctcatggatgactgagcacttcaagatttcagcagaggaagtaactgcatatgtgatggaaatagtaagagaactagaattagaagtggagcctaaagatgttactgagttgttgcaatctcaaaataaaacttgaatggatctggaattgttctgggtgagcaaagaaagtggtttcttgagatggaatcaactcctagtgacgatgctttgaacattgtttgaaatgtcaccaaaggatttagaatattacattaacttagttaataaatcagtggcagagtttcagaggactgactgcaattttgaaagaaattctactgtgagtaaaatgctatcaaacagcattgcatgctacagagaaatcttttgtaaaaagaaaatgcagtaaacatctttgtctttattttcaaaagttgccacagccatctcaaacttcagcaaccaccatcctgttcagccagcaggcatcaacatcaaggcaagaccttccaccaacgraaagattatgactacgtggtgcttcagatgattgtaagcattttttag

SEQ ID NO: 396170 - DNA, 538 bp, Homo sapiens
ccctcgcttgttaggaaccaggctaggctgtacagcaggaggtgagcgccgggaaagccaaaggttacggcctgagctccgctcctttcccaccagcgggggcattagattgttttaggagcgcaaaaccctgttgtgaactgtgcatgcgagggatctaggttgctgctagagaatctaatgcctgatgatttgaggtggaacagtttcatccccttcttcccctcaaccccccaccagtccgtgggtaaaatgtcttccacaaaactggtccctagtgccaaaaacgttggggacggctgctctagccaactttctcttaagtttctttgaccagaagtagtcacctgtgcatttccaggagcaaacgaagctgggaaaataaatagctggccactatagactaaactgttgaaggctgactacaaattagaatatgggagaggggaatggctggtacgtaggagagaacaacgtttaccgcmatccccaacctgattgtgaattatccgataacttgggctgcatagaatattac

SEQ ID NO: 396171 - DNA, 606 bp, Homo sapiens
gggggtcgttcagtagttgcacatacctctgggtggccatggagaatgatggatttgtaacgctaaccagcaaacagtgccaaagccagcagctcatatgggtatttttgcctgtgagttgtggtttctgatatctctccaggatagacactcagttttgcctgggcatgatggtgcgtacctgtcatcccagctacctggggggcactgaggtgggaggatcacttgagcccgggaggtcaaggctgcagtgagccatgatcgtgccactgcactccagcctgtgcaayagagcgagaccctgtctcaaaaaaacaaaaaaagacactcagttgggagtttccactttttcatgctgttttcacctattgactgcatctgcgtttcttctgagtgtttccacagtagctgggtgttattcctgctcagtgggttgccgtggcagccttagctgtgagtgagtgacaaggcagaggtttccatttccttggctggaattagctgttaagctccccattagctgttccttttcctggtccagggatgccctgcaggactcttttccttgactgaggcatcgtcttaccttaactccccagtgggcag

SEQ ID NO: 396172 - DNA, 591 bp, Homo sapiens
gtcctgagcaaaccaggatgaattggtcatcccagtgttgggaacaggggcagcaggaggggaacaggtgggtggggaggaattataatagctaacacttattttgcttaataatgtaataatacttaraacaaatgtatgaggtaagtactatcatagccctattttatagaggtaaaaccgggacccggagagagggaacagcttgtcacaagtgttcattctgtaaatggcagaggcaggcctgacagccaatcctgcgttcccatccattgctctgcactgccttagaggcccatgtgtaaaaatgcagtgcagatcaagtcttgaaactgtgtttgaaattaattctcagagattggaagtagaagtctgtggaagctttgtttccatggagacccaatcatacccaaccacactgtgttcaaatgtagtcacaacagtggggagcagccatcactgaagtgaggtgcatttctctttttttttttttttttctagatggagtctcacgctcttgcccaggctggagtgcagtggcatgatcttggctcactggaacttccacctcctggggctcaagccaccctc

SEQ ID NO: 396173 - DNA, 430 bp, Homo sapiens
gggggacagcgcgcggcgccgggtcggggcggggcggcttttctgtcggaggacgcgaaccggcacgctgcgcctttaaggagtccrgctgggctgggcgccggagctgggagcggcgcgggtaggagcccggcggcaggtcccagcccggggctagagaccgagggccggggtccgggcccggcggcgggacccaggcggttgaggctggtcaggtgagcggaggcgggcgggcgggcggtggtgcgctcctagggggatggggcgccctgatggccccgtgacctctcccccagtgtctccctgcagcggcgcatcgagtggaaagagtcggcgatctgcacttgcctttccactccgctccccgcgcgggcgctgcccccacctcccgctgcctggataggtttgagatgcccgaaacccggcgccc

SEQ ID NO: 396174 - DNA, 463 bp, Homo sapiens
ttagttgatctttgtgttacaaattacagctatgtgtaaatsaaaccctatttctgtctttcttatttacttctaaatataccaacattttcctcctctaatacttgggttcataaatcctcctttagcctttcttgggtttaaagccatatctagatagaaaacaaaaacaaaaacaaatgaaaatgatcatttggataagcaagactccaactctctttttggctgacgtaaaccatcagttgaaatgaaagtgttgggttgaagaagggctggaatgatatggctgcttgttttgactccttatcacactctgtgtccaagaaaatgtcacctacattttctgtcttagatgttcatccctccctcttcttgccgtttgatttttgcttcttgttctgtgctaaagccgcctgccacctcccttcttcaaaactatattttacacttgaatacactttct

SEQ ID NO: 396175 - DNA, 463 bp, Homo sapiens
ttagttgatctttgtgttacaaattacagctatgtgtaaatcaaaccctatttctgtctttcttatttacttctaaatataccaacattttcctcctctaatacttgggttcataaatcctcctttagcctttcttgggtttaaagccatatctagatagaaaacaaaaacaaaaacaaatgaaaatgatcatttggataagcaagactccaastctctttttggctgacgtaaaccatcagttgaaatgaaagtgttgggttgaagaagggctggaatgatatggctgcttgttttgactccttatcacactctgtgtccaagaaaatgtcacctacattttctgtcttagatgttcatccctccctcttcttgccgtttgatttttgcttcttgttctgtgctaaagccgcctgccacctcccttcttcaaaactatattttacacttgaatacactttct

SEQ ID NO: 396176 - DNA, 560 bp, Homo sapiens
acctctactttattcaatgggaaattgtattttttattcaacatctgttttatcacttttctcccttttattatccctttttcaacattgcagaccattgaatcatatcccaagcatgggaaaacaattgctggtgatcaatgatttgtatcctttctgtcttgataaacagaaggaaattaataaaatagttcatggaggccataggacattattccaactagttactgggtgctcgtagggcacagatgcatcactgtgcagcccaaagtgagcttctgatattttgaaaccttttaaagtgtatatagggcaaatctttccatagatttgctgaaagagtttcagtcttatcctttggaacaaagggtgtaaattggtacagaataatggtcatattggtgatagcaactattggttttctayatactgactaccagatactctgctgaaatgctttccttctattacttttaattctttgtggagaatattttgttactcccaatttgcccatgagaaaactgagacttaaaagcactaggtgacttgcccaaagt

SEQ ID NO: 396177 - DNA, 427 bp, Homo sapiens
accacgctgtgtcctagagacagaatgactagtactgtctctgcccctgtggagtttaatattctggcaaagaagcattttttaaaycaattatttgtgagtgatagcaaggagaatgagttgcccaacagtagtttttataagctgggcggggggggggggggcggggctccctctctcaaaatgtctttcctcatacctgaaaagtttccttttgagagtcaatccttggaagtttgaattattgaatgggagataaaacaccttaagctattcttggctaatggtttagagtgattggttaacagtgaggtaagagctggaagggaatagggatagcaggatagaggcctagagcaagggcaggggtaggaaggcatcagagagaagatgagtgccccacgcagaagactgagcatctgtggcg

SEQ ID NO: 396178 - DNA, 594 bp, Homo sapiens
ctcataggaattagtagatgtgaggaaaaggaatcactagtcctatctgctatgatccatgaatagggacagttttacatgtgtgtctaaggaaggcagtttagaagaaaggaagataaggccaatcacatgagcatttcagctcatattcttgagaaccagagacatcaatagaattagaactctaggcctgggagtcaggaagcaattacttgaataacagtctttcttttggctaccacatcagcaacagtctctcttgtgactttttaacttaagaacagattctggttgaatgagtcatcttctttttaggccaagaaatagaattgctgaaatcyttagggtaacactttggagaagtggtccaaaactaaaaacttgtaattctagccaatcacattctctgcaaagctcactgagacaaagtttcccagttgacaaatatggtgagggcttaaaatagacagtgctctggaggtaatgaaatctctcactttcgtatttagcatttctagttgattccaaggatggcaaagccataaaacaaagaagcctgtttcaaggatgggtagatttggggagaagcgtgtc

SEQ ID NO: 396179 - DNA, 551 bp, Homo sapiens
ttgttattatccaccttctgaagcctactgctgtcaatttgtcaaactcattttctgtcctgttttgttcccttgctggcgaggagttgtgatcctttgaaggagaagaggcattctggtttttggaattttcagcctttttgcacktttttttcctcatcttcgtggatttatttacctttggtctttgctgctggtgaccttcagatggagtttttgcattgttgtcctttttgttaatgttgatgctattgctttctgtttgttagttttccttctaatagtcagacccctcttctgcaggtctgctggagtttgctgggcatccactccagactctgtttgccaagttatcaccagtggaggctgcggaacagcaaagattgctgcctgcttcttcctctggaagcttcgtcccagaggggcacccgccagatgccagccagagctctcctgtatgaggtgtctctcgacccttgctgggaggtgtttccccatcaggaggcacgggggtcagggactcacttgaggaggcagtctgtcccttagca

SEQ ID NO: 396180 - DNA, 491 bp, Homo sapiens
aagtagctgcagaagagtccatctggcaagaagaagggtatcagctctgccgttttcttgtgagttgctttgttctgcattgttaatactatcttcaaaccaaacccattacaggaatcctacctatctgttgatttcatgagggtttttcaaagctattatttaaaacaagataacattcataaatacatttgacacctaaaaagcagtacatctagagaccaatgtgggtcccggaaccattctccatcctcccctcaacatggcactgccctcttcccgtccatctctggagttccrtgagggcaacgctgccaatccgtatcttagaagttggtgaagtttcatttcattctgacttttaaaataaacatcccagcacctcaactggctcacctcctgcagtgttgggccctactttggattccactgctctagcaaagagggttagaagtcagcataaatgcataaacactgccttcaatacaagg

SEQ ID NO: 396181 - DNA, 567 bp, Homo sapiens
attactttaaaaatatatttcaatgcaaataaaaatcatgtgaggagaattataaaattaacccgaaattccatcagatgtgacatagaaaatttaaaatttatcttttaactgagcaagaaaatgattgcttcactgaggcaacagcctaattgctccaccataaaactgagccataagctgagcatggtggtgtgtaactgtagtcccagctactcgggagtctaaggcaggaggatcacttgaggccaggggttccatttcagcctggacaacataatgagaccccatcgctacaaaaaaaaaaaaaaaaaaaaaaaaaagccatagactccaacccttgatattgtcacttttacccagatggatatttttctacacagcctgttaacagacaatgttgacatgatgataaacctgagaatctaggcacatatatcaatacattccatgaccagaggataaaaaactgaaaaaaaaawcacaaattctaagtagacttactgctacgataatctctacagtaaatgcaacacttcaaggtatttctaaacagtaaccatttgc

SEQ ID NO: 396182 - DNA, 591 bp, Homo sapiens
accagaattataaataacaaaaacgagaatctgaccctctttctggagttaagcaaagctataggaattatttgtcctgtattttacttctgtcacagtttgctataactgagattgggactaacttcaagccccaaagttaatttcaagctgtcttggattcatcagtctcttagacacacaaaaattttatgaagcacaaaagcaaagttgctcagttcataccaggcatattgagttcttatgctggtttcccatagtgtgctatggtatgttcctctagctaaaatttgccaagtttcagtaagtatcacatgtttcaaaatattaatgcattcttaattacatttggaataggaaataacccatgcccattaccacactctgggcatttagcctaaattttccattcaacatcataagtagatcttattttcagagggcacatatgctaagaatatgccaggaaattaggaggtttaacatgtttctgtggccctgagatgttaacttgcccataaaatttgtgcaggctcaaagacawctctaaaatttttctccccgcctgtgatgctttgattacttctaaaa

SEQ ID NO: 396183 - DNA, 578 bp, Homo sapiens
gctactctctagcttaaaactcatcactgactagaaaaaggacaaacattttattatagcttacaaggtcctctatgatcttgctcttgccttgtcaccagctttatctccaaccaaattttcctccaaacaaccccargccttgacaaagattggtcacatctaccaaactctagacggcctcttctgaatcctcttcccaaccaggccctgacttttgggctctgtgtttttctctgccttgtccaattatagcaagaaccctgctaagtcagtaagcagaggcccccatcctcaatagctgatcaccccatcccccaggtgatgtctgattaccatggccatcttcagcaagaatcttgttaggttgatttagccagaatccttcttacccctgatgtttcttgttagtcattttccatccactgatctctctcccctgctcctttgctataaattcccactcttccttgttgtattcagagttgagcccaatatctctcccctgctgccatatcacactacagtggtccctacacctatcacaactgtcctaaataaaatctgccttaccatct

SEQ ID NO: 396184 - DNA, 516 bp, Homo sapiens
tatcccttcttccaagttttcagacctacctgttaacatccctccttcacacctgataaatgaaccagcaattcattctcatggaaatacagctgtaaaggttcataaataacaaattaaagcttgcagttgccatctaggttaaagtaatccttagactgactattggcagagcactcagtcatagcttaaaatggaacgcagtcccaccacattcagttytaatttttgcctaaggagtattttccaggtaaacatggatagcacaatgccaaaaatgtctgaatgtgatacagacctattagctaactatagtttggggagatcatccatgaaccctggtttttctggttttcctcaaaaaaaaaaaaaaaaaggttaaaacatgaaaaaaacctctgtttctcttcttctctatctcttctttattttcccaccaaactttgggagcaagtgctctctccatctccatcggattactgccattcctttctccagctactacccttgcctctc

SEQ ID NO: 396185 - DNA, 516 bp, Homo sapiens
tatcccttcttccaagttttcagacctacctgttaacatccctccttcacacctgataaatgaaccagcaattcattctcatggaaatacagctgtaaaggttcataaataacaaattaaagcttgcagttgccatctaggttaaagtaatccttagactgactattggcagagcactcagtcatagcttaaaatggaacgcagtcccaccacattcagttctaatttttgcctaaggagtattttccaggtaaacrtggatagcacaatgccaaaaatgtctgaatgtgatacagacctattagctaactatagtttggggagatcatccatgaaccctggtttttctggttttcctcaaaaaaaaaaaaaaaaaggttaaaacatgaaaaaaacctctgtttctcttcttctctatctcttctttattttcccaccaaactttgggagcaagtgctctctccatctccatcggattactgccattcctttctccagctactacccttgcctctc

SEQ ID NO: 396186 - DNA, 390 bp, Homo sapiens
actggccctagtgcagtccttcccaaatgttctccctctatgtgcccacactttgcatttatgaggactcagcttaagtctgacaccgcccaaaatctttcctagttcccctcttgcccaaagtaaaacagaaccctcttcattccactgactttccatgcatatttctaacctaatatctggtaaaatataatgtrctcatttgctttacatgtcttttccttcttgtgtggaattctttgcggattggggttgtattttatttatcattctatcctctacacctggcatatttcatggcatacagtaaaggtttaatcaacaaatgttttacaaattcaagggaacctaggatatatgtttattcatgacttcaaggacccctcatgc

SEQ ID NO: 396187 - DNA, 390 bp, Homo sapiens
actggccctagtgcagtccttcccaaatgttctccctctatgtgcccacactttgcatttatgaggactcagcttaagtctgacaccgcccaaaatctttcctagttcccctcttgcccaaagtaaaacagaaccctcttcattccactgactttccatgcatatttctaacctaatatctggtaaaatataatgtgctcatttgctttacatgtcttttccttcttgtgtggaattctttgcggattggggttgtrttttatttatcattctatcctctacacctggcatatttcatggcatacagtaaaggtttaatcaacaaatgttttacaaattcaagggaacctaggatatatgtttattcatgacttcaaggacccctcatgc

SEQ ID NO: 396188 - DNA, 502 bp, Homo sapiens
agtctcagcatatatacctctgtgtgtgtgtgtgtgtgtgtgtgtgtgtgtgtgtgtgtgtgatttaraattgtactgagccctatctcagagctcttatcatttcacggaatttggaatccatcacaggcattaggatattcagacacctgcactgtcagttccaggaatgggtgtagggacagaatttttaaaatgtgctaataaatgtattttataaaatccctccaaataagctaattatcaaagaaaaaaatctgaagtataaatgaaataaaagtctttattttgagttacatgctacaactctatattgacaagatactcccgattagaagactagtatattttcttgccagcaagaatttattttttaaaaaaatctcttccagtttcagagattggaatattgaatatattactttcacaaatacaaaaatgtacctatatcatgacactttttccaaaattctcatatcttatttagttgttatttttttaa

SEQ ID NO: 396189 - DNA, 535 bp, Homo sapiens
cctacctttgctcttcctggctgcccctccaaattttggtctcatttttcttggctctacttcttttgcctctgggatccttctgttttccttttggattatgattcgctttttaccctgccctgtttctttgtttgcatctccccagggtctgattactcgtcccttcattttctatgtagccatctccaaacggatgatgcccagtgttgtccatttctgttgcatgtttgggtaggatttaaggtgcaaagggatagatacagcagggctgcagaaggacaagtaactaattgtgcactcacttttgtgtttaattcatgtttcctgaacaaactcactygccaataaaactgtttggggaggtaatcaggccacaggtttctggtgccagatttctctggtttgtgttctaaccctgcctcttattatctctgtaaccttggatgatctatttaatctacctggcctcagtgtcctcatttgtaaagcgaaaataataatagtgcctactcatagcattgatatgcagatt

SEQ ID NO: 396190 - DNA, 496 bp, Homo sapiens
gtggaaagaagacatgtctgctttgggcaacactggtcatgatgaagaaaggtgtgagatgtggtcagagggctggtgaaggagagccttgagggcatagaaggtatttggattttatccctaataggtaatgggagctgctgaaggcctttaagcatgaagtgatataatgtgctttgtgttttcaaaagatcacttcattgaatgacaactatacctatgcattgtcaatatttgtggaatgaataatttagttatakttatatgttgcatataatgcatagataatctccaagtaacagagggccaaataacatgacttaaataagatagttcacttctaaactatcttattcaaagtagtgtaggtgggcaatccaggactgatacagaggttcagctagatgaagaactcagggtacaggaattctttcagctccttggtccactatccctaggtgtagctctcatccttatggtccaaaacagtagcaag

SEQ ID NO: 396191 - DNA, 480 bp, Homo sapiens
agtaccctttggtgttaaacaccagtagtctgtacctttttaaaagttttattttatctttgattgacaaatagtttatrtatttatggggtaaaacgtagtatttccatacatgcatatatcatgtaatgatcaaatcagggtaactagcacacccaccaccttaactatttatcatttctttgtgttgagaacttaaaatcctctcttccagctatttgaaatatgcagtctgttattgttaactatagtcaccctggtgcaatagaacaccagaacttattcttcctaactaatgataacattgagactgtacattttggcctaagactggttgctcttagatcaagatgagatcatcataaccttgcgaaatgtacttagatcgacgaacttctaataaattatgtgcattacctcttctagctaactctctttgctgatctgtttgagacagttcttttgcaccagcccatagtc

SEQ ID NO: 396192 - DNA, 524 bp, Homo sapiens
atgacatcacttcattgagggaaccttccttggtgtctttatgctggactacatgcccctcttaaacattccaataacctcctatatatcctaactatggcaattagcatattcattataatcatatatttaattatctgtcttttttctcaaaactctgaaaaggtattgattctacactcttcttggttttagtttcaggtcctaccatattggctagcatgttattaggattaaatacattatgaaaagaaaataattactgtgtttaggtcattattctaagccttttacatttgttaaattctcaaatcaaccctatgacctaagtactattgttatccaattttataggtaaagaaactgaagcacaaacaagttgggtaagctgcrcaagtttacaaagatagtaagtagctctggtgactatgcataaaatcatgctaaaccaaataaatagaataattagagctgaaaaataccccacacaccaatttctgggtgacttaaaattctaagacatg

SEQ ID NO: 396193 - DNA, 533 bp, Homo sapiens
acaaacagagaagtttgtctctctgattgtgtatgacagcaaaagtaatttttgatcaaattttagtaaagtttaactrtcaaaattatgtagaattaaaaatgaatttttttctttcttttcttctttttttttcttcatggaattacctccaacagattccatttaagctgaagctctgcatacaaagcaaaatggagaattggagcagaagagagtactttaaactaagttttcttcaaaatagtctcaaaattgtggtcaaaatgtttttttttaattattgtacttcaagttctgggatacctatgcagaacgtgcaggtttgttacataggtatacatgtgccatggtggtttgctgcacccatcaacctatcaatccatcatctacattaggtatttctcctaatgctatccatccccttgtcttccaccctgcaacacgccctggtgcatgatgttcccctccctatgtccctgtgttctcatgtcaactctcacttatgagtgataacatggtgtttgtttttc

SEQ ID NO: 396194 - DNA, 533 bp, Homo sapiens
acaaacagagaagtttgtctctctgattgtgtatgacagcaaaagtaatttttgatcaaattttagtaaagtttaactatcaaaattatgtagaattaaaaatgaatttttttctttcttttcttctttttttttcttcatggaattacctccaacagattccatttaagctgaagctctgcatacaaagcaaaatggagaattggagcagaagagagtactttaaactaagttttcttcaaaatagtctcaaaattgtggtcaaaatgtttttttttaattattgtacttcaagttctgggatacctatgcagaacgtgcaggtttgttacataggtatacatgtgccatggtggtttgctgcacccatcaaccyatcaatccatcatctacattaggtatttctcctaatgctatccatccccttgtcttccaccctgcaacacgccctggtgcatgatgttcccctccctatgtccctgtgttctcatgtcaactctcacttatgagtgataacatggtgtttgtttttc

SEQ ID NO: 396195 - DNA, 533 bp, Homo sapiens
acaaacagagaagtttgtctctctgattgtgtatgacagcaaaagtaatttttgatcaaattttagtaaagtttaactatcaaaattatgtagaattaaaaatgaatttttttctttcttttcttctttttttttcttcatggaattacctccaacagattccatttaagctgaagctctgcatacaaagcaaaatggagaattggagcagaagagagtactttaaactaagttttcttcaaaatagtctcaaaattgtggtcaaaatgtttttttttaattattgtacttcaagttctgggatacctatgcagaacgtgcaggtttgttacataggtatacatgtgccatggtggtttgctgcacccatcaacctatcaatycatcatctacattaggtatttctcctaatgctatccatccccttgtcttccaccctgcaacacgccctggtgcatgatgttcccctccctatgtccctgtgttctcatgtcaactctcacttatgagtgataacatggtgtttgtttttc

SEQ ID NO: 396196 - DNA, 479 bp, Homo sapiens
gggtgacagagtgagactgtccctaaataaataaataaacaaacacctattgtgtatatcaactaactctatgttgatgctgggagaagagcctactgtgtaattctctcaggggttatctgttttctgtaataggaactatctctgaagtaactggacagaagagactcttctttttttttgaaagctttgtgctgtttatttggctatggtagatttaagtaaagaactttgctagccgtcatcagccttaggtgatcttggcacagctgtcattctttttttttttatttattttttattatactttacgttctagggtacatgtgcacaacctgcaggtttgttacatatgcatacatgtgccccaacagaagagactcttctraaagactcttcaaagctttgtaaaatcagagaaaaatggatagactgcttgaaaaattcctaaatcttttaaacgtttagaatttaccaag

SEQ ID NO: 396197 - DNA, 611 bp, Homo sapiens
tctaaactcttggccccttaaattggatttctgctatcattctccttatgtaaatatttttaggtcttccacaagtcttttggacttgccaaaacattttatgtctcttgtttctctagaagtatcaatctccccctggaggtccctctactgcaatgctttctgtggcagcacagaaactctgttcattcttgctagcaacaatttttaagtatggcatgaaatcttttggaatattctatactggttttaccagtatagaagttgcagtcataattttctattcctgagctagttcagcataggtttcaacccagtatagacytcaggccagaaacttaggtttgcaagaaatattgcattctttcattttttttatgactacacatgactttgattctaagcccttatcctgtaggctggtaagatattcaaactttgttatgctttgggcttccctccatccccagagctgacagggttttatttagtgccactgattcttaatggggaaggagtaggtatcctctggtaatggtcacagggatgaacgccaatacatcccttttgctcatctccatagctcacttagagccagctcctcttaggac

SEQ ID NO: 396198 - DNA, 531 bp, Homo sapiens
ccggctactgggagtacaaatagttctcagctgtctaatatttctaggaatttgtcttagattgtaatcacccraaagtttcttctttccctctgcacagacaaaaacaatccactgagaccacagcattgcagtagagaaagagtttaattaatgtgaggtcagtccacatgggagaagacttcctcaagacaaatcagttttcccaaaggctcagaggctaggttttatatggacaatttggtgggcagggggctaggaaatgggtgctgctgatttggttgaggatgaaatcataggggtgtagaaaactgtcctcttgcactgagttcacctatgtgtggggccacaggatgagttgagtcatgagtcacgagtctagctggggtcagtctgaaaaatctcttaaaaaaaaccaatctcaggttctacaatagtgatgttatctataggagcaattgaggtcacaaatcttgtaacctctggccacatgactcctgagcagtaaggcattatagaacccgcacctac

SEQ ID NO: 396199 - DNA, 623 bp, Homo sapiens
  misc_feature (1)...(623): n = A,T,C or G
ggctaggttttatatggacaatttggtgggcagggggctaggaaatgggtgctgctgatttggttgaggatgaaatcataggggtgtagaaaactgtcctcttgcactgagttcacctatgtgtggggccacaggatgagttgagtcatgagtcacgagtctagctggggtcagtctgaaaaatctcttaaaaaaaaccaatctcaggttctacaatagtgatgttatctataggagcrattgaggtcacaaatcttgtaacctctggccacatgactcctgagcagtaaggcattatagaacccgcacctacattttagcagagttcaggcccctgtcatagttctattcttgtggcttttcattaatctancaaagacagttttcagtccctgagcgaggagggagatcagttttagggagaaactactatcatctctgctttcaagttaaactataaactaaattccttccagagttagcttgacctatgcccaggaatgaccatggacagcttgaaggtcagatgcaagatggagtcaactgtgccagatttatcttatggtcataatgttgcaaaagtggtttcaagctgaataggcccaccttgctggaggtcatac

SEQ ID NO: 396200 - DNA, 465 bp, Homo sapiens
gtgtattagttcattcttaaactgctataaagaaatacctgaaacagtaatttataaagaaaagaggtttaattggctcatggttatgcaggctgtacaggaagaatggctggggaggtctcaggaaacttacaatcatggcgaaaggcaaagcaggcacatcttacataagtagagcaggagaaagagatagaagtgggaggtgctacacgcttttaagcaacaagatctcatgagaactcrctcatcactatcatgagattagcaagggggaaatccgcccccatgatataatcacctcccaccaggtccctcctccaacattggggattacaatttgacttaagaggtcagggacacaaatccaaaccatatcacgtggtttgagaggtgtctatcaatttgacctgggaattaggacataaacaattttcaggaggaagattatagatcacactcacataa

SEQ ID NO: 396201 - DNA, 462 bp, Homo sapiens
aaatcagaacctgtcatcaggcatacagaaattagactattgccattaatatttctctctcagtttgacatgttcaccttaatgaaaatacccaaacaggaagcagttctcttcttagctcctggaaaaatagaatgcaagttaaaagctcctaatgcttttaacatgatttgtccactttggacagtctaaggtgtaatgggagaagaaataaggaaaaacgagagagatgaaaaaattgagagaaaaaggaagagcaggaggcaaagaaatgacataatgattttttaaaatcatttttgctggtagtagccaaaaatggaaatgtaaaaagaaaaaaagcaagatacctaagaaataagccatactacatgtctgcatatctcttttacatatgaaacctctgtgtgtttgtgcrtatgtgtgtgtgtgtgtgtgtgcatgtgtgtgttttgctggcaa

SEQ ID NO: 396202 - DNA, 446 bp, Homo sapiens
gaagaaattaaaagtatgattagtttagaaatctctcggacagcagcagccctatctccatacaggccagcaattgcaagagcccaaatggaatttcttactgatatttcaagagcatgtcagcatctctatggtattttgraaaaataaaacgaagaaagttcagggaacaaaggctgaataactctttccttgggagatgaaataaagaaaagtagaatggagtaaaggaggcaaggagaatgaggaaagttctttacaagaatatatttctacaataatcaaaagagtctcttctttgattttttggacaaagaatctatttatggacagaagatatatttgtatccaattcagtaaatgatacaccaaagagaaaagagtagtcaatactgtttattggagttttggtgatttttattttcttattttgcctttgatacatt

SEQ ID NO: 396203 - DNA, 558 bp, Homo sapiens
gctgagaaaaaacttgaactaggacacccattttcaatgttagaaggtaatgaaccctaaagattcatccttccgctttccaaaatggccattttacctctttccatattgggtccatgacataatatttttaaaaaattaaaaaatgaaaacaaaatagccatttttgcaacacctatttcttgtcttctattaaaatgtctaacacttcttcagacatcacttaaaacataaagtcagatgacagccatctcttattcccaccaccaaacagcactgttcatttacatatatttctgtcttacctcrtgttacaatgaatgaaatttctatacgttttatctcatgccaaaccctccatttacactctgttgagcactttatacatgactaatccaaattgatattgctgtaagcataaaatttatgccaaatttcaaagacttaatatacaaacagtaaaaaaactcaataattttataataatacatgttgaaatgagaatattttggatatctaaggttaaatttaaaattttaaaattaattttacctgttt

SEQ ID NO: 396204 - DNA, 445 bp, Homo sapiens
tacttttctttattgtacctttaaaataagaactttcttggatttttctctgcatttctcttcaactcttcagtaaaaaaaattcttcaaaatatttatttgtctgtaattactacctatatttctctcctaaagatccctcaagttgggcttcaatttctttattcaggtcactatggcatcgatattgtctagttacatcatcagttttatcttctcttcttactcagcctcttggcaatacttgacaagattgaccactcactccttgaaataaattttttcctggtcttctctgactgtacagtgtctttttstgacttctccctttgttcctgactataaacacttcagttactgaaagcacaatcctagacaccctcatttattttcactcacttaaatgttttcatccagttcttcctttggcttttaatattatcta

SEQ ID NO: 396205 - DNA, 560 bp, Homo sapiens
tcctctgtttacaatttgcaatcacaactgacataaaatccaaatgccttaatatggtttataaggctatatatgatctgaattttgtaatgtccctgagctcattattcacaatgctcatcatcttttgctggactctagctttctggatttttttcctgccccttgaacacaccaaacatttcctgtctcagggtcttcacatttgctgtttcttctccttttcccaaatttgtgcacagttggtcctttcttattatatgggcctcagctcagttatcccattacaagggagagcctccttgaccattatagataactcgtactatccttccaccttcacaatcacttctttctattactttatttccttcaaagaatatatgtttctgaaatattctgttagaataaaatctctgtgaagagaaacttrttttgttcactattatatcctctatgcccaaaagaatgctaagaatccattaaattctcaaaagaagacagatcaatgaagatattaattaataaatgaatgaatgatacaatgaacagaggccaaa

SEQ ID NO: 396206 - DNA, 542 bp, Homo sapiens
actatataagtttcctgtttcctgctttttatcatctggtaattgaagtcctaacaaaaactcaatcaattrtaagttcaaatttaaaagtcctggtaagagaagtgtattgtcttagcttggctcatgagaatacctgtggtccaatggttacattttggggtcacctgatccactgactatatagctgttgctctgagtataggctttctgagaagagggcaaatgtaggttttttaagaaggtagcgtggaggcagggagacggtgaagagtaaaattctttgcacgtctggtacaataccaaaaatggaagaaaacctagcttccattgactgctcattgcttccctagaacactttgataatcagggactatgtattatttatacttgcccattgaatccccagcactaaatactgtgcattacatacaggaacctacataaatgtaggtttaataaataaatggtgaaaagcaattttcacacaagaaataatatagaaataattttcaaatagaaaaatcataatccagaagaga

SEQ ID NO: 396207 - DNA, 561 bp, Homo sapiens
gataaatgtctgtcaagttaccatttgatagtaaggcacacaaactcatttaacttaaacaaactgtaaaatgcatcagaagaataccagagacatagccaaacctctcaaagagtagaatcagttgagaaccaaattcgtttcttcacctctctatttctctctgtaaatctagttatccttctctctctttcaatagtggctatttctctgattcttcattaacacagcagagactgactatataagtttcctgtttcctgctttttatcatctggtaattgaagtcctaacaaaaactcaatcaattataagttcaaatttaaaagtcctggtaagrgaagtgtattgtcttagcttggctcatgagaatacctgtggtccaatggttacattttggggtcacctgatccactgactatatagctgttgctctgagtataggctttctgagaagagggcaaatgtaggttttttaagaaggtagcgtggaggcagggagacggtgaagagtaaaattctttgcacgtctggtacaataccaaaaatggaagaaaacct

SEQ ID NO: 396208 - DNA, 561 bp, Homo sapiens
gataaatgtctgtcaagttaccatttgatagtaaggcacacaaactcatttaacttaaacaaactgtaaaatgcatcagaagaataccagagacatagccaaacctctcaaagagtagaatcagttgagaaccaaattcgtttcttcacctctctatttctctctgtaaatctagttatccttctctctctttcaatagtggctatttctctgattcttcattaacacagcagagactgactatataagtttcctgtttcctgctttttatcatctggtaattgaagtcctaacaaaaactcaatcaattataagttcaaatttaaaagtcctggtaagagaagtgtattgtcttagcttggctcatgagaatacctgtggtccaatggttacattttggggtcacctgatccactgactatatagctgttgctctgagtataggctttctgagaagaggrcaaatgtaggttttttaagaaggtagcgtggaggcagggagacggtgaagagtaaaattctttgcacgtctggtacaataccaaaaatggaagaaaacct

SEQ ID NO: 396209 - DNA, 558 bp, Homo sapiens
tagcgagataaaactaccttgtgatgyatccattaatatgccaatgcatatttgtgttatttgaaacttagaattcagtgactcctcaagttgagtccttttctctgaggtctttactgcccttcttagtggttgcattaatgatgactcatcccctttaagtgattatgagaatggcagagaaagctaagaggcaaaatgtaaagctctcttgatttcaacagtatgcaaataatttcatatataatggactccctatgtattgtcctttgttccctgtactccatgatttgctgccccatttattttttttaaagtaaaataaagtgaatagtgaaaactaaatgcaagtaggtccttacaaaattaagttgcacaacgaagagaataaaaataaaaaaattccaggcttatgtttacgtatttggtgaaataatgtaactagagcagggaattcctgcccaatcaagaagatttacgattgtttcatgaaacagctttatagatggttagcatagttcagactaaagcattcacctttatcttgcatggacaata

SEQ ID NO: 396210 - DNA, 592 bp, Homo sapiens
ctggcagttcagtgggcctgggaacaccttctatagcttctccttctctagaagttgtaataataacagttgttattataggaactcacctagatactcatggtaactatatgtaattcctgatattaagatcaagcaaaataagcaaacaagaaagtgtgctaacagcatgtacctcctctgaaatcagtgtcaggatgggcataggttttaatttccttaatcgtatgatgaatatactatctgctgatactcatgcacatccctgccakgaggaaggcccaaacaaaagatggtttgtcaccgttatcctcagcaatatttacacaggattaatcacatttgaatgggaatcttattatttgatttctaatttacatggactttataattctgaaggactagaggaatattcatagtaaatgaggcattaaaatacctacaaagaggcaggaaatacacagaccaaggtggattgctagtgtagtctctgagaaactttaatggatgtaactttcttttcattcctagaaaaggggcagtctaagtaatttatgaagcaatagccagaaattacctatgcaaaagcttc

SEQ ID NO: 396211 - DNA, 548 bp, Homo sapiens
ccaggtggaggtaattcaatcatgggggcagttcccccatgctgttctcatgatgtgagtgagttctcacaagatctgataagggcctctttccccttggctgggcacttctccctattgccttgggaagaagatgccttgcttcccctttgctttctgccatgattgttagtttcgtgaggcctccccagccatgctgaaccgtgagtcaattaaacctctttactttataaattacccagtatcaggcagtactttagagcagtgtgaaaatggactaatacaattcaaatgctttttccggatcttttgaaattatcatatgatatatcctcattctgtaagtatgacaaattatattaattaatttttaagatgtaaaaacgaaytttgcattctttgtcatggtgtattatcctttatatttatattgctgaaattgattttctactacttttgagaatttttgtgtcttcgttatgacacaaaagttttcttttcttataatatctcttaaagttttggcataaaggtaatgctgacttcat

SEQ ID NO: 396212 - DNA, 576 bp, Homo sapiens
tgtattatactctggggatgaatcgatgccatgtgtttttttttttttttttacaacttctcaaggtgattttgatgcaaacaatgaaaatcattgtttattctacagaaagatacctttgttctagagaaattcagcaacttagccaagttcacagagatgattcggacaaatgagaactaaaatagagaacttcagactctcatatcaatgagctttctttctgaaacatcaakaaagataagttaaaatacaatttttcttcattgtgaatgtactaaatgccattgaatttaatactttaaagtggtgagtttacattaggcaaattttacccaattaaaaactaatttaaaaacatataaaaacaccacttttattttactattatgtaggcaagttaattttctaaataacacgtagaatggcaaccacatgttatatctggctagtgcaacagccaacagagaaatcattgatatagatcattcaagctactaaatcagctctctggtctgtaaaattagggaatgagaataataatgctttgttgttgaataaatgtgaatctatgaa

SEQ ID NO: 396213 - DNA, 408 bp, Homo sapiens
tagacctaacctgcttttccaggtgagatgttgaaaatagaaggkcagagttgtaaaatattttcttggcttccaacgccagaaatatgcaggtttatgaatgtctactatgtctatcaaacaggtaacattttgaggactacttcaggcttttcaaatgttttttcatccttcatgtaagtcacaggacactgctgtgaactgtgtcgatgatatagttgggtgggtcatttaggggccacagtgttgatggctgtggacaagaaactgttataaacttgccatacctttgatagagtaataatttggataaatagcactgtccttttaaagatgtttaaatccagctagaggcacctgtttttctaaatgaatgaaattggtcagcagctaaagttgaatctcaac

SEQ ID NO: 396214 - DNA, 540 bp, Homo sapiens
ctgctacaggtggtttgttttttttttccatgtcttgaacacaaaccattctcttcttctctttctctctccctctctcaacccacagtcattcatttccttctttgaactggawatgtgcttacctcctttccaatttctattattttgagacacattttatgttagcaggcatacacaattttaaaatcagacacacactgatttctcatatctggcaagtcaggtaaaaatttggaaaccaaatgtttataaattgcaaagttacttttaagactctaattattatcaatcaccatattgccataactattttgtatgttcccccaaatagcattgcttttgatgaatgcagtgtgattcagagtactcccaatacacagtcatttgaccgttttttttaacactggcaagcatgtagcagattttaagatatattaaaagatgtttgtcatatctagtatctaatagatgtaatcaaacaaaggcttttttttaagcccattcagaagattcattttataggcacaagattatggt

SEQ ID NO: 396215 - DNA, 313 bp, Homo sapiens
gcttcattctcatgacatcatatgaggcttactttgcatcagaccgggaagagatttgtattaagtgctatttctgtgattgactcttctcctttaatttaaaggtgcattaaacacgatttacaaggatattcaaatcacgtaggttttcctttaaagttttccacttgatagaacagaggatatcatagctacattgctgtttctactgaatccactatttcagacagatattgcctgaaaacctgctgctagctataaaatgaataaratatcaatgctgagctacaacctgcacaccagatgtaaccat

SEQ ID NO: 396216 - DNA, 313 bp, Homo sapiens
gcttcattctcatgacatcatatgaggcttactttgcatcagaccgggaagagatttgtattaagtgctatttctgtgattgactcttctcctttaatttaaaggtgcattaaacacgatttacaaggatattcaaatcacgtaggttttcctttaaagttttccacttgatagaacagaggatatcatagctacattgctgtttctactgaatccactatttcagacagatattgcctgaaaacctgctgctagctataaaatgaataaaatatcaatgctragctacaacctgcacaccagatgtaaccat

SEQ ID NO: 396217 - DNA, 519 bp, Homo sapiens
gatcctgtgagtgatcgttgctatgggaccattttatgcaaattaatctgtaaacatttagcagttagacaactgatgggagggggaagagtgaagaaaattagtcaggtggatagcaagaaaattactccatctgattagaaaaggataataatggtgttttcacgcagaccagcagcatcgtggtgtttcttcatttcatttatctttcatttctgcttgctttgaggtgagggtggggagtctgaggactgtgggatggctacatagtgtggtaaagstgatcagaaagagtaaggcaatggaatacatttcagattaagacatggctattcaggtctctcattaaagagatgatcaaaagctggaaatataattgtatgacttttcgcccaaagcccactggagttttcatagccaccaacaaatcatggttgagttataaagagatattccaccaacacctgagagaaaccaagagctacttcctgacatatttaagaaatttttctttcaaat

SEQ ID NO: 396218 - DNA, 575 bp, Homo sapiens
tttaaaaaccacaaactagaatttatttacttatatttcttttactatgtcaaatgactgttgattatgtggaatgttaaatattgggacaactaagcacctttaattcttaattcttaaagatccttacaaaatatgaatctatcatttttgaacatgcattcaactattttgaatggctccagtttagtgctgtgccaggtgacaaagatataatagtaaacataaaaatcggaattgaccttaatggagtcttctatccakctgagaactttttgaaacaataatgctataataaaatttattgctaactagtagtgacagatctggtgctaattactctatatgtatgttttccactaatgctcactataaactttcaagaaaaccctgggaggcaggtgtatttgataaaggaagatttcatatgtgatagaattagttagaacttggaagaacccaagattataatagataccattgataaattataaagaggaaaattaatttaaacttaaagcaaaaaaaaattatttgaactgtaaaagagaagcattgcataggctcaatattct

SEQ ID NO: 396219 - DNA, 539 bp, Homo sapiens
aaattagaaatgtgataataggtaggggcaggcgcagtggctcccgtctgtaatcctagcactttgggaggccgaggcaggcagatcacctgaggtcaggagtttgagaccagcctggccaacatgagaaaccctgtgtctactaaaaacacaaaaattagctgggcatggtggcacgtgtctttaatcccagctaccagggaggctgaggcaggagaattgctggaaattgggaggcagaggctgcagtgagccgagatggcaccactgcgttccagcctgggcaataggcgagactccatctcaaaaaaaaaaaaaaaagaaatgtaataacaaatatcagctcatttgcttgcccttccactccagaggaagtcaggtataactaccctgggatctcataattgaatcatcataagagtatataagatcwtttttctcaaacctcttattttgcatttgaagattaaggctaagtaaatggtccaagatctcacagctaattagtgcttaggtgctgcaccacattataagggaca

SEQ ID NO: 396220 - DNA, 570 bp, Homo sapiens
gctaagtaaatggtccaagatctcacagctaattagtgcttaggtgctgcaccacattataagggacaagtttaatggtcttggaaaacatttccccaccactagattctatgttttgtctaggacactgtgagcagcatttctgtgtgcatctaggggaatmctaccactttcaagtgattacttcattacttaaaaccctcaatcaacagatcaaagaaagattacagaagtcattcaatttcctgacaaatggctgagatagctattttcctttgggtttgaatgctcagattcatttattcctccatgctgtttttgtgatactaaaggaactttaaattatgcccttttatatttttttcagaggattttgtatcagtgttaaacacagcaccagcatcaataccactcataattattcttttttttcttctgtcagtatacttcaaacaccatatgtgaggctttgcaaagacacgggcagggccttcgtccaggaatcagcagcactgactgaagatgtcacatcttctgattgcccattattacagaaattgtaattcatgt

SEQ ID NO: 396221 - DNA, 596 bp, Homo sapiens
cctacaagtttcattttttgagaagattttcaatgttactagctaagttggaaggtttttgtactgttactatctttttgattacatttataagactgtgacataattgttcttgcctttttctgtcagtgtctttagaataaagaatgtcattttaatttctgcatccctgctgcctgattttactgtctgtacatagtaggtaatcaatatttgttcaacaattcaatggatgataaaaactaaatgcatcaataaaaagtataaatgactttgtgatgtggtttggatttgtgtccwcacccaaatctcatgttgaattgtaatccccaatgtggaggaggggcctggtaggaggttatttgatcatgggggtagatttcccctttgctgttcttgtgatagtgagttctcacaacatctggttgtttgaatgtgtgtagtacctcccccttttccttcttcctcctgctttagccatgaaagacatgcctgcatccccttcacctttcaccatgattgtgtgagggcttcccaggcatgcctgctgtatagccagtagaatcatgagccaattaaacctcttttctttatat

SEQ ID NO: 396222 - DNA, 544 bp, Homo sapiens
tccaggcagaagtctgttgcaagggcagaaaccttatgaaaaacctctactagggcaatgtgagaagaaatgtgggattagatctcccacaaagagtccccactggggcactgccaagtggatctgtgagaagaggccactgtcctccagatcccagaatagtagatccactgacagcttgcatcatgcacctggaaaagcttcaggcactgaatgccagccagtgaaagcagctgaggggattktacccggcagagtcacaggggcagagctgcccaaggccttaggagcccaccccttgcatcagtgtggcctggacatgagtcatggagtcaaaggagattattttaagctttaagacgtaatgactgccttgaagggtttcagacttgcatagggcctatactcccttttttggctgatttctaccttttaaaatgagtttatttacccactgcctgtacccccagtgtatcttggaagtaactaacttgtttttgattttacagacttatagacagaagggaattgccttgttttatac

SEQ ID NO: 396223 - DNA, 612 bp, Homo sapiens
cagggtaaggggtaaaaggatagtaagcatagaaaccactagaaagtgggcttaatggagttcttgtggcctcagctcaatgcagttagctgaagaattgaaaagtttttgtttggagacgtttataaacagaaatggaaagcagagttttcattaaatccttttaccttttttttttcttggtaatcccctaaaataacagtatgtgggatattgaatgttaaagggattttttttctattatttttataattgtacaaaattaagcaaatgttaaaagttttatatgctttattaatgttttcaaaaggtattatacatgtgatacattttttaagcttcagttgcttgtcttctggtactttctgttatgggcttttggggagccagaagccaatctacaatctctttttgtttgccaggacatgcaataaaatttaaaaaataaataaaaactaattaagaaattgtgtgtgtgtctatctgtgtctgtttgcctatttgtccattcttccatcctttggccttgttgatattatcgaggaagaagagataccgagcaaaacactggagagkttcagatgttgacgtttctcatctgagaacaaataa

SEQ ID NO: 396224 - DNA, 620 bp, Homo sapiens
aacagctgtaggtattttccatgacaatcttccttcatagcatgactttcagctgggacaccctcttctaatctctcaggaaacagaagagatgacgtcaacgtaggggaaaagaagtggcaattttctagtttatatatttaaaaaaatacaatcaagtaaaacatagctaaagagtatctgtcaataggtctgatgatctagatggattgtataaataaatataaaatctttatattcttaatatatactgattcactgtttcctaaaacatttcatataaattatcttgtttatttcctcaacactgtggaatagacagagcaaacattgtcagtacaaagggcggaggaagctgagcctctgagaagttacaggcatgtctaagttcacaaagctattatagtcagtggtagaatcagcaagtctttctattctagtttggctctttttttccgtggtactgttgtctccaatcagaaaataagttctcagygggtcactctcttaggctgcacacacacgcctcaaagaaaagaattctgtggactttccctggttggagacagagtatgcgttccaaaatctgtcagccctagattgcatccaactaacctagg

SEQ ID NO: 396225 - DNA, 540 bp, Homo sapiens
aggccacgcggagattaagtagaagcagcaggattgaaatgcttttttttttttttttacttcaaagttttgctctcccctttgcatcgtgctgtaccttctaaaatgattgactaaaacatatgccaatactactgagcttggaagtccataatttttagtggtaccagtctccatgaattattctttggagcaagacagatgtaagacttatagcccttgcccttcctgtgarcatggtttagagtttgggagaaggtaaggattcataaacaaacatgtataaagtgtttccaagtgagactgcagtatgaactactcgggagaatcccagcggaagaaaagatgtttttgatcagagaaatctggagaaatatcagaggagaagaagcatttggactatcttgtagaatgaatatcacgggcaaagccataacgacatggcaatgtgacggttaagtcaacagacctcttcgctaagctaggaacatgaatggggactcacagctttacatatgaccaaaagtcaggaaagacagg

SEQ ID NO: 396226 - DNA, 539 bp, Homo sapiens
atgcagcaatgatagccttgactttgatgtcttttaggcagcactataaagaaagccaagcaaggcagaagcctgaattacagtcagccctccctatctgcctgttccatatctgcagattcaaccaatcacagatcaaaaatagttggaaaaaaacaataaaaaaatacaccaatcaaaataatacaaatataacaacaatatagtataacaactaattgcatggcatttacattatattagatattataagtaatctagaggtaattttaaactatacagaggatatgcataggttacgtgcaaatactacaccattttatataagggacttgagcaacctaggattttagtatccatgggggccagatgggggtgggtagtcctggaatcaatgctctgctgatatcaaaagacaactrtgtatgtaaatggccagaagtcttagcccaattattatgtaagaacctcattaattcctacaagggacattacttctcttgcaatcactaatgagatcactttattagattatggtt

SEQ ID NO: 396227 - DNA, 425 bp, Homo sapiens
gagtaaaaaactcggcctataaatgcatatatcaaacccaagaaagcaattttttgcataattaagaaattatttacaccacgaggatgccagaaataaacccttttattttgctgaaagttgggcaatctcatgaactgtttggaaattgtttcccagattggcttcttgaatcacatttggctatgcctttcaaaggaacaaagtcatttttatttgcttaatgctaggattcagtaaaccatgtcaccggcaagaattgatatcatcttaacagaatatgcccgaataaaaatggatggggaagcaatgtacagctaactaaagacctctaagacctaggactgagcctgattctgcaaygaggtgagagaagttacaaaagtaatttaatctatctgagtttaattaatcattgagttttt

SEQ ID NO: 396228 - DNA, 541 bp, Homo sapiens
tgtgtctggaacataaatacaaatttactgcagaaaaattgtttatcttggttgaaaaaaattaaggttayattggtctggtaatgaaataattaaaagggctaatatttgaaaaaaaactgtcagcagtatagaaatctttgaaactgaatttgttagttggtgaaaaagtaatggcaaaacctgcaattatttttgcaccaaccaaatagttagaagtgaagtaaatttttatttttctttaagagctccaaactttccagaatctttttctcttctaagtcctcgccagactctaggcttttagtaccctgctcctccaaatctagtctctgcccattccttagttccaaagctgtttccacattttcagtgaaataaactttcatagaagccattccaaatacttccagttataactctaaaataacacgtgctgttctccagctcttccacttcctcccctaagatctgagacaaataatccagtagacatatagggaaagtagattttctaagaattgatagttggatgctaact

SEQ ID NO: 396229 - DNA, 541 bp, Homo sapiens
tgtgtctggaacataaatacaaatttactgcagaaaaattgtttatcttggttgaaaaaaattaaggttatattggtctggtaatgaaataattaaaagggctaatatttgaaaaaaaactgtcagcagtatagaartctttgaaactgaatttgttagttggtgaaaaagtaatggcaaaacctgcaattatttttgcaccaaccaaatagttagaagtgaagtaaatttttatttttctttaagagctccaaactttccagaatctttttctcttctaagtcctcgccagactctaggcttttagtaccctgctcctccaaatctagtctctgcccattccttagttccaaagctgtttccacattttcagtgaaataaactttcatagaagccattccaaatacttccagttataactctaaaataacacgtgctgttctccagctcttccacttcctcccctaagatctgagacaaataatccagtagacatatagggaaagtagattttctaagaattgatagttggatgctaact

SEQ ID NO: 396230 - DNA, 634 bp, Homo sapiens
atctcccaactcacagcccttccatgttttcttaacacttgcaggactagagccaaactccttagggtggtattcacagcccatctcaatctggctctgtggacttctctctagcctcatttcctgctactcctgttcctgcaaactttctatggtccaggtataccaaactgcttcccactcctagacttacataacacattcatgtctccatgcctttacttaccctggtccctctacctggaatatctattcttatttttcccaagactttgcttatccttgaaggcccaactttaaatgcaaagttttctgtgaaactagcaaaatcagttttctgtactacattccactttgtttaggtaataggtattacctgaaaaatatttgttaagacccattatatgtgccagcactaagacccagagatgaaaggtcaaagctactgcctctgaactcctgagtacgtgtctgtaagggggagctggtggggggtgggtatcacaaggcaagtgttcatctacaattaatgcttccaatgagttttaaagaataagtaggagtctgcmtggcagacagaggtggtggtggctaggggaacattccagacagattatagcacctgtcacactaa

SEQ ID NO: 396231 - DNA, 594 bp, Homo sapiens
acattttaaaacttatcaaagctaggaacaaaattcaaactgactctctgtgtttattatgagttaattttatttattaaatagtcgtcttagaaataggaccagaagtcttttctctggtcactgctctaaatgcaaatagtaatcctgaagctgaatataagacatttattcagaatgagaatcccagctgggaaataaataacagagcagagggaaataygaatatcccatttaaaagccaaccccaccaaataaaaaatttaagatattatctttgccataaaatttttaaatttgactttgggacaaggatacatgtgtaagatgtaatatgtaaagataaatattgggagaagacatgtcttttcccacatcaatatcctccctttccacagcctccttcatcacttccatctcacccaagaagaccacgtgggcaattgaagagataataacagggcaggggagggtaggccatggtgggaggaaggagtgaaccagtgacttgatttaaagccaaagggagtggataagagaactgggcttcaagataaataaggagacatctaagctagtactcatttctttctc

SEQ ID NO: 396232 - DNA, 594 bp, Homo sapiens
acattttaaaacttatcaaagctaggaacaaaattcaaactgactctctgtgtttattatgagttaattttatttattaaatagtcgtcttagaaataggaccagaagtcttttctctggtcactgctctaaatgcaaatagtaatcctgaagctgaatataagacatttattcagaatgagaatcccagctgggaaataaataacagagcagagggaaatatgaatatcccatttaaaagccaaccccaccaaataaaaaatttaagatattatctttgccataaaatttttaaatttgactttgggrcaaggatacatgtgtaagatgtaatatgtaaagataaatattgggagaagacatgtcttttcccacatcaatatcctccctttccacagcctccttcatcacttccatctcacccaagaagaccacgtgggcaattgaagagataataacagggcaggggagggtaggccatggtgggaggaaggagtgaaccagtgacttgatttaaagccaaagggagtggataagagaactgggcttcaagataaataaggagacatctaagctagtactcatttctttctc

SEQ ID NO: 396233 - DNA, 498 bp, Homo sapiens
tctactcttcctcttgcggtctgcaccggaatactatgcattttgttttgatttttaaggagctcaatttgagtactctagtccacttttccaagcrctcacctgcaagcatttttatctgaaacaccgaactctctctctccacaacactccccaccacaacccaatctgattagtgtcaacacagctgccccattctgaggaatgtaaactaatattgttgttagacctccctcaaccttaggaaacttcctcaaagccttacagtctcttcaggatttttttttttatccctttgcacaggtttaaatacctaagacaaacttgctgagaagagatcagaaatgcaaataatcagtttcttaaataaaatcctgtatgctataatacacatttacatgtatgcatgtataaatatttaacaatgcatccctccaaaataactttatttgtcatcacacgtgaaagtacaagtcaccctccagacgacagaaacgt

SEQ ID NO: 396234 - DNA, 498 bp, Homo sapiens
tctactcttcctcttgcggtctgcaccggaatactatgcattttgttttgatttttaaggagctcaatttgagtactctagtccacttttccaagcactcacctgcaagcatttttatctgaaacaccgaactctctctctccacaacactccccaccacaacccaatctgattagtgtcaacacagctgccccattctgaggaatgtaaactaatattgttgttagacctccctcaaccttaggaaacttcctcaaagccttacagtctcttcaggatttttttttttatccctttgcacaggtttaaatacctragacaaacttgctgagaagagatcagaaatgcaaataatcagtttcttaaataaaatcctgtatgctataatacacatttacatgtatgcatgtataaatatttaacaatgcatccctccaaaataactttatttgtcatcacacgtgaaagtacaagtcaccctccagacgacagaaacgt

SEQ ID NO: 396235 - DNA, 498 bp, Homo sapiens
tctactcttcctcttgcggtctgcaccggaatactatgcattttgttttgatttttaaggagctcaatttgagtactctagtccacttttccaagcactcacctgcaagcatttttatctgaaacaccgaactctctctctccacaacactccccaccacaacccaatctgattagtgtcaacacagctgccccattctgaggaatgtaaactaatattgttgttagacctccctcaaccttaggaaacttcctcaaagccttacagtctcttcaggatttttttttttatccctttgcacaggtttaaatacctaagacaaacttgctgagaagagatcagaaatgcaaataatcagttycttaaataaaatcctgtatgctataatacacatttacatgtatgcatgtataaatatttaacaatgcatccctccaaaataactttatttgtcatcacacgtgaaagtacaagtcaccctccagacgacagaaacgt

SEQ ID NO: 396236 - DNA, 437 bp, Homo sapiens
gtatatattaagtattcactttttatataattttagaaaacaaaatgagtgacatattttatacctaataaaatctggttttgagaaaaatgtgatgctacataaattcttcggttggaaagatggtgttttaacttgacgtttgaataccaatatattttcttaacctggagtagaacactgtaagtcaattgtgtttaattctagcataaaagaaaccatcattctctgaggtggggcaggtggcagaagacgaaaaaatgacaagtatgtctcccttaggcagtgcttgttgaaaagtcactatcctgctgatatttggggatggaaatgtagtactctctgctaaagyataattgaatgaatgcttttaaagccagggtcatcaagtaaagctgttttctttacccatgagggactgtagaatgttcataaaa

SEQ ID NO: 396237 - DNA, 581 bp, Homo sapiens
aagtccctctctctctttctctctctgtacataatttaaggtttcctaatatatacccaactataggcatgaggaggcgggactcttctctttacctgtccaatccatcaacttccacctggactcctccactccaatggagtgaggcctctcccayctcattaagtagttagaattccttatcaccaatctttaaaagaaaaagaaagaaagaaaaaaaaaacaaacccaggagacagacaggtaaaactttccctgtctctttcataagaaagtgcactgtcttttaaaaacaaaacaaatctccccaaacaaaccgcaccaccaccacgatttacagaaggcatttcagaaagttattttactctttgtaactgaaaagtaaacttcaggaaaacttttagaaggcttcttttttaaaatctagatttggggtttcaagaatgattacacaaagttagaaattaggagagagtacgcaaatccactgttacatttaaccaatataaaaaattaaaacccactgcctgatagctaaagagtttttaacttattttccccagagaaatgccagtggtttc

SEQ ID NO: 396238 - DNA, 607 bp, Homo sapiens
atatgttcattagccctctgcctttctcctttaaatgatctattaatatattttgccttactcccaatccctgctctgttgagggagtagtgtcttcattaataaaggtttaaacctttaacatattcatcaagtatttccaaattgctttcctttttagtattatatacattaaaataaaaactctaattattttattatayaaaactcacttctttaggatttttaaaaatacatgtatttgtttagattacaaatatgttgttgaaaatatagaaaatacacaatgtatggaataaattgcagtcatttatcctagaaactacacgtagacaccattagcattttggtttattctcttccagagatacatattacacacaagtatgtgttttaccaggtgtacacatactaaataccaaagatatattttgttaagtatgtacatatgtatctgtgtatacagatgcatatacctactttttgaaattaatctgctaaaatgagtacgttctcagttcattgaatgcattatgttaaattttaaaattaaagaaattaaactgctacatagttattgaattaatttagctatttccaattagtt

SEQ ID NO: 396239 - DNA, 607 bp, Homo sapiens
atatgttcattagccctctgcctttctcctttaaatgatctattaatatattttgccttactcccaatccctgctctgttgagggagtagtgtcttcattaataaaggtttaaacctttaacatattcatcaagtatttccaaattgctttcctttttagtattatatacattaaaataaaaactctaattattttattatacaaaactcacttctttaggatttttaaaaatacatgtatttgtttagattacaaatatgttgttgaaaatatagaaaatacacaatgtatggaataaattgcagtcatttatcctagaaactacacgtagacaccattagcattttggtttattctcttccagagatacatattacacacaagtatgtgttttaccaggtgtacacatactaaataccaaagatatattttgttaagtatgtacatatgtatctgtgtatacagatgcatatacctactttttgaaattaatctgctaaaatgagtacgttctcagttcattgaatgcattatgttaaattttaaaattaaaraaattaaactgctacatagttattgaattaatttagctatttccaattagtt

SEQ ID NO: 396240 - DNA, 612 bp, Homo sapiens
gttactgccaacattttctaccagtgctttactcatactctgagtatccatttcattgcttactatggggttcaataagtgttagtggtgaaggggagtgatcagggaagaaagaattaaattgattaaagaagtcaagaaaaaataaaaatgccatatccaccagcctcacaaactttatttataacccctttgtttgcataatagatatatttccaactataatttgtgctatttgaataccttgaatatctactgaaaatttgccttgcagtatagagaattagctttcaaacggaggatcttgttgtttggccaatttttacattgactgtggttccaactttagagtagatctcataattataacaattctaatttaaccatgtctcaagtagtgtctggtgatatccataaagacagagtttagtttgattcacccgtgtgttgccattaattagcccagtttcatacayagagtgggatctaaatatgcacttacttatcacatggttactttttcagttgatcagttgagtgaatgaacatttatttaatgttttcctatatgccacacagcttgcaacattctgggataatacaaattaaata

SEQ ID NO: 396241 - DNA, 641 bp, Homo sapiens
aaactcatgtccacacaaaaacctgcccatgaatgttgatagcagctttattcataactgccaaacttggaagcaaccaagatgcctttcaataggtgagtggataaataaactgtgctacttctataaaatgaaatattattcagcattaaaaacaaaggatccatcaagacacggaaatgccttaaatgcattttgccaagtgaaagaagccagtctgaaaggctacaacctgtatgattatagctttacaactttctggaaaaggtaaaactatggagacagtaaatagatcastggttgtcagggaaatatgtctgagaaatatcatgaaagaaacattgtcggtatttggcagtcactcgattaaagatgcatttatagcctgaaaagttgtaggagtagtaacaagaacgcgaggtgaaaaaggtaggagaggttttgggtttaggcaccatatgggttattttataatgttatttattattattatcagtgctgatggaaattctagcagaagtctggcagggagttgaaattgtgggactagaaatgaagagaactttaaacactaaaattataaattcagaagtcacctgcataaagcacaagagctggctgatattacactcttaataaat

SEQ ID NO: 396242 - DNA, 569 bp, Homo sapiens
aaagaaacattgtcggtatttggcagtcactcgattaaagatgcatttatagcctgaaaagttgtagragtagtaacaagaacgcgaggtgaaaaaggtaggagaggttttgggtttaggcaccatatgggttattttataatgttatttattattattatcagtgctgatggaaattctagcagaagtctggcagggagttgaaattgtgggactagaaatgaagagaactttaaacactaaaattataaattcagaagtcacctgcataaagcacaagagctggctgatattacactcttaataaatgcatgttagtcaaaactataaaactgtatgagcttctttaatattgtgaaaggagaagtaaagggggtcaaagacaaaaagtttgtgctaaaaattatcttagggagcaaaaagatttatcatcagagaagacaagattaacaaggaagatggatgatgaggagtgggttttggaaatgggaggaacgagaaacccagactcttgattcagtaaaagatgcgtgtatatgcatgaatctatgtaaaggtgggcttggaat

SEQ ID NO: 396243 - DNA, 641 bp, Homo sapiens
aaactcatgtccacacaaaaacctgcccatgaatgttgatagcagctttattcataactgccaaacttggaagcaaccaagatgcctttcaataggtgagtggataaataaactgtgctacttctataaaatgaaatattattcagcattaaaaacaaaggatccatcaagacacggaaatgccttaaatgcattttgccaagtgaaagaagccagtctgaaaggctacaacctgtatgattatagctttacaactttctggaaaaggtaaaactatggagacagtaaatagatcagtggttgtcagggaaatatgtctgagaaatatcatgaaagaaacattgtcggtatttggcagtcactcgattaaagatgcatttatagcctgaaaagttgtaggagtagtaacaagaacgcgaggtgaaaaaggtaggagaggttttgggtttaggcaccataygggttattttataatgttatttattattattatcagtgctgatggaaattctagcagaagtctggcagggagttgaaattgtgggactagaaatgaagagaactttaaacactaaaattataaattcagaagtcacctgcataaagcacaagagctggctgatattacactcttaataaat

SEQ ID NO: 396244 - DNA, 594 bp, Homo sapiens
acatcatctatgagtctacttccattacgtgttctattttccatttatatcagcttgtctccttgtgggcttggttgttttttattgatttacttacactgtattttaaaaactaggcaaagtgaataataggtgttgcttgactacartccctgatacagagggattatatgagatgagacctatgattgttccatttttccaccgagggtaactttctacaatatggaagaggaagatgaagcccaaacacagcagagtggttctggtgagctgaagagacagagatcagagcttggaggtgctgaagaggctggagtttgtgggtcagcatgtcagagagacaggagggagctacgcagctaaagagctccagagatatgcatacagtccacttaaatctttgaacaaatactaatctgtgcatgcaaagaatgagacccctactgagcacggcagagaagctgtgaactgaatggagattctgcaggccacacaatgctggggacataggagttccaaccagccagggaaatcttggggaaccaccagtttactcagttgacatccccaaagccctttttgaattgaagt

SEQ ID NO: 396245 - DNA, 594 bp, Homo sapiens
acatcatctatgagtctacttccattacgtgttctattttccatttatatcagcttgtctccttgtgggcttggttgttttttattgatttacttacactgtattttaaaaactaggcaaagtgaataataggtgttgcttgactacagtccctgatacagagggattatatgagatgagacctatgattgttccatttttccaccgagggtaactttctacaatatggaagaggaagatgaagcccaaacacagcagagtggttctggtgagctgaagagamagagatcagagcttggaggtgctgaagaggctggagtttgtgggtcagcatgtcagagagacaggagggagctacgcagctaaagagctccagagatatgcatacagtccacttaaatctttgaacaaatactaatctgtgcatgcaaagaatgagacccctactgagcacggcagagaagctgtgaactgaatggagattctgcaggccacacaatgctggggacataggagttccaaccagccagggaaatcttggggaaccaccagtttactcagttgacatccccaaagccctttttgaattgaagt

SEQ ID NO: 396246 - DNA, 594 bp, Homo sapiens
acatcatctatgagtctacttccattacgtgttctattttccatttatatcagcttgtctccttgtgggcttggttgttttttattgatttacttacactgtattttaaaaactaggcaaagtgaataataggtgttgcttgactacagtccctgatacagagggattatatgagatgagacctatgattgttccatttttccaccgagggtaactttctacaatatggaagaggaagatgaagcccaaacacagcagagtggttctggtgagctgaagagacagagatcagagcttggagrtgctgaagaggctggagtttgtgggtcagcatgtcagagagacaggagggagctacgcagctaaagagctccagagatatgcatacagtccacttaaatctttgaacaaatactaatctgtgcatgcaaagaatgagacccctactgagcacggcagagaagctgtgaactgaatggagattctgcaggccacacaatgctggggacataggagttccaaccagccagggaaatcttggggaaccaccagtttactcagttgacatccccaaagccctttttgaattgaagt

SEQ ID NO: 396247 - DNA, 440 bp, Homo sapiens
cttcgttttttaagcccctagtgtggaacacccggagagcggcaacacacacacacacacacacacacacacacacacacacacacacccagggaaacgcgtgctgaggacgggctggtctccccttcagcgggaaagcatccatgggtyttaaagccccagagacttctcagctccagccccgaccccaagtccccaagcgcgccgccgccgagggcgccccgagcggccgggtactcacaccaacgcgtggtaaagcagcgcccagccccgcggtctctccagggcgtcgtagatcaaagtttggatgcgccggtacttggcgttgtttctcttgactgggcggctcagcggggtcttggccaggagcccgatgccctgcggggtcctccgctgcccctcgtcgcggccgccgccctccagcagcagggtcccgtctt

SEQ ID NO: 396248 - DNA, 584 bp, Homo sapiens
aaacgtcactcttaaaacagaagtagaaatgtcacactttcagtcataaccctagttttaaatataagaaagaaaaaaaagccaaagaagctccagccccccacaaaggcactctgcacctctgtgaatgtgtgagaccaaggcattgtctttggggcaggatgaggacacttgaagaaatgtctcacgatggggaagttaagtggaaaatacaggcttcaatggtttaacaacaatccccttttctggcatatggagctgggcactaaaaagcactmcatccctcttaagctagtggacagagagccacacttgtccccacttccaaccttcctctagcaccacgacgaactggatctctggtgactgtatgtgattgttttctctaggaggatgctacagaccaaataatcactttcatcactttgaagttatgcagcttctatgttctatggtcatttcccccaggatagaggagagtgttatatggggttattatgaaaaccctttatttgggtggtaggattgggatcctgttttcaagaagtgagctcctccaagaatgaggcaccaagctgtgcaga

SEQ ID NO: 396249 - DNA, 540 bp, Homo sapiens
ccttctccttctggcagtctctctgtttgtgccattagagccccgtattttcctcagggcctcaagcagctccaatcaattgggaagaggagagcaagacgttcaagccaaattcagctgcagagcaacgggggaactcgttacacagttggtgtaggtgggaatcacgcactccaggctgagaagaccctggggagcagagcccatagcgaggaatgcccttcttactggtactattggaaataataatttgttaataaaaatattaacaataattggttaataacaacaggcagtatttytcaaatgctaaataatgtgccaggctctgtgcaaagtgcttctcatgcctaacctggcttactacttaccagtacccagtgaagtcagtcatcatctccattttacagatcaggaaactgaggcatagaaagttacactgtccaagagcaagcaatttgcaaagcaggggccagaactcctaagtctaagcccttaaaccactactctagggttctgtgcactccccattttgcaaat

SEQ ID NO: 396250 - DNA, 552 bp, Homo sapiens
gttaggtcatcttccatttttcaaaactggagagaatagctgagatgcacatgtatgcacatatgcatatacacacctctacacacccacccatacacataaacacacaaactgtggaaagattcactgagttgctagctcgtttttactaatatatctgaagttttctctctctctgatattttgtggcttgctccgcctggttagggcacatattctaagcctttaaagaggtgctcttgggctttgacagttttctccaagtcactgatgtagaagcacttgcaaagtcatcaactccatgttttgacaagaactcctccagctattcttaytagttggctgggttgttagtttcctcttgctgctgtaacaaattactacacatttagttgcttaaaacaacacaaatttattatctcacagttctggaagtcagaagtccaaaactacagggctgcatttcttctggaggctgtaggggagtgcactaggctgagcagcattccccaacctgggaaaaaatgcatgtccatccagaaccaaaatata

SEQ ID NO: 396251 - DNA, 615 bp, Homo sapiens
ggcagtttctgttcaaaatttcatacaaagatccttgttgttcctctctctgaccttaactctgcctgactttaaaaaaatcattaattaatgattaaaaacaatggatttagcacctccattgtggsccctgtgttcagcagtcctggatattgccctgtggatattttcagaccggtactaagaggtagcactcctatctccattttacataggatagaacgaaggcacaggcgccttctaacctgctcaaagtcacagctagaaagtagtagagccttaaactttgtgctgggttgactctgaagcaggaattcttctgacactgctgaaagagatggaaggcaagctggcatttatagcactcccgctatgcgccaggtaccgtattggccactatacatttcctttgtcattttacggccacattataaagtacacatttttatccccatagtatatatcataaaactgaggtttggagatattcagcaatttgcccaaggttaaacagttactaattcgtgacgccaagaggcaagttcggtctgtgagactccacacactgttcttttccttaagcaagaacctgagcatgagctcgtgaaaggtttt

SEQ ID NO: 396252 - DNA, 552 bp, Homo sapiens
tcatttgtttccttactaaaaaaaaaaaaaaaaaaagtaagatagaaactgggagccactcctgagtgtgtgtgtgtgtgtgtgtgtgagatatctcatataaatggaatcatatgagcaagaacatgaataagaacatctggagcttgcacgaggaggttctcagcaatagatttcttttgagtatggtggtgttcaraccaatgttttcctacattgtgttattaatccaaggattttcttgtacctacctttagcctcctttttctactgggttaataaattcttcatcgtaatcatgtcatgtaaacctataattcctgggtctcagtcagctttgggatttccatgtctgtacagggtcaaaagcatgaacctgtgagttaggacattggagttctcagctcagcctttccatgacaagttctgggcttctggatgaactatctccttgctgggctccagcttcctcctttgtactgtactctagtgcctctttcagaaaaagtaaaaagaataaattctttggagtcagattctcatgggttcaaa

SEQ ID NO: 396253 - DNA, 563 bp, Homo sapiens
cacaacacacccagaaatcaggcaggggctcatagaagcaggacaggggatctcaggggatctgtgtggagcaccaaaaagtctgctgtagaaattttccagttttaaagataggagagaactaacattttttgagtacattctgtattcacaaccactctgcaagtggacatcattttcctcatattatttgaatgggacaaaaataatatcaccttaactagcttctccagaatttttcaaatggaagaaatattcctcagtaaggttatctaaagatttggatgtccaaagaacaaagagattaagtcattttgcatagaaaataagccaaatgcactyacttattcatgagaaggagaagagaaataagggaagaatggggagtgagtcaggcaagtggtgaaggatagggaacagcatagggtggcattgccagagtaatccccagtgatgggatgaccaaaaggactctagaaagtaaaatgtcacacacgctaatgaccaatgaggtgcctggcgacacagataaagccagggacaaagccagcagaaaactgtgt

SEQ ID NO: 396254 - DNA, 604 bp, Homo sapiens
gtcttactctttacctatcatggcccagactttaatataagagacctgtcaagattatatatagtttcctttgaaactatgtctttttaaacaatcagatcctgggctttgttttcagcaaagtctgccctgtgacagcaggagatgaaattatcctttaaaactgccagggagacttagtccatttatgttgctaaaaagaaatacttaaggctaggtcatttatacagaaaagaggcttatttggctcatggttctgcaggctgtacaagaggcatagtgtcagcatctgcatagcttctggtgaaggcttcatactgcttctactcatggtggaaggggaaggggagccaccatacagagatcacatgataacaaagaggaaagagagaggatgaggtgccagkcttcaccagttcgtgcaagaactaagagtcagtgagaacacactcactcctgggagaatggcaccaagtcattcatgagggatacatccccatgattcaaacacctcccaacaggccccacctccaacattgggtgccaaatttcaacatgagatttggagggtcaaatagccaaactatcagagaccaatctgact

SEQ ID NO: 396255 - DNA, 561 bp, Homo sapiens
ggatgggtctggttggcttgggccagggtggtggagcagctttagtttcctctaggataggcctggttaaaactaagttgatagaaggcagtgttatgacatgagactgtggccgcaggagatttgcaaccaaggatgccatgagcaaggagcctcctggagagacccagagggcctcaagtgttgcataaacagggccagtatacctgtgtgctagctgttctccatttgccccttccacatttatgcattttctttttttactctcgtctgtacctttagaggctggccctaaggactgctttaccctacstgcttttccctgtctcttctggttggattcagccaatgggagacactaggaagagatcagaaaatagagtaaagagtggtcaagaattgtttctcccactccctccctgactggtgctgtgattctagcagtggttgcatccttccgtgactaagtccctgttggaaatcacttcccccatgattccactaacactggttcctctccatgcccttacaggtgaagggttaccaccaggcttactgtca

SEQ ID NO: 396256 - DNA, 564 bp, Homo sapiens
tctttacggtaattcagctgtacattgtgttacgctttctgagttataatacaccataaaaaatgatattaaggcaacccaacaaaaacattaatgcctgggccccactccagaccagtgaaatcaggatctttgagagcagggtgtggtatgggtgttttgtaaacattcccaaggagattctcatgcacctccagggctgagaagccttggaacactgtataagagcaagctcaggttctccagtctccagcactctccagcacttctctctgggcctccatttcctcttcagttaaatgagtgcaataacagtactgacctgatgaggttctaagaattgcaagtgccaacaccatgaagggtttggagtatttaccggcacattttaagtacccratcagcattagactggtatctttataataataaagtagcaatacatttcgtttcttaaataagacaatggaaggggtcaacacaattccaaatatttagcaaacactttcaaaatgttattactattaaatatttggtttccacaatctcaggatgaactaggat

SEQ ID NO: 396257 - DNA, 618 bp, Homo sapiens
ctggtgaaactggcagggcctcagatggcctaactgaaagttcccctccctcctccgctcccatggataaggccctyaggcaaacaaccctacccatcatgacaccggccatggttcctgcttatccctaaatagcgtgtttcagttcctcctccaacagagttgttaaaataagccaatcagatcctcttgtgggaaccagggggcacccccgccagtaagcctgcctctcacagcctggtttgctctctgtgatcccacatgcaatcctcatggggaccagcatggcacgcagtgtcctccccctggggctgtgagtatatgtgaagaataaactatcgatctcccccgtccagtgtcaggtgtcataggtgcagccaatcccatatcccataactgtagggtgaaatccttccctcaccaatggaatgattaaagcaccagctggtgtgctgtatgaactttgccattctctgaccaatggttttatcaatttctccaaggaagaataaaaacttccttgccaagaaccaaaacacaaattcctatggtctcactacaggtactccctggtcccccaaaataaacattaaagcaaggagataaataacccttgag

SEQ ID NO: 396258 - DNA, 618 bp, Homo sapiens
ctggtgaaactggcagggcctcagatggcctaactgaaagttcccctccctcctccgctcccatggataaggccctcaggcaaacaaccctacccatcatgacaccggccatggttcctgcttatccctaaatagcgtgtttcagttcctcctccaacagagttgttaaaataagccaatcagatcctcttgtgggaaccagggggcacccccgccagtaagcctgcctctcacagcctggtttgctctctgtgatcccacatgcaatcctcatggggaccagcatggcacgcagtgtcctccccctggggctgtgagtatatgtgaagaataaactatcgatctcccccgtccagtgtcaggtgtcataggtgcagccaatcccatatcccataactgtarggtgaaatccttccctcaccaatggaatgattaaagcaccagctggtgtgctgtatgaactttgccattctctgaccaatggttttatcaatttctccaaggaagaataaaaacttccttgccaagaaccaaaacacaaattcctatggtctcactacaggtactccctggtcccccaaaataaacattaaagcaaggagataaataacccttgag

SEQ ID NO: 396259 - DNA, 548 bp, Homo sapiens
aagtgttttctcattctcagacacctactccctcccacaccctgggccaagaactgggcagagaggcctaggggttgccctttccctgagcagctgactgtcattccaaaaccatctcaaccagagaggcctcttggttctttcatgagctgtctcttcacagaaattatgtttagtgtgtgctttagatttagatttccacccagatcttcctgtataagcatcaggtgaagttagtttaacaaagactagcctygttcccatccaagaccaagtaaataataatctctaaggtgaagaaaagataaaaatggggcattagaaattttaaaagggcccaagcaattctcacaagcaggcccttcagaagtgaccaaaccaagcatttctgtcatgtctcaataatgtggtagagaaaggtcactgagtcaggagccaaaggtccctgtgccagccctgggtgtcccaccaacctgctacatgatgttgagcaggtcatttccttccactgggctccattttctcctgtgtgaaatcaagtgttgagc

SEQ ID NO: 396260 - DNA, 546 bp, Homo sapiens
attctcagacacctactccctcccacaccctgggccaagaactgggcagagaggcctaggggttgccctttccctgagcagctgactgtcattccaaaaccatctcaaccagagaggcctcttggttctttcatgagctgtctcttcacagaaattatgtttagtgtgtgctttagatttagatttccacccagatcttcctgtataagcatcaggtgaagttagtttaacaaagactagcctcgttcccatccaagaccaagtaaataataatctctaaggtgaagaaaagataaaaatggggcattagaaattttaaaagggcccaagcaattctcacaagcaggcccttcagaagtsaccaaaccaagcatttctgtcatgtctcaataatgtggtagagaaaggtcactgagtcaggagccaaaggtccctgtgccagccctgggtgtcccaccaacctgctacatgatgttgagcaggtcatttccttccactgggctccattttctcctgtgtgaaatcaagtgttgagctaatggatcc

SEQ ID NO: 396261 - DNA, 556 bp, Homo sapiens
catggtggccggcaagagagcatgtgcatggaacaataaaaccattagatttttgtgagacttattatctatcatgagaacatcacaggaaaaaccctcccccatgattccattacctctcaccaggtccctcccatgacacatggggattatgggagctacaattccagatgagatttgggtgaggacacagccaaaccatatcaccaggtgtatctggatgtctccagggaatggtagggcgattgaggaaagactcacagkggtgggagaacaaactgggatgaaggagcatttagagacccccaagaccatcaccgcgtttggtaatttgctcggaggactcacaggacatagcctatagtcatactcatggcaataatttattacaactaaagaatgtaaagcagaatcagcaaaaggagtgtgcatgggggaaagcccagaggaaaccagaggaaagctcccaagagtcttttccccatggggtcacatggcatatattcaattcttccagcaacaagtcatgccatgtgttaaatgctgtctaccagga

SEQ ID NO: 396262 - DNA, 556 bp, Homo sapiens
catggtggccggcaagagagcatgtgcatggaacaataaaaccattagatttttgtgagacttattatctatcatgagaacatcacaggaaaaaccctcccccatgattccattacctctcaccaggtccctcccatgacacatggggattatgggagctacaattccagatgagatttgggtgaggacacagccaaaccatatcaccaggtgtatctggatgtctccagggaatggtagggcgattgaggaaagactcacaggggtgggagaacaaactgggatgaaggagcatttagagacccccaagaccatcaccgcgtttggtaatttgctcggaggactcacaggacatagcctatagtcatactcatggcaataatttattacaactaaagaatgtaaagcaraatcagcaaaaggagtgtgcatgggggaaagcccagaggaaaccagaggaaagctcccaagagtcttttccccatggggtcacatggcatatattcaattcttccagcaacaagtcatgccatgtgttaaatgctgtctaccagga

SEQ ID NO: 396263 - DNA, 578 bp, Homo sapiens
gatatctgcactcccatgtttattgcagtgatattcaaaatatctatgacttggaagcaacctaagagttcaccaacagacaaatgataaagaaaatgtggtacatataccaaatgaattactcttcagccatgtaaaagaatgggatcctgtcatttgcaataacatggatgaaactagaggtcattatactaagtgaaataagttagcatagaaagacacacttgtcatgttcttgctcatttgtgggaactaaaaatcaaaacaattgaactgagggaggcagggcatagaattattgttactagaggctgagaaaggtagggttggtggggtgatggggatggttaatggacataaaaatatacttagatacaatgaataagatctagtatttgataggaaaatacgatgactacagtcagcagtaattttgtgtacattttggaataactgagggaatagaattggaatattcatacacaaatacttgatgaatgctagaagtgatmgatatccatttaccctgatttgattattacacgttgtatgcctttatcaaaatatctcatataccc

SEQ ID NO: 396264 - DNA, 528 bp, Homo sapiens
actcatttgataaacaaacaaacatgcaaaaagaaaactaataaaactttacacytgaattcttctccttgttttttaacattaggttgcttctcttcatgtcttattgtgctgtctatgtcttgaaaagttttgtggttattattttttattggctcatcattttgtctttctatttaaatcaagagaaatgtatacaccacagttacgatgttataatattctgtgactttctgtgtggttactattatcaatgagtttttttaccttcagattatttcttcttgctcattaacatccttttctttctgactggataactccttttaccaattcttgtaggacaggtctggtgttgatgaattcctcaggttttgtttgtctggcaatgtttatttctccttcattcttgaaagatacttttgttgtatatactattctagggtaagagttttcatctttcagcaacttaaatatgccatgccattctctcttggcctataaggattctactgaaaaatatgctgt

SEQ ID NO: 396265 - DNA, 528 bp, Homo sapiens
actcatttgataaacaaacaaacatgcaaaaagaaaactaataaaactttacacctgaattcttctccttgttttttaacattaggttgcttctcttcatgtcttattgtgctgtctatgtcttgaaaagttttgtggttattattttttattggctsatcattttgtctttctatttaaatcaagagaaatgtatacaccacagttacgatgttataatattctgtgactttctgtgtggttactattatcaatgagtttttttaccttcagattatttcttcttgctcattaacatccttttctttctgactggataactccttttaccaattcttgtaggacaggtctggtgttgatgaattcctcaggttttgtttgtctggcaatgtttatttctccttcattcttgaaagatacttttgttgtatatactattctagggtaagagttttcatctttcagcaacttaaatatgccatgccattctctcttggcctataaggattctactgaaaaatatgctgt

SEQ ID NO: 396266 - DNA, 528 bp, Homo sapiens
actcatttgataaacaaacaaacatgcaaaaagaaaactaataaaactttacacctgaattcttctccttgttttttaacattaggttgcttctcttcatgtcttattgtgctgtctatgtcttgaaaagttttgtggttattattttttattggctcatcattttrtctttctatttaaatcaagagaaatgtatacaccacagttacgatgttataatattctgtgactttctgtgtggttactattatcaatgagtttttttaccttcagattatttcttcttgctcattaacatccttttctttctgactggataactccttttaccaattcttgtaggacaggtctggtgttgatgaattcctcaggttttgtttgtctggcaatgtttatttctccttcattcttgaaagatacttttgttgtatatactattctagggtaagagttttcatctttcagcaacttaaatatgccatgccattctctcttggcctataaggattctactgaaaaatatgctgt

SEQ ID NO: 396267 - DNA, 528 bp, Homo sapiens
actcatttgataaacaaacaaacatgcaaaaagaaaactaataaaactttacacctgaattcttctccttgttttttaacattaggttgcttctcttcatgtcttattgtgctgtctatgtcttgaaaagttttgtggttattattttttattggctcatcattttgtctttctatttaaatcaagagaaatgtatacaccacagttacgatgttataatattctgtgactttctgtgtggttactattatcaatgagtttttttaccttcagattatttcttcttgctcattaacatccttttctttctgactgrataactccttttaccaattcttgtaggacaggtctggtgttgatgaattcctcaggttttgtttgtctggcaatgtttatttctccttcattcttgaaagatacttttgttgtatatactattctagggtaagagttttcatctttcagcaacttaaatatgccatgccattctctcttggcctataaggattctactgaaaaatatgctgt

SEQ ID NO: 396268 - DNA, 565 bp, Homo sapiens
atttcttcttgctcattaacatccttttctttctgactggataactccttttaccaattcttgtaggacaggtctggtgttgatgaattcctcaggttttgtttgtctggcaatgtttatttctccttcattcttgaaagatacttttgttgtatatactattctagggtaagagttttcatctttcagcaacttaaatatgccatgccattctctcttggcctataaggattctactgaaaaatatgctgtcaggtgcactggagctgcattgtatattatctgtttcctttctattgctacttttgggttattgtgtttattcttgacctttttggagtttcrttattaaacgcctagaagtagtcttctttgggttaaatctgcttggtgttctacaaccttcttgtacttgaatattgatatctttttctaggtttgggaagttctctgatattatccttttgaataaactttctaaccttacatatttctatatctcctcttaatggccaagaactcttagatttgccattttgaggcaattttctaaatcttgtaggta

SEQ ID NO: 396269 - DNA, 565 bp, Homo sapiens
atttcttcttgctcattaacatccttttctttctgactggataactccttttaccaattcttgtaggacaggtctggtgttgatgaattcctcaggttttgtttgtctggcaatgtttatttctccttcattcttgaaagatacttttgttgtatatactattctagggtaagagttttcatctttcagcaacttaaatatgccatgccattctctcttggcctataaggattctactgaaaaatatgctgtcaggtgcactggagctgcattgtatattatctgtttcctttctattgctacttttgggttattgtgtttattcttgacctttttggagtttcattattaaacgcctagaagtastcttctttgggttaaatctgcttggtgttctacaaccttcttgtacttgaatattgatatctttttctaggtttgggaagttctctgatattatccttttgaataaactttctaaccttacatatttctatatctcctcttaatggccaagaactcttagatttgccattttgaggcaattttctaaatcttgtaggta

SEQ ID NO: 396270 - DNA, 603 bp, Homo sapiens
gttgtagttatttttttagcttggctcattatttaatggtcttgttgcttaagagtagtttacactgcagtgttataatattctgtttttctgtgtgtttactattaccagtgagttttgttttttcaggtaatttcttcttgcttattaccatcctttctttcagactaaggaactcgtktttcatttcttgtgggacaggttggtgttgatgaaatttcttagctttcatttttctgtaagatctttatttctccattcttgaaggacatttttgctaaacatactattctagggtaaaagttgttatctttcagcaatttaaatatgtcatgccactctctcctgtactgtagggtttccactgtcttctgtcagacatattagagcttccttgtatgttatttgtttataatcacttgttgctttttggattcctttttaatgcttgacctttgggagtttcattattaaattccttgaggtagtattatttgggttaaatgtgcttggtgttctataacttttttctacttagatattgatatatttctctaggtgtgggaagtccaggattgttccccgatgccttatttagtacac

SEQ ID NO: 396271 - DNA, 516 bp, Homo sapiens
tttgcaattaactgtagccaagacatttacacaacaaagcccatgtctagtagttggaaccccaagcatcacaaccatgttgtcagatattttttgcttgtcttcacatgggtatatccaccagactcactagccatgattctgcctctgatttgagcctatgcatgcctccctggtcttaaactgacatgagctttctgactttaataattgccctcctcctctctccttgtaacctaagactgacccaacctccctatgcyccaccactaaaatgaagtatggaatgtggattgaagggcttattaaaaagagtcttttgctacaaataaattccatattttctatttttccttcatccatgttttacatttataccaccacaccaataatagaagccttatattttgtttttgagccatctgttttcttcataaatgaaaactagtcatattgctaaggttattcttatcagtaaagtgacccctcttacctgtccatcctaacccttgcaat

SEQ ID NO: 396272 - DNA, 516 bp, Homo sapiens
tttgcaattaactgtagccaagacatttacacaacaaagcccatgtctagtagttggaaccccaagcatcacaaccatgttgtcagatattttttgcttgtcttcacatgggtatatccaccagactcactagccatgattctgcctctgatttgagcctatgcatgcctccctggtcttaaactgacatgagctttctgactttaataattgccctcctcctctctccttgtaacctaagactgacccaacctccctatgctccaccactaaaatgaagtatggaatgtggattgaagggcttattaaaaagagtcttttgctacaaataaattccatattttctatttttccttcatccatgttttacatttataccaccacaccrataatagaagccttatattttgtttttgagccatctgttttcttcataaatgaaaactagtcatattgctaaggttattcttatcagtaaagtgacccctcttacctgtccatcctaacccttgcaat

SEQ ID NO: 396273 - DNA, 448 bp, Homo sapiens
ggcctatatacatgtatgtatagygtatacaagaagccatagggcatatatatttagagcagcatgacattgaatgtgctgaatatctcctttcttgctttggtcatgtctaacgtgagacatcacagtatttatgaaatttcagtcagctttatgagaagcactctccgttgtcacgtgtagaaagactgagatggtcctaaaagcaaattcactctgagtataaaaatctctcagtgccatcttgtttaacacatgtaatgactcctgctagagacctcaaaaaggaaggttcatagatcaatttaatttacctaattaatcaaaagtaaaacttctataatgtacccagagttccattactggactactattatttagattttttgcaagtttataattccatgtaaatattcacagttagttgtttttattctataccttaaaa

SEQ ID NO: 396274 - DNA, 585 bp, Homo sapiens
taaagaaaattgactacaaatttactgaaaattgtttatgtgaagaaattacaagtgctattaatacttacaggtagacaaatgattagagaaggtagtagtttgatgtgaagatataggacttcacagtaatgttcagttgtaccaaacacttcttaagaaaatgagaaatgtagtcccaaggtctcaggcaattttctttcctgtaaaaacaatgttctcttctattttttatccaaaaggagataattggttttggtatttgtttctctagaaaggttaagagagaaactctccagcagaataatcctttagtttcttgataaattctttctttttagtgctatttcactgttctctatacagagttgctaactgcygaaatggggttaagtccccactgaggacgagaagtctgatcatttcccagaaggtggttagggttgtggaagcatcttagcctcgcaaatcctgggctactgtaaaggccacatattttttgaaagtttctgtgaggtcacactgtagctgagactcttatgtataaacccagcgtccagtgtcctcttcacacttaaagacagg

SEQ ID NO: 396275 - DNA, 630 bp, Homo sapiens
taaccatgtctcatccagggtttctctgttgcatagggttatcttgaggcagacttgtaattatggcaactcaaatttgtgccctgttttttttttcattatcttattcttctcatcctcctctgactagtcatgattattaaataccttaaaggcytgtgctacaaatgctgcctgagggatgtgggggctagttcccagcttttggagctttctctgaatgtctggtgccacttgggtaatgaaatgtatggctagaagtgtatgaccctctgcatgctccgggtctatataactttactttctgaaagcctcagggagcctgttaaagtacacagctgaattgtcattcccttcctgagtaatttccttcactttgttataatttaccggctttgtctggtatttcctcattccctccagtattcaattaaggatatggttcatctttagctgatcccttctatccttatgaactcactgggggttttggtcagggactgccacaccagatgcctggtaaatgacatggccaggattagatctggctgtctcatctgcatattctctagcctttcccaagatctgagccttttcctcaggaatacaacagtgagttacactattgta

SEQ ID NO: 396276 - DNA, 630 bp, Homo sapiens
taaccatgtctcatccagggtttctctgttgcatagggttatcttgaggcagacttgtaattatggcaactcaaatttgtgccctgttttttttttcattatcttattcttctcatcctcctctgactagtcatgattattaaataccttaaaggcctgtgctacaaatgctgcctgagggatgtgggggctagttcccagcttttggagctttctctgaatgtctggtgccacttgggtaatgaaatgtatggctagaagtgtatgaccctctgcatgctccgggtctatataactttactttctgaaagcctcagggagcctgttaaagtacacagctgaattgtcattcccttcctgagtaatttccttcactttgttataatttaccrgctttgtctggtatttcctcattccctccagtattcaattaaggatatggttcatctttagctgatcccttctatccttatgaactcactgggggttttggtcagggactgccacaccagatgcctggtaaatgacatggccaggattagatctggctgtctcatctgcatattctctagcctttcccaagatctgagccttttcctcaggaatacaacagtgagttacactattgta

SEQ ID NO: 396277 - DNA, 462 bp, Homo sapiens
attaaaacattttgtatacattaaagcatattcacattttataatcaatgccaaatactaaaattatagcattcagggttttgggggattcttgagaaaagtttgtaagtagcttcataatttaatattcaggttcttattcagtaatattttatttgctgtcttctggataggcacactagkggagcaaaacaagtgacgtaagatccaaacaattgaaaagataagagattgaactttaagatttttgtatgtgtgatgcatctctgttcacagttatttgcaattgccctattccaattctgttgctaaatgtctaaaaataaattactaaatgactgatttcttttttcattaagttcacatcttttaatatgtgactagtaggaaaagaaaaatgtttaaatactacagacttcagatgttttcataaatctagaaattcagattctggtaatggaa

SEQ ID NO: 396278 - DNA, 560 bp, Homo sapiens
ttcatttcttctagattttgaaatgtattgggatatagttgctcatagtagccactaatgaccctttgaatttctgcagcatcagttgtaatgtcttcttttttatctctaattttattttggtcttctctcttttcttgtcagtctgtctaaatgtttgtcaattttgtttatatttccaaataaacaacttttgtttcattgatcaaataaacaagtttttgtttcattgttttattgtttttctcatttcaaatttatttatttatgctctgatctctattatttcttttattttactaaatttttatttggtttgctcttgcttttctacttcctgaagatgcatcattaggttattttttgacattttcctctttttyttttgatgtaggcacttagctataagtttccttcttattactgcttttactgtttcccatatgttttggtatgctttgtttctattatcatttgttttaagaaatttctcaatttccttcttaatttcttcattgactcactggtcattcaggagcaggatgtttaatttcaatgtg

SEQ ID NO: 396279 - DNA, 605 bp, Homo sapiens
tttttttcctcaactaactcgaagtcgttatttagaaatttgtttaaatgttagctgaatttatccttcttgctttttagcttactgcatctgccccaggyaagcaactgcttatgtcctgtctcttcttagataaccctgtatttctttgaattttggttagtttatttccctgtgatctcagttcactgataagtttaagaaatttttgttttgtacattgtccagctttttatgttactgttgtaaggatgagaaataatgctttttgtagcattatacatcctaattagaagcttgaaatcccattcctcttgtctggaaggctcccagttttgatgtggagatatgttttatccttatatgatgttgattattgtgcaactaagcttaaagtaaactgtaggagtcattctggacagacactgcctttagagactgagtttaagggaaagaaatatatgctggctatgtcagaaatcacccctaattctctctgccttcagactgagttggtaaaaagaatcttctttcctccttaagaaagcccttaagaaagcctccttaagaaaactaggccgggcgcagtggctcacgcctgtaat

SEQ ID NO: 396280 - DNA, 660 bp, Homo sapiens
ttggatgttggaacagaaaaaaaggcattaatcataaaaaaaagtgaaatctgaaaatattctgtagtttagttactagtactacacaaacttaatatcctagttttatcctgtgctatgattatgccaaaatgtgtacagtaggagaaaataggtgaatagtatctgggaactatttgtatcatttttgtaaccatattgaaatgctaaaatgatttcaagttaataagttaaaaaagcatggttcagaagagtgtgctagtatgctagtattttttttaagtattgggcatctaattttattaacattttatttacttttttaagagatgaggtctttgttgccaaggctggactcaaactcctgggcttaagcaatcttcctkcctcagcattccgagtcctgaggagggactgcagaagtcatcttttaagtagctaatattaacagatacaactaagaatgttattgacagactgtaaaaaaatgtactatcaaaaagttgctggagtccaaagagacatagatcataattagctgagatagtgattaattgcataatggaaaaaataggcatttatttaaaaatgaatacaattctgaaatgtgaaaacttttggattaggtcaagtaaaagggagcattagggggaagagtag

SEQ ID NO: 396281 - DNA, 660 bp, Homo sapiens
ttggatgttggaacagaaaaaaaggcattaatcataaaaaaaagtgaaatctgaaaatattctgtagtttagttactagtactacacaaacttaatatcctagttttatcctgtgctatgattatgccaaaatgtgtacagtaggagaaaataggtgaatagtatctgggaactatttgtatcatttttgtaaccatattgaaatgctaaaatgatttcaagttaataagttaaaaaagcatggttcagaagagtgtgctagtatgctagtattttttttaagtattgggcatctaattttattaacattttatttacttttttaagagatgaggtctttgttgccaaggctggactcaaactcctgggcttaagcaatcttcctgcctcagcattccgagtcctgaggagggactgcagaagtcatcttttaagtagctaatattaacagatacaactaagaatgttattgacagactrtaaaaaaatgtactatcaaaaagttgctggagtccaaagagacatagatcataattagctgagatagtgattaattgcataatggaaaaaataggcatttatttaaaaatgaatacaattctgaaatgtgaaaacttttggattaggtcaagtaaaagggagcattagggggaagagtag

SEQ ID NO: 396282 - DNA, 637 bp, Homo sapiens
gaatgctactaatttgcaggcaaagagcatatgaaaaaatactcaacatcactaatcattagatgaacataaatcaaaaccaagatgagatacaatctcacaccagtcagtatgactattactgaaaagtaaaaaataacagatgctagcaaggttgtgaagaaaagagaacacttacacactggcggtatgaatgtaaattaattcagccattgtggaaagcagtttggtgatttctcaaaaactcaatccagaattactattcatcctagatattccattatggagtatatgctcaaaggaatataaattgttctaccataaagacaaatgcmtacatatgtccatcacagcactattcacaatagcaaagacatgagatcgagtgaaattcccatcaatggtagattggataaagaaaatgtggtatctatatataatggaatactacatatacatagctataaaaaagaatgatatcatgtcctttgcagcactatggatgaagctggaggccattattctaagcaaactaatataggaacagaaaactaaatactgcatgttcttacttataagtgggagctaaacattgagtacatactgacacaaagaaaatcacaggctgggtgcaata

SEQ ID NO: 396283 - DNA, 637 bp, Homo sapiens
gaatgctactaatttgcaggcaaagagcatatgaaaaaatactcaacatcactaatcattagatgaacataaatcaaaaccaagatgagatacaatctcacaccagtcagtatgactattactgaaaagtaaaaaataacagatgctagcaaggttgtgaagaaaagagaacacttacacactggcggtatgaatgtaaattaattcagccattgtggaaagcagtttggtgatttctcaaaaactcaatccagaattactattcatcctagatattccattatggagtatatgctcaaaggaatataaattgttctaccataaagacaaatgcctacatatgtccatcacagcactattcacaatagcaaagacatgagatcgagtgaaattcccatcaatggtagattggataaagaaaatgtggtatctatatataatggaatactacatatacatagctataaaaaagaatgatatcatgtcctttgcagcactatggatgaagctggaggycattattctaagcaaactaatataggaacagaaaactaaatactgcatgttcttacttataagtgggagctaaacattgagtacatactgacacaaagaaaatcacaggctgggtgcaata

SEQ ID NO: 396284 - DNA, 637 bp, Homo sapiens
gaatgctactaatttgcaggcaaagagcatatgaaaaaatactcaacatcactaatcattagatgaacataaatcaaaaccaagatgagatacaatctcacaccagtcagtatgactattactgaaaagtaaaaaataacagatgctagcaaggttgtgaagaaaagagaacacttacacactggcggtatgaatgtaaattaattcagccattgtggaaagcagtttggtgatttctcaaaaactcaatccagaattactattcatcctagatattccattatggagtatatgctcaaaggaatataaattgttctaccataaagacaaatgcctacatatgtccatcacagcactattcacaatagcaaagacatgagatcgagtgaaattcccatcaatggtagattggataaagaaaatgtggtatctatatataatggaatactacatatacatagctataaaaaagaatgatatcatgtcctttgcagcactatggatgaagctggaggccattattctaagmaaactaatataggaacagaaaactaaatactgcatgttcttacttataagtgggagctaaacattgagtacatactgacacaaagaaaatcacaggctgggtgcaata

SEQ ID NO: 396285 - DNA, 510 bp, Homo sapiens
agccttcccctgggtctagcagcagtgacagatccaccaagttctaatcaagatcattgtgttgactgatatgataggtcacccaactcatacattaagatgattgaaattactgaaaattggatggacttgaccataaatatattgatttaatgccatacatataataacatgcggtttttctttctgtaattttcttcttttgattgttattactccattccatagatccagtgtctgtggactatttctttaaattgcttttcacgtaaaggaaattggggcaataagtttattaattcatttttcactgaatgttagatttttttatttaattcatatgaaatgagaattgatgactgaagaaaatgttatttttggttgagatttgcttttcaccaatgacctgtcatgttggtcacatgtaatccagaatgccatwgaatcatctcttattttccttcatcaaatgacaataatgcttattttgacttttttagagagctacta

SEQ ID NO: 396286 - DNA, 490 bp, Homo sapiens
agaggataagagctaattattaactcccctttaacttacaagtttatactcagcaaatcttaatacttggagtctcttaaaacaaacaggcttkcacagtcaccatttcaattaagctaacctgaccaatttaggacttataaacacattagctccacaaattaaggtttctattcctgtgagtctttactgagttgatttattcagctggttttggagaatagttgtctgtcagttagtgttctttaaatacatgtttatcctggagaattttatctcagaagccttcaaatatgtaattacttattttcttttcagaaatacaaagcatctaatcactttttacttttaatacaatatatatattactgccctagtttttgcaatgacagatctttaaattcactattaactatttacatctttgtaatcctcaaaattagtgacataaatatttccaaattactagaacacagctgttttaaagaat

SEQ ID NO: 396287 - DNA, 569 bp, Homo sapiens
taacaggcctcataatcttcctaaggaattaatttcctctggttttgctacagtggaattagagaacagtgtattaacataacactatagtgaatttctccaactcaaataattaaattagacctttatttacccagctaaaactaagtaacatcstgctttttctgtctctttaaactagatattttagaaaatctttgaagaaaaacaatggctttaggtttttgcaatctctttgaatattcttattttgtaattttgctgtgttagttcatctccttctcaatgtatttgaaactcacatcatcacttcttccaaattaactccctctcctaaatttcctattaactttcataatactatcatctttcatatacacagggtcaaactttcatggatatggacactggtttttttttttttgtcccatcctatagttcaatcagtgtccaagagcctcatatatttaattattatattattatataattaattaagtcatatattttcctttatttagcatcatatattactttcactcaggagctgtctttaggattatgttgct

SEQ ID NO: 396288 - DNA, 577 bp, Homo sapiens
ttctcaaggccttttgaacatatttcttatgtttaaggatttttctaccygtaaataccagcttcccaaaatagagccaggaaattgcttttccagactcctgtgcagccagggcatagacaggtgacccagaatccactaataagatttccaggtataacattttgattcaaaagtaagaaaagtctgattcggacaagaatgcagttaagaaggtaatggaggcccttgggtttgggggcagcaatgacagccagggaggttttctggaacataactggcacacatgtatgaatagcagtggtcatagttatgctgatttcttggtccagaaagggtaaccatacaaaaactggtagtgctagttttcttgtagacctcttctacagcatattctggtttgttcccagaagtctacccagagattcataatttagggtcctacacaattctgagctatataacaaatttttttataataacatttcttacagtttgtaagaaagaatctagagtaatatcgcatgtagctccctgcttcagaatattttatatctttatatccaaaaaaacttct

SEQ ID NO: 396289 - DNA, 577 bp, Homo sapiens
ttctcaaggccttttgaacatatttcttatgtttaaggatttttctacctgtaaataccagcttcccaaaatagagccaggaaattgcttttccagactcctgtgcagccagggcatagacaggtgacccagaatccactaataagatttccaggtataacattttgattcaaaagtaagaaaagtctgattcggacaagaatgcagttaagaaggtaatggaggcmcttgggtttgggggcagcaatgacagccagggaggttttctggaacataactggcacacatgtatgaatagcagtggtcatagttatgctgatttcttggtccagaaagggtaaccatacaaaaactggtagtgctagttttcttgtagacctcttctacagcatattctggtttgttcccagaagtctacccagagattcataatttagggtcctacacaattctgagctatataacaaatttttttataataacatttcttacagtttgtaagaaagaatctagagtaatatcgcatgtagctccctgcttcagaatattttatatctttatatccaaaaaaacttct

SEQ ID NO: 396290 - DNA, 609 bp, Homo sapiens
taccttttaatgtctgatccttctttcctaacatatggcaaattctataaatccagtgccacaggtttcggttttgttatttatagcactatgaaccaggtaccaaagtctgcattagtcaarattaggtttggccgagtagcagaatatgcacaataaaagtgattaaaacataatattccagtgaatagtgttggactcctcacagtgttgcatctaaggtcctcctatcaaagggaagatgagattatggtatctggtgccatactgcctgggttcaggtttcccttcacttcttactatataacctatagaagtataactctatctctgtgtgcttcaattttctcacctctacaattgagataataaatatctcataagattgttgtgagaattgagcaagctaatacatataatgaactcagaacaattccaagcactgggtaaactgtatatgtgttagcttgttaccaggtagctttttctatgcaacaaccgtctaaacactagtgtcttaaaatatcaaccatgtatgttgtttactttctttgactcagcagtttgggcagtttgggatgagcttggctgatctccaggctgggatat

SEQ ID NO: 396291 - DNA, 572 bp, Homo sapiens
ttccagggccttcctccccagagattctccccaccttgtattgagcacctgggctttaactctttctaatggagaaaaatgagaaagtgaaagcgttcaacgtggagcaatatggacagatttcctcctgcttcattctcccgttcattgattcatggataaacttayagctttattccataatcatacactgactgcatgtagctctttaagtgggtgagaagtgtttgccacattttgttttgttttgtgcttattttttaaactaaattttatttctcaacagcaaaaattccatgtaaaggtttcaatggaaaagcaaataagaccagatgaacagacctatgaccaaacaaagaaaacagtatcttataatttttggaataaaaccattatctttaattttttccctccccataactttttcctaagctactaaatatttaggaaataagatatttaatagagtgcaatcattataaagacaaaataccatgcatagccaaggtatagaaagaaactagaaagcatcattccttgaggaatttataatctatagcagccacagaaac

SEQ ID NO: 396292 - DNA, 657 bp, Homo sapiens
cacagcctgaaatgtcaacataaagaataagctatccataacatattgtgttaaagtggctagcaatactttggcagaatattaagctattacactggtttcatggatagtgtgagcccaagctcaggtgtacctcttaggaatttaggatgtattcccacaggtacccagttgtcaagatccttgggagttgcctgagttgaaggaagctgcccccaaatacattatgcctcatttctaagacagcccttttccaatgaccttcctggctgttgaaagaagtgtaccaaagaagagaagaaataaaaatcggacagaaagtgatcttgggctctgtatagtggccacaaggcctgagccaatcctctgtggactctgaagctgagatagccccttagagttattataatttcagacactggggtcaggtctttatacacctttatacactcgtgttaccttacttatggtacttttatcccttaaatcttcacaagactaakgaataatagtaaaaagtaaacattaatgccatgttttgtagggcattttgtgaaaaaaatgccttttaacaacttttaacttgtactttaagttcctgttatataagcttgcagggacaagagcatatacaaaactcttaaaacatgtgcactc

SEQ ID NO: 396293 - DNA, 583 bp, Homo sapiens
catgtatattaataagccattcactaaagtcagtcagggtttgggaactgattaacgaagactgggttttatacccaactctggaactagggttcacatcaggtttaaaataactatgtaaaccgaagatgagaaatggggattcttgagagaaaatgagagtcctgttatcagcaaaataagaaatggctgcacacccagcaaaaacaaaggatttatttcagyttattgttgactattgataaataggatataaatgcttatagttagtttactaggaaagagctgtgtgagtttgaaaatgctacattaattcaacgaacacatttctccagaaatgtaactgtctctcccttatcaatattatcccagttctgtgggttcctgtcatttcacagcttcctttctatgtaagtccttttttgcatcactctaaagaaatacctgaggctgggtaatttataaagacaatagatttaattggctatgattccgtagtctgtgcaagcatggcactgccatctgctcagcttctggtgaggcctcagggagctgtcactcatggcagagggtgaagtgggag

SEQ ID NO: 396294 - DNA, 535 bp, Homo sapiens
aaaaaaaaaattcaataaaaattaatcaggccaggagtgttgacttatactgtaatcccagcactttgggaggctgaggcaggaggattgcatttaggccaggaggtcgagaccagccaggacaacataatgagacmctttctctattaaaaaaaaaaaaaagccaggtgtgggggcatgcacctgtagtcctagctattcagaagactgatgtgggaggatcacttgagcccaggagttccagacggcaggcggcagtgatccatgatctcacactgcactccagcttgggtaaccaagtgagatgctatttctaaaataaatattttaaaaataaataaaaattaattaaatctaccttctgacccatagatgtgctttttctaatattggaattagaatggaattaagatatcattaagcctcatctcatcatttttctgaagatcaccatgaagcacagggggtggggtatatttccttccatgcagttaatgacagagcagaaccagagccttctgctgatgaacccagg

SEQ ID NO: 396295 - DNA, 535 bp, Homo sapiens
aaaaaaaaaattcaataaaaattaatcaggccaggagtgttgacttatactgtaatcccagcactttgggaggctgaggcaggaggattgcatttaggccaggaggtcgagaccagccaggacaacataatgagaccctttctctattaaaaaaaaaaaaaagccaggtgtgggggcatgcacctgtagtcctagctattcagaagactgatgtgggaggatcacttgagcccaggagttccagacggcaggckgcagtgatccatgatctcacactgcactccagcttgggtaaccaagtgagatgctatttctaaaataaatattttaaaaataaataaaaattaattaaatctaccttctgacccatagatgtgctttttctaatattggaattagaatggaattaagatatcattaagcctcatctcatcatttttctgaagatcaccatgaagcacagggggtggggtatatttccttccatgcagttaatgacagagcagaaccagagccttctgctgatgaacccagg

SEQ ID NO: 396296 - DNA, 535 bp, Homo sapiens
aaaaaaaaaattcaataaaaattaatcaggccaggagtgttgacttatactgtaatcccagcactttgggaggctgaggcaggaggattgcatttaggccaggaggtcgagaccagccaggacaacataatgagaccctttctctattaaaaaaaaaaaaaagccaggtgtgggggcatgcacctgtagtcctagctattcagaagactgatgtgggaggatcacttgagcccaggagttccagacggcaggcggcagtgatccatgatctcacactgcactccagcttgggtaaccaagtgagatgctatttctaaaataaatattttaaaaataaataaaaattaattaaatctwccttctgacccatagatgtgctttttctaatattggaattagaatggaattaagatatcattaagcctcatctcatcatttttctgaagatcaccatgaagcacagggggtggggtatatttccttccatgcagttaatgacagagcagaaccagagccttctgctgatgaacccagg

SEQ ID NO: 396297 - DNA, 436 bp, Homo sapiens
agagagcatgattgtttacacagaaaatcctaaagaattaattttaaaaatccaagaactaattcactagcaaggaacaactagaaatcaaagttttaaaatcaggatcatttttcaaaagactgaaaatttacctaggtataatctaacaaaatatttttaggatctatctgctagaagtctctaaacactgatgaacaatatcaacgaaaatcccaataaatgtagaaatacagtgtatttatagttgaaaaactcaacattggcaaaatgccaattctctccaactttacctatagatttaatgtactcccatttaaaatcccaggargattttttggtggatatagataaactctttctaaaatttacatgaaagtgcaaagaaactagaatggccaaaattattttgtatgaaacaaagttggaaaactca

SEQ ID NO: 396298 - DNA, 585 bp, Homo sapiens
tgtagtattagaaaagttcacaagattatactctttgaaaaacatgtgtcaagacaatttcatttaaattatttatatatacacatatatatgtatgtatgtgtgtgtgtatatatatatatwttttatcttgtcttaaaaattttccagacagaattatatcttccaagatccaagacactaatggaagacattttaaaaatagaaattattggaaattaagcccaagtgttgtgttaataaaaaattttgcaagcattattttttacatgatgacagaaccaagaaaaagacatagagttgtttttattgtaaaattaaatcactctaattttgtccaaaggctcatctatcctcaatgtaaactcacatgttacttaccatatggtcaattaattttttatagaggtgcaaaggcagttccatgggaaaatttttaagattcttgagtttattctaaactctcagtgtctagcttttcttctcattaggaatccatggtcattaaccaaatttgcagttaaatttcttctctgagttagtgttttatctgggaaaacatacaaaagaaacacagtttaatat

SEQ ID NO: 396299 - DNA, 556 bp, Homo sapiens
agtaaagtatggaggaaaacatcaaatagctatatttgtgcagtataaggaaatatgcaatatatgtatattgatgcwtgtatatattatgtatgtatatgtatgtgtgaagtatgtatgaatatgtataattatgtctgcagtatgcatgaatgtgcatatgtatatgtatggctgtgtatattatgtatgcatatgtatgtgtggcagtatgtacgtcctgtggggagccatccagatccaccctttatgacccaggcatacattttgccagcttcaaaggagactggttgcagactagtcacagctcaggtctctctgccaattgccaccagggaaagggagatgacttggtcaagtttttacaccttgctgggagaagcccctatccaatgactaatcaatgcgtaggtataaaaaccagacccctttgcctcagtttggaacaactctaaaggactatcccggctccatagcccctgtgatatgagctgtctttgttgcatgaacattgctttcctcactacctcataggggttgttcaggaaagcacgcc

SEQ ID NO: 396300 - DNA, 566 bp, Homo sapiens
gggggtttagcttaactaatgcacctttcttgcaaggtctgtaaaagttaggcaatgttttaaatataccccaactgttccctggctttttctacattctatttctgtaagggttgattgcaaaggctagctyttctgtgtatttttttcctacagaagaagaaacacctcatttataggtttgacatagcagagactttaggtttcttgactctctggtctgttacggtttttgtcatctaaataagttgattggtggaaaccaacttatttataacaaggaaaaggtatcaaataaagctggatggcacccagataaaaatgagtacaaatccaaaggtcagtttgattgtattctttagccaaattgcaataaaactgctggcaggtattggaatcaggccaagaagtatgtaaacatgccgaaatattattaaggatgggaaccgtacagatattatgtttaagaaataataactttctgttagcaatcagaaactttaacaaagaggagagaaaatagctagggaaataaagaatgacatattgcagataaagcatgggaa

SEQ ID NO: 396301 - DNA, 590 bp, Homo sapiens
caggaaatattctgtgctttctagattaactcacacttccaggtaggacttggtatctgaattgaatatatcccagctgagcagtctacagcgaactctgatgctgtcattggttgtgttttgttttgtttccagtaaaagaaacttacttagctgagttcrggtctctgacaaatgatcagtagctatttggaagtgcctaatggtctaacatctaaaactttgtattatgcataaaatttttatttttacttaactgggtggttcaacgggacagataaaaattgagacatcattatgagccaggaaaaatatttacttttttttctgtgtatttcttgcaatctaaatgagatcaagttatttatgagaaaagagaaatcctaataggaaccaaaggcaaagcttattcaaaaacactccaggctttagaaaattaagtcaaattagatgaattattaaacttcatgcatgcaaaagtaaaaaagcaaatattaaataaaagtgtcttaactaattgagtataaaccaggttgaaaccaaattttagggaaaggctttgatttgatgtaatcataaacagtcatgta

SEQ ID NO: 396302 - DNA, 590 bp, Homo sapiens
caggaaatattctgtgctttctagattaactcacacttccaggtaggacttggtatctgaattgaatatatcccagctgagcagtctacagcgaactctgatgctgtcattggttgtgttttgttttgtttccagtaaaagaaacttacttagctgagttcgggtctctgacaaatgatcagtagctatttggaagtgcctaatggtctaacatctaaaactttgtattatgcataaaatttttatttttacttaactgggtggttcaaygggacagataaaaattgagacatcattatgagccaggaaaaatatttacttttttttctgtgtatttcttgcaatctaaatgagatcaagttatttatgagaaaagagaaatcctaataggaaccaaaggcaaagcttattcaaaaacactccaggctttagaaaattaagtcaaattagatgaattattaaacttcatgcatgcaaaagtaaaaaagcaaatattaaataaaagtgtcttaactaattgagtataaaccaggttgaaaccaaattttagggaaaggctttgatttgatgtaatcataaacagtcatgta

SEQ ID NO: 396303 - DNA, 643 bp, Homo sapiens
taccttaggtgtgatgctcacattaggacaatatctagggaaggcaggccatgacacaggcaaatgacatcacaaataacttctggaagagaaaaaagtgacccagctggtataagcctgggtcgtctgagcctctgtatatcagcactgactttcatttttccccctcacatgtcccttacacagcccttaatgtttctagagaggcacgcagtttacaggcacacgcttgaggatcaaaagaccaaggttctcaacctaagtcctaaattttactcttacaaattatattatttaatttcaatgaggtttttctgtcagctgtaaaaatataatcattatatgaacttagtaaatattttttcagtgttcactaataataagggatcatggaggatacaagaaaaggtagacattccatgtcytgtaaatatagaacattaaatggcataaataaaaaatgtacacaaagaactctgagacatgataaatggggatgggcagcaaatagcaatactgcaagtattgctggtgtcagagaagaaacaagcttgatgagccttgtgctaaggaagtaaagtgaggaggaggtggagaggacaatgcagctgacagagggaaaaacaggagcagagggcggggg

SEQ ID NO: 396304 - DNA, 643 bp, Homo sapiens
taccttaggtgtgatgctcacattaggacaatatctagggaaggcaggccatgacacaggcaaatgacatcacaaataacttctggaagagaaaaaagtgacccagctggtataagcctgggtcgtctgagcctctgtatatcagcactgactttcatttttccccctcacatgtcccttacacagcccttaatgtttctagagaggcacgcagtttacaggcacacgcttgaggatcaaaagaccaaggttctcaacctaagtcctaaattttactcttacaaattatattatttaatttcaatgaggtttttctgtcagctgtaaaaatataatcattatatgaacttagtaaatattttttcagtgttcactaataataagggatcatggaggatacaagaaaaggtagacattccatgtcctgtaaatatagaacattaaatggcataaataaaaaatgtacacaaagaactctgagacatgataaatggggatgggcagcaaatagcaatactgcaagtattgctggtgtcagagaagaaacaagcttgatgagccttgtgstaaggaagtaaagtgaggaggaggtggagaggacaatgcagctgacagagggaaaaacaggagcagagggcggggg

SEQ ID NO: 396305 - DNA, 538 bp, Homo sapiens
aatagaacagtgttacagctcatgtaaatacatgattgtttcaaaatcatgttttcaaaataatgagatgattccctggcatccccaataatttttagtatagttaggaactcacagatttaaacatatttgctatgctttaatccattgtaggtatgattctttttatttatttatttttgagacagggtcttgctccatcacccaggccagagtgcagtggcacaatcacagctcactgtggacccaatctcctggactcaagggatcttcctgcctcagcctcctgagtagctgggactataggtgtgcaccaccatgcccarctagtttttgtatttttaataaagatgaggtttcaccatgttgcccaggctgttctcaaattcctggactccagtaatcctcttgtctcagcctcctaaaatgctgcgattataggaatgagccaccatgcctcgccattgtagtgttattcttaatgatgttaaaatgttcctatctttgaccactgaaagcctctctaagttagctcctg

SEQ ID NO: 396306 - DNA, 562 bp, Homo sapiens
  misc_feature (1)...(562): n = A,T,C or G
atgtgtggatgcagcaagaaggtccttgccaaatattggcatcttgaccttggacttcccatcctccaggactgtgagccaatacatttctgtgcattataaattacccagtctcagtcattctgctrtagcagcacaaaagacaaagtgggttgttgnataggttcctaaatctctagaataggttatctctaaacacacatacagatctctctttttacaaacaatcaaaaactagtgaaaataaaattacagccaattttggtattgccatttcaatgattagcactttgataataacggccatgctttattgaaaactggctgtgccaggcaatctaattactttaagtaaattatcatgagatctttaaaactcccttgtgaggactctatcaatttaaataatgagcgtattgaggctgaggctgtcttttatttgctaagtacctcaactgagatttaaatattgatctgagtgactccaaagctcaacccagtcagccatctgcattctttcatttaggaaatatttttgttaactgacttatatgtcttgtgt

SEQ ID NO: 396307 - DNA, 585 bp, Homo sapiens
taccattttactctcccctaagttcctcaatattttggtttcccactatttcctccatgtatttccatcttagcaataatcaccttttaaaaaatgttgacaatttataagtttttgagaatattcttatgaggagaaaccagcttccactgctgcagatccagcttctcagagactagaacatgggcataggccagcagcttggtctcaaacaaggcagagtctggttgccaaaactcagacgcaaagccagcaagattgaatagatccttaatcaagttctaagaagcggattgattggttgatttcagagcctagggtggkgctgaacctacagttaaggatcaggaaatctcagttatgaagaaaggaagcacacgatgatagtgagccaggaatagcactgcagtaggacgggggcaagaccagggatagtaagtaactgtcaagtagtagggggagccatggtctgaatgtttgcgtttctgcacagattcacgtgttgaaaactaagcacaaatgtgatgctattaggagcctttggcagtgattaggaatgggattactgcccttataaaacaggcc

SEQ ID NO: 396308 - DNA, 505 bp, Homo sapiens
attatttatgtgttgtttgtttatcaatctagccaaaatttatttacttcactaatatttcaaaaactaacatggttgataatttctattgcttgattgtttctccttattttctgcactaatttttactatttttctctcatcattatttctattacatttattgtgatgtttcatctttttaaatctcttattcttatccatgtcttatccatttgtaaaagttttttatacattctgaacataaggtttttgttgattataagtgttataagtatgttcttccactctatctttttgctgaacaagttttcttaattttaaagtattctagtatatcartattttcttttatgattaatgttgtgtgtgctgctcaagaaatctatcacaattttcaaagtcataaagatattccatattatttttaaaaagatctagcattcatatagaatcaatatttgcatttgatatcagtaggggtcaaatatatggttcattgtct

SEQ ID NO: 396309 - DNA, 570 bp, Homo sapiens
atctgtagccaccagtcttattctggttaacttaattaagacatttaaaacatatatattgaactcaaactacgtacattgcattgatttagattctgtgatggatacaagaagtttaagacacagtccctgttctcaacaagtgtatacttcagctgcataaaatataaaacaaatatgtaaaaggtaaataattcaagagttctattyctacacaagagaataaaaccaagctcatcacagggtgttacatgatgttgaatttgttaggatattacagaaaaacaagaggttctgtagtaaaaaaataatttggagattctagattacatatattcaagtagttttctttaatgcacaatttctcatcgcctttattatggcaatgtacattgcaatcttgcaagagagtttcattctttgtaatattttccacatttgttttgaaaaatgctatggtctgaatgtctgtgttccccctaaaattcatatgttgaaattataaccccaaagtgatggtattaggaggtagggcctttggggaggtgattagggcttgaggcctctgat

SEQ ID NO: 396310 - DNA, 619 bp, Homo sapiens
tagtgttaagaaaaatataggagttggggggagccatttttactgtcaaataaaatgagtctaccaagaataaagccaagacagtggcagacagggctgatacatgcagggagagagagtcctaatgctgtagtttgaatccctggatacagttgtgtttgcaattaaagtcaccatttggggttcctagtttagatggcaaatacttctccctttgccttagctagttctgatagagttttgtgattctcagctgaaaacatcttaaactgtcrtagtattgaagctgggacaaaaactcaggttttctgatgccaattcagggctcttttcctcacctcatgagagttgtgaaataattgtcacttaaaattaataaaagactagtgaggaactgtggtaacaaagacactagccaggtagtaagatcaatatttgccaagaaatgaaaacaattctgttctggagaagtgtaattgcaaggcctgggaagttgtgggaagtctaatcacaggggaggcaccctagcttcttgctcagcaccaagagaagtctggtcaaaatcttatggtgatatttggaaactagtatcaaatagccaagcagcagaaagctaatg

SEQ ID NO: 396311 - DNA, 597 bp, Homo sapiens
ctgttctcatcacagcaatcagcgtgttcctgtttaaatgtaagacagtcttaccattcctctgctcaaaaatctyccaacgttttctcttctttttcagaataaaagtcaaaatcctctcaatggcctttgataaactatattttcattttttactactctttcccttgttcactctcttttagtcacagtgcctctttgctgaccctgggacacacaagtctcacttctacctcattgcctttgcacgtgctgtttcctctgaccagaatgcctttcccctaggtaatctgcttagatggtttcctggtgtccttcagttctatgctcagatgtcaccttctcagcaagtccttccccaaccaccctggttaaaacagctcccaccctctaccccagtatcctctacctccttctctgttttatttgtgtctaaagcactccttccattggatgctccatgtatttatttacttggttggttggttgttatctgttgccccccgctaagcaatgaactacatcagaggagagactttggttattttgtttcctgaggtattccttgagcttagaacagtgcctggcacagagtag

SEQ ID NO: 396312 - DNA, 431 bp, Homo sapiens
tctcctgtttctttgtcttcctcccacttattacactatgacaaaacatggttctaattttgcctatttctaaacttcattaaatgaaatgagatagtataaattcttccataacagtcttcttgtcctcactatttggtacatgacatttarcatgttgttttgtgtagcaatagttgtttatttctttgctgtctaatattgttcattaatatttaacagtttctttattttactattggtagacttgcttccaattgtaaattattaaaaataatgctgccttgaacattttctgtgtctttttctgtatatatgtatacatttttgttggctgtgtatccaggagtgaatttactaagtcacaggatacacagataaccaggtttatagatgctgccaaatgactttttgaagtggctttaaaaatg

SEQ ID NO: 396313 - DNA, 588 bp, Homo sapiens
acatagctatcgtaagtaatgtgcttttcagttcctttatttaaaagctctacagttttatggctctgtttaactcttgagtgcttttacctcttttgagaaaggctattcctcctgccatttcagcttgctgtcccaaatggacgtgtaaacagggcaccatcatgtatatgtgaaaaaagatgacctacatatatgatggtacagtacagtattaaaagtacaatttcagccatttcttccaattaaggctaacacgtctgtgatttcagccttctatttgaaataaaagtctaacgataattggagcacagagctattcaccastgtacttcaatctggaaataattgtctttgttcaattaggaatctgcattttcatgccaatcttcacagattattttgaatggagaatgcactctgattaagagctatacttcttaggaaaaaaaaagtagcagcctggagtcctcatccccttgttagatttaacattttgtttttccctaacagactgagaaggatgtcatatagacaactttttaaacttatttattcaatgtggcaaaattctcctggggcattcat

SEQ ID NO: 396314 - DNA, 559 bp, Homo sapiens
gaaagtgagggagatgaaatattaaagactgaatgttcatttccctccaaaattcatacaaagaagctttaacccccaagtgatggtatttggagatgggaccttaaggaactatctaggattggattaggtcatgaggatggggcatttatgatggaattaatgctcttataaaaagaaggagagacaggagatctctctctctgtctccttcttctcccagccacctcaccaccttgtgcasataccaagaaaaggcctagtgaaaacataagaagaagatggctctatgcaaaccaggaagaggactctcacccaaaactgaatctgccagcacttggaactttgacttctcagcctccagaactgtgagaaataaatgtttgttaagtcactctgtctatggtatttcattatggcagcccaaactaagacatggggcaatggtcaacatcgctttaaggtgtgtcctactatagaagtctcttttctcttcacaggcaggtaaaactaagcaaccatgtttgtactatgtcatgtccctgcttggaccaggaca

SEQ ID NO: 396315 - DNA, 463 bp, Homo sapiens
agaacttttgggggaaagtggggaggggggaaatgcttagataagtttttatgatgttttgccatatagtgataattccctttttccaattgctattttttccagtacacattaaaataaatacctgttaaaattttttttttaaattccaacaaacaaaactatcttgtatatagacaaaatcgtacaagcagtccattcttcacagcatgctccacactgtactgtgcagcacaactgtacaacaggcagcatgatcctcctcaaattctggtagctaaacactgcagtacaggtgatrctttaggatacacaacaggacactttccatcactttaatgtgcgctatttggaaaagcattaggctttttaagttctaacgaataaatcacgaaataacattgaaaagatctatacagaagaagccctaggcctgtagagaatacttatgaagcttaaaata

SEQ ID NO: 396316 - DNA, 553 bp, Homo sapiens
catttcagcctgaactgccagaaagttagacttttcagaccaatattagagagtgcctcccactactgatgggccctggccttcctacccttaggaaattcagcatcacaccagtctctgagaacactgcagttgatgccagtttgattttcataatatcttgatgagttgatttgtgtagagtatttatracccttgaatgtttataattcaggtcaaaaagactctgaattaaagtatcataaatgaattacaactttacatccatctgcaatttgaaaacaatttcccggagtgcaaatttaccccagctagaggaaaaagttgagcttctatttttgtcagttgtgcaaaaacaacaagaagaaacaacaaaggattgttatacaatactagtataaggaaagtctagccacaaagcacaaagtcctaacatatctgtcaacattcctaaactataaaaacttaaatgccatgcagtccagatcaatcctatatgagaaagatggggataagtaattggccactttactaatttaaactagcttggctc

SEQ ID NO: 396317 - DNA, 596 bp, Homo sapiens
tacaataagcaggagagtagagraggggttagcagtgccctacaggactatgtgtaggttgccagaagacctggttcaagccctgctcttccactttagttgtgtgtccttgggtaattcattgagtctctacttgtcaggaaatgagggtccccatgtcttagttgcccaaggatagggttagatagtcacaaagtgagactataaagtattgatgaggcaagtcatcaaggcttgctggtaaatgactgaactcccacattcaactgcctgtttgacatctcgcttgatgtctaagaaaaaactcaaaccaaatatttccaaaacagaacttttgatctggacccttataaaggaaaaacctgttcttcccctaggcttttccatcttaaaaaagggcactgctgggtcaaatggtagttatgttttaaatgcttggagaaatcaccaaactgttttatacaatggctgaactaatttacattcccaccagcagtgtatgagagttcccttttctccagatgtacccttgaacctaaaataaaagtggaaaaaaaaggaactgaagtgcacccaatttcacaagtcacaaactt

SEQ ID NO: 396318 - DNA, 518 bp, Homo sapiens
tgttgcattaggttttctctgttctgtcttagagaagtaacaaaggaggaaaaaaatcacagttcttactgaatagttcaagtggcacgtttatgggttcacttggcaagctatacgacacttaaatgaaaaaattaaatttaatttaaaagtataggtcatctccaacccttttccaacctagaagtcttaaatcaaagtaccttatgccaaacaactatgtgaaggaaagcgaaacaaatataacacctcctgctatcatgraagacaaattatatttacattacggatgtactttgctttttattttccttaatcttgcctaatgaatacactgtttggtcaaacatgttttatgtctgacatacttttcttttaggaaataatatgcttgtcactcaaggagttaatgaaatgatgagaaaatatgaacccaaagggagatgttttctcttttagcattgctttcaagatcccagatttttacccaccttataatgtatttactttggttctag

SEQ ID NO: 396319 - DNA, 599 bp, Homo sapiens
ttaagcaggtatgacaaaatgttaccaagagttaatactaactcttccatgggtatatggaagtttgytatatcattctttatgctttccaatatttaaaagttttttcccaaagaatttttaaaaattaatctacctctatgctacaagtctcttcccttgaaaaaaaaaagcagcagttaatgggcattaatcacttcaagaccaatatcatgtgggtcacctttgtgctatgtaaaaatgattggttggtttggttttaggccataatatttaactagataatgaaactcattaggtgtcagataaacaaaaactaccaatgaattaaacacattttctttttaaacttgcagttattttcattataaatataacctgaaagaactaaactctagttgctttttctgtccataacatccattactgttagtgattgtaagaattatctctgtcagttttatttctacctgataggttttctttgtgttctggccttcgttgtaattacatgtcagtcattgaaccagcattatttggtacctgacaagtccttcccatacacaaaacccctgtagtgagtatgtaggaaaaagaaa

SEQ ID NO: 396320 - DNA, 389 bp, Homo sapiens
cattgcttgctcatagaatgtagctcctgtgaaaggataaattcattcgacatgagatctctagctggagatttgatcttaagggcaaatggatccatgttttggttcacaccattatgtccagagaacatttgctttatggaagttgaaatatatggagatgagattggcccctgactgaggtcaggaaattataagacacagatggtgatatgaattaaaasctctaaagatgatgccacctccttgatatttgtccatgagaatggaaaatgggggataagggtaaaagcaaatgagtcaaatgctcttagccttctatgataggcatttgactccctcttaagcagtaggttggtataatatgagaactagaagttgagaccaag

SEQ ID NO: 396321 - DNA, 526 bp, Homo sapiens
ggtacaacggggagggggctgtagcatgtcctggattcctgacttcacttaaaagggaaggacatcctgacaggaaagggggcaaaaatgggatacagaggatgctgggtaacttttaaatccagcagttatgaggatttgggaaagattccctgggtagtggtaatgtcgcatgaattcccttacatctggaggcatttcagaggagatgggaacctgggaaggaccaggtatagggttttggtgagatcaacacagcagtctctccttcatttctagctattccagcagcacaaaaytctaggcaaatagttcaataatttttttaacagcatgactattactcagaaaaatcaaatgtgtttaaatccaggagtaaaacttctgcttacacaggtcagagcaattgatatgcagcagaaaatgttgaaagtccacagcaagcagcaagaactggcttctgctttaggcagcctgacagaaaggccagaagagacatgtgccctggagaattccagaagctatg

SEQ ID NO: 396322 - DNA, 328 bp, Homo sapiens
ctgtaaaattatgtttcagggtttttgcaagggtcaaaaaagataatgtggagggcgtgcagtgcacagcctggcacagaatactgaccaatggggcaccagagtgtctacctgcctgtgaagcactaggttttcctcacctctgctcttccttgtctcctctcaccactgttgtttcctaagacttaatgcacagtgtgactacatacgtatactatagcaacagatgggatcctagttcccttccttcctcttaggttaacccctccttattttactgtaygtaaatttgacaactctttccctttcctataggtgttttaaattg

SEQ ID NO: 396323 - DNA, 564 bp, Homo sapiens
gtagtacaaattatagacattatacataaataatttggcccatcatgttagatctaggtgcttcactacaaattttatatattcattctctgcaaaatgagggcctactccaggtttggggyctaggctaagtaaaaacaattccactttaaaaatcttgtaacctgggacttggaatagttacttcatattgaaaccaaaataaaggaaagcctgaccaaatcagctcttaccctccccatgtcacagaaaagatggggagtgtgtaaaacagacttaagaggacaaatgatattttctatgatagcctcataataactgttgctagagctgagcttctgtctacattctatttatattctacaaatatttttatttggtagttcctgtcctgagaggtatacttaatacaaattctcaaacacagcattttttatagaataggtagcagtgatatttcaaaacttgagctacatatctaaaataaatcctcacatgtaatatttttggacttaagaggcaccaaagaacccattttctaaactgggagttttgtattgaact

SEQ ID NO: 396324 - DNA, 633 bp, Homo sapiens
ggaatcaaatcccttgattaagtgragaattccacttgtaggtagaggcaccagaagaattggtggtgtagctttttttttccattttcttaaaaatcatccttttttctctaacttcagcagaaaaagagcattcatttgacatctccaggtacatggaagcaatccttccaagagaattacccaaaggcagtgtgtctgtgagcagcacccaggaccgtgcccaggtgtgcacaggctctgaagtatgacatcaagtgttccgtgctggggacaatccactctgaagcggccaccttgggagacgtggttaaatggagggccagctctagacaaaactgccaaggagggccagactcagcccaccactgtcccttagcgtcttctaggccagtccgttgttctcctcctgacctgtcttgttctaatagtctcttcttgcccctattcctgtcggaagtctgaagtacccacactaggcgtggtcaccacggtcccctcttggaccctgcttcccttgacagttggtccaggcctcagccccactctcctccctctcgttcattatctcttacccctcctgagtctcatttcctcagagccttgctgtgccagtaaatcagataaaccact

SEQ ID NO: 396325 - DNA, 494 bp, Homo sapiens
atgatatcataacacatcctataggaattagaaagaagataagagaatattataaacaaatttatgccaataaattcacaaattgactctttcaaaggcaaaaaaaaaaaaaaaaaaaaaaaaaaaaaaaaggataccctgggacaaccttccatccattaaatgactaagattgcattaaaagccttcctgcaaaaaaaactccaggcccaggtggcatcactggtacaatttaccaaacattcaagatggaaataacaccatttctactttctaraagaaagtacgtttcctaactcactttatgaggccaacatcacctcaataacaaaaagacactagaagtaaaaagttacaggccaataaccctcatgaagatagatggaaaaatcctgaaagtattttagcaaatcaaatattgcaacactcataaaaggtaatatattatgatgaagtgggatccttggaatgcaagatcatcctattatttcata

SEQ ID NO: 396326 - DNA, 494 bp, Homo sapiens
atgatatcataacacatcctataggaattagaaagaagataagagaatattataaacaaatttatgccaataaattcacaaattgactctttcaaaggcaaaaaaaaaaaaaaaaaaaaaaaaaaaaaaaaggataccctgggacaaccttccatccattaaatgactaagattgcattaaaagccttcctgcaaaaaaaactccaggcccaggtggcatcactggtacaatttaccaaacattcaagatggaaataacaccatttctactttctagaaraaagtacgtttcctaactcactttatgaggccaacatcacctcaataacaaaaagacactagaagtaaaaagttacaggccaataaccctcatgaagatagatggaaaaatcctgaaagtattttagcaaatcaaatattgcaacactcataaaaggtaatatattatgatgaagtgggatccttggaatgcaagatcatcctattatttcata

SEQ ID NO: 396327 - DNA, 561 bp, Homo sapiens
cacttcagattgacatacctgatgcgctcagtgagagagataaggtcaaatttacagtgcacacaaagaccacactgcccacatttcagaatccagagttttctgttacaaggcaacatgaggactttgtgtgactacatgacactcttcatgtaccctagaacttaaagtatamcaaaaaaaaaaaaaaaaaaaagaaagaacagaccatgctgggcttattgggagtgttttagaaaatcaaataagctagttctttctgccttgctattcatttagtttaaagagacttatatccactttttataatggattgtgaaaattttgatttcatctacctactagagtatttgctaactattgggtaagtggaaaatatgtgaaggaatagtgttacagctttgaggtaatgcatacaggcttacattatttatgttgtaaagtggtataaacagtgtaatgactttagtcttatttacctttaggtttggtttttctctggtatgttctttccaatgtcagtagaattgatttctaggaaacattagtattggtaatagt

SEQ ID NO: 396328 - DNA, 561 bp, Homo sapiens
cacttcagattgacatacctgatgcgctcagtgagagagataaggtcaaatttacagtgcacacaaagaccacactgcccacatttcagaatccagagttttctgttacaaggcaacatgaggactttgtgtgactacatgacactcttcatgtaccctagaacttaaagtataacaaaaaaaaaaaaaaaaaaaagaaagaacagaccatgctgggcttattgggagtgttttagaaaatcaaataagctagttctttctgccttgctattcatttagtttaaagagacttatatccactttttataatggattgtgaaawttttgatttcatctacctactagagtatttgctaactattgggtaagtggaaaatatgtgaaggaatagtgttacagctttgaggtaatgcatacaggcttacattatttatgttgtaaagtggtataaacagtgtaatgactttagtcttatttacctttaggtttggtttttctctggtatgttctttccaatgtcagtagaattgatttctaggaaacattagtattggtaatagt

SEQ ID NO: 396329 - DNA, 564 bp, Homo sapiens
tatatttagatatgttctgttcattcaaaatcaaagtccttgattatcctttgggattaggaaaaaaatcctttggaatactggagacttcataatcttgatggctaatcattggtgtttagcatttgttgtactagttttaggccaacattgaagcagtatagacactgttgtgctctgaacgattgtctgtaatggataaactgggcaaatgattgccatcaaagtgaatacaggaagatacctccttttaaatggccagaagaaataaggaaggttaagaaaaaacaggagttgacttttaaatagccccataggagtggagtggttgtctcctgtggaccagcaagagtagaacgaggcaccagctagaaaacatcgcttctgggacaagagrctcatgagttcctgcctctgctgcagattccgcctgctcctacgaaggctgacttcaatggtccttgagagaagatgcagaaactgggagaaggtaaagggtctttgaccaaagaagaatttgccaagatgaaataagaactggaagctgagtatctcgctgttttt

SEQ ID NO: 396330 - DNA, 576 bp, Homo sapiens
gtccatcagcagatgtataaataaagaaaacgtggcacttatacacaatgaagtactagtcagccattaaaaaaaaaaaaaagagaatgacatcctgtcatttacaacaacatggagggaactggaagtcattatgttaagcgacataagccaggcacagaaagacaaacttcacatgttgttctcacttatttgtgagatccaaaagtgaaaacaattgaactcatggaggtagagaatagaaagatggttaccagaggctgggaaagatagtgtggttgggggtggagggctgaagaggagggggratggttaatgagtacaaaaagaaatagaatgaataagacgtagtacttgacagcacaacatggggactatagtcaataataatttaattgtactttttaaaataactaaaataatataactggattgtttgtaacacaaaggataaatgcttgaggggatagatactcgattttccatgatgtgattataatgcattgcatgcctgtagcagaatatctcatgtaccccataaatatatacacctactaagtacccacaaaaattaaa

SEQ ID NO: 396331 - DNA, 576 bp, Homo sapiens
gtccatcagcagatgtataaataaagaaaacgtggcacttatacacaatgaagtactagtcagccattaaaaaaaaaaaaaagagaatgacatcctgtcatttacaacaacatggagggaactggaagtcattatgttaagcgacataagccaggcacagaaagacaaacttcacatgttgttctcacttatttgtgagatccaaaagtgaaaacaattgaactcatggaggtagagaatagaaagatggttaccagaggctgggaaagatagtgtggttgggggtggagggctgaagaggaggggggatggttaatgagtacaaaaagaaatagaatgaataagacrtagtacttgacagcacaacatggggactatagtcaataataatttaattgtactttttaaaataactaaaataatataactggattgtttgtaacacaaaggataaatgcttgaggggatagatactcgattttccatgatgtgattataatgcattgcatgcctgtagcagaatatctcatgtaccccataaatatatacacctactaagtacccacaaaaattaaa

SEQ ID NO: 396332 - DNA, 627 bp, Homo sapiens
tgaattactacaaccttataaagaagtaatatggcattcctgttaaaattcaaaatagttacgctctttgacccaggtagttcttataaagtttgcaagcctttaagtaaaagatgtttattcagcttaactacagtgtggggaaacattaaacaggctaaaatatccgacaataggaaaatggttggaatagcccatggtctatatatactaaggtatattatgtggctactaaaaagagctatatctctattgaactagaactacactgaagatatgcccccaaaatgataaaagttatgcagtgagagggtatggcaggattcaattttccttaaaaaacaaaaataaaaaaccctctataaatgtttgtacatacgaacatgagaggacagtatggaagaatacaactatactgaactgtcagtgttggcttccttgggaattaggggtgggaggagtgagataatgggcttttcgtaagtttaccactatgttacttaacttgttaacatggtatcaattactttgtactttgaaaggtaaagccaataarttatcatacatgtatgacatgtatgtatacatgtacgtatgtgtgtatatagatgtataaataaatgcata

SEQ ID NO: 396333 - DNA, 642 bp, Homo sapiens
taaaaatgtatatttacatttacaaagaaattcattttagttaggagtaaatatatattagaaagcctttggacaaattgccacttccaggttgccaagaggaagaaaactggcatttattgacatrttatattctaagcactgctacattatctctcctaatctgcacaccctgtgagattgatggtacttccattttacaaataagaaaattcaggcttggaaaggtagaaaggaacatggttaaagagaaaagtcagggtatagggtttagttccagatctttctgatccaagttcacattcctaccatggtttcattctgcctcctgaagatcagggaatgtaatttacccaccttcctattgatttctgtgcctgttgcagaggtgaacatccagtaaatgttattaatttattagttttgtgtattaaaactagagcaaagagcactatctattgacatgaattacattaggtctaaatgttctggtgctagatgaactccataattactcctagaatgcatttagttttatgtgagccttatctaagaatgttagatgcattttcaggatgaaaaagagtcaacagagcacatatatccgtgatgtatattaaaaagtccctccaaggtattgag

SEQ ID NO: 396334 - DNA, 582 bp, Homo sapiens
tatctcggtgatccccagtagtcactactgttaatactctcttaggttttcttccaaatcttattaatacctttgcatattatgtttttatttatggtagagattttcatccattcaacagaagcttatggactgcctttttagtttattttaaaagaatttttctagctttaaataaaaattgtatatatttacagtgtaccatgtgatgttttcatagttgtatatgttgtgaaatgataacatacccatcacctcacatagtcgtgtgtgcttgtgtgtatatgtttattttgtgctaagaatatttaaggtcggccaggtgtcgtggctcaggcctgtaatcccagctctttgggaggccgaggcgggcagatcccttgagcccaggagttggagtccagcctaggcaacatagtgagaccccatctctacaaaaaaataaaaaaattagccaggcacagtggcacttgtagtcccagctacttgagaggctgagatgggaggatcacttgagcctgggaggcagaggttgcrgtgagccaagatcccgccattattctgctctcattctatgagttc

SEQ ID NO: 396335 - DNA, 408 bp, Homo sapiens
acattgaggaaatgctcaaggacattagtctggacaaagatttcctgagtaagacctcaaaagcataggcagccaagggcaaaaatggacaaatgagattacatcaaactaaaaaagcttctgcacagcaaaggaaacaaccaacaaagtgaagaaacaatccatggggagaaaatattttcaaagcccatctggcaagggattaataaccagaatatagaagaagmtcaatagtaaaaataaatgtgatttaaaaaatgggcaaaatatttggatagacatttctgaaaagaagacatacaaatggcaaataggcatgtaaaaaggtgctcgacatcacttatcatcagagaaatgcaaatcaaaactacaagtagtcccagctactttggatgctgaggcaggagg

SEQ ID NO: 396336 - DNA, 408 bp, Homo sapiens
acattgaggaaatgctcaaggacattagtctggacaaagatttcctgagtaagacctcaaaagcataggcagccaagggcaaaaatggacaaatgagattacatcaaactaaaaaagcttctgcacagcaaaggaaacaaccaacaaagtgaagaaacaatccatggggagaaaatattttcaaagcccatctggcaagggattaataaccagaatatagaagaagctcaatagtaaaaataaatgtgatttaaaaaatgggcaaaatatttggatagacatttctgaaaagaagacatacaaatggcaaataggcatgtaaaaaggtgctcracatcacttatcatcagagaaatgcaaatcaaaactacaagtagtcccagctactttggatgctgaggcaggagg

SEQ ID NO: 396337 - DNA, 590 bp, Homo sapiens
ccagtgagctacacagccgcaaagaaatgatgtcacctaggaggtgaggaaccagtcctgggaaaaaccctaggatgccctctttctgatagatggtyatgaagtcacaaagtccacagtacttaggtcctctgccaatgaattgtaccacaggtctcagagtgatcacatggaagggatatgtgatgaggatagcagcagaatgagccatcatctctcaagctgtctccttgataactcagtcaaaggaagatgagacttccttatgcacatttccaggtcctcatcacactcctgggaatgctgtaaaacttttccatgggccacagtttgaaggcctcccgaacacagtcttggagttaagcctgtgaaaaacccatacctctcattgatactggcaatgtgttgagtgtaacaaaagagaccaggaagttgaaatacttgccatccaaaaatattgcatcctatttttggaggaagaggcttatatcccgcatgagcagctgggacaggatggtgagaccagaaccaaggaggacttgacttgtgtctgccatgatggcacctgctgcagtctggctttattttta

SEQ ID NO: 396338 - DNA, 590 bp, Homo sapiens
ccagtgagctacacagccgcaaagaaatgatgtcacctaggaggtgaggaaccagtcctgggaaaaaccctaggatgccctctttctgatagatggtcatgaagtcrcaaagtccacagtacttaggtcctctgccaatgaattgtaccacaggtctcagagtgatcacatggaagggatatgtgatgaggatagcagcagaatgagccatcatctctcaagctgtctccttgataactcagtcaaaggaagatgagacttccttatgcacatttccaggtcctcatcacactcctgggaatgctgtaaaacttttccatgggccacagtttgaaggcctcccgaacacagtcttggagttaagcctgtgaaaaacccatacctctcattgatactggcaatgtgttgagtgtaacaaaagagaccaggaagttgaaatacttgccatccaaaaatattgcatcctatttttggaggaagaggcttatatcccgcatgagcagctgggacaggatggtgagaccagaaccaaggaggacttgacttgtgtctgccatgatggcacctgctgcagtctggctttattttta

SEQ ID NO: 396339 - DNA, 536 bp, Homo sapiens
tctgtccttccaccccatctctggcctcccctccttaaagatasccactaccttagaatttgcacttactggatagagtttagacatttcttttttttttttttttttttgagacagagtctcactgtgtcacccaggctagagtgcaatggtgtgatctcggctcactgcaacctccgcctcccaggttcaagcgattctcctgcctcagcctcctgagcagctgggattacaggcgcccaccagtatgcctggctattttttttttctttttttttttttttggtatttttagtagagacaggatttcactgtgttggccaggctggctagacatgtacggatttcagatccgtacatgatgctgtgcatgaagggaagctggtatattcacagagaggtagcttagttttcagggtttattttgttgtggctaatagacctagacatctgtggctgtgtttgtttccatacatgggcatggcctacgcataaatggaattcctcctgaagaggctgcagagcacagggttatg

SEQ ID NO: 396340 - DNA, 558 bp, Homo sapiens
atgagctgttcttccaaatatgaccctaactcattcaacagctggaggcaagagcaaactagagctcatgcaaagggtattagcattgagtcttttttttccccctctttctctcagactaatagrtatttggaaaattcatctaaaaaccttttttaaaaaaatttcattcataaaaatagccaaggggtttctcagagagtttccttttagcaagtcttttggaaggaataaatgtctactttattatttttccttcctgtgcctgacctcggagaggattagagggtctgggcaaggagaggagcctcacacccagccacccacacttttccttctgacgagacccaccgccatgccatgctctgtacaagttctctggaggaacataagagccaccttatgtgtgagggaataagaccatgctttgaagagccagactttctccttttacttgctcttgaaattgttttcactctgatctgcaagtcaaagaaatgatctattatacatgtagggacctcaaaatctgtttgactctgtgcaaataaggtacag

SEQ ID NO: 396341 - DNA, 558 bp, Homo sapiens
atgagctgttcttccaaatatgaccctaactcattcaacagctggaggcaagagcaaactagagctcatgcaaagggtattagcattgagtcttttttttccccctctttctctcagactaatagatatttggaaaattcatctaaaaaccttttttaaaaaaatttcattcataaaaatagccaaggggtttctcagagagtttccttttagcaagtcttttggaaggaataaatgtctactttattatttttccttcctgtgcctgacctcggagaggattagagggtctgggcaaggagaggagcctcacacccagccacccacacttttccttctgacgagmcccaccgccatgccatgctctgtacaagttctctggaggaacataagagccaccttatgtgtgagggaataagaccatgctttgaagagccagactttctccttttacttgctcttgaaattgttttcactctgatctgcaagtcaaagaaatgatctattatacatgtagggacctcaaaatctgtttgactctgtgcaaataaggtacag

SEQ ID NO: 396342 - DNA, 590 bp, Homo sapiens
ccagtgagctacacagccgcaaagaaatgatgtcacctaggaggtgaggaaccagtcctgggaaaaaccctaggatgccctctttctgatagatggtcatgaagtcacaaagtccacagtacttaggtcctctgccaatgaattgtaccacaggtctcagagtgatcacatggaagggatatgtgatgaggatagcagcagaatgagccatcatctctcaagctgtctccttgataactcagtcaaaggaagatgagacttccttatgyacatttccaggtcctcatcacactcctgggaatgctgtaaaacttttccatgggccacagtttgaaggcctcccgaacacagtcttggagttaagcctgtgaaaaacccatacctctcattgatactggcaatgtgttgagtgtaacaaaagagaccaggaagttgaaatacttgccatccaaaaatattgcatcctatttttggaggaagaggcttatatcccgcatgagcagctgggacaggatggtgagaccagaaccaaggaggacttgacttgtgtctgccatgatggcacctgctgcagtctggctttattttta

SEQ ID NO: 396343 - DNA, 478 bp, Homo sapiens
ttaaccccaaataagttcttcaacaataacagtttcattacaaataagggaagagaaagtgcccaaaatgagcattctcagtcactagatgcagaatcagaaagccacctgccagggctgttattgagtgaaattctgactttgaaaacatttggcctatacgagggattcttaatctgatatccatggaagaactttaggtaaagtctttgaatccctggaaattatatgaaaaattgtatatgtgttttttttttcttgggaaatggtggatakatttcttcaaatcctcaaagcaattctacactattggtggggcagtgaaaggaaatcacttccaattctacaattctgttttgtaaaagtagtcttacccttcacagaggtgcacccaagagaactgtgtgattgatttaatattaggggtgaatgaacataaacaattgaagaaaacttcaaggtttttagccttgtaact

SEQ ID NO: 396344 - DNA, 578 bp, Homo sapiens
tgtggtcaactggggcaaatattttaaccccaaataagttcttcaacaataacagtttcattacaaataagggaagagaaagtgcccaaaatgagcattctcagtcactagatgcagaatcagaaagccacctgccagggctgttattgagtgaaattctgactttgaaaacatttggcctatacgagggattcttaatctgatatccatggaagaactttaggtaaagtctttgaatccctggaaattatatgaaaaattgtatatgtgttttttttttcttgggaaatggtggatatatttcttcaaatcctcaaagcaattctacamtattggtggggcagtgaaaggaaatcacttccaattctacaattctgttttgtaaaagtagtcttacccttcacagaggtgcacccaagagaactgtgtgattgatttaatattaggggtgaatgaacataaacaattgaagaaaacttcaaggtttttagccttgtaactaagatgttcatacaatttttaaaaatctttaataaaagagaagcaaatttagtggaagataattaagtagaaataaa

SEQ ID NO: 396345 - DNA, 436 bp, Homo sapiens
ttctctcttgtttatttctcttaaatctatctgcttatctcagttctcaatccaaccacctgtattactacagcagcctctcaattacttttcttaacaaatctttttcccgttsaatctatcttatgagttgtatttataatgatctttccaaaatgcaaatcaagttagatctatatctaaaatccttcaatccttttccttgtctaagaaaaggctaaatttctagatgtggcctaaaaagccattcatgatgacaacctctggagagttagtccacatcttatttatctcgctatagtacagtgctcagtacatattagtgggatacataaataaatgaaagaacaaatttctggagaaaaagctatcacatgtatttccttagtgtcaaaagctaaaattaattttatgtgtctcttttataattatgtga

SEQ ID NO: 396346 - DNA, 464 bp, Homo sapiens
aatctgggctccacttggcccagggaagttracacagaataggtgagggatatgtgggtgttcattttactatatttttagattttctactggtttaaaaattatcagaagaaaatcttagtaaaaagaacaccaacagtggtgtttgaagttgtacaattttaaacaatctcaacaacactaacattgtaataattttgaaaaaacttttgctgatttaatagaaaaagttacacataattttttgatttcttatgaaattgaatcttttcacatttgttggggattttctttctgtttttgtgaagtctttgcctatgtttcgcctggagggtttatttcttaagagccacatgtatataaactatatttatacttcgattgatcaacaggtaacgctgaagcatatatctttatgtaagaatttcaaatatgataaagaaagtacacaaaccagtggaaaa

SEQ ID NO: 396347 - DNA, 577 bp, Homo sapiens
cattattggctgagtatattcttgtcaggataatccacttttagaggcttcatttacattagctatcactccagagagccatagtaacaggctgctgaattacccaagagaaattactcttgaaagcaatcattgtgaatgaattttcatcacttggtctcatcatttcatgctgttttgtctctttcctttttgcccctgataaaagatagkcataaagagggcttttgttatgatctcattttctttagaaaacttggtcttattaatcatagcagccagcttatggaggcaaccaaagcgtatctctctgtctctctctcacacacactctgtcacacacacacatacacacacagagtttttgaaatgcatttcaatttgtggggaacataaagactaatttacttccatctacgatatctcacacaaatttgcttttcatgtaacttcattggtacgaggaatatgtttaagtacaggggcttaaatactgtactgaatactactgtactgagtttgttttacattaccaacacacgcgcaacagttgaaatttaaaatttttggacaaaaa

SEQ ID NO: 396348 - DNA, 464 bp, Homo sapiens
aatctgggctccacttggcccagggaagttaacacagaataggtgagggatatgtgggtgttcattttactatatttttagattttctactggtttaaaaattatcagaagaaaatcttagtaaaaagaacaccaacagtggtgtttgaagttgtacaattttaaacaatctcaacaacactaacattgtaataattttgaaaaaacttttgctgatttaatagaaaaagttayacataattttttgatttcttatgaaattgaatcttttcacatttgttggggattttctttctgtttttgtgaagtctttgcctatgtttcgcctggagggtttatttcttaagagccacatgtatataaactatatttatacttcgattgatcaacaggtaacgctgaagcatatatctttatgtaagaatttcaaatatgataaagaaagtacacaaaccagtggaaaa

SEQ ID NO: 396349 - DNA, 629 bp, Homo sapiens
agcagccagcttatggaggcaaccaaagcgtatctctctgtctctctctcacacacactctgtcacacacacacatacacacacagagtttttgaaatgcatttcaatttgtggggaacataaagactaatttacttccatctacgatatctcacacaaatttgcttttcatgtaacttcattggtacgaggaatatgtttaagtacaggggcttaaatactgtactgaatactactgtactgagtttgttttacattaccaacacacgcgcaacagttgaaatttaaaattyttggacaaaaacgtagaataaataatatgttttttacttacctgtccataatgtatacctggctttatgaaagtgacatattgctcacacatcaactcagggtaggagaatatagaaatgtaaaataatatcttaagaagtaatttgctaaatcgtattctgttgttttgagaaaataaataaataatcagcttatttatttcagagttagtctccagatcacactcaattactaagtttagaaaacagataatagcacaaaggctgctagcagaattgtctgcggcaggtctgtaaatagaggaatgaaaggagcatttgttgaacatcctcaaa

SEQ ID NO: 396350 - DNA, 577 bp, Homo sapiens
caacaggtaacgctgaagcatatatctttatgtaagaatttcaaatatgataaagaaagtacacaaaccagtggaaaaggggtgaactggaaaatctggcaaattctctttcacacacaaataygtgagatttttttttaccatattgcacacgaagataaataccaaagttaatgctatgtgattaaaatgttgattgcaaattagtgtgaaatcctgaaaaagttaaaacaaattagataattattcattgatcttgggcttgaaaccaggactttgtgaaaaaaacaatggaagaaaaagcaaagaaaaaattggcaatatatttgattgcatacaaacttaaaaaaaatacataaccatcaaagagttaaaatccttattataaagggaactcttaaaatcaatacaaataataatgtcacaatagagaaatattaaaataaaaacctcaaaccacaaggaagagaattcagtaataaaagaagaaatctaaatgtcttaaaagcatatgagcagacacctttaaaaagagaatatagggtattagttcagctggcttatggcagtttgtgtg

SEQ ID NO: 396351 - DNA, 577 bp, Homo sapiens
caacaggtaacgctgaagcatatatctttatgtaagaatttcaaatatgataaagaaagtacacaaaccagtggaaaaggggtgaactggaaaatctggcaaattctctttcacacacaaatacgtgagatttttttttaccatattgcacacgaagataaataccaaagttaatgctatgtgattaaaatgttgattgcaaatwagtgtgaaatcctgaaaaagttaaaacaaattagataattattcattgatcttgggcttgaaaccaggactttgtgaaaaaaacaatggaagaaaaagcaaagaaaaaattggcaatatatttgattgcatacaaacttaaaaaaaatacataaccatcaaagagttaaaatccttattataaagggaactcttaaaatcaatacaaataataatgtcacaatagagaaatattaaaataaaaacctcaaaccacaaggaagagaattcagtaataaaagaagaaatctaaatgtcttaaaagcatatgagcagacacctttaaaaagagaatatagggtattagttcagctggcttatggcagtttgtgtg

SEQ ID NO: 396352 - DNA, 629 bp, Homo sapiens
gatggtagtaacttctgtttatgttggtttctgtttattggtttgctttttattttgaactcgtttgacttcaggttccagatttgtttttttctttgtaaacgagactttgacattgttagcaggcccatctgtttgcttttcttaaataaaatgtaaattggtttttgttttaaatttcaggtgcttttaagtttgactctgctattcatttcctawggtagtttgggcatggtagtgctggtaagaacagagaaatcttgctttatagaatctttttgttcaaatgaatgtacatttttagtattcgaaaattatcagttttaataggtttgattttcctgtctataatctgtgttttcttccttattccctcattctttcctatcccatgggctcagatttatgctctgatcaaatttcttttcatatctttccacctcacaacacacacaagaaacctaatacaagccactatctgtttctttttcaatggaaaagaaaaggattcctatgggatcatactgattcctgtgggccccttgcataaaagattgtagtgcattaaataatgaccctccattggccaatcaatcattattgagcacctagtttatgtggaatactgt

SEQ ID NO: 396353 - DNA, 629 bp, Homo sapiens
gatggtagtaacttctgtttatgttggtttctgtttattggtttgctttttattttgaactcgtttgacttcaggttccagatttgtttttttctttgtaaacgagactttgacattgttagcaggcccatctgtttgcttttcttaaataaaatgtaaattggtttttgttttaaatttcaggtgcttttaagtttgactctgctattcatttcctaaggtagtttgggcatggtagtgctggtaagaacagagaaatcttgctttatagaatctttttgttcaaatgaatgtacatttttagtattcgaaaattatcagttttaataggtttgattttcctgtctataatctgtgttttcttccttattccctcattctttcctatcccatgggcycagatttatgctctgatcaaatttcttttcatatctttccacctcacaacacacacaagaaacctaatacaagccactatctgtttctttttcaatggaaaagaaaaggattcctatgggatcatactgattcctgtgggccccttgcataaaagattgtagtgcattaaataatgaccctccattggccaatcaatcattattgagcacctagtttatgtggaatactgt

SEQ ID NO: 396354 - DNA, 628 bp, Homo sapiens
ttcttttggttagtgtttgcatggtatatcttttgccattcttttattattaattttaaaaatccacttggtaagtactatatttcaggcagtatatagttgggtattgccttttaatccaatcccgccagtatctgccatttaattcaagtgtctagactgttaacatgcagtgtagctattgatactgttggttttaaatcttctatattggttatttgttttctatttacttgtcttctctttgttttttattcctctctccctgttattatttttattagttatttttattactttattttatttttactattgtcttgttagacataactatttttagtggttcttctgaggtttacagtacataygcattttaaatttatcacagttcaccttcatgtaatattatacgacttcactcatggtatatggaccttgcatcagtatccatccatttcctatttaaccttttgtgctaggttgccatgctttttacttctatgtatgacacaaactccagaatttgttcttttttgtttttaactttaaagagttattcatctcttaaagaggctggaaaagaataaaaaatctgttctacatttatctacatattattcatttc

SEQ ID NO: 396355 - DNA, 557 bp, Homo sapiens
atttattttaatatttgtttaagtgcacacttggtgattatgagtcatctcctccttttgttgtctgaaaatctgtctttgacttgatttttgaaagatattttcattgtataaacaattcttgattaacttttttttcatttttatattttaaagatgyctattattatttggcttaaatagtttctgacaaaaaggatggcattattctcacctttgttccttgccatgtaacctatcttttttctctggttgctcttaaaaaatgtttttttcactgttcttcccactctcctgccaattttactatgatttttcttagcttcctttattgcttaaaagcctttcttctgcttgaggttcatggaaattcttgagtctttgggttatcattttcatcaaattttggaacttttagtcatcattatttcaaaatattccattctccacttctcctcctgaacttcaattacttgtaggttataacaattatattttcccatatctcactgattttctgggggttttttgtcttttttttttttactctcagtgtt

SEQ ID NO: 396356 - DNA, 578 bp, Homo sapiens
tagtttttttttgtttgttttttgtttttctgaaacacagttatttggaagcaattggatcctatcctgtaagctttgttaggatgggtccagaatagtctttagcctaaggctaatttatcctcaytactaacacagggctcctctgaatattctacccaatgtttattggattatgacaatttcctttccttcttttgggatcacaaactaattgcagccctgtgtgagggtccatgggtttttcacttacttttttctgatatttctttccccagtctcagatagttgcctcttgctacggtttgagtgtctcctccacaactcatgttggaaccttaattcccagtgcagcaatgccaggagatggaactttaagatgtggaatctaatgggagacatttgggtcatgagggttctgccttcatgggaagcttggtgcgattctcacggtggtcagtgggttcttactctcacaagattgtgagaagtgccatcttgctctcacaagattgaattagctctcacagggatggattagttcttaggagagtggggtgcctcttgtgtttgatctc

SEQ ID NO: 396357 - DNA, 578 bp, Homo sapiens
tagtttttttttgtttgttttttgtttttctgaaacacagttatttggaagcaattggatcctatcctgtaagctttgttaggatgggtccagaatagtctttagcctaaggctaatttatcctcattactaacacagggctcctctgaatattctacccaatgtttattggattatgacaatttcctttccttcttttgggatcacaaactaattgcagccctgtgtgagggtccatgggtttttcacttacttttttctgatatttctttccccagtctcagatagttgcctcttgctayggtttgagtgtctcctccacaactcatgttggaaccttaattcccagtgcagcaatgccaggagatggaactttaagatgtggaatctaatgggagacatttgggtcatgagggttctgccttcatgggaagcttggtgcgattctcacggtggtcagtgggttcttactctcacaagattgtgagaagtgccatcttgctctcacaagattgaattagctctcacagggatggattagttcttaggagagtggggtgcctcttgtgtttgatctc

SEQ ID NO: 396358 - DNA, 526 bp, Homo sapiens
agttttgcagtggcagaaatctgaaaaatggcatagaacagatctctccaaagagattttcaaactaagatgaggactaaaataagcaatccattagatcataagatctttgagtgagaggagcccatttgatatatttaattaaaccccaacacccatcccccatgcctgcacatggtagatgttcagcaaatatttaataaatggaagcctaaatatttgggaataataacagcctttgaacaaatgagcttgaaaatgccaccaccaggtattctttcttatagaattgttcccttacaacacacattaaaacattctaggagacctacagttaaaaacaaaacaaaacaaaaaacaacaaaaaaaamccctacttacttatttatttattttactttttgaggtagggtcttgctctgtcacccaggctggggtgcaatggagccttcatagttcacagcagctttaaattcctggactcagatgatcatcacacctcagcctcccaagtagctgggactac

SEQ ID NO: 396359 - DNA, 588 bp, Homo sapiens
tctacctgtgcctcagatttctctgtctaaaaatacagctttggatcccattgactataaaattcctagtacctctaaaaatatttcattttcctcctggggattttttttttattatacagcatacttttcccatctctaacccaacacacagattttaacatttttgaaattagattgtttcacaattagaacacaaattaaatttaatcattttttctcttttttcccttcttctcctcctcttcccctttctcttcctccccttctttctcctcctccttttttatcctgcaaagttgtcattaaattgataatgtatctcagaattaaagaaaaacacaaaactcaaacataaacaacacaaccactaccaccacaaacaataactaacctgtcccaaaggcttggttgatrtgtaaatagatttgcatactgaaattggagaaagagaattttcaagtgttattactacttaatttcttttgagttcaggccctcttccaaggaataaatcataatttatctgtagcagctatgatccctgggtttccctggccaagggtgacagcactgtatcagaaacaa

SEQ ID NO: 396360 - DNA, 543 bp, Homo sapiens
atggcctgaaagaaaacctgcaaaagtttgaactaattaagaacaggtgctgaaaaagcaggactatgaaatctgacctcagcaagaactttgggagagagattaatacaagaagagattctggggcttgagatggggagaagggagcaaccagccctaatgcagatcagcttctacctacataaagtagaaatacaaggacgagtcttagctttcccttaaggcccagagtccagaccctgaaagtcaagatgtcctagtagccrgagggagaattagcagaatgggagtcaagcttgatattcaagcttgagtatcatgagacacagcagtgctccatctgctctgtgaatctgtatcttctggggtcatagcatgtgctaagtgctttatatatgttatcccatttaatatgaagaattaggtttatgaaataggctttattatttccagtttcacagatgaggacactgagattctggggagttgagtaagcctcctaagtcacctaattataattgataaatgtcaccttctaaatgg

SEQ ID NO: 396361 - DNA, 614 bp, Homo sapiens
gtgagccaggaactgccatgtcctcaccaaggagagaaaagctgatgtgcatagagaagcacagatagacagtgctgagcaatggttcaggaagagtatcttcctcctgtacccctctttgtttttccttaagaagcttgagttagatttgtcccttgcaatccaagtttatttagtggctaaaaattaattttgtagagacttgggtggaaaagctgtctcttaacttaatagacctgaggtgaggcactaaacctagttaggccccagttccctcactgataagtggggatatggtgtggatgaaatgagattatgaacataaagcatttagcacatagattgtgtacagtaagawatagctgttattagggcaagtgagaggagaaaagcaattagactgacaagaagcccccttcacatccctttaaccaccatggctctgtactcctgtcacaaggaagcctgggatttcccttaaaacatatcacaaagaaaaacggagcatgaataaatgtggcaaagtcttgataactgttgagcagatgagaattcatctattggtctttttaaaattttttatgatcttttttaaagaaagatctgttgagatt

SEQ ID NO: 396362 - DNA, 540 bp, Homo sapiens
tcctatctgtcctaccacatatcacaccctgctattacgctagtcaatgctgccctggatagaactgtgatagggggtgggaggtgtcataagacagagacttaatcagtttatttagttcctcaactttagcttatgaggcattcttcacattgaaggaatgtgattcagatttgrgggctgtgggaagctactgagcagattcagcataagttaccacatgtcagctctgcagtcttaaaaattatacaagttgctttaagtttctcctttaaagtactcatggaagtcatcatcttctccatcattttcatcaatgtccttagtctttattgattattttgctgggggtggtatgatcttactcatttgttaagtaagtcaaaaaatcttatttttgactagactcagaagtagaagcttacagaggggacaacctgtgtctctggtaacctgctcctggagtttttctttagtctccttcattctcttggccaaaagtttaacatattttgtggctctttcttatttttcttagta

SEQ ID NO: 396363 - DNA, 540 bp, Homo sapiens
tcctatctgtcctaccacatatcacaccctgctattacgctagtcaatgctgccctggatagaactgtgatagggggtgggaggtgtcataagacagagacttaatcagtttatttagttcctcaactttagcttatgaggcattcttcacattgaaggaatgtgattcagatttgggggctgtgggaagctactgagcagattcagcataagttaccacatgtcagctctgcagtcttaaaaattatacaagttgctttaagtttctcctttaaagtactcatggaagtcatcatcttctccatcattttcatcaatgtccttagtctttattgattattttgctgggggtrgtatgatcttactcatttgttaagtaagtcaaaaaatcttatttttgactagactcagaagtagaagcttacagaggggacaacctgtgtctctggtaacctgctcctggagtttttctttagtctccttcattctcttggccaaaagtttaacatattttgtggctctttcttatttttcttagta

SEQ ID NO: 396364 - DNA, 540 bp, Homo sapiens
tcctatctgtcctaccacatatcacaccctgctattacgctagtcaatgctgccctggatagaactgtgatagggggtgggaggtgtcataagacagagacttaatcagtttatttagttcctcaactttagcttatgaggcattcttcacattgaaggaatgtgattcagatttgggggctgtgggaagctactgagcagattcagcataagttaccacatgtcagctctgcagtcttaaaaattatacaagttgctttaagtttctcctttaaagtactcatggaagtcatcatcttctccatcattttcatcaatgtccttagtctttattgattattttgctgggggtggtatgatcttactcatttgttaagtaagtcaaaaaatcttatttttgactagactcagaagtagaagcttacagaggggacaacctgtgtctctggtaayctgctcctggagtttttctttagtctccttcattctcttggccaaaagtttaacatattttgtggctctttcttatttttcttagta

SEQ ID NO: 396365 - DNA, 335 bp, Homo sapiens
accattgggcttttctatggggtgttctggctgagttcattaggcaacctccaaatgttaatattaatattrtcatggtattcttctttctccacttcttcctcctcccttctccctttcctttccttctccctctcctctcctttcccctcctccccagcacccctcctcatcattctcctcctcctattttccctcccctcctccttctcattgcttagtccattgtctagagcaagaaccctcccagcatagtgactcatgcctataatcccagcacattgggaggccaaggtgggaaaatcacttgaggccaggagttagagaccagcctg

SEQ ID NO: 396366 - DNA, 607 bp, Homo sapiens
ccaaacaaattaataaacctactgtactgggaattttatttttgagaaagagcacagtccttttggaaaaraaagaatattttccaacaactgagaaataatgaatagcaacaaattttataattataaatacaagtgtcacagaagtttgagagacagtgctatctcagtgccaaaaaacagaaaatgatagcaggattctgtaaagtggcacagtgctggcagctttgtagcatggagcaaacaaagacatcagacatccttgaacacaactagttgtaacacatgttgaaggaggcagttgcacccttcccctggcgtggctgctatggatgcatacatgtgaggggatgtagggagtcagggagcccagcatgtttcaccaactccgcactaccccggccccagcactgtgatctctcacctgggttactgcaatagcctcttccctgccctcgttcccctacagactattctcaaaattggatcagagcactcctttgagaattattggaaaagtaagtgaaaaaatatctcacatagtagacctaaaagacacggagaggaaaaataagagagaaaaaaacgagaaaattagaggaactgt

SEQ ID NO: 396367 - DNA, 609 bp, Homo sapiens
gtgtatgcataagatctttatgccttcttttctctttccagaaaatagtccctttccaggccaaaaggacctgaattctgtttacttcttctgggctgtgcaaaagcacactcaagtgaatgactaaaaatgcaaccrcagtgcatgttgcagataccggcggccgcaggaggggcagcatccagtagaggactggtcattggagtccactgctgggaaacacgttgcagtccagcgcacaattgctatctatccatagaccattcttgaccaagcaagcatgcacattatgggcagttacattctcaagtttttaaaatcaaggggaacttgtatactgggcctgtttttcagcctgtttgctaccttttttgcattctatcccatgtgaattttacagacactgggctaaaaagggtattcagacacatggacacacattcctagaatgtcatcatatggtcctaattccatgtcaccaacaacacagacaagaccctgtttacaactttttctttccttttttttaattttagacctttctgagaagattattatatatgacatatctatagctatgtgtatggccatagatgtatttctgtgtgt

SEQ ID NO: 396368 - DNA, 644 bp, Homo sapiens
tcatttagtactgtctcttggttatttttctccatttgggaagcattgcaccatgacttcgaagatacacttgtatatctactagttaaatgtcttccactttagacttgcaccagcaacatccagaaaggccagtgaacatggcttgggaagcataggaaactgtcttttgtccctcatatatcttcagggctgacttcagatccaaatgacttcaactgtgactcagttagagaggcagattttcatattatagaaagagagctcctggttygtacagcaaaacaaacaaacatgcacaagattaggctgtgtgaacttgactcagtagacattcccacatggggtactgaggtgctggaagcctgtctactaaaggtgcactggtgggcatggaatctaaagggggtgtctgtgagggccatcctgggtcccagcagcaggtggttccatggttatgctgccccacactttcttggctgaaccaaattttctgcctttcattttgttccttacaaaatgtccttctttttggtgactgttaacatacttcttcacagtgcaggtgagtcatttttcaaaaaactttgtgggcatttatgaaatagctttggggatagtgaggaaaacatttgtttggagat

SEQ ID NO: 396369 - DNA, 548 bp, Homo sapiens
gtttaggtctttttaaattatcttcaaygatgtttggcagttttccatgtataagtcttacaattcttttgttaaatttattcctaagtattttattctttttcatgctttggaaatgtaattgttttcttaatttcattttagaatgcttattgctaatagaaagaaataacagtagatttttgtggattccttagtattttctatatagaagaccacgttatctatgaatagaaatagttttacttcttcctttccaatcttgattacttgtatttaattttctttctaattgccctggctagaacctccagtacaatgctgaatagaaaaactaagagtagatctctgggagaaagcattcaatctttcatcatcaactatgatgttagctgtaggttgttattactgtaaatgaacaatatcaggttgagaaagttctcttccgttgcttgttttctgagtgtttttatcatgaataaatttaggattttgccaaatgtattttctgcatctgttgagatgatcatgtgggctttgtcctttat

SEQ ID NO: 396370 - DNA, 548 bp, Homo sapiens
gtttaggtctttttaaattatcttcaatgatgtttggcagttttccatgtataagtcttacaattcttttgttaaatttattcctaagtattttattctttttcatgctttggaaatgtaattgttttcttaatttcattttagaatgcttattgctaatagaaagaaataacagtagatttttgtggattccttagtattttctatatagaagaccacgttatctatgaatagaaatagttttacttcttcctttccaatcttgattacttgtatttaattttctttctaattgccckggctagaacctccagtacaatgctgaatagaaaaactaagagtagatctctgggagaaagcattcaatctttcatcatcaactatgatgttagctgtaggttgttattactgtaaatgaacaatatcaggttgagaaagttctcttccgttgcttgttttctgagtgtttttatcatgaataaatttaggattttgccaaatgtattttctgcatctgttgagatgatcatgtgggctttgtcctttat

SEQ ID NO: 396371 - DNA, 534 bp, Homo sapiens
gtacaatgctgaatagaaaaactaagagtagatctctgggagaaagcattcaatctttcatcatcarctatgatgttagctgtaggttgttattactgtaaatgaacaatatcaggttgagaaagttctcttccgttgcttgttttctgagtgtttttatcatgaataaatttaggattttgccaaatgtattttctgcatctgttgagatgatcatgtgggctttgtcctttattctattaatatgatatattgcactaattaatttttgtatattgagccaactttgtattcctgggataaaccctacttggtcatggtatgtaagtctttttctatgttggtagattcagtttggtggtattttgttgaggctttttgcatctgtattcatttgtaagagatattggtctgtagttttcttgtgatgtcttggtctggttttgttatgaggataatattggcctcataggataagttgaaatgtgtcccttatcttctgttttttggaaaaggttgtgcaggattggtgtt

SEQ ID NO: 396372 - DNA, 540 bp, Homo sapiens
gcagtcatgtaaaaaaaaagtatgcaaacagcataggtatgaatgatcacctccacaatattaccagtggttacctctgggtggtaaagtaatgcacrtttcattttcttgcctatctatattttctaatctaggatcacccaaccatgtattatttctgtaataagaaaaaaactgataaaagttattatttttaatatacatactccttgaaggggcaattttatatctaggaattcatcttaaggaaaaaactgtaagcatgcatgcaagatttagctatagtaatgtttattgcaaggttgtttctaatagtgaaaattttagaaataactcaatttctagtgttaggggattgggaaaataaattttaatatattcatagattataaaactaggtaggtaaattaaatatttaatgatcttgaaaatgttcataatatcttaataggttaaacaaaacaaacaggttacacaacacgtattttcataccctttgacccagcaaattccacttctacgaaatactaacacaaagaa

SEQ ID NO: 396373 - DNA, 516 bp, Homo sapiens
tcaggcaaaattcatcagcaactaaacatgaatgttctgattctcaagacctttgcaaaataaaggctctgatttttttttttcaactaaatgtagaacatttctttcaacccccaaatccacctttgcagcccaagtcagtccacgttgcactgtttctgcagcatgtcagagcctctggcttctttcctctctcccccttcccccaattaatctctgaaacctacataagaatggaataaaatgcaaattcarggagaaggatgcagttttcagagaaggcctcatcctcctcctaccctataatggaaattcccttatggttaaacaacaaaaatggaaatattaaaaccctcagctgaaaacaaacacttaagcacctattctcctttccagagaatctgtttccctcaatcattatttttccactcttttgagagccttctaggctgaaagttgtttcatctcacccatcttgggtctctcctaggtctcatttctgccttcaccaggctt

SEQ ID NO: 396374 - DNA, 593 bp, Homo sapiens
tgtttctgtatgagttaccaaatgttattttatattttagttactttgggttcatgtttttaaaaataactttattgatatatacttcatatattttcctatcatacaatttacttacttaaagtgtacagttcaatgattttttagtagtatattcatagttgtacaaccatcaccacaatgaattttagaacaatttcatcctgccaaaaagaaaccctgtactcattagcaaccactgcccattctcccttccctctagctctcggcaaccactaatctactttctgtctctaaagatttgcctattttggaggatttcatataaatagaatcatacagtaggtgttcttttatgactggtttctttcacttaygtgtcagaataatgtttccaagattcatccatgttgtaacatgtatcagcacttcatttctttttgttgctgaataatgttctattgtatgtaaataccacattttatttatccttcatcagttggtagagatttggtttgattctattttttgactatgatgaaaaatgctgttatgaacactcatgtgtaagtttttgtgacgacgtatgtttt

SEQ ID NO: 396375 - DNA, 602 bp, Homo sapiens
tgcctctgctccagttttgtgtatgaagcccacaaaacccccaatccttaagacaagtgccgtataattccaacaatcacaatatttcaaagtaccatcaatggatagatgccacttgtaatactgacactatttggaagatcttattgctttgaatcatttaaaacaaaaaacaaaaaaaactaagctcaagagagcagtgtagtgtagtggaaagaacatagactttggagccacacagccctaaggctgaatttctaattagcctttcactctctgtgatagcagactttactcatcatttttgagcttgagttccctcatttctaaaatgmggataaacattcttatttataaatgtggcgataagtagaattacattttttaaggtttgtgataaaaggtgtttgataaataaaaattccttttcaactaaaacttaatatttacaaatatattcagtgtttcaaaagatatagagtacctgtacctactgtggagcaggcactgttaggggatgggtatataataataagacagttcttttcaaggactttacaatttactctaattattcaaaaaataagtccactaactaagag

SEQ ID NO: 396376 - DNA, 390 bp, Homo sapiens
gtaattaccatatagatgaggaaattgaggctcaaagaggctaagtgagttttctatatcacacagctagtaattggcagactggggaagaactcccagattttcattcccctggcccagtgccyttttcacccacagcatgtgttgtcttccaggaattctcttttgccaaagctttctctcctctgcttccccatccactcaactctcagcaccccctgttatttccagtggacaacagctgtccagagcagggcttcgacgtagccctcactggccttcacattctgttgttcataataaaggatgatgcaggtggtatacagttgtaagtggggggaagtttggatggacctagttggtgagaaagggagaaactggagaaaatca

SEQ ID NO: 396377 - DNA, 601 bp, Homo sapiens
acggtagcctttgtgaagtagatcttattgtaattaccatatagatgaggaaattgaggctcaaagaggctaagtgagttttctatatcacacagctagtaattggcagactggggaagaactcccagattttcattcccctggcccagtgcccttttcacccacagcatgtgttgtcttccaggaattctcttttgccaaagctttctctcctctgcttccccatccactcaactctcagcaccccctgttatttccagtggacaacagctgtccagagcagggcttcgacgtagccctcactggccttcacattctgttgttcataataaaggatgatgcaggtggtatacagttgtaagtggggggaagtttggatggacctagttggygagaaagggagaaactggagaaaatcagaaatctagtagcataaaaactgtaatattctcatttattcatgtattatttcagctcatctttgagtcaagagagctgctttattgattttttccccttcagcttcctaaagttaatgaaagtatcctttattatttttctgctctagttatttctcacataagcagcaaaatctctctgt

SEQ ID NO: 396378 - DNA, 520 bp, Homo sapiens
gattcccaagaacctatgccacattcccctcaacacatctccatctcctccagcagtaactcacttttacaggctcccttctgaaagctataaggccctttgggaaagtagctcttctctaggacattctcacaaccaggcatctaagaaagcttgatcatgactgacagacacaaaatcccctcttcccagacactctggcagtgyctaacaggagaaaacaggtttcattttctactttttgatgattatcagagtcttacatgctgctgtcttcaaagggagactgcctcctcctaggtcagcagctgcctgttggtgagaggtctgatatctcaaagagactgttatgaaccaatgaaatgctccccagcccagctggcatttcttacatcaaaattgttcaaaaaccaaattgaattagaatttgaataaggccaaaatctgactttcaccataaccagtgatgtagtcactgtttcttaggtgaaagcgtaacagaatgaagaaagaaagaccc

SEQ ID NO: 396379 - DNA, 520 bp, Homo sapiens
gattcccaagaacctatgccacattcccctcaacacatctccatctcctccagcagtaactcacttttacaggctcccttctgaaagctataaggccctttgggaaagtagctcttctctaggacattctcacaaccaggcatctaagaaagcttgatcatgactgacagacacaaaatcccctcttcccagacactctggcagtgtctaacaggagaaaacaggtttcattttctactttttgatgattatcagagtcttacatgctgctgtcttcaaagggagactgcctcctcctaggtcagcagctgcctgttggtgagaggtctgatatctcaaagagactgttatgaaccaatgaaatgctccccagcccagctggcatttcttacatcaaaattgttcaaaaaccaaattgaattagaatttgartaaggccaaaatctgactttcaccataaccagtgatgtagtcactgtttcttaggtgaaagcgtaacagaatgaagaaagaaagaccc

SEQ ID NO: 396380 - DNA, 642 bp, Homo sapiens
tataggaatatatagttgtaagatttatggtagtttaaatttaccatctagataacaagactttcacctagtgacagcctctaacaatgtttctgagagtttaagaattacaagacagtgctatcttacatattgtgcaaatacacaaatacctagaaactatttgctatttatatgcatgatgtatatatagataaaataatgtttatgatataacttgtttaaactatggaaaatgagtcagtattagaaatcagatttaattttggaatttctccccctaattctataaaaatatagtactcattgatagcctcaatagaatatattaacagatatgtactagatatcagttggaaaatatattcaatggcagtatttatgggtaattaacaatgaatatatttttctatattttaaaacatattttgatattttttacctagataccatgttttttrtatgtccagtttttgttttgttttgttttttgagacagaaccttgttctgtcacccaggctagagtgcagtggcaggatcttggctcacttcaatctctgccttctctgctcaagtgattcttgtgcctcagcctcctgagaaactgggattacaagtttgtgccaccacacccagctaat

SEQ ID NO: 396381 - DNA, 498 bp, Homo sapiens
tactgactagtatatgcgattgtattttctagcataaagttatttagttctagtaaccaagtgtaagctagctggttcctttctttccggctctgtagattatggtggttaaacagtttttccattaactgcctactatgtgtttacctttgtgttatttattgtggaagatataggtatgtagaagaatcaggtgtttttttttctcaaatagtttataaaattaaaaacgatgaaacatgatagtacattggtgaattatcttgagaatggtttatcttgggaatggtgaattatcttgggaatcaaagaagtttatgacagaatttttaaaaatgacattttaatagaatgagataagacatggtaatatgtgagttttgaaaagaaattcactcactaattaatttttgtaacaacataaaaccagttagtaaagaactgagtctaaayagaaataaaggcgtgtggcttgcctttacagatttagggtttatt

SEQ ID NO: 396382 - DNA, 568 bp, Homo sapiens
ggacactagaagatgataccaatcctgggtccagattattctccagccagtgagcctataagaaaatcagttaattaattacarcttgtttggagattgacttatcgcataaaattgaaggtagattctggctagcatgagcaaaaggcagatagaaggaagagattatagggaagtttagtaggtaaacttggctggagtggagaaatggtgttcaggagtagaggagtgcaatagcattagcactataattctaactgctagagataattggatgttaagattcttggataggtaatgtgaagccgccatatattcctgaggtgagaaagagtaacatgaggggcattcataaaggtgaataagagtgaagacatcctaagccaacttggaggttgtgtcacatatggttctaagttgcaagcaacagaaatcacttctgactgatttaaggggaagagtgtttacataagaaatgctagatagctcacaaaattgccacgaggtttagaggcaacagattcaagtctacacagccaaattacactacctaaatggactgtggaag

SEQ ID NO: 396383 - DNA, 568 bp, Homo sapiens
ggacactagaagatgataccaatcctgggtccagattattctccagccagtgagcctataagaaaatcagttaattaattacaacttgtttggagattgacttatcgcataaaattgaaggtagattctggctagcatgagcaaaaggcagatagaaggaagagattatagggaagtttagtaggtaaacttggctggagtggagaaatggtgttcaggagtagaggagtgcaatagcattagcactataattctaactgctagagataattggatgttaagattcttggataggtaatgtgaagccgccatatattcctgaggtgagaaagagtaacatgaggggcattcataaaggtgaataagagtgaagacatcytaagccaacttggaggttgtgtcacatatggttctaagttgcaagcaacagaaatcacttctgactgatttaaggggaagagtgtttacataagaaatgctagatagctcacaaaattgccacgaggtttagaggcaacagattcaagtctacacagccaaattacactacctaaatggactgtggaag

SEQ ID NO: 396384 - DNA, 619 bp, Homo sapiens
tctaaattagaaaattggaatgtgtgacaacatagcttgatatatgctaaaagcacaggtgtcagaaagatgaaaggtgatggttaaataacatgaaggttaatagtcaaggaatttgatagctttataagtaacacatattgaataaattgaacgtgggttaatcaatcattcaacatattctaagtgtgtagtatgtgcatgaaaatacactggatgctatgaaacatttttttaaaagcagttaatcaaaaagcattaacttggctccatttatgatttttatcattgtgaartgtagaattcagtatgtttcttcctacacaactctttccaactacaggaaaacaaaataggcagtaaaaaataaaataggcaatgattaggtacatacttaagtatttaatatttgctaattgtgagataaagacactgctgatgatgcagggcagatgagcaccaaaattggggcttagtctgggaggattcttggcttcactcaggaaacaattcaagagtgagtcagtggtggaagaaagcatgtccattgaagcagcagcagcgtacagcagagtgactacttcttgcagagcagggctaacccataggcagtgtgccc

SEQ ID NO: 396385 - DNA, 619 bp, Homo sapiens
tctaaattagaaaattggaatgtgtgacaacatagcttgatatatgctaaaagcacaggtgtcagaaagatgaaaggtgatggttaaataacatgaaggttaatagtcaaggaatttgatagctttataagtaacacatattgaataaattgaacgtgggttaatcaatcattcaacatattctaagtgtgtagtatgtgcatgaaaatacactggatgctatgaaacatttttttaaaagcagttaatcaaaaagcattaacttggctccatttatgatttttatcattgtgaaatgtagaattcmgtatgtttcttcctacacaactctttccaactacaggaaaacaaaataggcagtaaaaaataaaataggcaatgattaggtacatacttaagtatttaatatttgctaattgtgagataaagacactgctgatgatgcagggcagatgagcaccaaaattggggcttagtctgggaggattcttggcttcactcaggaaacaattcaagagtgagtcagtggtggaagaaagcatgtccattgaagcagcagcagcgtacagcagagtgactacttcttgcagagcagggctaacccataggcagtgtgccc

SEQ ID NO: 396386 - DNA, 580 bp, Homo sapiens
  misc_feature (1)...(580): n = A,T,C or G
tacacatcagggaaactagaaattgctttcagagcaatttgccacttctggctgttttctcattttatcctggcaggaccaanaaagaagccctactaatctacctcattcacccctcagagatatacactcctccttaagtttaagggagttgcaaagggcagaggtctctcttctgttactgtttcctgctgatcttatgggcatggrctctgcttagtgttggaagagcaaacatctctggatgcctgatctaaggggcctaaaggcaagatgtctttatttcctgggtcagaagatgggatgagttggaagtctggtgccagcatcttctttatatggaaactttaccatctggaagacacaaactatagtgagaggttaaacaagcaagggacaaaaattaacagtaacaagttaggtatcaaaggtcccaggaaaggtaaaagccagataagacttcagagggtgcttttgatagtcaaccagaaagttggggtcaattccctggttatagctatgtaaccaggtagcttgtcaacatacagatgttgacatttcatttgtaaactgtcatggc

SEQ ID NO: 396387 - DNA, 564 bp, Homo sapiens
ccagcgatggggaggggctgtaaatacagatgaagctttgctcacttagctgctgttcacctcctgctgtgtggctttttcctaacaggccatggactgatcctggtccatggcctgagggttggggatttctgctagaacgcaatttcatcagtttatcaaacattttgccaacatgtaccttccccaaattcctgaaaatttgtgacttttggagaatatgctgaaagaagcagctgcttcccctccacttgctgcagttctgtatacatgaaaatatgacataaaatagagttgcctttcaaatctgatcaattagaagtggctccctgggacattcagttcagaatgattgytacataaagcttgggttcatgtaacccaagggaaagattagtgacttttatcttggatttgaaagtggctatgacagaccatttgcttgttatccctggaaagggtgctaaatcagatatcaggagaccctgtgtatttcacggtgagcaggtctatgcaaacttaatcccaaagaggaaactgagaggccaaagaaaaaggctgaca

SEQ ID NO: 396388 - DNA, 489 bp, Homo sapiens
atgttctctttgtagaggtgtatattatatggtctgtaggatgataggctaaagtggaccaatgactagaaaataaaattagttgttatgcttcttcactttttaatttctttattttggatagatacacaatagatgtgtattttcataaatgattcagttttactttttaacttttttactccttattaaaataattttgtcattttttgatgggttgtgaatttaaatatgacaatgtttataatagtgtttcaagttgttatagatgtaagcagtgttattttctgtatttattgagattttaatcactggaaaattttaattagtaggatttttaaacagatgtactgttttgggtttctcctgttaatactattttgatattttaaacaatattgacaaaaatgtgatcttgcttcaaattgttttatggtacacattcccaaacacactaatctttraacatgtaaacatttgaatgtttgt

SEQ ID NO: 396389 - DNA, 280 bp, Homo sapiens
acatatgtcaaaacttcataaattgtatactttaaatatatgccctttcctgtatatcaattatacttcattaaagctgttaaaaattgaaaaaacagaaataagcattctaaaatgttaggattcactaattttcacttgaaccatttaactatttaacctgaaccatgtttgtactgaraatattttgctaatttgaattccaaagatatcacttatcaggtatatctttcagttttttacattaacaactctagtactgacaagcattagaattaaa

SEQ ID NO: 396390 - DNA, 603 bp, Homo sapiens
attttgctaatttgaattccaaaratatcacttatcaggtatatctttcagttttttacattaacaactctagtactgacaagcattagaattaaatatattgtcacatattttagtctaagtcctctaattcaaaattatcacaagcaattaacaataaattgaactaccatttattcattcaaaagatatttattaagtcagtctgcgccagcttcaaaagataaaaagataaataagactgagtctccaccatcaagaagtcatgctctactagggaagacagacatttatgaagataattttcaaaagatgtggcaattgcaataatagataaacgtagaagtgttttcaggcataacatgaccatggaggaagtatacctaatgaatctggggcaagaaatacaataaaggataagtaatgaaaggtttcttttcgcttcttctttttaaatagagatcatatcttgctatgttgcccaggctggttttaaactcctgggttcaagccaggagtttaatccttggcctcccaaagtgctggaattataggtttgagccactgcacccagctgtgaaagttttccagaggaaaatcttc

SEQ ID NO: 396391 - DNA, 603 bp, Homo sapiens
attttgctaatttgaattccaaagataycacttatcaggtatatctttcagttttttacattaacaactctagtactgacaagcattagaattaaatatattgtcacatattttagtctaagtcctctaattcaaaattatcacaagcaattaacaataaattgaactaccatttattcattcaaaagatatttattaagtcagtctgcgccagcttcaaaagataaaaagataaataagactgagtctccaccatcaagaagtcatgctctactagggaagacagacatttatgaagataattttcaaaagatgtggcaattgcaataatagataaacgtagaagtgttttcaggcataacatgaccatggaggaagtatacctaatgaatctggggcaagaaatacaataaaggataagtaatgaaaggtttcttttcgcttcttctttttaaatagagatcatatcttgctatgttgcccaggctggttttaaactcctgggttcaagccaggagtttaatccttggcctcccaaagtgctggaattataggtttgagccactgcacccagctgtgaaagttttccagaggaaaatcttc

SEQ ID NO: 396392 - DNA, 421 bp, Homo sapiens
ctaagaaatgagccaaaaatattaccaacatctaatgtcaacacaaagatagccaaaatactaatggaagttacattttctccttagcatattcagtgctttaagacrtgtctagggtattcatagtaaatcaaacaaaaacaatttcaaggcaatagagatagtatgtgcacagactgagctgggaaatagtgacggatgctcaatgaggtcacagaacaaatcaacacagctgccctactgactgttcactagccaccctggaagagccagaggtgccccacctagcacagctgccaaaccaaacttcagctgtgctgaagttcaagagcacagtcatacaatcaaaaaattttagctggaaaggcctaggaggtcatagagttcagtgtatacagatccataggttgctgctgcattt

SEQ ID NO: 396393 - DNA, 421 bp, Homo sapiens
ctaagaaatgagccaaaaatattaccaacatctaatgtcaacacaaagatagccaaaatactaatggaagttacattttctccttagcatattcagtgctttaagacatgtctagggtattcatagtaaatcaaacaaaaacaatttcaaggcaatagagatagtatgtgcacaractgagctgggaaatagtgacggatgctcaatgaggtcacagaacaaatcaacacagctgccctactgactgttcactagccaccctggaagagccagaggtgccccacctagcacagctgccaaaccaaacttcagctgtgctgaagttcaagagcacagtcatacaatcaaaaaattttagctggaaaggcctaggaggtcatagagttcagtgtatacagatccataggttgctgctgcattt

SEQ ID NO: 396394 - DNA, 421 bp, Homo sapiens
ctaagaaatgagccaaaaatattaccaacatctaatgtcaacacaaagatagccaaaatactaatggaagttacattttctccttagcatattcagtgctttaagacatgtctagggtattcatagtaaatcaaacaaaaacaatttcaaggcaatagagatagtatgtgcacagmctgagctgggaaatagtgacggatgctcaatgaggtcacagaacaaatcaacacagctgccctactgactgttcactagccaccctggaagagccagaggtgccccacctagcacagctgccaaaccaaacttcagctgtgctgaagttcaagagcacagtcatacaatcaaaaaattttagctggaaaggcctaggaggtcatagagttcagtgtatacagatccataggttgctgctgcattt

SEQ ID NO: 396395 - DNA, 631 bp, Homo sapiens
aattatatgacattatgcacaatcataaaacacagataatatttcaaggagttgttgttaattcagaagaccaaaagaactatagaaagacatagatacaagcaaaaaaaaagaagaaataaagagaccaagtatattcataaaattgttttaattttctaattttctctaagagagataatggggcacacatcatacttgctgaaccccattcacaacctgaattttaaaaaaaggaaaaaagcaaaataatgttatacaaccatatgattatgatgactaaaataataagacacataattacgttgcaatatttaaacacaaattggcaatgacctggcaatttaggagtagtaaagtcataaataaggaaaaagacatatccccatggatgaggtaggcagcagaaagcctcaggtaggttaaagttagtgagattaattccagcagrcagcaaatttcaactgttttctattcatccaggtagtactaagcaattatttttcatgtaattccattgttgccactatgtgttaggttctgttttcaaatttaaaccaacctattacatacctttattacaggaaagcttaaacgaaatgcatttgtgtaagagatgtagatacaaact

SEQ ID NO: 396396 - DNA, 636 bp, Homo sapiens
aaatatagtactgaaattacaaagatataatttgaaatgatagaatcctgctgtcaacacacaatattttaagcatgaaataatatttctgtattcactaaaatgcatcttttaaaaataatttagtaggttcttttaatattaaaaatttagttatagtgattatttttcacatagctgtagaaaaatattttgaaaataggattatggaagaattttccagaattgacaaagaacwtttttacaaaaataaaatttccgaaatgcacttgaagagctatactttaagtccaacttattaaagagaaaatgtcagcacaggatatatataaagcattttttaaaataatgtgacagcatcataattctctttgatttgtaaaagtaattgaacacattttctaccagtgtgaccactgatcttcagtgcaaatggtgagaaagattctctgcttggcatctctagtcaggcttctgattcttctgctaggcccatctctgcacttccttccaaatccagttgcagcaaacaactttgctaagtcagtttagcaagaatcttctaccctcaatatctgattatcctctctacttgatcaggttcctcatccttcatcactccttaggtgatgtgtg

SEQ ID NO: 396397 - DNA, 541 bp, Homo sapiens
gcatcttttaaaaataatttagtaggttcttttaatattaaaaatttagttatagtgattatttttcacatagctgtagaaaaatattttgaaaataggattatggaagaattttccagaattgacaaagaacatttttacaaaaataaaatttccgaaatgcacttgaagagctatactttaagtccaacttattaaagagaaaatgtcagcacaggatatatataaagcattttttaaaataatgtgacagcatcataattctctttgatttgtaaaagtaattgaacacattttctaccagtgtgaccactgatcttcagtgcaaatggtgagaaagattctctgcttggcatctctagtcaggcttctgattcttctgctaggcccatctctgcacttccttccaaatccagttgcagcaaacaactttgctaagtcagtttagcaagaatcytctaccctcaatatctgattatcctctctacttgatcaggttcctcatccttcatcactccttaggtgatgtgtgaccaccctg

SEQ ID NO: 396398 - DNA, 582 bp, Homo sapiens
catgcccttgtggtatgtgagaaaccaaaagtagtctgccacaatactcagggagaaatgagaggacataaaaaggtttgggaataaacgtgttcaagaacagggctatgtagttacttacagagcctagtaaatacttgatgcycattaaatgttttttgaactgaattgaactggtatataagccgtctaacaaatcattcccaaatgaggaagaattgttgctcaagaattgcctcccttatgaatgcagtaaggctgttttttttttttttttttggtttgttaatataagctttccttaagcaactctacacatattgctgaatccttcatttattctaaaatggctctgaatttacaaatagatggcaggacttttatatgctcaataaataatggagactttctctcagtgttgctgttatttaaaaaaatttctccagtagatattttggctaatgaataagaatctctcatcaaattaataacactattacattcactttcagatggtttaacagtggtctttggggtataataacatattgctgacttgggcaagctgccactggactgaat

SEQ ID NO: 396399 - DNA, 571 bp, Homo sapiens
tcaactaggtattatcacacttggaagtaggtagcaagccagtatttcttttgaccagcctcgggtacccagtgtagtaatttactaayggtgacataaaagtaattcttgggggagcacaaatcaatgatgaaagagtttttactgagtaaaaagcagtactgttattttctaaattgtctttagttatactctccagaggttgataataaaacatcatacattagatcaaagaaaaatagaaaaaaatttataaaattttgaggaaagaataaacaataacataaaagcaaatatactcctatgaaaaaagagcccaaatgtgaaataggatctacaatgtacaacttcatctattcatgtatacaaatattttcatttccctatagaaaagactacttaataactgtttagtaattagtcaactctcttgatagtgaaacaaataaaaacatacataatccttgattagattcatggatataactgaatataagcatttcatattttatgtcttgaattgggaattttatatagcaactggttttctattatagatatttttcatatg

SEQ ID NO: 396400 - DNA, 616 bp, Homo sapiens
tagtattctctctctctctatgtaatatatatcaatacttcattccttcttatttataagtagtattaaattgtatgtataccacaatttgtttatctatttacctgttgaaggaaatttggcttattttcagctttgggctatgaacatttgagtgcaaaattttttacagacatacacttccatttctctcagggagatacctaagagtggaatggttggatcataatgttaagtatattttgaytttttaaggaattgacaaaatgttttccgaagtggttgtgccattttacattcccatcagcagtgtacagtatataaattccatttcctccacattctcaccaacacttgttatggttagtgtttttaattttggctattatagtaatgacagtgtgcctcattgtggctttgcatagaatgatggcatgggaagcaaatgtagaaattgtttcaaaaaataagttatctaataataggttaagtgacagagaaatcagccaggattcaatcattacactgtttttgagtttatgatttaatctcaagtgccaagaatctaaattggaaacaatatattctctgaattcattgtttacagtccagtggg

SEQ ID NO: 396401 - DNA, 616 bp, Homo sapiens
tagtattctctctctctctatgtaatatatatcaatacttcattccttcttatttataagtagtattaaattgtatgtataccacaatttgtttatctatttacctgttgaaggaaatttggcttattttcagctttgggctatgaacatttgagtgcaaaattttttacagacatacacttccatttctctcagggagatacctaagagtggaatggttggatcataatgttaagtatattttgattttttaaggaattgacaaaatgttttccgaagtggttgtgccattttacattcccatcagcagtgtacagtatataaattccatttcctccacattctcaccaacacttgttatggttagtgtttttaattttggctattatagtaatgacagtgtgcctcattgtggctttgcatagaatgatggcatgggaagcaaatgtagaaattgtttcaaaaaataagttatctaataataggttaagtgacagagaaatcagccaggattcaatcattacactgtttttgagtttatgatttaatctcaagtgccaagaayctaaattggaaacaatatattctctgaattcattgtttacagtccagtggg

SEQ ID NO: 396402 - DNA, 632 bp, Homo sapiens
atacattattttttttatttttaaaaatacgataaataaggccacaatgaatattcttacaggtaattatgtgtgcacattcattacaaatttctagaagtttccaggtcaaaggtgttgtgctggactcctgctaacttcagtatggatggcaccgggttcaacagactgaygaagagacccagaaccagcgacgagaccacagggtttactaagaacttacatacagtggtccagtggcagttggctggatagcagaactgctgatgccttcaggaaacatgtaatttatgtagcactttcacttaacatcctcccgcatcagcctccacttggcaaccttcatttaacccgaacattctgtgggttgggccaggggctcacatgttcctcatagataaggaatgaatctctgagttggccatacttgaaactctgaacacgtattcagatgtttctgccatatagggtcatttctcaaggtatgcttatgttattgctgtgagctgcatctactatataaaaaggtatgcaactttcagagattttttttttattattatactttaagttatagggtacatgtgcacaacatgcaggtttgttacatatgtatacatgagccatgttgg

SEQ ID NO: 396403 - DNA, 632 bp, Homo sapiens
atacattattttttttatttttaaaaatacgataaataaggccacaatgaatattcttacaggtaattatgtgtgcacattcattacaaatttctagaagtttccaggtcaaaggtgttgtgctggactcctgctaacttcagtatggatggcaccgggttcaacagactgacgaagagacccagaaccagcgacgagaccacagggtttactaagaacttacatacagtggtccagtggcagttggctggatagcagaactgctgatgccttcaggaaacatgtaatttatgtagcactttcacttaacatcctcccgcatcagcctccacttggcaaccttcatttaacccgaacattctgtgggttgggccaggggctcacatgttcctcatagataaggaatgaatctctgagttggccatacttgaaactctgaacacgtattcagatgtttctgccatatagggtcatttctcaaggtatgcttatgttattgctgtgagctgcatctactatayaaaaaggtatgcaactttcagagattttttttttattattatactttaagttatagggtacatgtgcacaacatgcaggtttgttacatatgtatacatgagccatgttgg

SEQ ID NO: 396404 - DNA, 476 bp, Homo sapiens
ttcccggctgaggcgatgccctgccytgcttcagctcacgctctgtgggctgcacccactgtctgacaagccccagtgagaccaacccggtacctcagttggaaatgcagaaatcacccatcttctgcgtcgcttatgctgggagctgtagactggagctgttcctattcggccatcttagaaccaagtctgagtttctgtttgtttactggcaaattaccattcattgagactgtgccatttatggtcacaccaacagtgaatgagaatggaaggcaaagatcttgagcaaatttagttgactgaaacattagtaatttcagaataacttgaagattttataccaagctgtagtattcattaggtagggagagccaataaacagctgtcaatcaaaacacttttgaaaatttttgattactaagttatattaacttttggtaaactttcaggaagtggaatactagaatattaaa

SEQ ID NO: 396405 - DNA, 622 bp, Homo sapiens
agttagctttcaataaccatgttgaagaactgaataaacttgactaaaaatgaaaaataatgatctgtatttcattctgaaaaagttacttacctagttttcttagtagccattggtaaacatcatttaaaataaagatcctaataaactaaaggaaacytgataggaattcaagtggaaattaattatgagcccttatttttaaaaggtctggtcataaactttgagttagtgtgactagaattaagtgtatttgtttttactctgcatcaatttttaattacttagagccttttatattcattttctccctctaaaaccacatttcagtggaaattgtcacttaattaggtctgtgctaaatgatatacacagaacttatttttaagattaagtgaaaatggtagatttctcctcagccaaagaaaccgtgttatttcttggtatcagacacttattattaattaattagttctccgaagtggtatgctggtgtatttttaaatcggttaagcaaagacatactcccagtgtcctgataaggagaattatgaaaatttataattagttcatgataaacagcttttagtgtctatcaggtctcctgtagtaacttagtaaa

SEQ ID NO: 396406 - DNA, 622 bp, Homo sapiens
agttagctttcaataaccatgttgaagaactgaataaacttgactaaaaatgaaaaataatgatctgtatttcattctgaaaaagttacttacctagttttcttagtagccattggtaaacatcatttaaaataaagatcctaataaactaaaggaaacctgataggaattcaagtggaaattaattatgagcccttatttttaaaaggtctggtcataaactttgagttagtgtgactagaattaagtgtatttgtttttactctgcatcaatttttaattacttagagccttttatattcattttctccctctaaaaccacatttcagtggaaattgtcacttaattaggtctgtgctaaatgatatacacagaacttatttttaagattaagtgaaaatggtagatttctcctcagccaaagaaaccgtgttatttcttggtatcagacacttattattaattaattagttctccgaagtggtatgctggtgtatttttaaatcggttaagcaaagacatactcccagtgtcytgataaggagaattatgaaaatttataattagttcatgataaacagcttttagtgtctatcaggtctcctgtagtaacttagtaaa

SEQ ID NO: 396407 - DNA, 501 bp, Homo sapiens
tttcttatgccatttatgcattgtattaaactcttgtgtttattcttctccttcccctgccgtaaaacagaactatgtatgataattcttctctaggtgttacaaagactgctttcgtcaacaaatccctggtatttgacctgaaaaacaatgaaagccttagtgctcaatttttaggcagtttttatattctatctggcatcactgggcattatcaatagtggagtaagtctttgaagaagacaaataaggaaagaaatgtttacaaggttgagcattagacttgatagaaattttaagaattcagtgctagcttcaagtaacttagataggaatagcattataaataatattctatgtagtttacagtattctttatagtattctatttttttcaaaaaaaaytaatcctttataatatatgataatcccttacagtgtctccttggatttttatgcctccccacactttagtgaaacaagaaagtttcagtgtggttt

SEQ ID NO: 396408 - DNA, 593 bp, Homo sapiens
cttcaaatataagattgatagcctattatgtttttattatttaaacataagccaaatcatgtaattagctcactcaaagtgttttgacctatttcctaaaaatctttcataatttggattcaaaataactcaagttcatcaaaatgagatttatttraatatctttgtgagtaaaatacataagtatttatgtgcacccaactgaatatcactttcataaccagtttcacagtcccattttgatctcctgaacccttggtacctacaagattttcctagttcagttttgtttaagggttctttaattgctctgataaaaatatcaaacatctttccttgggccagagagtcctaaatattctctgttaatagtatccttagtaatatttttcacaatattctaggccaaaagaaatctgtatcagttctgtttattaaatgagtaggtctaaacaattccacaagtattaatgccctattaacttagtagccagttgaaaaaaacaaaacaaaacaaaaaacacacataaactgaaagtagttcatgtaatatccagtaggtgttgctgtgtttcccataaaaattttaaata

SEQ ID NO: 396409 - DNA, 540 bp, Homo sapiens
tttaactttctatacaagtaatcaagaatatcaagatgccaagaatagaaaccaratatatttctattataaagaacatctaactgttatattacattcaaatatctggaattcgctttttctatcatagacgcagcttgcccttactgcatcagctttgttagtgtaagctatactagtatcaagtttttttagctgttcccaaatagacatacagtagataagaaaactcatgtgattctggcatcagaattaatattcaaccagtgtgtattcaagaaattaacaagagtagtacacagcttcctacattattctatgagggaatatacatacatttcttagtactagaaattgcaactgccagcttaattcaaagtggttctgagtgaatgttcccaaaataccagtgaaaaatctaactagatgcataaacagttggtcatcattcagagcctgtatcaaaaaagtaccttcctattcctaattaaataacaacctaaaattacaataaggtataatgtttcaaaggtcttcagt

SEQ ID NO: 396410 - DNA, 540 bp, Homo sapiens
tttaactttctatacaagtaatcaagaatatcaagatgccaagaatagaaaccagatatatttctattataaagaacatctaactgttatattacattcaaatatctggaattcgctttttctatcatagacgcagcttgcccttactgcatcagctttgttagtgtaagctatactagtatcaagtttttttagctgttcccaaatagacatacagtagataagaaaactcatgtgattctggcatcagaattaatattcaaccagtgtgtattcaagaaattaacaagagtagtacacagcttcctacattattctatgagggaatatacatacatttcttagtactagaaattgcaactgccagcttaattcaaagtggttctgartgaatgttcccaaaataccagtgaaaaatctaactagatgcataaacagttggtcatcattcagagcctgtatcaaaaaagtaccttcctattcctaattaaataacaacctaaaattacaataaggtataatgtttcaaaggtcttcagt

SEQ ID NO: 396411 - DNA, 538 bp, Homo sapiens
tataggagtatccttcttatataaaatataaaatattacaaatgtagtcaccaggcatagtggctcatacctgtaagcccagcactttgagaggccaaggcatgtagatcacctgaggtcaggagtttgagaccagtctggccaacatggtgaaacctagtctctagtaaaaatacaaaaaacttgggtgtgacggcatgcacttgtagtcccaactactcaggaggctgaggtacaagarttgcttgaacctgaggtggaggttgcagtgagctgagatagtgccactgcactccagcctgggtgtattagttttcacactgctgataaagacattcctgacactgcgcaatttacaaaagaaagaggtttattggacttacagttccacatggctggcgagacctcacaatcaaggtggaaggtgaaaggcacgtctcacatggtggcagataagagaagagagcttgtgcagagaaactcccatttttaaaaccatcatatctcatgagaattattcactctcatgagaacagca

SEQ ID NO: 396412 - DNA, 554 bp, Homo sapiens
ctattgcagtactttacacagaggctcttagtatttatagtgtggaatgatacagttaaatgtagacatctagaaaattgataggttgccccagcagaggctccctcaraggttgactatttataactatatactctttttatcactgatcagttgtcacaaatggcaaaattcctttccacatctcctttttacttttagattcacaatgagagtcttgtaaaccaaaaataaaattctaagtccccagccaattgaatgggcccctcctgttggcccacggcattcctaagttaaccgtaaaaattagttccagccaggatgggaagtggaggttggacctgcctcattatattatccaggttttggaatttaggcacagctggccagcatttaacattcaagcagagaactcgagactgacaatgcagactctttgtagcaataagataccaacatgacagctggtcctaaaagaaattgaagtattttacccaaaataaatttacttgacatattttgaaatgactctgcaaagctgtccctaatgggac

SEQ ID NO: 396413 - DNA, 554 bp, Homo sapiens
ctattgcagtactttacacagaggctcttagtatttatagtgtggaatgatacagttaaatgtagacatctagaaaattgataggttgccccagcagaggctccctcagaggttgactatttataactatatactctttttatcactgatcagttgtcacaaatggcaaaattcctttccacatctcctttttacttttagattcacaatgagagtcttgtaaaccaaaaataaaattctaagtccccagccaattgaatgggcccctcctgttggcccacggcattcctaagttaaccgtaaaaattagttccagccaggatgggaagtggaggttggacctrcctcattatattatccaggttttggaatttaggcacagctggccagcatttaacattcaagcagagaactcgagactgacaatgcagactctttgtagcaataagataccaacatgacagctggtcctaaaagaaattgaagtattttacccaaaataaatttacttgacatattttgaaatgactctgcaaagctgtccctaatgggac

SEQ ID NO: 396414 - DNA, 608 bp, Homo sapiens
ttttaagttggataagaagcatttacaatctattctctctgaagcctgctacctggaggcttcatctgcataataaaaaccttggtctctataaccccttatcttaatccagaccttcccttctattgattccaggtctttggataaactctttcaaccaattaccaatcaggaaatctttgaatccatctttgacatggaagggcccattttgagttgtcctgcctttatggactgcaccaatgtacatcttagatacattgattgatgccttatgtctccctaaaatgtatgaaaccaagctggagcctgactacgttgggctcatgaccttttgaggttgtgtcacagccatgtccttaaccttggcaaaacaaacttctaaatttattgagatctgtcttagatacctttttgtttgcagtcttcatcaaagaaaatcaacataaaatgcaatttttcaaataaacaatctaataatatgtgtcagtaaaatstatgtaaacaaagtaaagaattcaataaaagtaagactaagtaaagacaataattttcagcaaaagcaataaccagtatgtccaatatttatttaactctacaaaatatat

SEQ ID NO: 396415 - DNA, 608 bp, Homo sapiens
ttttaagttggataagaagcatttacaatctattctctctgaagcctgctacctggaggcttcatctgcataataaaaaccttggtctctataaccccttatcttaatccagaccttcccttctattgattccaggtctttggataaactctttcaaccaattaccaatcaggaaatctttgaatccatctttgacatggaagggcccattttgagttgtcctgcctttatggactgcaccaatgtacatcttagatacattgattgatgccttatgtctccctaaaatgtatgaaaccaagctggagcctgactacgttgggctcatgaccttttgaggttgtgtcacagccatgtccttaaccttggcaaaacaaacttctaaatttattgagatctgtcttagatacctttttgtttgcagtcttcatcaaagaaaatcaacataaaatgcaatttttcaaataaacaatctaataatatgtgtcagtaaaatgtatgtaaacaaastaaagaattcaataaaagtaagactaagtaaagacaataattttcagcaaaagcaataaccagtatgtccaatatttatttaactctacaaaatatat

SEQ ID NO: 396416 - DNA, 608 bp, Homo sapiens
ttttaagttggataagaagcatttacaatctattctctctgaagcctgctacctggaggcttcatctgcataataaaaaccttggtctctataaccccttatcttaatccagaccttcccttctattgattccaggtctttggataaactctttcaaccaattaccaatcaggaaatctttgaatccatctttgacatggaagggcccattttgagttgtcctgcctttatggactgcaccaatgtacatcttagatacattgattgatgccttatgtctccctaaaatgtatgaaaccaagctggagcctgactacgttgggctcatgaccttttgaggttgtgtcacagccatgtccttaaccttggcaaaacaaacttctaaatttattgagatctgtcttagatacctttttgtttgcagtcttcatcaaagaaaatcaacataaaatgcaatttttcaaataaacaatctaataatatgtgtcagtaaaatgtatgtaaacaaagtaaagaattsaataaaagtaagactaagtaaagacaataattttcagcaaaagcaataaccagtatgtccaatatttatttaactctacaaaatatat

SEQ ID NO: 396417 - DNA, 608 bp, Homo sapiens
ttttaagttggataagaagcatttacaatctattctctctgaagcctgctacctggaggcttcatctgcataataaaaaccttggtctctataaccccttatcttaatccagaccttcccttctattgattccaggtctttggataaactctttcaaccaattaccaatcaggaaatctttgaatccatctttgacatggaagggcccattttgagttgtcctgcctttatggactgcaccaatgtacatcttagatacattgattgatgccttatgtctccctaaaatgtatgaaaccaagctggagcctgactacgttgggctcatgaccttttgaggttgtgtcacagccatgtccttaaccttggcaaaacaaacttctaaatttattgagatctgtcttagatacctttttgtttgcagtcttcatcaaagaaaatcaacataaaatgcaatttttcaaataaacaatctaataatatgtgtcagtaaaatgtatgtaaacaaagtaaagaattcaataaaastaagactaagtaaagacaataattttcagcaaaagcaataaccagtatgtccaatatttatttaactctacaaaatatat

SEQ ID NO: 396418 - DNA, 559 bp, Homo sapiens
actttgtgtctttgctttactatgttatttcatcaagtgtgaggacaaaattattgctctcaaatttgtttcctgattaattactattactgtaattttatttttttgttgtcattgtcatacatatttttttcatcatctggaattttaattttacagtcaaatttgagtattaaattactttgctagtatcttgctggctgtaatagtctcagtccacaccactaggcctaagttgcctctcactgtggactgaatcccaagtgttgttcagaaccacatgttgcactttgtaraaacatgtcacaaccagctttttctttgccatatttgtgtttattgtgcagtatcattacgttcaatgagtaggagatacgaaaatatcacctaggttatattatcctataattttctatatatgacttcgtagatttcttctgacagaagcatttgttgatgtggtatagtaaagagggaataatgtttggaagaagataaatttgtgtttaaaccctgatacgtcttccagttaccagtgtaatttttcctgttccttgaa

SEQ ID NO: 396419 - DNA, 556 bp, Homo sapiens
gaattcaggttagagattatccaccatgactaggtgctagctgacttgtattgttaaacaataaaatccatttcaattcagtttttatatatatgaaccccaatagagagtatttaacaatataaaacataattatyacgataaatcatctcatatcatacaaataagtttgtctcataaaagaatagaacaaaacaagacaaaacaagttgaaatattgtttctttaaatcttatcacaatgtattaagcaatgatgtacttaaggacattgttatctttgccaacaccttttaagtgcagtggttccatgcactcaaagtgaatcttcatatttcaatgcttatgacatattttgtaggaagataaagtgactatttttatcttacataagtccatccaaaactctaagttaaaaaaagaaaaaaagtatactgccaaaccctttaaagctggcagtgaaacatatttacattctagacagaggggacttattttaagaaaggtatctcaaaatgaatattccatctatgcttgctactactccttagaagtta

SEQ ID NO: 396420 - DNA, 560 bp, Homo sapiens
actgtaatttcaatgatatttccactgcagttttattaagtaaataagccaaggagctatatgaattatttgttaagacacgcacacacatacacacacacacacaaaaacaggtgtgtaggtaagttttcataattaaggtataaatgattcatataataataacagacatatagaggtaccaagccggatgtcaagtagaagtgaaactagtgaaactacaaagcattgtaattatctgctgtgaataacactatcccaaattctgaaagaagtatgtaacaaaatcattaaatacaatcttgtaattagagtgtgcatagatgtatacttttatgagattcccatgaaatcttaaatgccataacattttgaggtaatatctcagcttccttcatgtaagtccmctgtaagttccagtagcacaaaactacttttcagacacaaaaagtcatattttcatagtctcccaaaacgagtgggacatgatagccatgtaagcaacacctgaagcaaaacattaaaaagtttaaatgtggccaggtgcagtggctcacacc

SEQ ID NO: 396421 - DNA, 562 bp, Homo sapiens
gattttgtcgaaggatttgtctgcatctattgtgatgatgatgtgatttttgtttttaattctctttatgtggtgtatcacatttattgacttgcatatgttaaaccatccctgcatccctggtatgaaacccacttgatcacggtgtattatctttttgatacgttgttggattctgttagctagtattttgttaaggattttagtgtctgtgttcatcagagatattggtctgtagttttttttttttctttttttttttttttcttttttggttatgtcctttcctggttttggtattagggtgatactggcttcatagaatcaattagggaggtttctctctttctctatcttgkcaaatagtgtcaacaggattggcaccaattcttctttgactgtctggtagaattctgctgtgaatctgtctggtcctggacttctttgtgttggtaattttttggtggtattttgtttttgtgtttgttttttttgagacagagtcgcactctatcacccaggctgcagtgcagtggcatgatctcagcccaccacaaccccc

SEQ ID NO: 396422 - DNA, 602 bp, Homo sapiens
ttggggttttttgatcatgcatgcttaatacttgtgagttctccaagaaataagatatataggtaaactaggaaagtaggggaaaggtatacacatataagaaatatgggtagagataaattaaacaagattcttttgtgcttaggtatactggcccaacatattgtattttctctcttctggatctcagtgataccattaacccagctgctagagacagaaacttagaatttatctttgtttccaccaacacattttccagagagtcaccaggtttgataaattctgtgtcctaactgtcattgaactctatcgcctaaactttccatttcctctaggtgaggccattttcatctcttgcctggagaacaattccctaaatacagtctttcttctctctcatctatggtctyatatctcctatagtggtcttcctaaaacatagcaatcatgccagttccatgctcacatacgttcaatggccccacagcctgcccaataatgtcaacatgttaccagcaaaattttttatcctgctgactccaaacccttcattaacatttaactcatttaactcctctgtaaaggcttctctgatgtcc

SEQ ID NO: 396423 - DNA, 602 bp, Homo sapiens
ttggggttttttgatcatgcatgcttaatacttgtgagttctccaagaaataagatatataggtaaactaggaaagtaggggaaaggtatacacatataagaaatatgggtagagataaattaaacaagattcttttgtgcttaggtatactggcccaacatattgtattttctctcttctggatctcagtgataccattaacccagctgctagagacagaaacttagaatttatctttgtttccaccaacacattttccagagagtcaccaggtttgataaattctgtgtcctaactgtcattgaactctatcgcctaaactttccatttcctctaggtgaggccattttcatctcttgcctggagaacaattccctaaatacagtctttcttctctctcatctatggtcttatatctcctatagtggtcttcctaaaacatagcaatcatgccagttccatgctcacatacgttcawtggccccacagcctgcccaataatgtcaacatgttaccagcaaaattttttatcctgctgactccaaacccttcattaacatttaactcatttaactcctctgtaaaggcttctctgatgtcc

SEQ ID NO: 396424 - DNA, 548 bp, Homo sapiens
gttaatgccaaaggtaatcaaaaataactagcagagttaaagcacaaacccagctctatctcactcaaaaggttatgttcttaaccactaagttgtactgcctcccagctaaagatattattatatattatccaattttacttaagtataaaagaattcatgatatgatttactcactgaattgactgccagtaaaaacacttcctctccaaaacaatttatcatcctccaactcaaagaaagcaaaacgaaattactaacactaaagtaaataagttataacttgccagaaagggtttctatgttctccraaacctcttttccccacctccaccaacttgcttgggtgacttgcttctcatagtacggttatttaacctacatcaaaatgtcacacattcgaattgaggtaacagtttctaataggcctcttcacttacgtatttctgttaaattttcagctactctatttgctggcttagattgtaaccacaaacctctcagttttgaacattgacataacctcttgtacttcgcattcaatggaa

SEQ ID NO: 396425 - DNA, 548 bp, Homo sapiens
gttaatgccaaaggtaatcaaaaataactagcagagttaaagcacaaacccagctctatctcactcaaaaggttatgttcttaaccactaagttgtactgcctcccagctaaagatattattatatattatccaattttacttaagtataaaagaattcatgatatgatttactcactgaattgactgccagtaaaaacacttcctctccaaaacaatttatcatcctccaactcaaagaaagcaaaacgaaattactaacactaaagtaaataagttataacttgccagaaagggtttctatgttctccgaaacctcttttccccacctccaccaacttgcttgggtgacttgcttctcmtagtacggttatttaacctacatcaaaatgtcacacattcgaattgaggtaacagtttctaataggcctcttcacttacgtatttctgttaaattttcagctactctatttgctggcttagattgtaaccacaaacctctcagttttgaacattgacataacctcttgtacttcgcattcaatggaa

SEQ ID NO: 396426 - DNA, 548 bp, Homo sapiens
gttaatgccaaaggtaatcaaaaataactagcagagttaaagcacaaacccagctctatctcactcaaaaggttatgttcttaaccactaagttgtactgcctcccagctaaagatattattatatattatccaattttacttaagtataaaagaattcatgatatgatttactcactgaattgactgccagtaaaaacacttcctctccaaaacaatttatcatcctccaactcaaagaaagcaaaacgaaattactaacactaaagtaaataagttataacttgccagaaagggtttctatgttctccgaaacctcttttccccacctccaccaacttgcttgggtgacttgcttctcatagtacgkttatttaacctacatcaaaatgtcacacattcgaattgaggtaacagtttctaataggcctcttcacttacgtatttctgttaaattttcagctactctatttgctggcttagattgtaaccacaaacctctcagttttgaacattgacataacctcttgtacttcgcattcaatggaa

SEQ ID NO: 396427 - DNA, 548 bp, Homo sapiens
gttaatgccaaaggtaatcaaaaataactagcagagttaaagcacaaacccagctctatctcactcaaaaggttatgttcttaaccactaagttgtactgcctcccagctaaagatattattatatattatccaattttacttaagtataaaagaattcatgatatgatttactcactgaattgactgccagtaaaaacacttcctctccaaaacaatttatcatcctccaactcaaagaaagcaaaacgaaattactaacactaaagtaaataagttataacttgccagaaagggtttctatgttctccgaaacctcttttccccacctccaccaacttgcttgggtgacttgcttctcatagtacggttatttaacctacatcaaaatgtcacayattcgaattgaggtaacagtttctaataggcctcttcacttacgtatttctgttaaattttcagctactctatttgctggcttagattgtaaccacaaacctctcagttttgaacattgacataacctcttgtacttcgcattcaatggaa

SEQ ID NO: 396428 - DNA, 452 bp, Homo sapiens
ccttctggcgtgggtaagctagtgaatagcttcctgtgagcrtcataacatcagtggacagtgactggcaagagcctatctagtagacaccatataacgtttgagtgctacagcatgatgatatttaatgggcaataagaaattctcctcggaacatgaatgttagatccaggtgatatcacctgataaaggcaggttttgtaattaagtttagagtgatgtgtttcctggtaaaagtctgggtagggtaactattaataaaagaatctcacactagacagaaaacttaaccatgcaacaaacttgattatgtttcctaacaggatataggaagatttgaaaggtctaatctgctctgatatcatttattattaaatcgactctgtgcttcattgcaatcaactgttaattatattagttgtaaccactgaagtgctcatttgtgctaattt

SEQ ID NO: 396429 - DNA, 599 bp, Homo sapiens
tcagcctgcttagtcctcaatatattattgtatatctaacccctactagaatgtaagctctcaaagggcaagaaattttgctggttatgttccctgatatgtgccaactacctagaataatgcctgctccaaggtagttactcaataaatatttgttaaataaataaggcaaaggtagaactctaaatctasaacagataaaaagattccaattctataatagagaagcaattagtgtttaaataaagataatagtagaaagaaataacaacaaaaacagatgtcatagtagtagcctacatggtacaggcatttgttaaggctcttttgaagaaggtgccctttgatgttgcctgaaaaagaaactattaagtttatagctttgcttcttgacacataatgtgcacagcagacaccttcacccatcccatacctgtatttcatttctgactcacacctcgcaagagcctgagcgatacactgaagaaagcattgaccctcaaagatccagtgagagataaggtgaagatcaaaaatgccagtagctgtcaggacacattaaaatgactacttcaaaatggtcacttcaaaattccatg

SEQ ID NO: 396430 - DNA, 422 bp, Homo sapiens
cccactttccttgcttccagtactattcctctaacccacagctcctagttgttggaatccctttgccctgcatatggccttcttatatgggattataaccaatagatactaccttagctaccctctgtggcattcatgtggtccatcagaagctcataaattctcaccatgtcaaatggtggaaatgtgccctatcatagttctaccatctctctgcagtcctctttctctacttcttaggtagactcacgtgcaaatctgctggctaactgcccaaatagacatctaactagggaatgaaaatgcctgaatccctttcctgaggggaccccttagagttggtcagcmataccttcacatcttgacttcgaggagaaacaacagcctttaataatgaaccagtacatcccagaagacagagg

SEQ ID NO: 396431 - DNA, 576 bp, Homo sapiens
cctctgcaaaccactaatctactttctgtctctatagttttgcctattctggatattcataaaagtggaataacaatacaatatgcagtctttgttggctggcttgtttcagttggcatgtgttttcaagtttcatccatgatatagcatgtatcagtattttattaattttactgctgaaaaatattacaaatcacttgtaaaacctttctattgcaagttgggttctccaggaaaaattgtagaaatgcagttaagcatgcaaatgttttattagtaaaccaatggtaaacacttgttaaaggaaaagagtggaagcaggattgaataagtccctcaggccacagtgcagatctccccacagggtcctccagaacaaaggttgtccaytggaggaatcctccactgggaggaaatgaccaggcttttgtagtcctcccttgcacagttgttggccaggacttgccctgataataaggtgacctcagctggaatttgaggcagaaccagataaagttatcagctgttacctcaccacattccttgcagctggacacgaagtctttccgtaaaggg

SEQ ID NO: 396432 - DNA, 596 bp, Homo sapiens
aattacctggaatgtgattcaaaactaggattgtctgaatccaaagctctgttctttcctctgtacttctacactttctcaggttgttgtgtattgacagaattttcagaaagacattagtgtttttcaagctatgtatatccaaatatcttctcactgatttgactatgacatatttatgtagtcctttcattctgtattatagtttatagtgcattttctcagatacaatataatcagataagattattaggtccttatagccatctagtaaacaaggcaggagaaacatcattgtccttagttatagattagggaaccagcaaaaagtgattaggtgtcttgatacagtcacaagataataagtgaaaaaacttgaaattgagattaagtgttttaaatctagaatgtaaataaataaaagtacctactagaaatgtgcttgtgtattgcagggtttcagcttttaaaggatttgaaatwttattagctcacatcctagcactttatgatgtgctactttaattgaataacagtctcttacattagcatttttaccacccaacttttttttcttcatgaatatcataatagcc

SEQ ID NO: 396433 - DNA, 548 bp, Homo sapiens
agttacattcctttataatcttaaaaataatagtttgcttatcactattattttcattgtgtgtgtgtgtgtgtgtgagagagagagatatgcagtggcagtagtagaatgtgtctctaatataaagccsaaattaagttactatgtggtatcccttcatgtgtagaatgttatattttgtttgctaaagatacttggcttttgaatttgtatattggtacattatccgtaaaaatattgaaattctgcagtgttttcagacttgtggaaatttatcaatggcaaatgaataatttggtatttcaagtctcttaactattaaatcacacacaaattaaaatttccacatacaggtatcatttgccatgaacaaattcactatgaagagttgatgcttaggaaataataaataaaatatgaattcctttttcacaatataaaaattgaagtctaaaaacatatttaaacaaggcctccctatatccaattaaacacttctgcacaaaatgtcatatgggtgttcagttccactagtgggttatgcccag

SEQ ID NO: 396434 - DNA, 609 bp, Homo sapiens
tcagatatagaaacagtactggggatatatacgcaggctccatatgctttggaggtatactggatctatttttcttgtggttgttagaacgtagcaggagcttttactgaaaggaaccacgctatgtaaaactaacagaaaagtagacaataaaacttttgtataragtattcagatatggcctaagataatataggcaagaatctagggcactatgttccatatcaatatgttcggattttaccaatttcactttgtaatagcacagtaaaaagctttgttgaacactgacttttctatagtgaccaaatgcttataaagctgctaagaatttgggggcaagcctttctaataacttggtttatacaaatttttttcatggcatcatatttaagaaagtggcctcatatataacttcaaaaaaacacactgaaaaatggactgactttttttttactacatagtaattatttgatggtaaatagatgatatttaagtaacattaacatagttgacatttcttgaatttctctactaactataaaattgtgatattatttgtatctgtattcctacccaaatttcatgttcacttgcaatcccaatgtt

SEQ ID NO: 396435 - DNA, 609 bp, Homo sapiens
tcagatatagaaacagtactggggatatatacgcaggctccatatgctttggaggtatactggatctatttttcttgtggttgttagaacgtagcaggagcttttactgaaaggaaccacgctatgtaaaactaacagaaaagtagacaataaaacttttgtataaagtattcagatatggcctaagataatataggcaagaatctagggcactatgttccatatcaatatgttcggattttaccaatttcactttgtaatagcacagtaaaaagctttgttgaacactgacttttctatagtgaccaaatgcttataaagctgctaagaatttgggggcaagcctttctaataacttggtttatacaaatttttttcatggcatcatatttaagaaagtggcctcatatataacttcaaaaaaacacactgaaaaatggactgactttttttttactacatagtaattatttgatggtaaatagatgatatttaagtarcattaacatagttgacatttcttgaatttctctactaactataaaattgtgatattatttgtatctgtattcctacccaaatttcatgttcacttgcaatcccaatgtt

SEQ ID NO: 396436 - DNA, 560 bp, Homo sapiens
actacatagtaattatttgatggtaaatagatgatatttaagtaacattaacatagttgacatttcttgaatttctctactaactataaaattgtgatattatttgtatctgtattcctacccaaatttcatgttcacttgcaatcccaatgttggaggtggggcctcatgggaggtgatcagattatggggatgaatcctgcacaaatggtttagcatcatccttttgatgctgttctcatgataatgatagagttctcatgagatctggttgtttcaaagtgtgtggcacctcccccctctcttggtcctgctcctgctgtggaagatgcctgctcctgctttgccttccatcatgagtaaaagctccctgaggcctcctcagaagcagatgctgccatgcttcctgtacagcctacagaactgtgagccaattaaacctcttttctttataaatgatccattctcatgtattcctttataacagtgcaagaatggactaacacagaaaaattrgtacttaagagtgggacattgctgtaaaaatacctgtaaatgtg

SEQ ID NO: 396437 - DNA, 638 bp, Homo sapiens
attccagtgagacaagatgcatgggtggaagacagtaatactgatgatgctgatctcgtataggcctaggctaatgtgtgtatttgtgtcttcatttttaacaaaaagtttaaagagtaaataaaggcaattaaaaattttaaaaatagaaataggcttatagaataaagatataaagaaaaaaattttcatacagctctacaatatatttatgttttaagctaagtatttttacaaaagaatcaaaaaagtaaagacattaaaaagtttataaactaaaaatgttataagctaattttttattgaataaagaaaaacattttaaatatatttagtgtagcccaaatgtacagtatttatattatraagtatacagtaatatcctaggcctttttcttcactcaccgctcactcactgactcaccagaacaacttccagtcccgcaagacccattcatgttatgtgtcctatacaggtgtactgttctcttcttttccagtggtattcaatcttttggcttccctggtccacattggaagaagaagaattgtcttgggtcacacacaaaatacagtaacattaatgatagctgataagctaaaaaaaacacaaaaaatctcataatgttttaagaaag

SEQ ID NO: 396438 - DNA, 566 bp, Homo sapiens
cacatttacttcctttgtaacattatgagtaatttctttatcatccacttattttattcttaatttagttaaatctaaggtggtgggccgggcacagtggctcatgcctgtaatcccagcattttgggaggccaaggcaggaggatcataaggtcaggagtttgagaccagcctggccaatatggtgaaacctcgtctctactaaaacaaaaatgagttgagtgtggtggcacgtgcctgtagtcccagctacttgaaggctgaggcaggggagaatcccttgaacctgggaggcggaggttgcagtgagccaagaccacaccattgcattccagcctgggcaataagagcaaaactccatctcaaaaaaaaaaaaaaaattcttagatggtgtttagccatacatttctaatttgaccamttatattttattactcagtttgatatttaatttgattcaattcttcctgttaatttttgataacaaaatgttgctagttcttatttatgacattatatttatgtaaacatagttttatgtatctaccagtaattctgtggaattc

SEQ ID NO: 396439 - DNA, 566 bp, Homo sapiens
cacatttacttcctttgtaacattatgagtaatttctttatcatccacttattttattcttaatttagttaaatctaaggtggtgggccgggcacagtggctcatgcctgtaatcccagcattttgggaggccaaggcaggaggatcataaggtcaggagtttgagaccagcctggccaatatggtgaaacctcgtctctactaaaacaaaaatgagttgagtgtggtggcacgtgcctgtagtcccagctacttgaaggctgaggcaggggagaatcccttgaacctgggaggcggaggttgcagtgagccaagaccacaccattgcattccagcctgggcaataagagcaaaactccatctcaaaaaaaaaaaaaaaattcttagatggtgtttagccatacatttctaatttgaccaatwatattttattactcagtttgatatttaatttgattcaattcttcctgttaatttttgataacaaaatgttgctagttcttatttatgacattatatttatgtaaacatagttttatgtatctaccagtaattctgtggaattc

SEQ ID NO: 396440 - DNA, 476 bp, Homo sapiens
ttttgttgaacaacaatgtgaatatacttaacactactgaaatgtagacttaaagatggtaaattttatgttatgyatattttaccaccactaaaaaagtatttaaaaatggatggctgtagctatgcagtgacacataaatcaaatttgtatccacaaatgaatacttgttctttcaatggctggttgcatgcactgttctcatgttggtatatttaaataaaacagaaacgatgcccaaataaaattatgtagtgataatcgaagccataagttttaaaccacacttcaaggaaagtcatctatataaaaattgacttaaaaattataataaattttatgctacgatatagctatttttaaattagagaagacaatgtagttttagaaataacaattcaacaaatgttaagtaattcacactattcgtgcttggtgtttgcaatagctgaagaaataattttggtttgtgctgt

SEQ ID NO: 396441 - DNA, 476 bp, Homo sapiens
ttttgttgaacaacaatgtgaatatacttaacactactgaaatgtagacttaaagatggtaaattttatgttatgcatattttaccaccactaaaaaagtatttaaaaatggatggctgtagctatgcagtgacacataaatcaaatttgtatccacaaatgaatacttgttctttcaatggctggttgcatgcactgttctcatgttggtatatttaaataaaacagaaacgatgcccaaataaaattatgtagtgataatcgaagccataagttttaaaccacacttcaaggaaagtcatctatataaaaattgacttaaaaattataataaattttatgctacgatatagctatttttaaattagagaagacaatgtagttttagaaataacaattcaacaaatgttaagtaattcayactattcgtgcttggtgtttgcaatagctgaagaaataattttggtttgtgctgt

SEQ ID NO: 396442 - DNA, 656 bp, Homo sapiens
agggtagaaatattttattatgaaagagagaaataagagtgagttttacatcagtaccaccttgaattaaaaggtgaacattcagtttgaaaaaaatcaattttagaaacagttcatttggaaagaataatataaaaacatgttccaaggacaagaaggcagtgcatacgcaaaaagtataaaatgcattccwtgtaagttaacaagagaccatatgtcatatttgcagatgaaatattacagatttattccagctatataaggaaatggaaaccgcttgtgtaaagatagttttcagcatcaagcactaaatgaattgctgtcaaacttattaatatgattaaaagttgatatctttgaaatttatagcaagagctatatgcaaagatcttcaaaaacttacaaaattaggctaaaaatttatctatataaagctaaaaagttaatgagttggagtttttcccctttaaaatattactcagctcttcatggctttttattcactatatgaatattgttttttcttttatacctttagaaagaaaaccgctacaagcttgtcctctgagagggacagaagattcttaaaaatataaaaaataacaatataatttcagttccaaggataggttataataatacaaaaattaccattt

SEQ ID NO: 396443 - DNA, 656 bp, Homo sapiens
agggtagaaatattttattatgaaagagagaaataagagtgagttttacatcagtaccaccttgaattaaaaggtgaacattcagtttgaaaaaaatcaattttagaaacagttcatttggaaagaataatataaaaacatgttccaaggacaagaaggcagtgcatacgcaaaaagtataaaatgcattccatgtaagttaacaagagaccatatgtcatatttgcagatgaaatattacagatttattccagctatataaggaaatggaaaccgcttgtgtaaagatagttttcagcatcaagcactaaatgaattgctgtcaaasttattaatatgattaaaagttgatatctttgaaatttatagcaagagctatatgcaaagatcttcaaaaacttacaaaattaggctaaaaatttatctatataaagctaaaaagttaatgagttggagtttttcccctttaaaatattactcagctcttcatggctttttattcactatatgaatattgttttttcttttatacctttagaaagaaaaccgctacaagcttgtcctctgagagggacagaagattcttaaaaatataaaaaataacaatataatttcagttccaaggataggttataataatacaaaaattaccattt

SEQ ID NO: 396444 - DNA, 615 bp, Homo sapiens
ccagaaacactaaatgttaatggcatatgggctccactaaccagggcacatgcaactaaccccctgagagtataattgggtcagagatgtacagaaaaagcactgtgatgaataatcattgataatatctatggctagcctttcaaattgtaactagagatcattcagtgaatctagaaaatctagatacatggccttagaaaatcattattcaaagcacttgatggagttccaatgataatctacataatatattatcctcatagtcaaaacacgtaagtcatccacatgtttaatatacaaaacatattattttaacatagttatttccactaaagaacatccgtttgtaagtggagctgacaatgagtattatttgaaagaacctcagaattttttataaatgtcattaagtcaaaggtgaaattgaacactagaaaataacttttcattcactttggtcattttgaaactcaatttcagattttggacagggtatcacagacaacagaaaaatgttaaggcattccattgcctttataatgtaaagaaatccagaaaygaaaccaacaactgaactaccatcggttctttttaaccctcacttgattaata

SEQ ID NO: 396445 - DNA, 620 bp, Homo sapiens
agacattacaactgatactacagaatgcaaagaatccttagaggctactataatcaactatatgccaataaattggaaaacctagaataaatggatacattcttagacacatacaacctgagcagaccaatagcaagtaacaagatcaaagccataataaaaagtctcccagcaaaagaaagcccaggacccaatggcttcactgctgacttttaccaaatatttaaaaaagaactaacaccaatcctactcgaactctcccaaaaaatagagtacagaggaatactttcaaactaattcaataargtcagtattatcctgataccaaaaccagacaaagacacatcaaagaaagaaaaatataagccaatacccctgataaacattgatggaaaaatcctcaacacaatcctagcaaaccaaattcaacaatacattagaaagatcattcattataaccaggtgggatttatcccagagatgcaaggacaattcaacatatgcaaatcaatcaatgtgatacatcatatcaacagaatgaaagacaaaaaccatatgatcatttcaattgatgctgaaaaagcattggataaaattcaacatcccttcatgacaaaaac

SEQ ID NO: 396446 - DNA, 606 bp, Homo sapiens
atatgggtgatttctacctcaactgcagcacatatgtgttgagtatcaattggaaaataagtcaaaaattatgttaatgcaccagtatacaccgaatgattaaataatccaagaaataaataataaatcttagaagtattcataatgaactcttaattctttattaaactgaaatctatgaagtcwtgtgtcatttatctgtaacagtaaaacaaagtacttgcatatttgaatcagttatctggccattatctggactttcatagcttggcactgagccacaaatcatatactgagaattactttcatgtaaccttgcaacagtgatcaaaattgaggtctgtgtcatctgatccaaaagtcgctttgagttcttaaatcagacaacattcaggaggcatgaagaccaatattgtgatatattttattataaggaaaacatggtaaggtcaccaagaaaagcctagacttgaaagagaagagcaaaatcaggccatgaaattaggcacttatctcttaatgcaactatcaatatgtttttattactaaaggtaacaattctgaagtacttattttgtaccaggaattgtgctaactgctttgcat

SEQ ID NO: 396447 - DNA, 536 bp, Homo sapiens
ttccaaatttaattatatattcacaatttttactgttggctgttcatatgtaaccttgtagtattgctatattatcaacaacatatagaagtgctcctgatcactgcataaatatgcagcaccatgcccagtacgtatagatgctcaaatatactaactattctcctagaatcagtgttccccaacctttctgtcaccagggaccggttttatggaagacaatggaatggtatggggttggagggcagggatggttttgggctgaaactgttcaacctcagatcatcaggcattagattctcataagaagcatgcaaygtgtatcccacatgtgcagttcatgatagggttcatgatcctatgagattctaatgctgccactgatctgacaggagctgagttcaggcagtaaagcttacacacctgccactcacctcctgctgttaggtgatcataacaggccaccaatcagtactgttctgcagcccaggggtcgcagactgccttaaatgattatagcctatgttttcttaact

SEQ ID NO: 396448 - DNA, 560 bp, Homo sapiens
tgagtctttattttaaaaatgaaaatactacccacatgtctacttaattaattaatgtgagaattaaaagatgtcacacagawaaaagtgtttggtaaattataagatacatgttaaagataagtgttatcaaagtcgttaattttataactttaaaatttccaaaatggaatttatttctaaataaataatacattgtatgaactgggaattagagtagaacaaaaatgtcaggtggggtaaagtggggatagtaaaagaaggaagcttatgcttcaaaccaataatgaaaggactgaatgccaataatcaataatcaaaacagaaggaagctcatgctttaagccaataatcaaagggctgaatgctactctaagaaaagatcctcctgtaaaagaacaactcataaaatacctgagtaggcaagtcttatgaagagaaagcagatctagtctcatgcagttattgcaaacagcaggcctgttgtgaaaacagcgacccataggtataagttttgtgtactctcccttgtttgttagctgacagcacaaacacagagg

SEQ ID NO: 396449 - DNA, 549 bp, Homo sapiens
aaaacaaaccttggaaaccttctctttcttacttgtcatgtaaatcactttatataggacatcttgagacacacgccctatgctttacaagaactctattacttgcaaaccttagcataaatcctcttgatatgtttaactaagatttactaaaatacaaccttaggcccatttcttctgacaaaggtatgtgtttatactctatcatttgttccattttctcctgagggctttgccatctttattctgcatgactgtatttttgttgcaattgaaaaaacttcataacacctatttcacaggctttaatttctatttggtcttgcataactaactgcctgcagaattctgacaccatgcacagatatatgtctaattacacttttgaacttaatgaaatgaatatatttttgtcctctgatcacaggctagatatttaaaatttttaattggctattatttttccaagtaagcttattgcagtttgaggttgaattaaaytggaaagtacatgtgaacaaaatccttgtattttaatatttgcaatct

SEQ ID NO: 396450 - DNA, 549 bp, Homo sapiens
attatttaccatgtgtagtaagagtgatgaaaggaaaacacagactatttcatgtaagcaaactgggaagagggcaaggtttaatattgtcgcatttatcttggacttggtcaaagaaaaggaaaagaacaaatagtttatgagctgtcaaaaaagacatgtcaccatgcctcccaaatgaagtgaggcaccttcaaatagtactaagctagggggagccacctgtaagggatactatttacctgtcttcagatcttgattaatgtcagtgagacacactttacctctaccatttctccctgtctccatrgaacaaatgttaaagtctgctcctcagaaaaggaaagtatgggaacacttccagtgtctcctggggagagaaggcatcacttatctgattggcgggtctggagaaagaactgaacatgttcaatctaccgccttttagcgtctttatattttaataggcatttgcttgtgttttctgcccttccttgcttaatcctgcaggggccagttggcccctgtgtgggaacctgtgattgttca

SEQ ID NO: 396451 - DNA, 619 bp, Homo sapiens
gagatctaagaaaaagttagccttaacattccatagcagtgtggtgacaatagttagcaacaatgccttgaacatttcaaagtaactaagagaggacatgaaatgttactaacacatagaaatggtaaatactcaagatgatggatagtccaaatacactgacttgatcatttcacattctatacatgtaaaaactactcacatgtactttatayatttgtaaaatatttgtataaattacaaaacaaaatcaaaaacaaaaattactcagcagttacatgaatacattctcattgtgaaaaactcaaattatatacaattatataagcaaaatgctgaggaccttcttcatactcagcccctcttctctccagaggtaactagagctgataatttggtgtgtattcttccaatctcctttctacaaaattacatacatataaaaatatacaaatatataatttttttaatataaaagacaccagaccatatgcattgtttcaccaccaccttgtttatcaacatgtcttagaattctttctattagctctgtacaaatagatcatcttttaaaaatgctatagaattaaatataatttaaccatatttaattaaatat

SEQ ID NO: 396452 - DNA, 579 bp, Homo sapiens
gtagcacatcatctcttgaagcttcacttcaacttcactacttctgtagtctcatcttgagtaaaaggtaatatgttcatgtataatcgaatatgttgtcttaatctagagtgttgcttcctaaaatcttttgaaaactaattataaaaatgtgtatttatgtaatgataatttctcataaagaaacaattgagagaaatgatgaccttcttaggatctgaaggtaagttgagaatctgaataactatacattgaaatcagcaatcatcatgcaaagtaaataatgtggaatatggagrcatattccaacttctctcctgatggaacttctgaaaagctttttatttccttgtctacgtactggcatctactctgctacttactacttttacctttattcgaagttcatattttaagaaaatagcatacgttctcttttttgcaaatgtatatattgtttcacaagtttaacttttaaaaatttacttttttcccataagtaaacatttctcactaccttttcattgacctttccatcattttaaacagttatgtcattctgcataataaaaaatgttg

SEQ ID NO: 396453 - DNA, 486 bp, Homo sapiens
gaggatccagtttcattctcctacatgtggcttgtcaattaacccagcaccatttgttgaataaggtgtccttttcccactttawgtttttgtttgctttgtcaaaattcagttagatgttaagtatttggctttatttctggattctctattccgttccattggtctaactgcctatttttataccacgatcatgctgtttgggcgactatggccttacagaatagtttaaagtcaggcaatgtgatgatgtgatgcctccagatttttttttcttagtattgctttggctatgcaggctcttttttgtttccatatgaattttagaattgtttgttctagttctgtgaagaattatggtggtattttgatgggaattgcattgaatttgtaggttgattttggcagtatggtcatttccacaatattgattctacccatccatgagcacgggatgtgtttctatttgtttgtctcgtctgtgat

SEQ ID NO: 396454 - DNA, 634 bp, Homo sapiens
aacatttttctgaaagaagaaaaatgtaactaaaaatttgaaaacatttatgtagataacacacgaggtcataacaactttaacaatctaagctttcagtgacagtttttgtgaagcatttttactgtcattgcctctattctctgcaatttgctctctccttttgtgtgtatgcaggaaaagcatcattcacatcgaggytatagatcaaattatctgtatgacaattgatatcttcagtaatcacggggcatgattatggaggtaagctgactctagttacttttctttctagaagtatcaacactgacagttaaaacaaggaaaaattaaaaaaaagccattaagccaacaatcattccagtttaagaaatgtagcgtgggttagctctttgaagtgtgttgatttatatagatgcttctgactttgtagatatgtggtgttatttctgaggtctctgttctgttccattggtctatatgtctgttttggtaccggtaccatgctgttttggtaaccgtagccttgtagggtagtttgaagtcaagtagtgtgatgccttcagctttgttccttttgcttacaattgtcttgtgtatatgagctcttctgtagataattatgaaatttaag

SEQ ID NO: 396455 - DNA, 634 bp, Homo sapiens
aacatttttctgaaagaagaaaaatgtaactaaaaatttgaaaacatttatgtagataacacacgaggtcataacaactttaacaatctaagctttcagtgacagtttttgtgaagcatttttactgtcattgcctctattctctgcaatttgctctctccttttgtgtgtatgcaggaaaagcatcattcacatcgaggctatagatcaaattatctgtatgacaattgatatcttcagtaatcacggggcatgattatggaggtaagctgactctagttacttttctttctagaagtatcaacactgacagttaaaacaaggaaaaatwaaaaaaaagccattaagccaacaatcattccagtttaagaaatgtagcgtgggttagctctttgaagtgtgttgatttatatagatgcttctgactttgtagatatgtggtgttatttctgaggtctctgttctgttccattggtctatatgtctgttttggtaccggtaccatgctgttttggtaaccgtagccttgtagggtagtttgaagtcaagtagtgtgatgccttcagctttgttccttttgcttacaattgtcttgtgtatatgagctcttctgtagataattatgaaatttaag

SEQ ID NO: 396456 - DNA, 591 bp, Homo sapiens
atgacaactttaatataatggattgaagtgtcctgatagtgggtacgtatccacagtgtttcacccctaagttatttctgccctcttacatgccttgttttctctcttcagaggtctggcacctccaagaaggctcaaaagatggagtaaccagctcccatatgcatttacctatgagccttgtttaactacttttgttgggggttccctgcagggctgctgtacatcacagggggtcaaacccccagacactttcacttggcttctggtcacccaggggcascgtttgcctgggaggggcaaaatgccttttctcttcagagtgagaaaactcagtctcccatttatctacgaaaacaacagttcagttcctcgcacaaatgtgcagacaagacaattgtgcttaatttggggagaaaaagcagtagagaagaccctttagaatatacctctctgaaccagataccaaacaggttgcccaaaaaggggtcattttccttgtctttagaaaaaggcaatggaaaagatcctttagaatgcacctctcaaatagaattagaatcctaaacaacttcctaggaggaaaaaaaa

SEQ ID NO: 396457 - DNA, 593 bp, Homo sapiens
ctcaacttcccttttgcatcccctacctccttctcaagaccaatcttctctgtggttcttgctgtatctcctgccccttccaaactggtttgaaggtaagattcctctaaatgccttggctgctgaggtgagtgtgactgggtcattcaggcctctggtgmaggaggaggcagcttggccttttctttaacctaaaccagtggcactcaaatgatgatgtgtcatacacttgggaggtccacaggagagttatctcttgatgcacaggggccttctttggactcccccaaaacttcagggaacagataaccttaactttgggcaagtcatgcctttctctggcttgacttgttctgagaagtcccctacccgcactgggtcagggcttgtctgctaggctctcccagggcctatccctcccttatcacggctcctaccacaccgtgttctaatgaccagtcatcttgtctgtctctccttctagccgggaggcccctagaggccagatctgggatattactttttttctgcatcctcagtcccctgcacaagaactagcatatattagggtcattgttcatggaataaataaa

SEQ ID NO: 396458 - DNA, 575 bp, Homo sapiens
gtgagctgctccatgcctgcatcctttaaaggttcttttctcctttctcatttctttgccaaatctcaagtcctcgttgcatccctcacttgtcttgcccttgcaaagagcccacaggacctctcaggaccagttctctgtcttcctagctgatccgaaagccaaattcatggcctatggagttcatgggctgatatgtcaccttcctctcccagatcacctatgcatttccacatactttaacacagagcagtgacttgaaggtagggttttctggccagctactgataatatatatacaagggccaagtgtgatctgcatcacactgggtttgctctgaccccctcactgctcacaccaggaatggaccttggagagtgtcatttctggggcacacacaataggcagcttaatcccaccgccctatgccaatcccagttcayggcaatgcttttgagaattcttccttttttgctttgagtcagtcaaggctggcctcccaagaagcataaattgctagtccaaggctgtatggaacacagcatgttctgtccactagaagaaaggggttcca

SEQ ID NO: 396459 - DNA, 455 bp, Homo sapiens
atattaagcaaattaatgaaggaacagaaaaccacattatcactcaagtaggagctaaacgatgggtactcatgggtgtaaagatgacaacaatagacactggggactaccagtggtgggagtgagggaagggagcaagggatgagaaacaaactattgggtactatgcttagtatctgggtgacaggatcgactgtatccaaacctcagcatcacacaatatacctaggtaataaacctgcacatgaactccctaaatctaaaataaaagtggaaacttttttttaaagaaattgtggtctattcctataacagaatgctagtcaacaataaaaatgaaaaattagtgatacwtgcaacaacatggatgaatctaaaaaaaaatgccagtgaaagaagccaaagacaaactatgattccatttacataaaatttcaaaggccaggcttggtgtt

SEQ ID NO: 396460 - DNA, 576 bp, Homo sapiens
caccttggctcctttatggagtttttgagaccaagtcccaagtttgatagaccagaccccagcacacaggctttgattctgaaagacctggatccaaatcctgcctctaccactccccagttgtgtgagtagaacagggtcmtttttatcaccctccctgtctgagaaataagatgaaagaatcaggcacacaagaatcatgagcagaattggatgagagggagcaagagatcagggtttgccctcagccctgccacttactccctgcaggaccttggacaagctgacttctgcttagttttcttatctgcaaaatggggattataattccataagataatgttagaaatcttgggtttgtccaaaaccaaacccaagaataaggaggacctgaaaatgtatatttctagcaaattcccaaacaatgttgatgccactggtttggggaccacacttggagaataataaatctataggaaagacaggtgggatggagttcaaatcaaagctctgccatttctttgctgtgtgaccttgggaaagctacttggcctctctgagatccagtttttctct

SEQ ID NO: 396461 - DNA, 598 bp, Homo sapiens
atgtcattggccaagatgtcctgggaggaacattgttcgcggggggagggagacagttgcacttgcaggtacaatgtgaccgttggcaaatctgggctctgggcctcggtgtcctctttgtacaaaagagaggaattagattagctgacttctaagaaccctccagcttcaatattgyatgattctatatacaacagtcttgagtggggtcagaaacagggatctgaacgggattaagaaagtcaggggcttggagtgtggtctgcttcagcaccacagacagctccaagcctctgggcatcccaagaaaaatgcctgaatctgtgtgaaggcagatgtgtgtatgagtgacgttgacattatagtttaagtcaagggtcctcaatcacagcactattggcatttggggccagataactctggaatttttcccatgtattgcagaatgtttataagcacccaccccacaccaccctcaagtcatgacaatcaaaatcatctcccagacatcgccagacatccccagtgagtgggaacaaaatcacctccacctgagaaccagcaatctaagtaaacagctctccctgcagtgcacagc

SEQ ID NO: 396462 - DNA, 598 bp, Homo sapiens
atgtcattggccaagatgtcctgggaggaacattgttcgcggggggagggagacagttgcacttgcaggtacaatgtgaccgttggcaaatctgggctctgggcctcggtgtcctctttgtacaaaagagaggaattagattagctgacttctaagaaccctccagcttcaatattgtatgattctatatacaacagtcttgagtggggtcagaaacagggatctgaacgggattaagaaagtcaggggcttggagtgtggtctgcttcagcaccacagacagctccragcctctgggcatcccaagaaaaatgcctgaatctgtgtgaaggcagatgtgtgtatgagtgacgttgacattatagtttaagtcaagggtcctcaatcacagcactattggcatttggggccagataactctggaatttttcccatgtattgcagaatgtttataagcacccaccccacaccaccctcaagtcatgacaatcaaaatcatctcccagacatcgccagacatccccagtgagtgggaacaaaatcacctccacctgagaaccagcaatctaagtaaacagctctccctgcagtgcacagc

SEQ ID NO: 396463 - DNA, 598 bp, Homo sapiens
atgtcattggccaagatgtcctgggaggaacattgttcgcggggggagggagacagttgcacttgcaggtacaatgtgaccgttggcaaatctgggctctgggcctcggtgtcctctttgtacaaaagagaggaattagattagctgacttctaagaaccctccagcttcaatattgtatgattctatatacaacagtcttgagtggggtcagaaacagggatctgaacgggattaagaaagtcaggggcttggagtgtggtctgcttcagcaccacagacagctccaagcctctgggcatcccaagaaaaatgcctgaatctgtgtgaaggcagatgtgtgtatgagtgacgttgacattatagtttaagtcaagggtcctcaatcacagcactattggcatttggggccagataactctggaatttttcccrtgtattgcagaatgtttataagcacccaccccacaccaccctcaagtcatgacaatcaaaatcatctcccagacatcgccagacatccccagtgagtgggaacaaaatcacctccacctgagaaccagcaatctaagtaaacagctctccctgcagtgcacagc

SEQ ID NO: 396464 - DNA, 578 bp, Homo sapiens
gtaggaacaaggacagggggccctgaagggaaggaggaaggagatgagcggaggaggagaaaaagcacggcacttgagtatttggggkgtgtgtgtgtgtgtgtgtgtgtgaccatttcctttaaaaatcaatgagaatgtttagaatggtgaacagtggaaatggggactttctgtgcatcatcccatttgattctcattataatccatggggtgggcatgcttagcccattttacagatgagaagaccaatgaccacagaggccaaagaatctgcacaacagcatccagccagtgggtagaagacacaggattcaacctggggtcaaagtaaacagtctcttcactctatttgcagcttgtctcccaaggggaagggagaagaacttacattctaaaaaggtagtgaataattaaatagaacgtaagaagtgataagtgtagaagtgggtaaaaggatcagagctgtgacatttaaatgggctagttgatggagttcactgagaaggtagcagtggcacaagactggaaggaagggagggaattggatgaatggtcgtctaggggaagggacacta

SEQ ID NO: 396465 - DNA, 568 bp, Homo sapiens
tatggcaacatgaaataaactataacactctcaatatattacatatagaaaaagagacatggtagctataattaagattacagattttaagatagaaagatgatcctggataatccaagtgggtttgaactaatcacaggaaccttgaaaagtagagtactttctccagatggaggcaggagagaaggcagaagggacgtcagagagattcaaagctgagagggactcaaactgtccttgctagagggggctacatcaaggcatgagaaaaaaatgtgagcagcttctaygattgaagactaacatccagcaaggtaatgagacctcagtcctgcaactacaaggaaccaaattcagccatcaacctgaataagcttggtggcagattcatccccagagccttcagaaagggatccaggccaacaccttgatttcagccttgtgagactctaagcagaggacccattgggtcatgctataaccagacttctgatttacaggactgtgagataataagtgggtaccattctaagccaccaagtttgtggtaatttgttttggcagcaat

SEQ ID NO: 396466 - DNA, 568 bp, Homo sapiens
tatggcaacatgaaataaactataacactctcaatatattacatatagaaaaagagacatggtagctataattaagattacagattttaagatagaaagatgatcctggataatccaagtgggtttgaactaatcacaggaaccttgaaaagtagagtactttctccagatggaggcaggagagaaggcagaagggacgtcagagagattcaaagctgagagggactcaaactgtccttgctagagggggctacatcaaggcatgagaaaaaaatgtgagcagcttctatgattgaagactaacatccagcaaggtaatgagacctcagtcctgcaactacaaggarccaaattcagccatcaacctgaataagcttggtggcagattcatccccagagccttcagaaagggatccaggccaacaccttgatttcagccttgtgagactctaagcagaggacccattgggtcatgctataaccagacttctgatttacaggactgtgagataataagtgggtaccattctaagccaccaagtttgtggtaatttgttttggcagcaat

SEQ ID NO: 396467 - DNA, 683 bp, Homo sapiens
atatggttagtttgacttgagatgtgttttaagtataaaatacacactgattttgaagctttagtacaataaatgggaatatcagatatcttattaatattttatatcaattatatgttgaaataatactttgaatatgcaaaattaaataaaatgtattattcaaatttaatttcacctgtttaaaattttcaatttggctactagaaacttcttaattacatgtataacatgaaatatatttctgttggacagtgctactttacacactaatgctgatgatggaatcaatcatgtaartgaaatagactatgaatctttagatcatgatttcctacaaactttaacaaatttcctcaaattcatgaatcaatgagtaaacaacctgtctctatggaaaataaagaaaatagagtacttcatacaggacagactgtatcacaccatattttgcaacaagaatttgggctttcctcttttgctaattgcatatatgacaatattcttttatcttttataatgtttgtgtgccaaattttttatttgatataaagagttttgctatgtttaacttttattaaaatttctaatcagtttttctattatgcctttatccttctgtaaattatttgaaaaatgacttaaaaatgaaaaaatttagatggatttctttagttgagatg

SEQ ID NO: 396468 - DNA, 683 bp, Homo sapiens
atatggttagtttgacttgagatgtgttttaagtataaaatacacactgattttgaagctttagtacaataaatgggaatatcagatatcttattaatattttatatcaattatatgttgaaataatactttgaatatgcaaaattaaataaaatgtattattcaaatttaatttcacctgtttaaaattttcaatttggctactagaaacttcttaattacatgtataacatgaaatatatttctgttggacagtgctactttacacactaatgctgatgatggaatcaatcatgtaagtgaaatagactatgaatctttagatcatgatttcctacaaactttaacaaatttcctcaaattcatgaatcaatgagtaaacaacctgtctctatggaaaataaagaaaatagagtacttcatacaggacagactgtatcacaccatattttgcaacaagaatttgggctttcctcttttgctaattgcatatatgacaatattcttttatcttttataatgtttgtgtgccaaattttttatttgatayaaagagttttgctatgtttaacttttattaaaatttctaatcagtttttctattatgcctttatccttctgtaaattatttgaaaaatgacttaaaaatgaaaaaatttagatggatttctttagttgagatg

SEQ ID NO: 396469 - DNA, 414 bp, Homo sapiens
ttgtgtgccaaattttttatttgatataaagagttttgctatgtttaacttttattaaaatttctaatcagtttttctattatgcctttatccttctgtaaattatttgaaaaatgacttaaaaatgaaaaaatttagatggatttctttagttgagatggtgaatgatgatactattttcctagtatatataggggtaagtacttgaatatttgaaactagacktttcttttcttcttttttttttttttttgagacggagtctcactctgtcaccaggctggagtgcagcagcactatctcggctcactgcaacctccgcctcccaggttcaagcgattctgctgtctcagcctcccaggtagctgggactacaggcgcgtgccaccacaccctgataatttttgtattttc

SEQ ID NO: 396470 - DNA, 582 bp, Homo sapiens
ccctatttcattatgttgttctttttctgctttagcctttccactctcaaattctcttgtcaggaattcctctagaagcaccctcaaggaaattgaatgaaaaaactcagaatttttgaaaatttaaacaagtaaatttttgtatagtttcctaaaaatcattgaggatatcaataccctcttttgcaaaataaaaaaggaaattgtttctagctttaaattttatttaaaatttaagtaactgctcatctgcagwtttttatcatttgtagtgtttcaaatataaataattctatgttttgcccaatctcttccctttcttttatgtgccatttactgagggctgacataaatcccactgggagactacagagagtaaaaagcgacctggaagagtttgcttgagcctttatgactgaaaagttttgtcatagtctcagaatctgtaacaatactcagtgaccatatttaaaaaaatgattcagacagacttgttcaagcagatgtgatttctgcaaggatagccaggtcagagtccacaaatggtttaaatatgaatcatcttaaaaaacaaagaaaaac

SEQ ID NO: 396471 - DNA, 496 bp, Homo sapiens
atcttctgttattatctcttaaatatgtttctctattcgtatcccccagccatggtggataatatcacactactgttattttttctagattcaaactacaaagcagttttaaaatcctacctctctctgcctctgtcctactttggttagttgtcaggccctgaatatgtttctacaagttatctcacttccatgtcttctattccattatactgccacttctctagctctttttaatcgtcttatattttaattattgtaactggccccaaattgttaacatatgtgagtgaattcagagccccccacaaccccactccccgttacaaggtagcccacttgctctggcaccatcwagccctattgagagaagagagaggataaaaatctgtgtgtaaagatttggaatgggtgcagaaaaccaaacagagcaaaagtgtaacactcacagggtgagtgtgatctgctggcgtggcagagaagagaaaggggattt

SEQ ID NO: 396472 - DNA, 580 bp, Homo sapiens
atgtgtatgttggagtgtgtgtatgttggagtgtgtgtgttattcctgttgtttttgatatgaaacaataaaacctaaggccaaattattgctctaggttagatcaaggttcttggggctcaggttttctcttcaagrtggcattttcaaagaaacgggaggattttaatagtttactttctcttgagagttttaactattttgctaatatttaccctaaattcttcaggtatatttatgtgtattgttataaagcttggactagaaacaaacaacgccccaccaaaaaaactaataagttatgtttgactctaatcagcaagaaattatgaatcattttatgcctaaggccctaacaaaactcccattatttctctcttagtacatcttagtgtccagtctatcttttctttatgtttaggaatagaaggaacaaagataccagcaaatttttgatactgaatttgtgtattgagtggctaaaagtaatctgatgcatactgagattatccaaaaaatgctctgtttttttttcattgtttatatgcaacagtggatcttttgatgtcaagtttatttg

SEQ ID NO: 396473 - DNA, 622 bp, Homo sapiens
aacagcacagtaaaaatattacactccatgaccaagtgggattaatctcagatgtacaagagtggttcaatatctaaaaatggattgaggcaatagatcacattgatagaatagaggaaaaatactacatggtcaattcagatgcaaaaaaattgacaaaatccaacactcttccatgataaaaatattcatcaaagtaggaaaagaaaaggaaacttcctcaacatgataaaagacatttatgaacattccacagctarcattgtactcaatggtggaagacagaaagcttttctggtaagatcaggaacaagacaaggatgtctactttcaccactgttactcaaccttgtactgaaagtcctagctagagctatgatatgaacaaataagacatccacattggaaacaaagaagttcacctatctgtatttgaaaatgacataattctattttaagaaaaattccaaacaacacacacacacacacacacaagctaataaatgaatttggtaaagttgcagagtataagattttattagtctgttttcctgctgctaataaagacatacctgagactggataatttgtaaaaaaaaaaaaaggaggtttcatgtactca

SEQ ID NO: 396474 - DNA, 344 bp, Homo sapiens
catttcataataaactaaacagttaaaaacatccagatgaaggaatccttcaaatgaatcrtacagcatgcttaaaagtgtaggacagatgagtgaattttggaaaccagaagatcctgaaccactgaggcctggaagctcagggtgaggaactcagggcatgggaggcacccaggacgggggtctcccaaaatgctggtttaacttcctttcctcctacaaagaagctataaactgccattttactttctaaattaagaatctgtaagagcggactgctccctcctagaattccaggccctctgctaattgacttgttcttaccataacagaggacatggcct

SEQ ID NO: 396475 - DNA, 577 bp, Homo sapiens
tttcctaagtacagggaaaaaaacctgtcttcaatgcaaacttcaacagaatctacatctcaggaagaagatggggactgaaccacttagagcatctccagtcctcattacagaacactgtagtagtaagatgataatttaacataagaaaactgccttcctggattttccttgagaagtgattaatatgtaagagtggacaactcagggtttcacttctaccttctccatttgatgactctcagaatgaccagatataccatgcacggtgatggagaacaagaaccatagtttgaaatcagaacaatgggattccacccggcactsgtacctattaaatctcttcgaatctcagttttctcattagtaacaatctcagcaggattgttttgaaattcattgataaaaagtatgaaaagagttgctgtacacattacctttgtgatttttgttgtgtcatgtgtgtaaattccagaatattctaagagaagcagcatgatttagttattcaaacacagatgctgtgacagaaatttaactctgccactcataagcagcatgaagaatttaaatgttc

SEQ ID NO: 396476 - DNA, 511 bp, Homo sapiens
atgtaacttaaaatccttcctgaattaagtgagatcagcagagagccacattcctagacttcagcaaggtgccctagagctactttattgaatggcaggcaggagggggtagtctgatgttcatgacgtactgtgggaggattttataagaaactgccctgtgaagcttattactgtgtttactgtcaggttattattgaggacatttattattctattaggtagtatgccttcctgcaccagtaatgttgctgcttccactgagcgctgggcttgattttrttccatggatgcatttttgtttttataaatggttattttgaccatcagaaagactacagccaactttcgccttacctctaacaaatgagtattttatgttagggcatgaattgtgtgaaccttccctcttgccccattttacttctctgcccttaaattctctttatcacatcttttgagttcttattttagtggcttctcacttagtatatctacctttttttcaagc

SEQ ID NO: 396477 - DNA, 554 bp, Homo sapiens
tctcataaaatatttgcaaagaaaattagatgcatgaagaagtacaacatcttagtgggcttttattggtctatttttttaaaggttacttaattctcagtttactaatttccagaattagtgtttttgtgtctttgttgatttttatggagtcaattaaatacagctcarggacgtggcagtatctttccccaactgtagcccccacaactgttactaataacaacacaaacacagacaaaggatctttaacaaatgagaataacataccggtggcttgagtagagtcatgaaggaaaaaagtactctattttttagtaaattatccattttcccaaaaatttgcattgtgaaatggaatgaaaaataaaacatgaactcatatttagtacctactttatattcattctaaatttattttctaagacttagaactgtttttaaaacagtctacattgtcaggtcatgatacaccttatatagcaaagggggaaaaacagtgcaaggctcacatgcaaaaaatacacagatgcctttcgcagtctcaaaaaaaa

SEQ ID NO: 396478 - DNA, 560 bp, Homo sapiens
ccttgttcaacttcccctcactggctctcctgcctccttccttgtccagagcaagaataccataacaagtgaaaaaaagctttgggctattcacagtaaattgatcccccctgtaagaagtgctaactctcttgttttaattactctgggcttcttggagtgaacaacttattctcaaaaggtcacataagccctctctttcctggctttctggctaaaggagttacagggcagcactttgcctatcttacaagatatttataatgagtgcagctggcctttatggagtatatctgcatcccaggatggggggaaaaaaccctggactttcccaaggtcactctgtagaatagacctgccttttgatgcagaaaaatgtgcaacctcattcttagcctgagctcggaatcacaaccctgtgttttattyccccagagatcccaagttctagatcaacatttctccctccaagagaccttttaaaatattttaaacactgcgtaaagcaagtttaacttgggtgcgaaggagcctaatttgactctgctgttaaattaata

SEQ ID NO: 396479 - DNA, 599 bp, Homo sapiens
gcttgctgaaatcctaaattatttaaatatgtgccaaagcacaaaactctggaattagactaataagtgtaaactttataaaatttttctttatrattgtttcatttgtttttccaaattcagaatataataaagaaaatgtttagttagagtgaagattaatttgagctctgtgcttgaaataaaagctttatctttggaactagcacagacctctaggcattgagagaacaagtttctctttttcattcccagaagtgctctttcatcatacatattttttttctttatatgagccaactttcaaaatatttggaagaagaaaggattcattctcaggtttctcattattgctttgctggtgaccttgggaaagtcaattaaattctttcatgtttttcataacatggaaataataagtgagactattcagcacataaatcaatgatttgggagtgcttaaaatcctgcaaaaatatgaaataccagaatattactatttgaaaataatgaatttctgtttgtgttccaaaaacaaaataatcacatattttattgataaaggaaggtacatcgcacatgtgacaaatgctatttcc

SEQ ID NO: 396480 - DNA, 571 bp, Homo sapiens
ttgttaagtgtgccagtagcacaaatgggccagtgtgtatatatatacatatttttttcttttacaaagcagagaaaagcagatttttaagttattagtraacttgacatgaaaatattaaaatgaaatggttccaaaacattttctttctcttcagccagtctatcaactgtctcagaaagcatatgcaacttgagaaaagaaataaaagtaatgatcatgtctttaaatcctatttaagctaaaaggcaggatgaaaagaaaattatttaaactaaagttctttctatgtggttctatggtatgtgttaggtattgataaactgcatcaaattttacaggaaatttacattctcaaataaatgttatatttattgaaattaaaatattaaggataaaattggttcagtttacacatcaggaaacactccatatggttcagcagtcagcacaaaatctgaaagatttcccaaattcactctgatatttttcacttttctcagcatgttccttttgcccagtttctaaattcctaatcaactttcacagtcttctctgaggatgcacacag

SEQ ID NO: 396481 - DNA, 571 bp, Homo sapiens
ttgttaagtgtgccagtagcacaaatgggccagtgtgtatatatatacatatttttttcttttacaaagcagagaaaagcagatttttaagttattagtaaacttgacatgaaaatattaaaatgaaatggttccaaaacattttctttctcttcagccagtctatcaactgtctcagaaagcatatgcaacttgagaaaagaaataaaagtaatgatcatgtctttaaatcctatttaagctaaaaggcaggatgaaaagaaaattatttaaactaaagttctttctatgtggttctatggtatgtgttaggtattgataaactgcatcaaattttacaggaaatttayattctcaaataaatgttatatttattgaaattaaaatattaaggataaaattggttcagtttacacatcaggaaacactccatatggttcagcagtcagcacaaaatctgaaagatttcccaaattcactctgatatttttcacttttctcagcatgttccttttgcccagtttctaaattcctaatcaactttcacagtcttctctgaggatgcacacag

SEQ ID NO: 396482 - DNA, 602 bp, Homo sapiens
tattgcttggcctcaatgaggacagaaaagggagtgacagaggctgtgttgacccagagaagacaggctctgttttaaagggggagccaccacttagctcccattgctttttgtaaggaaaatgggcggaggtgccagctcctctgaattttctagcagggctggcttcaagggcatgcattccctgcagtgccccagggccagcactcagaaggacccacacctggtttgatgctctgctatccccatcttgaaattcttttttattattaktatttttaatttttctagagacaggtctcactttgcggcttagcttggagtacagcagtactatcatagctcactgctaactcaacttcctgttttcaagggatcctcctaggagcctcagcctcgaagtagctgggatgacaggtgtgaaccaccatgcccagctaatatttaaattgtttgtaaagatgtggtcttgccatcttccccaggctgatcttgacatcctgggctcaagcaatcctcccaccttggccttccaaagtgctgggattacaggcatgagctactgtgcccggccaaaattcttaataatttttgaacaaaag

SEQ ID NO: 396483 - DNA, 532 bp, Homo sapiens
ccagggaagccagagcacaggatatcctggttttcttttcttccatcatcaatctgcggaggtcatggtggctgcactctggagaggctgagttatctgcagggaaaaaggaagggaaaggaatacctataaaatagcagccttatttttttaggttcacagtcatatttttcagagagaaaaagaaatctgtaaaccagctttctttttcaccagagatgctcaattctgtataattatcgggaaagatattttactcttgcatgaaattaccagattgttctcagaagagccacctggggccaggagggatgggcagggaatacgactataatatagaagatgagaaatgtgcacagtaatattgacctcagggtgtactgtcaacttgacatctgaacccagcctcccctgccaagtctcctcctgctctgctccactaatattactctcacattgttcttacgatagcgccaytgagggagcctcagctatgtgtcagcacagtggctaaacttgaaacatgttagcc

SEQ ID NO: 396484 - DNA, 389 bp, Homo sapiens
aagtgagtccctgaaggtcgaggtgccctccaagcctacacccccctcctgagagcagggtcctcatgagggtctcattgcatgagacagtcagggtcatgccacggactctgtctgaatgaagccacttctgccatattcatcctgactgttcagaccaggcatcactggccgtgcacagtctagatggagggagggacatgtttctgcagggacttggcacaatgctgtgtctaaaaggagtgctccatgttggtgcagccaaatagagctgatgagatgctctctgtggccgtggttgctggtttcttctcagtattcattccctctttttcsttagtaataaggacctcagacacaagagcctagctaagaaggattccacgttt

SEQ ID NO: 396485 - DNA, 496 bp, Homo sapiens
ctacatattcatatataatacactcaaaactatacatacatgaatgagtaaaacaaagatctagaatgatgtataatttgataccagtgcttacctatggttagagcagtgatcagagatgagattatagaattttcagttttttaattccaggtttattgaggtataactgacaaataaaaattgtatatacttaaggtgtacgacatgacgttttgatgtatgtatgcactgtggaatgattaccacaatccagtgaattaacataatcagcacttcacagttaccrtttttttggtggtgagaacacttaatatttactgtcacaaaatttcaagtatacagtacagtgttatttaccatagtcaccatggtgcacatgaaacctccagaacttattcattctgcctagctgaaactttgtgccccttgatcaatatctcatttcccttagccctcagccctggcaaccaccattctatactttgcttccatg

SEQ ID NO: 396486 - DNA, 540 bp, Homo sapiens
tgctccccacccattagctcatttgcaaccccctcacctccccaaccgccttgtgaaacctgggatgttgtggtttaatggtttttcrcaaatagatttcctttctctgtgtggaaggggaacagcccagcgtccaggtgataaaactgaagagaactactcaaggttgtagagcttgaacctgaactctggtcttcaaagactgagggtgagtagttttctgaggctctacattgtagaatgaggattctacattctgaccccttacctgagtcctagactacatgtgctagtggtagctcctactctgtctcccttttccagcccagttctcccttagactctgccccttcccagcccaatctgtgatcatttcctctctattttgtactggttggatgatatagggtgaatcgcttctctctttgccatttctatttggaaaagtaaagttacctattatactgatctcattgcatcattataaaactcaaatacctaaggttttgtaaagcccagtgcccatcaggtaaaaaccac

SEQ ID NO: 396487 - DNA, 567 bp, Homo sapiens
agacagctcgggcacagagggaggtagggggagagtctcttgagttactgccaaacttcaccctcatacaatggccctagtaaaacagtgggccttaataagcaaattcctttcccttcaggtgcactaagatagggaagctaaaagcagactcagtgggtatgcctgtagctgcagaaagatgtatgggtacagacacacacctctctctcccagataagcacaacaaagagactcagaagcagtccaagtctctgataaactctcccaccctaaatccttaaaaactcttagtctgtaagagagtgtgcctctgacttaactcggccagaaactcctctcaggtttgttttctctaaaayctgtcttgactggtgagccaccattcgtgtttctttcctctttctttaattcttacagtgagcctttgtgtataggtggggcttgagaagagatgccactgacctgattcctgcccttaagatactccccatccatagcctcatgtcctcaccacacacacacatgctgtctggctttagagctgtgaaaagttgggaatttgcc

SEQ ID NO: 396488 - DNA, 578 bp, Homo sapiens
atctgtttttcttttctggtgaggtggctgataaaacctttggctacctttttaaaatattgtgttagttcattcttggcttgctatagaggaatatctgagactgagtaatttatgaagaaaacagatatattttggctcacagttctgcaggctgtgcaagaaatgtggtgctggcatttgcttctggtgagggccttgagtactatatttttttgagaaatgtgattcacaccctctgtccatttttaagtgttgtttattttttgttrttgttgagtggctgctttttcatttacacaaaattgggccttttgttgttgttgttgctgttgtggtttacttatgtttttgttttgagagtccttgatatattctggatacaagtcattcatcagatacctatattcaggtgttatcaccctgtaacttatcttttggctgtcttatcagtgtcttttatggtataatagaccccattcccataaatacgcgttacatgagttggcccactagtgtgtcaggacggaaagaacagagaaagtaatagaaagagaaggcaaggtctggagggcaga

SEQ ID NO: 396489 - DNA, 578 bp, Homo sapiens
atctgtttttcttttctggtgaggtggctgataaaacctttggctacctttttaaaatattgtgttagttcattcttggcttgctatagaggaatatctgagactgagtaatttatgaagaaaacagatatattttggctcacagttctgcaggctgtgcaagaaatgtggtgctggcatttgcttctggtgagggccttgagtactatatttttttgagaaatgtgattcacaccctctgtccatttttaagtgttgtttattttttgttattgttgagtggctgctttttcatttacacaaaattgggccttttgttgttgttgttgctgttgtggtttacttatgtttttgttttgagagtccttgatatattctggatacaagtcattcatcagatacctatattcaggtgttatcaccctgtaacttatcytttggctgtcttatcagtgtcttttatggtataatagaccccattcccataaatacgcgttacatgagttggcccactagtgtgtcaggacggaaagaacagagaaagtaatagaaagagaaggcaaggtctggagggcaga

SEQ ID NO: 396490 - DNA, 578 bp, Homo sapiens
atctgtttttcttttctggtgaggtggctgataaaacctttggctacctttttaaaatattgtgttagttcattcttggcttgctatagaggaatatctgagactgagtaatttatgaagaaaacagatatattttggctcacagttctgcaggctgtgcaagaaatgtggtgctggcatttgcttctggtgagggccttgagtactatatttttttgagaaatgtgattcacaccctctgtccatttttaagtgttgtttattttttgttattgttgagtggctgctttttcatttacacaaaattgggccttttgttgttgttgttgctgttgtggtttacttatgtttttgttttgagagtccttgatatattctggatacaagtcattcatcagatacctatattcaggtgttatcaccctgtaacttatcttttggctgtcttatcagtgtcttttatggtataatagaccccattcccayaaatacgcgttacatgagttggcccactagtgtgtcaggacggaaagaacagagaaagtaatagaaagagaaggcaaggtctggagggcaga

SEQ ID NO: 396491 - DNA, 496 bp, Homo sapiens
aaatgctggagggttccagggctgtgtctgtggaccccttctcttctttgtagattcatcgattattggatgttgatagggaagctcccaacctctgtgtctcccacgtggakccctcttctgagctccagacacttgcctgctacttgtcatctccacatggatgtctcagaggcacctcaaacttacggtaaccaaaataatgtttgatatacacttgaaaatagacttctccttcaaggatggcaattttaatcattggcaatttgattttttaagtttgaattctgagttaaccacatgaacatcatcattggcatctatagacatctatgacatctatggggtcttcttggacatccatgacatctatgatatctgtggacccacctatgacatctgagacacttatcgagcagagcccgtgagctatctttgctcatgccttgcatgcactccatcactccacttgcaaatactgttgactccaccttca

SEQ ID NO: 396492 - DNA, 525 bp, Homo sapiens
atcctaaaaatctgttactcagttgttagagttttcatcattaaaaacaacaagctggccagatgctgtggctcatgcctttaatcctagcactgtgggaggccaaggcgagcagattacctgaggtcaggagctcaagaccagcctggccaacatgacaaaaccctttatctactaaaaatacaaaaatttagccaggcatggtggggcacacctgtaacactagctactcgggaggctgaggcatgagaatcacttgaaagaggcagagattgcagtgagccaarattgtgccactcactccagcctgggtgacagagtgacattccatctcaaaaaaaaaaaagaaaaagaaaagaaaagaaaaaccttaatttgtagcttgaaggcctttgaggattaaatgtgaaatgtgttaaaattcttagcacttttcatgcctcttacagacccttgatgaaggccctcattttcttgcccttgttctctctttccttgaggaattcttgtgttttctctaatttg

SEQ ID NO: 396493 - DNA, 612 bp, Homo sapiens
tgtgttttctctaatttgtgttcatcaaacatttaaatgaaaatgacagaatgacacaaggtatattctgcgagttgaatatgtgaaaacagtaacgacatagttttgcatattgaataaaaaataaattccaaaaagtaaattattaaaaatctacttttgtttttctcacaaagttcttgttcttagtgctattttttccctctcaatgtccttatctctactaaccatcttaaatggtcgtgttccacttaaattcctcaatgtctgtactttaagaggcctaaagtcacctaaattacctaacgatcatctatatgagtttaattgggattaaaattgtcagtcatttgggttactcatgagttagtgacagaattctaccttctagggcagaaaaccaacaactgactcttagctagagcagatttcttttaaaataamaacatgatacaaataatagaaagagcacttaactgagagttaagaaacctgagtcctgatgccagtcctgatactacctatgtgaccctgggcaagtgtttgacctctctggctatgagttcttttttcataaaataagaaattaaaatgccatggtttctgataagt

SEQ ID NO: 396494 - DNA, 433 bp, Homo sapiens
taatgttcaactgtaaaaaattagatcatagcaacctrgaaatagaggctgacctagtcatgtacctgtgtatgtacgctaatgaattagattcatcaagtcatggcacactgcatatggaaaggaacttaaagctcatcatgccaaatcctctcacattgtcactgaggaaatgcaggcccagagaaaaacaaaaatttgtcccgtatcactagtctaatttattgtgaatttggcagtaaaatacaggcattcttttctacgccatttcaaactatccttaatcaccttgaagcagatgctccatgccagttgtatgtcatatacagtggtcctttctgaacacccacaagtgccttcattctcacagaccccatctgaataaagatacatgaggtgccttacacataggtaattatgttttattccatgt

SEQ ID NO: 396495 - DNA, 622 bp, Homo sapiens
cttttcatgttaaggtaatttccctctatttctagtctgttgagagtttttaacatraaaggatgttgaattttaacaaatgcttttttgcatctattaagatcatgtggttcttatcttttattctgtcagtgtggtgtattaccttaattgatttttatatgttgaaccatacttgccttccagggataaattgcagctggtcatgggtgtctgatcctcttagtaagttgttgaacttggtttgtcagtattttcttgaggatttttgcatctatggtcatcaaggatattggcctgtagttttcttttcttctgatatttttgtctggctttggtatcaggcaacactggcctcataaaatcagattgaaagtgttccatcttcctcaattctttagaggagattgagaagaattggcattaattcgtttttggatgtttgttcaaattcactattgaagccatttggttctaggcttttctttggtaggaagtttttgattactatttcaatccctccactgggtataggtctgttcagattttctgtttcttcatgactcaaccttggtaggttgtatgtttctgagaatttatctatctcttccaggtaatccaa

SEQ ID NO: 396496 - DNA, 605 bp, Homo sapiens
ctattttgtccaatataagtatagccagtctttcttttggttaaaatttgcagcatgattttttccatccctacacttttggcctatatgtgtccttaaatctaaacttaataagtttattaagtttattaataataataagttatgtaaacttaataagttgtcaaacttaagaagtttacataaattgatccaayataagttggatcttgttttttttcatccattcagctacattatgtcttttgattgaggagtttaatccctttatatttagagtaattaatgtacttccttttgatgggcgagtacttactatagccatgtttttttactaccttgtagttgttttgttcatctttttttccttgctgtattcttctgtattttgttttgtatttattgctatactttgatttccttctctttttttatggctcttctgtatgtactttctttgtggttaccaagaagcttgtataaaacaactcatagtcataacagtttattctaagctttaaacaacttaacttcagttgcatacaaaagctacacttttacttctccccccacaaaccccccacacacgttatgttcttgatgtc

SEQ ID NO: 396497 - DNA, 429 bp, Homo sapiens
ccttttgtttcaacttgaagaacttcctttagcatttcttgttaggcaggtctggtaatgatgaactccctcagattttatttgtgaaggaaagtctttatctctcctttatttttgagatcatttttatcaggtatagtattcttagcaggggtcttttctttcagcactttgaatttattctcatctaccttctctggcatgcaawgtttctgctgataaatctgttgataaccccacggagatttccttgtatggaatgagtcacttttctcttgctgctttcaaattctctctttgtcttcaaattttgtcagttcaattatgtgtctcactgtgaatttctttgggtttactctatttgaatttgtggaacatccttgatctgggtgttcatttccttccctagatttgggaagttttcattca

SEQ ID NO: 396498 - DNA, 544 bp, Homo sapiens
ggcccttggcaagagggtgtccttgtctctcttgctggttttcatgtagttggttttacacttgctccaggatgcaggagacttgtaactagtttctggatttctcacaaagtaaattagtttgtattttattatagaatcattgtttccattgaggaaagatggatccagggcttctattctaccatcttgctgacattactgattgaattttcaaatctttatatctccaagagcctagtatagtgcctagtgtgaaattaatactccataagaatgaacgaatgaatgaatggatgaatgccctggggttcaaccactttctcccrtattttcctacaagtgatttacctttttatggagctttgaggaaatccatttgctcttcctcctcacctggattaactcccactcccattcctgaggaagtgcttttatgcaagatgaagtggttctttgtgtgtgtgtgtgtgtgtgtgtgtgtgtgtgtttttcatatgtgtgaaatgttaccataaccctggttcttctgacagtagtcaat

SEQ ID NO: 396499 - DNA, 544 bp, Homo sapiens
ggcccttggcaagagggtgtccttgtctctcttgctggttttcatgtagttggttttacacttgctccaggatgcaggagacttgtaactagtttctggatttctcacaaagtaaattagtttgtattttattatagaatcattgtttccattgaggaaagatggatccagggcttctattctaccatcttgctgacattactgattgaattttcaaatctttatatctccaagagcctagtatagtgcctagtgtgaaattaatactccataagaatgaacgaatgaatgaatggatgaatgccctggggttcaaccactttctcccatattttcctacaagtgatttacctttttatggagctttgaggaaatccatttgctcttcctcctcacctggattaactcccactcccattcctgaggaagtgcttttatgcaagatgaagtggttctttgtgtgtgtgtgtgtgtgtgtgtgtgtgtgtgtktttcatatgtgtgaaatgttaccataaccctggttcttctgacagtagtcaat

SEQ ID NO: 396500 - DNA, 615 bp, Homo sapiens
caagtatatagaaactaagaaaaatacagaaatagtagctaagagaacagtggaaagctggggagaaagagagacagagacagaggaaaaaagatgtagagaaattgaattctcctaacacacttaggaaaagcaaaaggaaaattggattccaaattggcacttttcccacaaactacagtccataagggtgtgtgtgtgtgtgtatatatatgtgtatatatatatgaatactgctgtttactcatcaatttacagtgtatttttcacaactaatttatagatgaaaaaacagtaaatgtaaaagcactataaatgtaaggtaacatagatcagtggatttttctaaataactcattaactaaagcatacttttccaaaataacctgaaaaacaagtgtttttaaaagtattttattaraatctatatagttcacatatcaatatgctttcctgcaattcaaaataggcaaaaatgattatttctttattttaaatatctctgcacattgaggcaagttataaaaatcaatgtccccacacattaaaaaaataagctatgcttagacttgtttttcttgctgtttgtcttattattttttcagtttttttaag

SEQ ID NO: 396501 - DNA, 481 bp, Homo sapiens
ataaattcacatactatatgaatacatatacatgtacacacttacacatttatttgacttcattgtagaactttgacattaatcccaataactaatctctttatacatattgtttcatcctgacatcaacctgaacagggaaaattgacttatataagcacacagctactacagatgtctttttagaaactgattattgatatatagcagagaaacttaaaatctctttaactaacttgaagtcctgaccatatgacttctttacaaacaatgagatgagtaccctgagagatgctgcttccagcaactaaagattgaattaaatcattaayaaatacatgataaaaacaggaatacattgtatacattttgtattaactagggtttcctagagaaacaatagataaatgatagctagctagctagatagactgagtaatagattcattatagaatttggctcacatcattatggaggctg

SEQ ID NO: 396502 - DNA, 474 bp, Homo sapiens
tggtttaggtgtctggtcttcccaatttgactctcaactttccccaattaataggagttggatttgcttccatttcaaattcaagctctaattcagcaacacttacttctctccttcctctcaccatatccaaaagacacaataatcagtgggaaagactcaaacacccaagttacaaggctggcattattatacrttttaaactcaaggtcataccttctgactcaattttagtgctcttaaaaacaacaacaacaacaatgacaaaaaatatatatataatataataaaaataaaaaccctttctttaaaataaggagataacagaaaagaccatctattttttttaacctctactccctcactactccagtctgatagtctgatagaaatgattcatgaagagctaaagtgttaaaaagacaaagggaagagcaataggaactcgcacctacaaagttcttacatacataa

SEQ ID NO: 396503 - DNA, 461 bp, Homo sapiens
gtatctttaactcaaacattattggaaaaaagttgtaattgtgtaattgtatactttatcctaaaattgtttttttttttaacttgagtggaaattgggagaaaatactggcagattcagttatgagaggtacatccaaacatggtaggcttctggatacagcagagcaaaatcctctaagtctaaaacaaaagtatctgtttttaaagctgaggattgggcaacctttcttagtcattcttgaaatagaaaagtttacttcaaatattatatcaagtttagctgcttttttgtttcttctctaaagwcgtgttgtctcaaagaaacagttgaacctattttattaagtgattgtaaggtatacatttcaagataattctagaatgcattacattgcaaaaatgcaggaatcaccttggcagaataatagtaagatgtatttcaaaaattataaagtgatt

SEQ ID NO: 396504 - DNA, 571 bp, Homo sapiens
aaaaggaggaacattaaagccaatgaccaggctccattagcagaaagagctgaaagaaaattcctatagctattttattttttgaatccagcagatattwtgctcaaaaccagtgttttccaacctaggttctcatcagaatctcttggagaaaatttaaaaaatacaaagatcaggtctccacactcagaattttttaacttaattagtctatatgaaacaggacatcattagataattctaacgtgtagtcagttttagaaaaccattattataaataaagcctccaaaaggcagttaagcatgccatcatgatggatgcaattgaaatatttttttccaggttaaaatacttatactgaataaaacatggatacccttggagaaggtcactgtagaccatcatggtgtattcactggaccccagcacctgttgctattcacatgatctcatccgttccattcacattgtcacaatctaacagaaaataacccaaagaactgatgtgttctcgttgctcctcatatacttgcttttctgataactataccttatacatgtggcagttca

SEQ ID NO: 396505 - DNA, 571 bp, Homo sapiens
aaaaggaggaacattaaagccaatgaccaggctccattagcagaaagagctgaaagaaaattcctatagctattttattttttgaatccagcagatattatgctcaaaaccagtgttttccaacctaggttctcatcagaatctcttggagaaaatttaaaaaatacaargatcaggtctccacactcagaattttttaacttaattagtctatatgaaacaggacatcattagataattctaacgtgtagtcagttttagaaaaccattattataaataaagcctccaaaaggcagttaagcatgccatcatgatggatgcaattgaaatatttttttccaggttaaaatacttatactgaataaaacatggatacccttggagaaggtcactgtagaccatcatggtgtattcactggaccccagcacctgttgctattcacatgatctcatccgttccattcacattgtcacaatctaacagaaaataacccaaagaactgatgtgttctcgttgctcctcatatacttgcttttctgataactataccttatacatgtggcagttca

SEQ ID NO: 396506 - DNA, 571 bp, Homo sapiens
aaaaggaggaacattaaagccaatgaccaggctccattagcagaaagagctgaaagaaaattcctatagctattttattttttgaatccagcagatattatgctcaaaaccagtgttttccaacctaggttctcatcagaatctcttggagaaaatttaaaaaatacaaagatcaggtctccacactcagaattttttaacttaattagtctatatgaaacaggacatcattagataattctaacgtgtagtcagttttagaaaaccattattataaataaagcctccaaaaggcagttaagcatgccatcatgatggatgcaattgaaatatttttttccaggttaaaatacttatactgaataaaacatggatacccttggagaaggtcactgtagaccatcatggtgtattcactggaccccagcacctgttgctattcacatgatctcatccgttccattcacattgtcacaatctaacagaaaataacccaaagaactgatgtgttctcrttgctcctcatatacttgcttttctgataactataccttatacatgtggcagttca

SEQ ID NO: 396507 - DNA, 579 bp, Homo sapiens
gtatgagtatgttcctgaagaataggttcatgagaatattcatatttcatatactcaagaagaatacattcttaatcatatctaaacaaagtgtgtcttcaatattgttttaatttaatatactcaaattaatttaatatactcaaaataaatgtttcaacaaaattgttggcacactagaaaatttattacattcagtgaattagtcattcaaaaaattgctccttcagggaactgatttttgatgacttggtctgttttcaaygcggactgaaattagtggggcaggattagggttgggatgagggtggtgggatctggaaacaatacagaatggctctcgttgagaatgaagtgagggcagcctaggacatagtgcctgtgtccattgctggggccagcctgcaggaaaaggggtgctataataagcctagataaatggaggcattgggcttgaggctacttatttatatcctgctaaaactcaaattgctctgaaaataaatagtgaggctggatctgtagaagattaaatgagttgacccagctgtgggagaactggggcaggcagaagctggg

SEQ ID NO: 396508 - DNA, 579 bp, Homo sapiens
gtatgagtatgttcctgaagaataggttcatgagaatattcatatttcatatactcaagaagaatacattcttaatcatatctaaacaaagtgtgtcttcaatattgttttaatttaatatactcaaattaatttaatatactcaaaataaatgtttcaacaaaattgttggcacactagaaaatttattacattcagtgaattagtcattcaaaaaattgctccttcagggaactgatttttgatgacttggtctgttttcaatgcggactgaaattagtgsggcaggattagggttgggatgagggtggtgggatctggaaacaatacagaatggctctcgttgagaatgaagtgagggcagcctaggacatagtgcctgtgtccattgctggggccagcctgcaggaaaaggggtgctataataagcctagataaatggaggcattgggcttgaggctacttatttatatcctgctaaaactcaaattgctctgaaaataaatagtgaggctggatctgtagaagattaaatgagttgacccagctgtgggagaactggggcaggcagaagctggg

SEQ ID NO: 396509 - DNA, 628 bp, Homo sapiens
tctaacatcaggatgaccactgtttttggctatggcacaactatagaatagttatcaatatttctcttgggcagaagagggcaaaatacgaatcattgctgcctcctcttcatcttcattcctggcaaattctcctatggactttctccaaatggatatataaataaagcctttgatgaatatcttttgcgtgtgatagtatgtgtgtctgtgcttcagaaatactatttctcaaaggatatgagtgtgtttcctaaaggataaaagtgtgagtgcatagctgagcttatgtgttgaacttggatctgtttgtgcttggtgtttagatatttttagctagagatgactagattttcagctaatttgctaaaaagaaatttgtgctatgtctgctgtagggcaggatgatggaattggagattatttcacctggctttcatccccaatccctgcraattctttggagatggaaaatttagagcgggctttcatattttttgtaccggttgtgaacaataagaagcttgaaaatcagaagaggcactcttactacaggaacaacacccttgggtacaaatgttttgtaaaattccaataaaccaatcattgtcctctttgtgaattactg

SEQ ID NO: 396510 - DNA, 568 bp, Homo sapiens
agcctacaatgaaaatgtctgaggtgggaagatacaacaagaatgaaaagaaagcagattataaacccatgtttatgagtttcatagacctttatgaactagaaagaaacctgtaaggatgatttaatgatgcttatacacttctaatttataccctctttcaataggaaacacttattaagctcgaatacaggtaagagaccatgtaagatcctgtagatatggtcatatacagggatgtgcatgtcttatgtatttgtgcrtgggtgtttgtatatataatgtatagttaactcttttctggtgatagaaataatacattactgcttcattttgctattgaaatatatctaaagaacatgcaccaagaagtgccttaggtcatagaaaattaaggatgacttctatatcactataactttaataattttaacccttgtgaaaaaaatcgtttaactccatagagcctatacgggtagtatgcattatttaaatcaatggaattttcttctcagtttttttttgtgcaaaataagggacattctttagaaaattctgtgatacttct

SEQ ID NO: 396511 - DNA, 572 bp, Homo sapiens
cactggatcatctttccctggaggagtcagagccctataatctatgaggccctcatgggttctttcatccccagagctccaggtgtagctgatgwtcctcctccctctgctggaaccctctgactctcaaataggcttcacacatgaagccgggagattgttttatactctaaataactttctgtttctacaacagatgggaagactgtatcttctagcctaattggaggctcacaattccagggagaatttcggctgggcaggagctctcttcctctgagattttatttcccagggacattccatacttggcccatgacagaggctgcagttgcccaagggaacaatgcgtcaagggccactcatcctttggaaagcagaagtccagataccagagtaaaaccataactcattaacacttccaacaagtatttattatgtgttgagcaatctgtgccagccctgatgacctaatggtgagcaaaaccatgttctgtcttcctgcaacctgcaatctggcaagtgggtcaaagagcctaaagaaggcattagttagaatacaggtgcagcaa

SEQ ID NO: 396512 - DNA, 459 bp, Homo sapiens
acttccaacaagtatttattatgtgttgagcaatctgtgccagccctgatgacctaatggtgagcaaaaccatgttctgtcttcctgcaacctgcaatctggcaagtgggtcaaagagcctaaagaaggyattagttagaatacaggtgcagcaattctaacagaacctcaaaatactagggttcagataagatggaactgcatttacctttcacaagggtgggcagtcgagacccaggtaccttccaccttgttgctccagcatcctgagtgtgtggccctcatccatgtggtccaagatggttcaccatcaccaagatagccacactccaacaaggaggaaggaagagaaaggtgggagaatggaaggaataaacccctcttttcaaaggtccagaagtcacaccacactgaagctcaaactcttcttgcagaaattagtcccatgaccacaccagc

SEQ ID NO: 396513 - DNA, 459 bp, Homo sapiens
acttccaacaagtatttattatgtgttgagcaatctgtgccagccctgatgacctaatggtgagcaaaaccatgttctgtcttcctgcaacctgcaatctggcaagtgggtcaaagagcctaaagaaggcattagttagaatacaggtgcagcaattctaacagaacctcaaaatactagggttcagataagatggaactgcatttacctttcacaagggtgggcagtcgagacccaggtaccttccaccttgttgctccagcatcctgagtgtgtggccctcatccatgtggtccaagrtggttcaccatcaccaagatagccacactccaacaaggaggaaggaagagaaaggtgggagaatggaaggaataaacccctcttttcaaaggtccagaagtcacaccacactgaagctcaaactcttcttgcagaaattagtcccatgaccacaccagc

SEQ ID NO: 396514 - DNA, 459 bp, Homo sapiens
acttccaacaagtatttattatgtgttgagcaatctgtgccagccctgatgacctaatggtgagcaaaaccatgttctgtcttcctgcaacctgcaatctggcaagtgggtcaaagagcctaaagaaggcattagttagaatacaggtgcagcaattctaacagaacctcaaaatactagggttcagataagatggaactgcatttacctttcacaagggtgggcagtcgagacccaggtaccttccaccttgttgctccagcatcctgagtgtgtggccctcatccatgtggtccaagatggttcaccatcaccawgatagccacactccaacaaggaggaaggaagagaaaggtgggagaatggaaggaataaacccctcttttcaaaggtccagaagtcacaccacactgaagctcaaactcttcttgcagaaattagtcccatgaccacaccagc

SEQ ID NO: 396515 - DNA, 538 bp, Homo sapiens
actccttgaaggctgatggctttggacacatctgctcctcaacgtccttgcctctcaaatgatagcgtggcccagccacccttggatggttaggtgggattttctgctggaattgtgcatcttgggaaaatgttttgaaaagcctgaaactctggaaagatgggagtaggatggagactccagtttgagtctctaagccaggtctgcaggatgggcccctccaactgagtaagtgcctgctgtccttttcccggcacccccactggccaactcctcctcagccagagatgttggggctatttccatctgtgcgctaaaccctcgtggatgggcgtggccacytttccataggaaaccacccagtggtaagtcctctatcaccctctcgtgacctctaggtaggtggccatatgtcccctttacccagtttattccggtgaatagtgcctcctttcattctcaaacaagtgtcccagctggcacaagaaaacacggggtcactgcacctctaggccaagtgacacctctacagacaccg

SEQ ID NO: 396516 - DNA, 525 bp, Homo sapiens
gaggcctgggcctgtcccatactctccgggcctrcaaatactttcagtatccaccagcactgggggctgatcacacaagaatacaaaagcttctcagcctgatgcggtggctcatgcctataatctcagcactttgggaggccaaggcagatggatcacttgaggtcaccagttcaagaccagcctggccaacatggtaaaacctcgtctccactgaaaatacaaaaaaatcatccaggcatggtggcacatgcctgtactcccagctacttgggagcctgaggaaggagaatcgcttgacccttggaggtggaggttccagtgagcccgagatcgggctactgcactccagcttgggagacagagcgagactctgtctcaaaaaaaaaaaaaaaaaaaaatctcattttagatcctgcctaagccacagactgacatgaggccccctcattgccaaccactagttcagctgtgggaaagccacctccaggtcttttgtgagagaatcaaggtcagaccccagag

SEQ ID NO: 396517 - DNA, 525 bp, Homo sapiens
gaggcctgggcctgtcccatactctccgggcctgcaaatactttcagtatccaccagcactgggggctgatcacacaagaatacaaaagcttctcagcctgatgcggtggctcatgcctataatctcagcactttgggaggccaaggcagatggatcacttgaggtcaccagttcaagaccagcctggccaacatggtaaaacctcgtctccactgaaaatacaaaaaaatcatccaggcatggtggcacatgcctgtactcccagctacttgggagcctgaggaaggagaatcgcttgacccttggaggtggaggttscagtgagcccgagatcgggctactgcactccagcttgggagacagagcgagactctgtctcaaaaaaaaaaaaaaaaaaaaatctcattttagatcctgcctaagccacagactgacatgaggccccctcattgccaaccactagttcagctgtgggaaagccacctccaggtcttttgtgagagaatcaaggtcagaccccagag

SEQ ID NO: 396518 - DNA, 465 bp, Homo sapiens
taccaggcattcttttagaaactcacagcrcatatcagccaggcgcagactctgagaagtcctgcatgaagggatcatctataagggctaattgaatgtttcccaaagttattgagtggaacatgtttgttaattgacataccctatgacatcatgtggaacggctttccagtgctaaccgtatgaaaatctcactaatctgccagcctcccaccctcaggcagggtaaccctagagccactcaggaaacacattttgcatttcactacactaaatcttgccttgtcaagccgtcaaccctcagcgtttcttccagggaagccgcgcagctcagtggaaagaccacagactcaaggcttgaaatctgcatccaccacttaactaattgtgtgacaacaggaaagacactgaaatgcccttagtccttctcatctgtaaaatgagagtaacacctaatagtgaaag

SEQ ID NO: 396519 - DNA, 465 bp, Homo sapiens
taccaggcattcttttagaaactcacagcgcatatcagccaggcgcagactctgagaagtcctgcatgaagggatcatctataagggctaattgaatgtttcccaaagttattgagtggaacatgtttgttaattgacataccctatgacatcatgtggaacrgctttccagtgctaaccgtatgaaaatctcactaatctgccagcctcccaccctcaggcagggtaaccctagagccactcaggaaacacattttgcatttcactacactaaatcttgccttgtcaagccgtcaaccctcagcgtttcttccagggaagccgcgcagctcagtggaaagaccacagactcaaggcttgaaatctgcatccaccacttaactaattgtgtgacaacaggaaagacactgaaatgcccttagtccttctcatctgtaaaatgagagtaacacctaatagtgaaag

SEQ ID NO: 396520 - DNA, 465 bp, Homo sapiens
taccaggcattcttttagaaactcacagcgcatatcagccaggcgcagactctgagaagtcctgcatgaagggatcatctataagggctaattgaatgtttcccaaagttattgagtggaacatgtttgttaattgacataccctatgacatcatgtggaacggctttccagtgctaaccgtatgaaaatctcactaatctgccagcctcccaccctcaggcagggtaaccctagagccactcaggaaacacattttgcatttcactacactaaatcttgccttgtcaagccgtcaaccctcagcgtttcttccagggaakccgcgcagctcagtggaaagaccacagactcaaggcttgaaatctgcatccaccacttaactaattgtgtgacaacaggaaagacactgaaatgcccttagtccttctcatctgtaaaatgagagtaacacctaatagtgaaag

SEQ ID NO: 396521 - DNA, 540 bp, Homo sapiens
aggtgcaagggtagaatcagagagacccatcaggagggcacaggtgctggtggcctgaatgaagggactggcagagaaactgctgtgatctggagaatgctggatatgtggctccagggccccagagggaagacctcatactcacctccacttggcacatgcagaggagaggggagcctctggtgccatactcagaaaggcagatgctggcaaaagaaatcaaagaagaatgcctctctggacgcatggacctctgagtcctgccatacctgggctttgtccaagactgagggagcaagctggmctgggcaggagcaggagcaggacaagtcagggccttcccctccttccatacagccagccatggtcctgaggcaaccagggaccagcacttacacagaccctgcctggaggttctggtttccccagcccaagaagccaaggtcattcatgcctttgctgacctgtggcctccccacggccctgtcctagtgccccaaggcactagcctccagcttcccaggccacatgtcccaggct

SEQ ID NO: 396522 - DNA, 540 bp, Homo sapiens
aggtgcaagggtagaatcagagagacccatcaggagggcacaggtgctggtggcctgaatgaagggactggcagagaaactgctgtgatctggagaatgctggatatgtggctccagggccccagagggaagacctcatactcacctccacttggcacatgcagaggagaggggagcctctggtgccatactcagaaaggcagatgctggcaaaagaaatcaaagaagaatgcctctctggacgcatggacctctgagtcctgccatacctgggctttgtccaagactgagggagcaagctggcctgggcaggagcaggagcaggacaagtcagggccttcccctccttccatacagccagccatggtcctgaggcaaccagggaccagcacttacacagaccctgcctggaggttctggtttccccagcccaagaagccaaggtcattcatgcctttgctgacctgtggcctccccayggccctgtcctagtgccccaaggcactagcctccagcttcccaggccacatgtcccaggct

SEQ ID NO: 396523 - DNA, 509 bp, Homo sapiens
cagaaactctctccacctgctttgttcttcatgggtatggggtcctgggagccccgccttgctagcctgggtgtcaccttcctgtctgttcacttcactctgcacacagctcttgaaggggtcccttcactaaagcttcttcctatggaccctatttgatacaktctgcttttagccaggaccctgattgcaacaagatgcatctatagtcacataatcagagttgtcctatatattctattttataatctgctttttaaagttaactatacactattataggactcttttaaatccagcaaatataactacaggtcctcattattttacttgttaagattttcaacaggatttaatgaaatcccacaaatattgattgagcacctatcatgtacaggatgtagtcccgcccttaggcggggtacagagccacgtgggcattaagacagatgtggaaattatgtggatggaaaatacaaggtgtcatcagggagatactagctaagaac

SEQ ID NO: 396524 - DNA, 509 bp, Homo sapiens
cagaaactctctccacctgctttgttcttcatgggtatggggtcctgggagccccgccttgctagcctgggtgtcaccttcctgtctgttcacttcactctgcacacagctcttgaaggggtcccttcactaaagcttcttcctatggaccctatttgatacattctgcttttagccaggaccctgattgcaacaagatgcatctatagtcacataatcagagttgtcctatatattctattttataatctgctttttaaagttaactatacactattataggactcttttaaatccagcaaatataactacaggtcctcattattttacttgktaagattttcaacaggatttaatgaaatcccacaaatattgattgagcacctatcatgtacaggatgtagtcccgcccttaggcggggtacagagccacgtgggcattaagacagatgtggaaattatgtggatggaaaatacaaggtgtcatcagggagatactagctaagaac

SEQ ID NO: 396525 - DNA, 545 bp, Homo sapiens
tctcttgtcttgagagctgcaaaatgtgccatacgtggttgcatgatcctccccaagcctgtgccacgcttttcagggaggagggctgctctgaatgaaaccaactggcatggatggaaccccagggtgtcctrttatgacagtcttgtaaacatctaggaaaacctgttggtggctgaaaaattcagattctaaatactgtttacttctgaataatttgtaattcctttcccagctcaaataactataaacctctccaaagtgctttataaacactcattagagtcttacaaaagtcttttgagtgccatatgattatctccatttggcaagtgagtaaactgagtcacaaaagttgaaagatcagctcaaagttatgccaggagcaaaggcagggctgggctggaacccagacttcccggctccttggctggtgaacggctccacagaatatgctggaactaggcacgtccaggctcctgatcttcttggggccccatggcgcctcttgcttctgctagcgacccttcattcagttcactggg

SEQ ID NO: 396526 - DNA, 557 bp, Homo sapiens
cttagggagctaagttgggattgagacgctttttggtcatgcgaagttggagctgcgtatttgaaatctaaatggagatgctgagctgggcagttgggctagaccagtctagggcttcagggataaacagacacagggataacatttgaaagccatctacatataggtgacatttaaagtctcgggactagatgagagagtagatgtgsaagagagaagagctaatatcagagctctggggcatttgagtgataggtagaggtccggaagagacaaaggatcctgagaaagcatggggaggagggaggagaaaaaccagatagaggtgggtggcaagtcacccaaaggaagtatctctaagatgagatgatcaactctgatgctgttgagggctcgagcgagacaaagacagtggtgtgagcatcagcgttggctcaacgtaggtctttgggaaactattttaggaagaggtgaaggaagagctagactggggctattggaagagagaatgggtggcaaggaggttgtgatggtgtctgcacaactctttggagagt

SEQ ID NO: 396527 - DNA, 557 bp, Homo sapiens
cttagggagctaagttgggattgagacgctttttggtcatgcgaagttggagctgcgtatttgaaatctaaatggagatgctgagctgggcagttgggctagaccagtctagggcttcagggataaacagacacagggataacatttgaaagccatctacatataggtgacatttaaagtctcgggactagatgagagagtagatgtggaagagagaagagctaatatcagagctctggggcatttgagtgataggtagaggtccggaagagacaaaggatcctgagaaagcatggggaggagggaggagaaaaaccagatagaggtgggtggcaagtcacccaaaggaagtatctctaagaygagatgatcaactctgatgctgttgagggctcgagcgagacaaagacagtggtgtgagcatcagcgttggctcaacgtaggtctttgggaaactattttaggaagaggtgaaggaagagctagactggggctattggaagagagaatgggtggcaaggaggttgtgatggtgtctgcacaactctttggagagt

SEQ ID NO: 396528 - DNA, 552 bp, Homo sapiens
atatatgttataacacatgaaaatccgcaactgttttaattttcctgacatttggaatgcttatatttgagacttaaatatgtctatttttataatttctgacattttatttcttttcttgagaccaagtctcactctgtcacccaggctggagtgcagtggtgcgagcttggctcactgtaagaaatcacttgaactccccctcctgggttcaagygattctcctgcctcagcctcccgagtagctgggattacaggcatgatccaccacgccaggctaatttttgtaattttggttgagatggggtttcaaccaactcctgacctcgtgatccgcccaccttggcctcccaaagtgttgggattacaggcgtgaaccacctgacattttatttctaacggacataatcagacaggagatttcagctgttcttttcaaataatacattatagtatatggattttttttgtcaccaataaataaaaagccaaattagatagaatcaccaatatatacatttttttctttcaacttacatttttgaagtacaa

SEQ ID NO: 396529 - DNA, 671 bp, Homo sapiens
aaaccatgagcatttagagctgaggctgggaattgacataatgttcagtgaagactaggagatgcaggaggggkttcataggctcaaggaaacagtattgaaatgggtgggccatgggcctacagtggagtagaggatggataaagtcagacagagttcttggcaagtggtggaagagtttgtagtcagacagggagacctctgggcccaatatttttgaagtgagacagttctgtgtgactctgagcatagccataggcatagccatgtgtatgaccaaagaaggcaatgaggaaggcgagtggtcagctcaggaatggacaccctgaggctgaagaccctgagaattcccaggagatgcagcagaaaagaagaagctggatgtgggactcactggggaaggtgaggtatgtccctgtgtcccaagaggaagagggcaagaatgaagagtgtacaagaaatatgaattgccaagagactctagacagtgcaggaacacagctgcagaggccccctggagagaagcccaccatcctcccctcccagggactgacacggcaaaggtatagatggctttgcacccatcccccactatctggctcctgcaggaaccctgaccagggaaagctgacttcagagaaggcaaatatgccaaaacccatgttacagag

SEQ ID NO: 396530 - DNA, 671 bp, Homo sapiens
aaaccatgagcatttagagctgaggctgggaattgacataatgttcagtgaagactaggagatgcaggaggggtttcataggctcaaggaarcagtattgaaatgggtgggccatgggcctacagtggagtagaggatggataaagtcagacagagttcttggcaagtggtggaagagtttgtagtcagacagggagacctctgggcccaatatttttgaagtgagacagttctgtgtgactctgagcatagccataggcatagccatgtgtatgaccaaagaaggcaatgaggaaggcgagtggtcagctcaggaatggacaccctgaggctgaagaccctgagaattcccaggagatgcagcagaaaagaagaagctggatgtgggactcactggggaaggtgaggtatgtccctgtgtcccaagaggaagagggcaagaatgaagagtgtacaagaaatatgaattgccaagagactctagacagtgcaggaacacagctgcagaggccccctggagagaagcccaccatcctcccctcccagggactgacacggcaaaggtatagatggctttgcacccatcccccactatctggctcctgcaggaaccctgaccagggaaagctgacttcagagaaggcaaatatgccaaaacccatgttacagag

SEQ ID NO: 396531 - DNA, 554 bp, Homo sapiens
tggcagctgcctgtagtcccagctacttgggaggctgaggcaggagaatggcgtgaacccaggaggcrgagcttgcagtgaaccgagatcgcgccattgcactccagtctgggtgacagagcgagactccgtttcaaaaaaaaaaaaattagccaggcatggtgtaatcccagctactcaccaggctgaggcagggagaattgcttgaaccagaagggcagaggttgcagtgagccgagatcgcaccactgcactccagcctgggtgacagagcaagacgccatctgaaaaacaaaaaaaaagtatacattcaagatggcaaaaaaaaaaacaacaaaggacacaaaatgtgtgtaacctaccaattgggaaatagggcattgcctcatatttgggcttacatacatggtatcttcaacccatcacctacctgcctccgccaagcctactcttcctggaaacagtacttcttcagtgtctaccagatgccaggcaccatgccaggccctgagtatatacgtccctgaagtgcacacctgccctgtgagggacat

SEQ ID NO: 396532 - DNA, 554 bp, Homo sapiens
tggcagctgcctgtagtcccagctacttgggaggctgaggcaggagaatggcgtgaacccaggaggcagagcttgcagtgaaccgagatcgcgccattgcactccagtctgggygacagagcgagactccgtttcaaaaaaaaaaaaattagccaggcatggtgtaatcccagctactcaccaggctgaggcagggagaattgcttgaaccagaagggcagaggttgcagtgagccgagatcgcaccactgcactccagcctgggtgacagagcaagacgccatctgaaaaacaaaaaaaaagtatacattcaagatggcaaaaaaaaaaacaacaaaggacacaaaatgtgtgtaacctaccaattgggaaatagggcattgcctcatatttgggcttacatacatggtatcttcaacccatcacctacctgcctccgccaagcctactcttcctggaaacagtacttcttcagtgtctaccagatgccaggcaccatgccaggccctgagtatatacgtccctgaagtgcacacctgccctgtgagggacat

SEQ ID NO: 396533 - DNA, 535 bp, Homo sapiens
atcatggagaaggacaggctcgaggctggagcccacccccatgtgccttggccctgctccaaagcgtacctccaccccttcacctctccgttgccatttctcctggggacgaagttttccctcaaatgggtgmtcctgaaactgattcacccaaaggatgtgggagggccttggaagggccttgggtgagagggcgtttggctcccctgtaaaggcttcagcaaggagtgaatcctgagaccatagtgggcaggggcgggggcagggctggctcttccctctatgccaaggcacaggagagcctgtgtttgactggggtgttttccccgatggtggccgagctgccagcagttcctgcaagaccccacttgatgaggcagggctgagaggaggtgattaggaggtgcagatttcaggttggcgagtggcaagtggcagaacattctggcccctaagtcctcttgttggcatgctcgagtgtcttttctcccaaagagctcttccacgagcatgtccagagagtgtctgcctggcc

SEQ ID NO: 396534 - DNA, 592 bp, Homo sapiens
aacatgaaacatgaaatttgttaattttggtaagctccaatttatttgttaattttgttgcttatactttaagaaaccattgcctaatccaagatctatgcctatattttcctctaacractttctcattttagctcttacatttaggcctttgatccattttgagttattttttgtatatggtgtgaggtatgcatccaacttcattcttttgtgtgtagataaccagttgtatcagcattgttagttaaaaagactattatgtcctcaattgatttgctttggcactcttattgaaaatcaattcaccataaacgcttatttctgaactttcagtactcttccattgatctgtgtctatcgtatgccagtgccacacagtcttaattcctgcagctttgtagtaagttttgaaacttttctagattgctttggctattctgatttccttgaattttcatatgaattttaggattaccttgtcaatctctacaatcaatcaatcaatcaatcaatcaatcaatgccacttagtgttttggtagtggttgtgtggaatctgcagatcatagatcagcttaggaagtttgcca

SEQ ID NO: 396535 - DNA, 592 bp, Homo sapiens
aacatgaaacatgaaatttgttaattttggtaagctccaatttatttgttaattttgttgcttatactttaagaaaccattgcctaatccaagatctatgcctatattttcctctaacaactttctcattttagctcttacatttaggcctttgatccattttgagttattttttgtatatggtgtgaggtatgcatccaacttcattcttttgtgtgtagataaccagttgtatcagcrttgttagttaaaaagactattatgtcctcaattgatttgctttggcactcttattgaaaatcaattcaccataaacgcttatttctgaactttcagtactcttccattgatctgtgtctatcgtatgccagtgccacacagtcttaattcctgcagctttgtagtaagttttgaaacttttctagattgctttggctattctgatttccttgaattttcatatgaattttaggattaccttgtcaatctctacaatcaatcaatcaatcaatcaatcaatcaatgccacttagtgttttggtagtggttgtgtggaatctgcagatcatagatcagcttaggaagtttgcca

SEQ ID NO: 396536 - DNA, 592 bp, Homo sapiens
aacatgaaacatgaaatttgttaattttggtaagctccaatttatttgttaattttgttgcttatactttaagaaaccattgcctaatccaagatctatgcctatattttcctctaacaactttctcattttagctcttacatttaggcctttgatccattttgagttattttttgtatatggtgtgaggtatgcatccaacttcattcttttgtgtgtagataaccagttgtatcagcattgttagttaaaaagactattatgtcctcaattgatttgctttggcactcttattgaaaatcaattcaccataaacgcttatttctgaactttcagtactcttccattgatctgtgtctatygtatgccagtgccacacagtcttaattcctgcagctttgtagtaagttttgaaacttttctagattgctttggctattctgatttccttgaattttcatatgaattttaggattaccttgtcaatctctacaatcaatcaatcaatcaatcaatcaatcaatgccacttagtgttttggtagtggttgtgtggaatctgcagatcatagatcagcttaggaagtttgcca

SEQ ID NO: 396537 - DNA, 592 bp, Homo sapiens
aacatgaaacatgaaatttgttaattttggtaagctccaatttatttgttaattttgttgcttatactttaagaaaccattgcctaatccaagatctatgcctatattttcctctaacaactttctcattttagctcttacatttaggcctttgatccattttgagttattttttgtatatggtgtgaggtatgcatccaacttcattcttttgtgtgtagataaccagttgtatcagcattgttagttaaaaagactattatgtcctcaattgatttgctttggcactcttattgaaaatcaattcaccataaacgcttatttctgaactttcagtactcttccattgatctgtgtctatcgtatgccagtgccacacagtcttaattcytgcagctttgtagtaagttttgaaacttttctagattgctttggctattctgatttccttgaattttcatatgaattttaggattaccttgtcaatctctacaatcaatcaatcaatcaatcaatcaatcaatgccacttagtgttttggtagtggttgtgtggaatctgcagatcatagatcagcttaggaagtttgcca

SEQ ID NO: 396538 - DNA, 656 bp, Homo sapiens
cgttggacttggggtattgtcagctgcacagggaggccgagtgtggggctgcctcagccccggcagctggatgacgcgtattctcctgtcatggtatttctaacagtgactctctccctctctgtagcaggcaccatcttccctcctcctttagggaaagggcacccacatctcctttggggacccccacttcattctctctcgaggagcctgggggccttcctggtttcagctgatcagcatttcccatggctgtggccctggccccagggatccatgcacaggagggcacatggcctatgttggctccactcgagggacctctcaccaccttctgggaggggtgagacagaccagagctcagtctctcccacagsatgggcaggggaagagaagagcactggcccagggggtcgatagtcattagcactggtgaaaggagagtcagcctcagaatgagacctgaaagcaggaagaagcggtcaagcgcaatcaggtggagtggggcatgagtcaaattgtggggcctgaaatccatgcctacctggaacctagaatgtgaggtctttgcagaggtcattagttaagacaaggtcagccggggcagtggctcacacctgtaatcccagcactttgggaggccaagacaaaagaat

SEQ ID NO: 396539 - DNA, 525 bp, Homo sapiens
catgtccagatgaatccactcaaccatctacaggacatctcccctcgaaggtcttgcaggcttctcaaactcaccggattcataactaaacyttcaaagcttaaaagacctcagtgtccccatctcagataatgacaccagggttccccagatgctccagtcaaaagctgagtcatgcttcactgtaccttttcctcataccgtacatccaatttttttcacctgtgtgcaggaagaagagcaggtctaggtgcccaaaccctgcacattgcaaagaaagctctggctctcgacctgcttgtgggagatgccctcggaaatcctggtaggagtgtctttgtttacctgaggcattggaccacatgaatagtctttgcaaataatgctactgatggtgggggcctgggcagcatggtatcagtttgacctctggagaggctgacactgagtgattaaggtcagtcatgtggacgctccctgcttccatgactgaaccccagcaaaaaccccagactacatagctgg

SEQ ID NO: 396540 - DNA, 525 bp, Homo sapiens
catgtccagatgaatccactcaaccatctacaggacatctcccctcgaaggtcttgcaggcttctcaaactcaccggattcataactaaaccttcaaagcttaaaagacctcagtgtccccatctcagataatgacacsagggttccccagatgctccagtcaaaagctgagtcatgcttcactgtaccttttcctcataccgtacatccaatttttttcacctgtgtgcaggaagaagagcaggtctaggtgcccaaaccctgcacattgcaaagaaagctctggctctcgacctgcttgtgggagatgccctcggaaatcctggtaggagtgtctttgtttacctgaggcattggaccacatgaatagtctttgcaaataatgctactgatggtgggggcctgggcagcatggtatcagtttgacctctggagaggctgacactgagtgattaaggtcagtcatgtggacgctccctgcttccatgactgaaccccagcaaaaaccccagactacatagctgg

SEQ ID NO: 396541 - DNA, 525 bp, Homo sapiens
catgtccagatgaatccactcaaccatctacaggacatctcccctcgaaggtcttgcaggcttctcaaactcaccggattcataactaaaccttcaaagcttaaaagacctcagtgtccccatctcagataatgacaccagggttccccagatgctccagtcaaaagctgagtcatgcttcactgtaccttttcctcataccgtacatccaatttttttcacctgtgtgcaggaagaagagcaggtctaggtgcccaaaccctgcacattgcaaagaaagctctggctctcgacctgcttgtgggagatgccctcggaaatcctggtaggagtgtctttgtttacctgaggcattggaccacatgaatagtctttgcaaataatgctactgatggtgggggcctgggcagcatggtatcagtttgacctctggagaggctgacactgagtgattaaggtcagtcatgtggaygctccctgcttccatgactgaaccccagcaaaaaccccagactacatagctgg

SEQ ID NO: 396542 - DNA, 525 bp, Homo sapiens
catgtccagatgaatccactcaaccatctacaggacatctcccctcgaaggtcttgcaggcttctcaaactcaccggattcataactaaaccttcaaagcttaaaagacctcagtgtccccatctcagataatgacaccagggttccccagatgctccagtcaaaagctgagtcatgcttcactgtaccttttcctcataccgtacatccaatttttttcacctgtgtgcaggaagaagagcaggtctaggtgcccaaaccctgcacattgcaaagaaagctctggctctcgacctgcttgtgggagatgccctcggaaatcctggtaggagtgtctttgtttacctgaggcattggaccacatgaatagtctttgcaaataatgctactgatggtgggggcctgggcagcatggtatcagtttgacctctggagaggctgacactgagtgattaaggtcagtcatgtggacgctccctgcttccatgactgaaccccagcmaaaaccccagactacatagctgg

SEQ ID NO: 396543 - DNA, 592 bp, Homo sapiens
gcatgatcttggctcactgcaacctctacctccagattcaagtgattctcctacctcagcctcctgagtagctgggattacaggtgctctccactacactcagctaatttttgcatttttaatagagatggggtttcaccatgttggccaggctggtctcactctcctgatctcaagtgatccacccaccttggcctccaaaagtgctgggattacaggcgtgagccaccgtagttggcccgagtcgttgatttcttacacggcaaatgtcttcccaaagagtgagcattctaaggtgatgggaatggaagctgccatctctgaaggccctggcccggaagacagcaccgaatcaccccggccattgtctactggacaaacrgtcacagagcctgcccagattcaagtggaggggcaaggagttttcctctccgtgggaagagtggcaaagaatttttgtggccatctttaattcttctctgcattgagaaaatgatattttcccccaaatgctgctgcatgaacaaaatgaaggacaatttgtagagcatcttgctgagtgcctgacacataccggtgttcagtaaatacc

SEQ ID NO: 396544 - DNA, 229 bp, Homo sapiens
gacgtgctcccatatggaggtgagaacatagcagagataacgtttaactattgtcccaatgggtctgagttraaattctattttcctaatcatttaccagagattcgctgcctcttagtgaaacacagtttagcaagtcacataaatcagatctgttggtagtctctaaactcactgacttcgttgtttttctgtgttgtgagcctcagcctgccttgccatgcatctc

SEQ ID NO: 396545 - DNA, 426 bp, Homo sapiens
aaatgctcaaaatatctcaatctgcagatttctttttacctctatgagattcaattcagttctcttattgttctttctctcctgtgatccttggggtgggggaggggggcttgcactggcatgaagaggagacagcactggtcagttgactcactgagtgacaccctgtcatgtctaattaaactacaggctttgtggacggcttmatggacgttctctgcagatttctctggcttctgcttttcctgtactttttttggacttgtttttgcaaacggcagtgtcaggtagggcatggatttgggagccagaaagcccaggttcaaatcctgactctgccacttactagctatgtggctttgggcaaattactcaacctctctgtgccttattttttccagttgtaaaatggaagataatactagc

SEQ ID NO: 396546 - DNA, 648 bp, Homo sapiens
tatcctgtacccattggcattggcatatccattcagaaatgttagcagggatgattctccaaggtagcccattcctggcggcctccggcagcttgatgcatagccagtgccgactgcagttggcttccgttgcagcagtggctacccagttgttgaactcattcccagcctcagacrtgatgacccaagtactgatttctagcagacagattattcgtaataacaaaactggaggggaacatgacattgtttttcatctttaggaaactgtattatgccttcattttttgctcctatagctacaaggtcaccagccttaggggcgggacctgatggacactgcacccatattttggctcaaggttttaagttgcccacccactccgatggacccaaattttccggttctatatgttgtttctattggggcagaaatttcctcaggggttaattgttgacaaggtaccactaacaattgagcaacccacatctgcagatttatagcaaaagaatctggagtggtattgtataaaatgagctttaactctccccagtaatcactatcaattataccaccataccttataatgcctctcattgtaaggcttgaacgtgttgtaatccattcatccgcattcaaatttgcag

SEQ ID NO: 396547 - DNA, 648 bp, Homo sapiens
tatcctgtacccattggcattggcatatccattcagaaatgttagcagggatgattctccaaggtagcccattcctggcggcctccggcagcttgatgcatagccagtgccgactgcagttggcttccgttgcagcagtggctacccagttgttgaactcattcccagcctcagacgtgatgacccaagtactgatttytagcagacagattattcgtaataacaaaactggaggggaacatgacattgtttttcatctttaggaaactgtattatgccttcattttttgctcctatagctacaaggtcaccagccttaggggcgggacctgatggacactgcacccatattttggctcaaggttttaagttgcccacccactccgatggacccaaattttccggttctatatgttgtttctattggggcagaaatttcctcaggggttaattgttgacaaggtaccactaacaattgagcaacccacatctgcagatttatagcaaaagaatctggagtggtattgtataaaatgagctttaactctccccagtaatcactatcaattataccaccataccttataatgcctctcattgtaaggcttgaacgtgttgtaatccattcatccgcattcaaatttgcag

SEQ ID NO: 396548 - DNA, 648 bp, Homo sapiens
tatcctgtacccattggcattggcatatccattcagaaatgttagcagggatgattctccaaggtagcccattcctggcggcctccggcagcttgatgcatagccagtgccgactgcagttggcttccgttgcagcagtggctacccagttgttgaactcattcccagcctcagacgtgatgacccaagtactgatttctagcagacagattattcgtaataacaaaactggaggggaacatgacattgtttttcatctttaggaaactgtattatgccttcattttttgctcctatagctacaaggtcaccagccttaggggcgggacctgatgracactgcacccatattttggctcaaggttttaagttgcccacccactccgatggacccaaattttccggttctatatgttgtttctattggggcagaaatttcctcaggggttaattgttgacaaggtaccactaacaattgagcaacccacatctgcagatttatagcaaaagaatctggagtggtattgtataaaatgagctttaactctccccagtaatcactatcaattataccaccataccttataatgcctctcattgtaaggcttgaacgtgttgtaatccattcatccgcattcaaatttgcag

SEQ ID NO: 396549 - DNA, 556 bp, Homo sapiens
aggtagaatggagtgcataattctgcaggcgtgatgtatcttcaaatattagaaaagcaggaacatgctgagagcgaaacagaaaaataaatcaaaaagaaatcaaaagatttatttctagagtatatagaatactatagttctgttgttttggaatcttccaaccctgtgctcttttgggggccacttcttggagttgtagtcaggattctccagagaaaaagaactgatagratgtgcatatatatatatatatatatatatatatatatatatattttttttttttttttttttttaaggaattggctcaggcaatggtgaagatttggcaagtccaaaatctgatggaggagtctggcgggatggagactccgaaaagagttgcagtttgagtcaaaaggcaagctgtcagtgagctaggaagagctgacgatgttgcagttcaagtccaaagaccctctgccagcaaacttccctcctgctcggaggagctaaatcttttgttctatttaagccttcacctaattggataaggcccacctgcattatagag

SEQ ID NO: 396550 - DNA, 556 bp, Homo sapiens
aggtagaatggagtgcataattctgcaggcgtgatgtatcttcaaatattagaaaagcaggaacatgctgagagcgaaacagaaaaataaatcaaaaagaaatcaaaagatttatttctagagtatatagaatactatagttctgttgttttggaatcttccaaccctgtgctcttttgggggccacttcttggagttgtagtcaggattctccagagaaaaagaactgataggatgtgcrtatatatatatatatatatatatatatatatatatattttttttttttttttttttttaaggaattggctcaggcaatggtgaagatttggcaagtccaaaatctgatggaggagtctggcgggatggagactccgaaaagagttgcagtttgagtcaaaaggcaagctgtcagtgagctaggaagagctgacgatgttgcagttcaagtccaaagaccctctgccagcaaacttccctcctgctcggaggagctaaatcttttgttctatttaagccttcacctaattggataaggcccacctgcattatagag

SEQ ID NO: 396551 - DNA, 556 bp, Homo sapiens
aggtagaatggagtgcataattctgcaggcgtgatgtatcttcaaatattagaaaagcaggaacatgctgagagcgaaacagaaaaataaatcaaaaagaaatcaaaagatttatttctagagtatatagaatactatagttctgttgttttggaatcttccaaccctgtgctcttttgggggccacttcttggagttgtagtcaggattctccagagaaaaagaactgataggatgtgcayatatatatatatatatatatatatatatatatatattttttttttttttttttttttaaggaattggctcaggcaatggtgaagatttggcaagtccaaaatctgatggaggagtctggcgggatggagactccgaaaagagttgcagtttgagtcaaaaggcaagctgtcagtgagctaggaagagctgacgatgttgcagttcaagtccaaagaccctctgccagcaaacttccctcctgctcggaggagctaaatcttttgttctatttaagccttcacctaattggataaggcccacctgcattatagag

SEQ ID NO: 396552 - DNA, 556 bp, Homo sapiens
aggtagaatggagtgcataattctgcaggcgtgatgtatcttcaaatattagaaaagcaggaacatgctgagagcgaaacagaaaaataaatcaaaaagaaatcaaaagatttatttctagagtatatagaatactatagttctgttgttttggaatcttccaaccctgtgctcttttgggggccacttcttggagttgtagtcaggattctccagagaaaaagaactgataggatgtgcatatatatatatatatatatatatatatatatatatattttttttttttttttttttttaaggaattggctcaggcaatggtgaagatttggcaagtccaaaatctgatggaggagtctggcgggatggagactccgaaaagagttgcagtttgagtcaaaaggcaagctgtcagtgagctaggaagagcygacgatgttgcagttcaagtccaaagaccctctgccagcaaacttccctcctgctcggaggagctaaatcttttgttctatttaagccttcacctaattggataaggcccacctgcattatagag

SEQ ID NO: 396553 - DNA, 534 bp, Homo sapiens
tcaagggggcaggagagtcctagaggaatttgagaggcacttgggccatagcaagtatgatgtgtggcaggattagtgtttttcttgagactctccttaagaaawcacccaggctttgctgatcttttgctttctccgccttgctggtgtgcgagtgcacatggcgaagcaggtggtgatggagccatgttttcttgccttgtgtctggtggcctgctgcttagagggggtccccaggcatcagagaccagggcagtcagaggctcagaaggaaccagccctgccaacacctggacctcagactatcacagtcagccagagctgtgagaaaataaattcctgttgttaagccacccagtgtgtggtaattttttatggcagccctagcaacagaatgtacttattatatcatctatatctacatctatgtctgcctgcatctatccctctacctgtccacctacctgcacctgtgcctgtatttatacctacgcctgtatttctgttggtctattatatctctatctatctatc

SEQ ID NO: 396554 - DNA, 534 bp, Homo sapiens
tcaagggggcaggagagtcctagaggaatttgagaggcacttgggccatagcaagtatgatgtgtggcaggattagtgtttttcttgagactctccttaagaaaacacccaggctttgctgatcttttgctttctccgccttgctggtgtkcgagtgcacatggcgaagcaggtggtgatggagccatgttttcttgccttgtgtctggtggcctgctgcttagagggggtccccaggcatcagagaccagggcagtcagaggctcagaaggaaccagccctgccaacacctggacctcagactatcacagtcagccagagctgtgagaaaataaattcctgttgttaagccacccagtgtgtggtaattttttatggcagccctagcaacagaatgtacttattatatcatctatatctacatctatgtctgcctgcatctatccctctacctgtccacctacctgcacctgtgcctgtatttatacctacgcctgtatttctgttggtctattatatctctatctatctatc

SEQ ID NO: 396555 - DNA, 550 bp, Homo sapiens
gcagtaggactgtgtgctgtgaatgtccagctcccagtagaaccctcatttttccacaaagaactgggagttggcgctaactgagccccaacccaagttatcctacacaggaagggagccaggtgctgggttttcaagactcaatcctatacccagttacactgcacagaaggaggatsatcaattagcctcattagtaacttccctatcaatacagatatgggttccagagacacccatctaaccaatagctgatgaccctattgattaaacaaattcgtatcatttcaagtgaaaataatcatccaaacaaaataccagaaagagctagacttgaaaatctttcagcaacttatcacacatgagaatagagctgcagaaaagattttagtgtaaatactgtaattctgccagcaattaaataacctcaaactgactcattatcttcagagtaacatgttaataatttaactgacaaacatttcataggttaattctgaaaagagttaagcatagatagatttaattgatctcatatttacactagttt

SEQ ID NO: 396556 - DNA, 621 bp, Homo sapiens
gcttaagccccagggtgggttgcaaacacctctggcattctcaatagctatgctgctgaccaggcagcatcttgcagyggaattatgctacagggacccctttttcattttaaataagaaaactctgtaatgatccattgcaatgaactcgattagacctttgcaggtaatttagtagtgcatggcaggaacaacaatgtcatcaggttacattgttggctagaggccatacacagagtgtcttgggtggacaccacagtcacctcgtgaaagaagtaccattacctctgtcctacagaggaggagattggggctgagtgagcttaagcagcttgtccaagaaagttcagtcagcaaattgtgctgctgtcctacctgtctgatcagaagtcctgatgccgagacctgaatccttgcccagagatgaagcagagcagtggagctaaatccttttgctcctcatcaagtcacggagggagcttctatcacagcttttgagtgatgtccatacgagtggtgtccacttctatgtgattcacaggaaaggtggtttataaaggcctgtggtctttggaggggtttgttttcacagctcaaaccccaataagccttagggactat

SEQ ID NO: 396557 - DNA, 621 bp, Homo sapiens
gcttaagccccagggtgggttgcaaacacctctggcattctcaatagctatgctgctgaccaggcagcatcttgcagcggaattatgctacagggacccctttttcattttaaataagaaaactctgtaatgatccattgcaatgaactcgattagacctttgcaggtaatttagtagtgcatggcaggaacaacaatgtcatcaggttacattgttggctagaggccatacacagagtgtcttgggtggacaccacagtcacctcgtgaaagaagtaccattacctctgtcctacagaggaggagattggggctgagtgagcttaagcagcttgtccaagaamgttcagtcagcaaattgtgctgctgtcctacctgtctgatcagaagtcctgatgccgagacctgaatccttgcccagagatgaagcagagcagtggagctaaatccttttgctcctcatcaagtcacggagggagcttctatcacagcttttgagtgatgtccatacgagtggtgtccacttctatgtgattcacaggaaaggtggtttataaaggcctgtggtctttggaggggtttgttttcacagctcaaaccccaataagccttagggactat

SEQ ID NO: 396558 - DNA, 527 bp, Homo sapiens
cagtgccctctctaggtggtacctccttataaactgggccttatgctggcatcttgggtccttggaaggatagtttcctggtgcgctrgattagtcatagcctattgtagtgactctggcatggttacctcaggaacaccaccagacaaatatagaccctttaacactggctggcccttgtgtctccagacccctcccaggagttcctcacactaggaaccttgggctgctccactttgggtcacaaggacccctttgcctagcccaaagcaggcctctttggttgcttttctctggtccactctggctatgaccttcaggatcagagggcaagaagtcgagaaggacacgtctccaagatagagcactaagagctaatgggcagaactggctggagctgcttattcttggcctttttatgggtgagatgcctctagcagtgttggacatctcatcccagataccaccaggaggtgagcttgctctgggaggcatattgaaagggctgcaccatgcaaaggtcagga

SEQ ID NO: 396559 - DNA, 527 bp, Homo sapiens
cagtgccctctctaggtggtacctccttataaactgggccttatgctggcatcttgggtccttggaaggatagtttcctggtgcgctggattagtcatagcctattrtagtgactctggcatggttacctcaggaacaccaccagacaaatatagaccctttaacactggctggcccttgtgtctccagacccctcccaggagttcctcacactaggaaccttgggctgctccactttgggtcacaaggacccctttgcctagcccaaagcaggcctctttggttgcttttctctggtccactctggctatgaccttcaggatcagagggcaagaagtcgagaaggacacgtctccaagatagagcactaagagctaatgggcagaactggctggagctgcttattcttggcctttttatgggtgagatgcctctagcagtgttggacatctcatcccagataccaccaggaggtgagcttgctctgggaggcatattgaaagggctgcaccatgcaaaggtcagga

SEQ ID NO: 396560 - DNA, 526 bp, Homo sapiens
ccttgggtttggtcctaattttaacattccaagaggccgtcaaagttctaaccatcgtatttcaatttcaagaggcaggatagagaataaaaagggaggacaatgagcaaaggacatagacctgctgtttgttaacatagatttccagggagttgtcataggccacctctacttayattgcattggccagaagtgcaccccagtggcaacacctagcttcaaggaaggcctagaaatgtcatcttagaaggggatagccatgagctcagctaaaaagtctattgttttggaagataatgggttttggaagacatccgacattctctggcatgggtgcaccatttgaacagcttttagaatccagcctcttccaaggcattttttgaactaattagaagagtgctgtgctccctgcccctctttgtctgatcccggggtttcatggtgcagttgctgcttcactttctaactgtgcactgatccttgccttctgcttccacatgtcctctttctagacttacagatg

SEQ ID NO: 396561 - DNA, 526 bp, Homo sapiens
ccttgggtttggtcctaattttaacattccaagaggccgtcaaagttctaaccatcgtatttcaatttcaagaggcaggatagagaataaaaagggaggacaatgagcaaaggacatagacctgctgtttgttaacatagatttccagggagttgtcataggccacctctacttatattgcattggccagaagtgcaccccagtggcaacacctagcttcaaggaaggcctagaaatgtcatcttagaaggggatagccatgagctcagctaaaaagtctattgttttggaagataatgggttttggaagacatcygacattctctggcatgggtgcaccatttgaacagcttttagaatccagcctcttccaaggcattttttgaactaattagaagagtgctgtgctccctgcccctctttgtctgatcccggggtttcatggtgcagttgctgcttcactttctaactgtgcactgatccttgccttctgcttccacatgtcctctttctagacttacagatg

SEQ ID NO: 396562 - DNA, 342 bp, Homo sapiens
agagcagggacttcctctgtcttgttcactgccacgtcttcactcgctagaacagtgcctggcatataacggcacttaatgagtgttcattggaatgaatgagtagatgtatgataaaattaaggttttttycctatgtgtttatttatatcagtatcatttatttattgatatcagtatggacccatggatatttattttatactttgggctacagttcacttctactttatttatttattgctcaagttattcaagccttagtcactgaatttagttggcccctggtatccctttggcacaaccccgtcattctgtgtgtgtacatgcatgtgctcacat

SEQ ID NO: 396563 - DNA, 342 bp, Homo sapiens
agagcagggacttcctctgtcttgttcactgccacgtcttcactcgctagaacagtgcctggcatataacggcacttaatgagtgttcattggaatgaatgagtagatgtatgataaaattaaggtttttttcctatgtgtttatttatatcrgtatcatttatttattgatatcagtatggacccatggatatttattttatactttgggctacagttcacttctactttatttatttattgctcaagttattcaagccttagtcactgaatttagttggcccctggtatccctttggcacaaccccgtcattctgtgtgtgtacatgcatgtgctcacat

SEQ ID NO: 396564 - DNA, 458 bp, Homo sapiens
cattccctgccccagttatcaaatcagccatttcttcaaggagctctggtacttttgtattttattttttgatatttttattttkggggaataacacacactggagcttgctgagggagggtcgggggagagcattaggacacacagctaatgcatgctgggcttaatacctaggtgatgggttgataggtgcagcaaaccaccatggcacacgtttacctatgtaaaattagtttcaatatatagacaatttcaaaatcttaaaaataatgctttgagggaaggagagactcttttcgtaaaagtgtttcttaggagaagcatgtcattttttactttttgattttttcatacttacccctccccagaagcagcggacctcctagctgtgtctcgcggtctccctccatctccgcaggtttgtaccgactgggggctctccgtagctttcatgccat

SEQ ID NO: 396565 - DNA, 550 bp, Homo sapiens
tgtcttgagaaagaaatggaaaaggcacagtttgcagatcagagatgtgggagtcagtgtaggctagtggttcacgacatggaccctgaggccagctttctggggtttgaatcccagctctgctacttgctagtttggaaactttgggtaagttacccaatctttgtatgcctcagtttcttcaaacaggaccaggattaagatgaggccagtgaagcaactaggatgcaatatttaaggagataacagtcagggtcgtggaagtgctggtaggaacctgagagtaatgtcttcttaaatgttgcaccctaagaacctccctagctgcactccaagcccagttctggccttgtrttcatttacaaataaacacaataatagtacctttgttatagatagttacaaagattaaatgacttaagagcaaatgacctaatgcttcacacagagtatgcatcatacaagtatttgcctttatgtaagaaaagctctagtttggctatttaatagctctaccaactttggcaaataatgcaccttcagttttctt

SEQ ID NO: 396566 - DNA, 571 bp, Homo sapiens
ttttaataaccaaatatcctccagcaagggttgagtgttgtctaggtggcccgcctacagtcttagcctctcagactcttcaactcatggaaatcctgttttctagcaagcaagtcagcaggtacaaatcargagaccaaggggtcatttcctcaaagttcctaaaaagtcactgataccttccaggctaaattccataacactgtataaacgtcaatgaattttaaaaaaccattattaggtgcattttaatgtactccaagcttgttttcaacttaatttgacccacttttttttttttaagtccatgtgatcattttactcagttctacattttccctttagttctaatggtctttgattgttgttaatatttgcaattgttgactctggcttttatttgtttttgctgcttttcagggtcttaagaaagtaaaattttttgcccatattgaattgactataatattttaatattcttttaaatattgctcacattagcccatttgttgttttaataggtcttaagttgtttcagctgtttttcagttaaatattttaacttaaaaaa

SEQ ID NO: 396567 - DNA, 443 bp, Homo sapiens
gatttgtttttctcagggcagatcagaattatgtgtgtcccaggggagatccaaatgatctgacccaaccacagaatggccagaaaaaggttgcaagtcagaacaagggttggtggtctggccaaacagtgacagggcaaactatcaatcaagacccagaagagtggtggtatgaaggaggtgagtatgggactggtgtgggagactcaatcatggtaagaacagtgtcaagaaacaggacatctaaactagggcataaggaaggaggctgggtcctaaaaattcagagcatgaagatcagaagagagcctgcagccaggccctcagacctgagcactgccttcatcttgtcctacatacattcaggattggctccagtcagagacagcacatgcaagaggtgtgagcaaaggatgtgmgtactcctcctcctgcacccatga

SEQ ID NO: 396568 - DNA, 544 bp, Homo sapiens
cagtgggatgatcttggctcactgcaacctctgcctcctgggctgaggtgatcctcccacctcggcctcctaagtagctgggaccataggtgtgcaccaccatgcccagctaatttttctatttttattagagatgggattttgccatattgtccaggctggtctcaaactcttgggctcaagccaccctcctgccttggcctcccaaagtgctgggattataggcatgagcgactgtgcctggcctgtcttctgtatatcatagtaagaaaaagatctgacgaacagggaagtggaacttcaatacatatttttgaatgaatgaatgtatgaacgagctgaagattaargtgattatagtttaataaatatttatcaaatgcatattatttgtcacttcattcattcaacaaatatgtttcgaacccctgtttaggtcaaactacttgagtatttgagaatacaagagttgcaaatgcacattcaatcactatgttcatggaacatagtgtctggccagagaaatacaggtaatcaaaaaaac

SEQ ID NO: 396569 - DNA, 628 bp, Homo sapiens
catctgtgacctgtcacatgaggtcaggtggtataattttccattcatggcattgtgtcagtattcaaaaagttttggattttggaggatttcagattttggatttctgtgttagggatacccaactgtacaagtggaatcatacaatatttgtccttttgcatctagctcatttcacttagcataatatcttcagatttaatccatgctatggcacgtgtcagaatttccttcctttttaaggctgaatagcatcccattgtatgggtatamcacaacttattggtccattctgttgatagacattggactatttccaccttttagctattgtgattaatgctgctatgaacatgggcgtacaaatatttgttcaagtccctgttttcaattcttttgggcatatacacacagatttgctgggtattatatgtaattttgagtaaccaccatactgttttctacagtggttgtaccattttacattcctaccagcaatgcacacgagttctaatttctccagatcctgaccaacactcgctattttctgttttttaaaaaacaatagccatcctaatgggtgggaaatgatccctaatgattagtgatgttgagaatctcttcatgt

SEQ ID NO: 396570 - DNA, 556 bp, Homo sapiens
ttcttgtctatatacatttttaactttccaaaaggaacacatattgtttctgtaattatgaaaaaagcacaatcccatgtttcagcaactcccccatccccagcccagcctgcaggctgcctggatcaaattctttggaagctgtttgggaattactgggcttcatcttctgatggtgcctgaaattttagaaacagccattgccagcaagtaggggaaaaggargggaagtatccccatttttagccaaagacaaggtgtgacttggaaggaaagcagctggctttctggggtgcttctgatgaaagttccagaaaagaagctccaacagttgcattcagtaaaggaaagctccagaaaggccctgcacccatgacggtatcatttaagaatgtggcagatgtgatggcttatgcctataatcacagtgcctcgagaggccaaggcaggagaatcatttgaggctgggaattgaagaccagcctggccaacatagcaagagatagctctacaaaaaaatttaaaaattggctgggcctggtggtgtgcacctgta

SEQ ID NO: 396571 - DNA, 574 bp, Homo sapiens
gaagggaagtatccccatttttagccaaagacaaggtgtgacttggaaggaaagcagctggctttctggggtgcttctgatgaaagttccagaaaagaagctccaacagttgcattcagtaaaggaaagctccagaaaggccctgcacccatgacggtatcatttaagaatgtggcagatgtgatggcttatgcctataatcacagtgcctcgagaggccraggcaggagaatcatttgaggctgggaattgaagaccagcctggccaacatagcaagagatagctctacaaaaaaatttaaaaattggctgggcctggtggtgtgcacctgtagtctcagttactcaggaggctgaggcgggagaatcacttgagcccaggaatttgaggttgcagtgagtgagccttgatcttgacactgcactccagcctgggtgacagagtgagaccctgtctctaaaaaagaaaaaaaaaaatgtgagttatctccattaccttccagtgaccaggctgaacgtgaatacatacgttccaaagcatttgtgaaacaatccaccatggcatggcgcttta

SEQ ID NO: 396572 - DNA, 455 bp, Homo sapiens
gtaagtacagagcctctttactttaattttaaaattacagctctgattaacgagaagctacgattttctgcacttgagtccagtggcctcttgcccactmatcagtggtgtgtaatcacttctcttggaagtacagtggagaacacggatctcatttattttactgtcatgtagctcctgagggacagccaaggtggaaataaattgtgagctggcatgtgtattgtccatatctcccagtctgtgttaatcagaacaatcactcccaaaagcctcttggctctcagacatggcattaattgcttatttggctggcccttaatttgtaagtaaaccagagacacacaacttcaaactcagagaaattattttaaattggtatttactcattttacgtgagtctaagactctcctcttaagggatttccaggacgtctttacacattatacatttc

SEQ ID NO: 396573 - DNA, 621 bp, Homo sapiens
gatgctaattacaagcattgcctaattaaactaacagaatgatctctttttagatacttgctgtttgaggtttctatgtttatgagtatttaactctgatcaaactgtttcaacaaatatatacagaacttctactgggtgtgcaaatgcagtgtttataaatatcacacaatcacctgtgaaatgagattacggagatatttagaagggctactggaactatgggtgacattgtttttatatatttttacctttttgtaatgttgcaatactattttcctgcttaaaatttaaggactgccacaaggatagcaaatgggttatcttaagtgccatttctgatcaattgttaatgtctgtttggaattctttattgagggctacaaagctcatttcagactcatgggagagaatgttttgatcacttagtaatgtctgccatgtgaaaaggacagggcatgtgctctgtatttaccagtaccgtgcttctataacctagaggcaaaatgacttcttccctttggctatttgaatgtggctcctggattccacatttaaagcttagtccttctcctrctatccttaattagagatagaatacttattaggtagcagccaact

SEQ ID NO: 396574 - DNA, 634 bp, Homo sapiens
ctaaaatactaggcaaaaaaatagcatgcagaactattactattagagatttctaaggtccttgcayttgccaaaaaagagtaaagatatcaattacatttagggtttcccatattaagtatgtacagtaaaatcactataaaaggaaaaaatagggaaaaacagtcaatccaaaataattttaaaagaagaaaaaagaaacagtaaaagcagaacagatatatcagtaattacaataaatataagcagactaaatttgccagttcagagataaatagtatcagattggataatgataaagattgaactcgctaggaggctataataattctgtgcttagtaacatagcctcaaactatataaagcaaaaattgttctacaataagaaatatctaccaccttagtggtatatatttcaatagtggtacatgcacacacacacacacacacacacacacacacacacacccttacctgtacaattttgcaggagactgcaaccaaacatttgggaaacatcactgcaattttttacagtctcttttaggaaaggacatacttctcatttcactctaaaatcataaccaatcgacaactgtacaagaaaggaataaggggccaatgctactcatga

SEQ ID NO: 396575 - DNA, 558 bp, Homo sapiens
tttgtcacagcactatttatagtataatagtatactgtatatatatacacacacacacacacacacaggttgaacatccctaatctgaaaaccgaaatccaaaatgctccaaagtccaaaactttttgagtgctgacaacacaccaaaagtggaaaattccacaccagaccctatatgatgggttgcagtccaaamacagtcaaaactgtgcttcatgtaaaaaattattgactgatactgtgtagaattaccttcagggtacttgcataaggtgtatatgaaacaaataaatttcatgtttagacttgggtcccatcccaagatatctcattatgtatatgcaaatattccaaattcaaaaaaacctgaaatctgaaacacttctggtcccaagcatttccaataaggtatattcaacctgtatagcataatatacattttatatattacataatatacagtatatagcataattatgtcatataataattttgaggaaaaaatagaaacatttgaccaaaggagattggtttaataagtcatggtagatctaaaac

SEQ ID NO: 396576 - DNA, 588 bp, Homo sapiens
caagcccttcctttccaaaggaatttgggcatttcttcctttgttgattcaatgcccagtcccatgccaagagctagggaggtgccctcaaggaactttcagactaattatgaaaacaggtatggccatcactaggatgttcactcaacaccctttccaatcaccttcttcctagtccacttctattctacaggctgaaagctaactgcccaatttcccagttttcactgcagctagggtgtccacataatacatatttggccagtgaaatgtagccagaagttccaaggagggctctgcttttttcaaaataaggcatcatttgccagaaaacagtctttatgccccttgtcaaagcctttatccccrttttctctccccctctttctgtctggaacatagataagatgcctagagattcagtagctatcatgtgctcatgaggcaacaaattggaggatgaaagtcccagtgctggcgatggtaacgcagagagggagcaggtgcatcagaaagcagctgcaccagccctgagctgaccacatttggatttcctggctgaagaaatgcaggatgagctgaaaaaaa

SEQ ID NO: 396577 - DNA, 581 bp, Homo sapiens
tgccaaattcctccaagaattttgttaatttttgcttcatatyttgggaatatgttgttaagtttacacaagttaaaaattattgcatcattctttttgtcattattccttttgtcattgtctatttttatttgaacaaagttgtttgccttaaagtttcatttgacagatattaatatagctatgccagaatctttcctgtttgttaatgttttcctggtatattttatttcatcccatttattctcagactttctgtatcatatactgtatttaagctggatttttgaattttcatctaaaagaatatccatcttttaaatgctgactctgttctatttattaatacatttgttttacttttgctattagccatgctttttctttgcttccctttcttcatttccttccttcgattggattgattctttattcccttttatgtcttcctttggttttcaaattatacatttctgttttggggtggttacttttacaattttgatatgcatacttattaaaatctacagttaatcattatccctactctcctgggaatggggagatcagcaggggccaag

SEQ ID NO: 396578 - DNA, 616 bp, Homo sapiens
cattttttccagataaaaatttgagtgcattcatcactggccgatgtgactataggaaatactcaagtgttcttcagttggaaggaaaatgatcataggtggatgctcagagacacaggaaggaatgagtacacaaacactacaaagaggtttcatggaatttaaaattatacagagaattaaaatgcatgacagccacggcttacaagttagggggaaataaatgatgttgcagtaatctaaggtcctcaaattgtttgggaccagtacaagcacaaatatccaactttaataagtcaaagatatgtaatattatctctagggtarccactagaagaactttcattgtaaaactatcaaagatgataggggaaaacaaaacaaaacaaaacaaaaaaaaaccacagaagaaaaacaacccaaaaggaggcaaaaaaagtgagaaaaggaaacagaaaaagtgaagaaataaaaagcaaatagcaaaatgacagaattatagccaaatacatcagaaatttaattaaatgttacattgattttaaaacataccaaagcactttttgttttagaaagaggatacttacttcacaatgggacttttcccagtatgctt

SEQ ID NO: 396579 - DNA, 602 bp, Homo sapiens
cgtgcaagtttgccggccccagggcccaggtaaggcgcacggagcctccctggactcgcggtgcgatcgctgccccggcggcctccccggcctcgctctcggacgccccttgcccgagccccagcccggcgcaggtggctcggaatccccacccggcagctcccagcgccagagggctgagcttcgtctcgctgggccgctccgttccactcccccaccccaccccacaccccggcagacacagccacccgccatcacagaatgctctagaagtcccttccgtgccacggtgttgccacggaagacgtggagctccccgcccggggcccctctcggaggaaaagtgtcgggacgtttttggctctgagcatctcagcgctcggtgcgggagccgcsgggcgctggaggaacctgtgtgagagccagccgcagtgagccccaggcagcgccgtccttccccgcctgcctggccggggctccgcctcccgtctccgggctctgccgggccctcggcggggtgtcctgaaggtgcgctcccggcgagctgcccttgtctttggcacagagggactttttttgcccagtgtgtgcctgagttaaaa

SEQ ID NO: 396580 - DNA, 596 bp, Homo sapiens
taatttctgaagttttgtttcccccgtagccaaaagcatacaagaagttcagaaaagccataaacataaggataaatttgcagattccattgcacaacaaattccggaaatggcaatacacttcaagtctttgtttcttcaggatggattattgtagcagctttcaaatgtctccacagttgaacatttttcactaagaaaaccatcaccgggaaatgtattataygtttctattatacttggttttcaagttttctgcaaaaatcagggaaagcagctgaatgacagcaagcagggacttacttaaaccattgtgttctgtccagctcctggtaaaattgactgaggtgtccaaacactgcctctgaaacttcttctggcaatttaagactggcaccttggatcatttcatccaacacttcttctttgactgttgattctcttttctatgtaactgtccattttctccctgacaatcaccttttcttctggtggaggtaacagccccctctccacatttctccgtgctgatctgcaaggaacgattttaaaaagcttggtgtacctgttcaaggtgcattctgacagtctgaata

SEQ ID NO: 396581 - DNA, 622 bp, Homo sapiens
gggtagtcattttctctccccgccccctcccagctgcaggtgacatggtcatatattagacaacatgattattagtttgcttctacagttttgtgaaaaattaatggaggggaactccacagggcctcatcttcagcagcctccctgtaggtgcttctgtcctctcccaacctgaatatcccttatttctaactgatccatgttcactatccccaggaaaagggactattttacaggcttgctatttaggggagaagaagctggccatctgtaagctctcttctttttaatttaccagcttttaagggctaggaacagttttgaaccatccaagtgaaccactgggtatctgtccagtggtcagagggtaacaggatcagggaacattaggaatagataagacctgggtgatcacagaacacagcccacccatcacgggggtgagctaaccagggatgtatgttagctgagagctggtctgcagaagggctggatctgttagcgatggyggagatctgagttaccccaagttactggcagtgtgtccatatgggtctgtagcaacttcagcccttgcctcctccgaagaaagcattaaactgagggccataaagcagaaaaa

SEQ ID NO: 396582 - DNA, 562 bp, Homo sapiens
cttttcaatgttaacagctactgtatctggtggacgtggccttttatcaccagaaagacctactctgtcctggagaagagttagttctttgggcttttcccttaccctcaggaaaaatctctaagatcatcaaactttctttctgtgatcgtgattcagagccaaataaccttttgattagcaactcactttcccagtgtcttaatgctgggaaacagaatattctaggggaatagagatatataacccacttgcaggaagatgttctgcttggtaaatgaaaccattgacattctgatgtatcagtcccttgcaaatttagtcagaggggtcaccccccaccygaattttatcaatttggaataaacaagattgcctatgtatgatgacttaaacagccccttgttcttgtattttgacatcattttaatttgtacattgtttaaacttaaataactacttagatcccaaacaataccatttcaaggatactgtttcttccttattaaaaaaaaaaaaaaagctcggaggaattatagaaaaaaaattctagtccgggtgc

SEQ ID NO: 396583 - DNA, 527 bp, Homo sapiens
ttgctaatattttgctgagaatttttgcatctaacctcatgaggaacattggtctgcaattttcttttgatgtctttggttttagtatcaggttattactggtctcatagtatgagytgggaaatattccttccatctctgttttatgagttcattaaggatggtattaagtattatttaaatgatttatagaatcctccagtgaaaacaactggacctgggattcttttcatgtgggaagacttaaaattacaaattcaacttctttacttggtataggtctattcagaatttatattcttgttgaatcagtattggcaacttttatatttctaggaatttgtccatttcatctaagttgtctagttggttagcataaagttcttcctagtgttctcttacaactctttttgtttctataaggtcaatggtgatgtctcctctttcattatttttggtaatttgtgtcttctcagttttttcttcatcagcctagataaagttttgccaatattttgatcttttca

SEQ ID NO: 396584 - DNA, 642 bp, Homo sapiens
atgctggcaaggttgtggagaaaaaaaacacttatcactgttggtggsactgtaaattagttcaatcattgtggaagacaatgtgacgattcctcaaagacctaaaaacagacataccatttgacccagcaatctcattactgaatatatacccaaaggaatataaatcattttgtttatggacacatgcatgtgtgtgttccttgcagcactattcacaatagtaaacaaatagaatcaacctaaatgcccatcaatgatagactggattaagaaaatgtgatacaaatacaccatggcatactatgcagccataaaaaaagttagattatgtcctttggagggtcaagaatggaactggaggtcatctttaggaaactaatgcagaaacagaaaccaaacacatgttctcacttataagtgggagctaaatgatgagaacacatggacacaacacatagaggggagtgcacactgggacttacatgaggtggaagctgaaaggagggagaggatcaggaaaaataactaatggatactaggcttaatacctagtgggtgatgggtgatgaaacaatctgtacagcaaacccgcataacacaagtttacctatgtaacaaacctgcacgtatactcctgaa

SEQ ID NO: 396585 - DNA, 642 bp, Homo sapiens
atgctggcaaggttgtggagaaaaaaaacacttatcactgttggtgggactgtaaattagttcaatcattgtggaagacaatgtgacgattcctcaaagacctaaaaacagacataccatttgacccagcaatctcattactgaatatatacccaaaggaatataaatcattttgtttatggacacatgcatgtgtgtgttccttgcagcactattcacaatagtaaacaaatagaatcaacctaaatgcccatcaatgatagactggattaagaaaatgtgatacaaatacaccatggcatactatgcagccataaaaaaagttagattatgtcctttggagggkcaagaatggaactggaggtcatctttaggaaactaatgcagaaacagaaaccaaacacatgttctcacttataagtgggagctaaatgatgagaacacatggacacaacacatagaggggagtgcacactgggacttacatgaggtggaagctgaaaggagggagaggatcaggaaaaataactaatggatactaggcttaatacctagtgggtgatgggtgatgaaacaatctgtacagcaaacccgcataacacaagtttacctatgtaacaaacctgcacgtatactcctgaa

SEQ ID NO: 396586 - DNA, 582 bp, Homo sapiens
gctcatggttttttgtctggatagctgatccataccttcattgctgtaggttctggactattagtagtccttcccagtagggttgctgtagttttccattgactttaatcacaggacagagcagtaataaaatacattctaaggaatctcccatrttccaaacatactctacttttcctctattacgcagaaatagctcaagttccctttagtaatcaggatccatcacccaagctaatatagcaagtcttttatttgttttttgatttggaggcatgaggatccgaaaacagctgggtggcagtcttcaacttcagttcagtgaaataattattgtgtcaactgctggaagttttcttttctttgaaaccaaaacttacagaccttcagaacatgagattacaggggtaggaagcaagtattttgttagttgaacactagggatcaactagggataataagaggtattactcccatttctacctcttgataaattggcctttgaatactggaaatgggagaaactcaccactaatttagaccacatacaccctcctggagaacaatgactcggcactgtaa

SEQ ID NO: 396587 - DNA, 556 bp, Homo sapiens
aacacaatataccaaatttataggatacagctgaagcagtgcttagagaaaaatttatacacataaatatctatattaacaaaggcaaaagattgttaatcaataacctaatatttggccttaaaacatagggtaaggaaaagtaaatgtaacctagaaaaagcaggagaaataaaataatagatactagagtggaaattaaaaagatagagaatagaaaaataatagaatcaatggaactcaaaggttattctttaaaaagatttttaaaattggcaaacctttagttagattttatagcaaaagatataaattccagcagacatatacagaagagtaaataccaattcttcacacagcttctccaacaataaaagacaggamtactgctaaacttatcctatgagccctagtattactttgacaccaaaaccaggcaagtcatcataaagaaggaaacctacatatcaatatcttttacaaatatgaatataacaaccctcaaaatgctagaaatgtataaaataatatgtaaaaaagaattatatattatgag

SEQ ID NO: 396588 - DNA, 556 bp, Homo sapiens
aacacaatataccaaatttataggatacagctgaagcagtgcttagagaaaaatttatacacataaatatctatattaacaaaggcaaaagattgttaatcaataacctaatatttggccttaaaacatagggtaaggaaaagtaaatgtaacctagaaaaagcaggagaaataaaataatagatactagagtggaaattaaaaagatagagaatagaaaaataatagaatcaatggaactcaaaggttattctttaaaaagatttttaaaattggcaaacctttagttagattttatagcaaaagatataaattccagcagacatatacagaagagtaaataccaattcttcacacagcttctccaacaataaaagacaggactactgctaaacttatcctatgagccctagtattactttgacaccaaaaccaggcaagtcatcataaagaaggaaacctacatatcaatatcttttacaaatatgaatataayaaccctcaaaatgctagaaatgtataaaataatatgtaaaaaagaattatatattatgag

SEQ ID NO: 396589 - DNA, 505 bp, Homo sapiens
gattgaaagatttaatattattaaaatgtcacttctttccagcttggtctgtgcatttcatgcaatcgtaatcaaaatcccagcaaactattattgatgttaataaaaaggttctaaaatttatatagaaaggcaaaatgcctagaatagctatgcaatattgctsaaaaatataagagcactcacactactcaatttctacattaattacagttataagaatcaaaacaggatattattgacaaaagaatagaaacataggtaaattggacaaaattgatttccagcaataaaccaataaaatacaatcaattaatttttgacaatgattgaaagccaatttaattaagaaagaatagactataacaaatgtttctggaacaatgggatatccatgtgcaaaaaggaaaaataaatacctgtgcaaagacccaacacattttatattcttaataattgtctcaaaatggctcatagacctaaatgtaaaatgtaaaactataat

SEQ ID NO: 396590 - DNA, 656 bp, Homo sapiens
tacagttcctaaagttcctcttggtactaatttctagctttattccatatggtttcagaaaatatttggtaagattttcatttttaaaaatttgttggcaattgctttgtgtcctaacatatattccattctcgagaatgttccttgtgctattgaaaagaatgcatattctatggctgttaaataaaatgttctgtaaatgtctattaagtccatttgctctaaaatgcagcttgaatttaatgtttctttgttgattttctgcctaatctttccaatgctgagaatggagtgttaaagtttattattattgtattgtagtctatttctccttttatatctaataataattgctttctttatctggatactccagctttggatatgtatttgtttataattattatattatctttcttaatttttttatcattatataatgaccttctttgtctctctttactgttgtttacttaaagtacattttatatgatgatrtaagtatacttactccttacttttggtttctacttgagtggactatcttattctatccttcatttttaatctatatgtttcctaagagttaaatgcattttatgtagacagcatatagttgaatcattttttaatctattaaatcagactttatcttt

SEQ ID NO: 396591 - DNA, 494 bp, Homo sapiens
gataaacttaataggaaagatttaacaaattgtttctcaagatacgtggaacaaagaaaattttgagagacaaacaaaaaggtttgccttgttgaatttgagaaatgcttatttgcttacggtgtaccatcagtatcaagaagttgttcaaaactcaatagtggatgaatttactatatactcyttccccacttctctgactgacttgcaaggttcatacctgagaaatctgcttctgcaaccatgaaaagcatagatgtgactgaaagcagtaaattataggtagtaattttttaatgaaattttcaatacactaagaattgtaaaaattttctaaagagaaactaataattttagttactatataggaatttaaacaagtgtcttattagtgacattttataaagattcattgtctccatcattttacagcctcacatttcattagagaagctgcatattattatgatgacccattggcttttgaaggagga

SEQ ID NO: 396592 - DNA, 646 bp, Homo sapiens
tacctcctttttctttttctttttttctttctttcttagtttctttcttcattggctttcctcaaatggctactgattgttgtctattatttcataattaagaatgagacactaggccaggcacaatggctcatgcctataatcctagcccttcggggggctgaggcagatggatcacttgaarcaaggagttaaagaccagcctgggcaacatggggagaccccatcactacaaataaatgcaaaaattagccaggcatagtgacacatgcttgtagtcccaactactcaggaggctcaagtgggaggattgcttgagcctggaagagtttgaggctataccaaaattgtgccactgcactccagcctgtgtgacagaataagaccctatcacaaaaaaaaagaaagaaagaaagaaaaaagaaaacaaaaaacttttctcatggttaaattattacttttctttttcgtttcatagaatattttgcattgaactattcttcaagatagtggaggaaaaacatccagataggaagctgtgcttagtcaaagtgtagtactcaatattttggacatataaggactctgttgagctgtcagaaaggagagccaaaagctggcagtcttagtaaataaaacgtttgca

SEQ ID NO: 396593 - DNA, 526 bp, Homo sapiens
ggggtgcttaatgtaattattgaaatgtaggaattttatttgaaaaaaatgttttccacaatattatagttctttgggggtgattattgccctctgccatatgttaataatcatgctagaaggtgtgtacaactgaaaaatccgctgcagtaaagactttcaggtgggccactaccctatctgagaaggcccaggtgtacttgttaccttaggacctctttcaacagcaatgcttctggaaggattttaagtgtgggtaaatattgtttaagattatcttaattttaaaatttattttaaattttattttatttttaattttaattaaaaattttaaagtttttgagacaaggtctcactctttcacccagactagagcacagtggtgcaatcacagctcatggcagccttaactgtctgggctcaagccatcctcccacctcagcctctctagtagctgggactacaggcacttgtcatgacagctggcaactcrtttaatttttatgtacagacagggtctcaa

SEQ ID NO: 396594 - DNA, 401 bp, Homo sapiens
aaacaaatgatagattttactctaaaggctatatggttgctatgtctcaagtctaattacacagctgtggattatatgatggtgatggtgatgatgatgatcatgacaatagaaacattacattcagtgagtctatatatttgtcatatatagaatttgattccaatttattctgaaatcaaggattctgttgtttatcactacagcattatgcctcctgtcttttcaactctaggaaacgattttgaacttcttcatatratagtcagatagttgtaggttaatcttctccatcattttactaaacactaatatgtaatttttaatacagaaagagaaaataatttaaaaatgaaatgtgtaattgtaaaatatgagtacctgtatgtttaagcaaagta

SEQ ID NO: 396595 - DNA, 590 bp, Homo sapiens
ttttgtaacccaaatgaaattaaaggttgtgtaacaaaactaaagtttcatttaaggacttttgctcaatgagaaaaaaaatgataaaatttatacataaatattgatccatctagcttgttttcaatacattttttaagtgaatgagggaaatggaaagagataccagtgtttataccttaaataaatgtaaaaaactattttattttttgttccttcytctcattttatattcttctccttttcttatttgagaaaacataattgtcatatgaacatattctttaacataatgtcttttgtgagatggcaatattaatttatttgtgctcatagagttcaaatataattttaggtaaatgatgtcaggtaatcaaactgtctaaaatattatagattacaaattaatttatatggtgcttctaccattatatattgttactacaattattactatatgatctggatatttatcagctttaaaactttctgttaggtaaaccttaaaaaaacaaacaagtagcatgttgggtaagttaggtctatgtttatttaaaggtaacaaaatatgtcaatacaaatgacttaaa

SEQ ID NO: 396596 - DNA, 576 bp, Homo sapiens
ataaacaatgagagagaaaggaataaaagatatacaaaacaaccagaaaaacaattaacaaaatggcaagaataagtcttcatatatcaataactatattcaatgtcaataaattaaattttctacttaaaagagttagactcaatgaattaataaaacatcatcaaaattctgcctacaagaaaatagtttcaactgtaaagacatatagacatttaaaaaaagggtaaaaaaatcccatgtaaatagaaggcacagtgagcaggagtagttatgcttatttcagataaaatatattttaagtcaaaaacagtaaaaagacacaaagaaggtcattaaataaagggattaactcagcaagaggatatggcaattctaaatatrtatgctcccaataccatagtgcccagatatataaagcaaatacgattagatctaaaggtagtgatgactctcataaaataattgttggggattttacacccactcttagctttagatagatcatcttgaccgaaaatcaaaaaaagaaaccttagatgtaaactgaactttagaccaaatgaacctaacaga

SEQ ID NO: 396597 - DNA, 592 bp, Homo sapiens
ttcatatatcaataactatattcaatgtcaataaattaaattttctacttaaaagagttagactcaatgaattaataaaacatcatcaaaattctgcctacaagaaaatagtttcaactgtaaagacatatagacatttaaaaaaagggtaaaaaaatcccatgtaaatagaaggcacagtgagcaggagtagttatgcttatttcagataaaatatattttaagtcaaaaacagtaaaaagacacaaagaaggtcattaaataaagggattaactcagcaagaggatatggcaattctaaatatatatgctcccaataccatagtgcccagatatataaagcaaatacgattagatctaaaggtagtgatgactctcataaaataattgttggggattttacacccactcttagctttagatagatcatcttgaccgaaaatcaaaaaaagaaaccttagatgtaaactgaactttagaccaaatgaacctaacagacattaacagaacattctatccagcagctgcagaatacacattcttctcatcagcctaygaaaaattctccaaaatagaccataggtaaaaacac

SEQ ID NO: 396598 - DNA, 621 bp, Homo sapiens
tcatttctacacaatttctataaaacatttgtatacaacaatatatattgtgaggtatatatatatacctcaaacatatatatatatatatatatatatgtttatatattgtatttgttttcatactgctgataaagacatatgtgagacttggtaatttataaagaaaaagaggtttaatggactcacagttccacgtggctggggaggcctcgtaatcatggtggaaggcaaaaggcacatcttacatggcagcagacagaagagaatgagagccaagtgaaaggggaaaccccttataaaatcatcagatctcctgagacttattcactaccattagaacagtatggaggaaaccaccgccatgattcaattatctcccactggttccctcccacaacatgtgggaattataagagctacaattcaagatgaaatttgggtggcgacacagycaaatcatattttatatacatatatatttatatagataagttttatatttatatataagtatatatatttatatattgacttactatataaacatatatatttacttgtgatataatatatatttatgtatatatttatatttatctatatatatacacacataca

SEQ ID NO: 396599 - DNA, 573 bp, Homo sapiens
gtaacatgtttatacaagtttttaaagttagagtttatgaggtcagttgttaagtataccatagcattaaagtacatcgttcttaattagaatggttattctcttaaatccctagaacctatttttcactattaaatatttacttataagtttacaaataaaacagaataaatgtatttggatagactgtatttaaattttccttttcccgtgattttcttatttggattttcaaaacatatgatattacatttatataagcatatcagtaataaattgaactttccatgttacttgaacacaaagtaataattataaacttttatttttgatagataccgatacataaaactggagtatttaatttttttcaaaaaaattgatcaaataattgacccttaatcaaataactgatattatatcttggttttcttctattcaaaaaaaattcatgtgagtgctatgcaatgtagacatatttttaaytaaataatacttattttacttactagtgctttctaaaatattttaaatttttattggttaccaagtagattggaataattaatttta

SEQ ID NO: 396600 - DNA, 584 bp, Homo sapiens
aaaggtatatgctctcaagaaggaatataatttgtctctagaacagctccagtgcaagatgtgcaaaaatcattttgtatgaaatgcaaagaactgaaaagcaaaagcattcctgaagaaaaaaataaaatcagaatatttatactctatgaaagacttacttaaagctaaagtaattaagacagtgtagtaaagtttaagcataaaaaatgaatcactggagcagaattgattgtccagaagtagactcaattatgtgctttttattgctatttgaccaayataggcatccattcaatatgaaaaaagactggaatatagatttagaaagatgatgtatgaatggttaacaaacacattaataagctgatgaaaattgtcattaggaaaatgtaaattaaaatgaaaataaagtattttcttaaaaacattaaaatagctaatacggaaaagatcaataatatcaaatgttttaaatatggagaaaacaaaaaacagtcattcatttttggtgtcttgtgggtagcaaaaattatacaaccaacttgaagaaccatttaacagtttctgacaaagttacatat

SEQ ID NO: 396601 - DNA, 619 bp, Homo sapiens
aatatacccaagcactttgagtagctcctgtctccatcaccaccctgagtgagaaagtaaacctgcaataagggccaaaagagccagcgtgaattcattcttttagaaagttctaaggctaatgaatcaacagaaagagaaatagtttccacttaaatgcagggaatatgtttccaagacctccagtaaatgtctgaaaccacggatagtaccaaactgtgtgtgtgtatatgtgtgtgtgtgtgtgtgtgtgtgtgtgtgtgtatttatatagatatatagtgtgtgtgtatatatatatacacattatatctgtataatgtgtatatatataatgtgtattatgtagttaatgttttttcaatacaaacatttataaaacaatttagtttrtaatttagtttataaattaggcacagaaaggagttggcaacaaaaaccaataataaaatagaacaattacagcaatgtattagcatcactacttttgcactttgagaccattattaagtataataagatgtgcttttttttttttaatttgaacacaagcactgaggtactgcaacagttgacctaataactgggatggctactcagtaactaacaggcagatagc

SEQ ID NO: 396602 - DNA, 690 bp, Homo sapiens
ttggtatttattatttaaattgctttgctagggcccctgacaagcttattctgaatctgcaggtatgtggatataataaagaagcaaaacgtcattatcttcaataggcaacagcaaactttttgttcaaagtccagatagtaaatatttcaggcttgtggtccatatagtctcttgcaattactctactctgctactataacacaaaggtatttgtagttggcacataaatgaatgagcaatgtgggttgtgtttcttaaaccatgttctacttatctwttctatcttcagctggcagtatctgatatgtgatttctgtttaatcaacatttattggattaaattggatgcaatggaattgcattgaactggaatacaaaatgtttcatgtaaaaataatctacttaaatcactttatttttcaaataaagaaatgaaagcccaaataagtgaattacttgtattcaaatactgtgtgaaagaaactattataatttgcaacaaaaatgttttatttcatcccagtatatttgacttatcagaaaaccatctcaagatattactggacaaataatacaatttcctgaaaggacttgaactgtttgttaaatgatgcttccttttttttttgttattgacattggagttgagccttgaacaacctgaaagttagaggtccagaaggttaa

SEQ ID NO: 396603 - DNA, 450 bp, Homo sapiens
agtcaaggcagatgagggccctgtgaaaaagaaacccttaaaatctcatttctctttgtttgagagttctggttgctccacatattctagaaatagtgttgtcaattatttttttattttttccattatagtgggtatccagtaatatctcattttggtttaatttgcttwtctatgataactcatgaggtgagttcaggttactgaggttgagtttatggcttccacatttctatgaatttttttatttgttttatttaccattgagagaggcatctgaaagtcttcaaatatgatttggagatttgtctctagttccctatgattttgttaaatcccttgtctatatgtgggaactttgttatagggtgcatatacatttggcattatgttttcttcattatcaaactattccttgattgcagaatggtgggctttttagctctgata

SEQ ID NO: 396604 - DNA, 324 bp, Homo sapiens
taactaaatttaaatctaattttacagtcaagttataaaagatccagttagaattgtgaaggataatcctaaaaataaatatattaaatatataaaactgagatgccaataatttcagtctattaaattactctcaacatcactactactaacaaaagttccactgtgattttttaatctctctcacataaaataaaacttcttttaaccttggcaatctggactaattccaattatctcactagcttttttttcccccaattttacytaatatttttaatttgttttattcaataaaatatgtaattccaaaaatagctatga

SEQ ID NO: 396605 - DNA, 586 bp, Homo sapiens
aaatgaaacgtctttcaatgaatatatgcattgatttactctagatagatgaagacatctgagagacctctgtgggtgttcagggtatttgctcaaatacccaagtgatattcttaaatttaacctgttgaatcttttgttgggccacctgagcaactttgcctttgctgtttatccacatgcagtaaaaagtttagtgcaccaaawtgctatatacccaactgtgatggttaataataggtgtcaacttgactggattgagggatgcctagatggctggtaacattatttctgggtgtttccatgatggggtgttgccagacaagattgacatttgatttagcagaatgaaataggaaaactcaccttcaatgtgcttgggcaccattcaatcagctgccagtgaagctagaacaaagcaggcagaaaaagggggattagcagtttgctgagttcacccactacctctctctctcttcctgtgccagacacttggcttccttttcttctacccttgtgtcacaggatacttagggtgtctcttcaccagctggcagtgccttctgcctaaatgttgctggtgctt

SEQ ID NO: 396606 - DNA, 510 bp, Homo sapiens
gggctgagacacatgacccaggaatactctaaagagagacttgattccataccccgttcctaaatgtcaaatatcaaaacttccaattgaggtcagcaaaacttataacacagggtcatcaaggctgcacaaatagagcacaatgcagcatgatagaaagtacaarcttactaacaaacagagcagccatcccatacactatatgcagttatttgtacttagtaagtggagagcaagacaagaaagctctcaaagcagtagtggtcatctattagcgcatctttctgggtctgccagacttttgttgttgttgttgttatcctatggaagcagaaatggatccacaactgaaatttggtttggatgtcaaggtggatgatgtttcacacaccaagaacatttgagtgaaagtttattcctcacacaagggatccctggggacagctggtcaggtacaagcaggtttgagcttggttgggccaaactagagggtgtaagttgggtttttat

SEQ ID NO: 396607 - DNA, 570 bp, Homo sapiens
tggagtgttgctattggaaaagatgagcaattgcagacagttttacagtctaccatatttatctgttgtgcaaacaatatgatttacattttaccatgtcactttttcagaataactaaaaagtactgtatacaattcaaaagctttgatcacaatttatctatcaattctacttagttaattctagttcacaaaattaatttacaaactttaaaaatagatttaattttatttattattggtttattatacgaacatttatataacatagacaataattatacagacaagtatcaccaaggcacagcttatgctatcaattaattgataaactaagcatagatatgtaatsaagtggtagtatttccaaccaaacattctggtcagtcctaatagttgaaaaagtattatggaaattttgaagagattataattcagatttgagagcaggttattgaggagagtctcaggggttaacttttgaacagaatcttgaaagaggagtaggactgcagtgacagtggtaaagatcattccaggcaagaggtaacagcaacagcatgggcaaag

SEQ ID NO: 396608 - DNA, 632 bp, Homo sapiens
gtgagctacaggcataatcaatgcatgttctacccagatccagaagaaagaacagtgcctaaggttgaggcagctagagaaggctcagggaggaggtgggaaccgagctgggtttggagttgagagagctcttgaaaagcaccaggaaggcaggggaagatgcggccctgcactttctgagggggaccattaagagatcaagttgactaaagcagagactttgtgtaggtgatgagcctgggaaagtagctatggatgccagactgagcacccatagcaggaccacgggatggagatgggaggggtcaggggccagggyggggtggaatgtggggcagaggttcaggggaactgatcagagttgggaggtcatggagatggactatcttggggaatgggttcaaagcaaccagagttgcttctttctgacccaaaaacaaaaattaagaagatgagtgaagaagaagtaaaacagttgaaacagaaagaaagagaaaattatgagggagggaaggtaagggcagataagatttactgccacgttggtgtattttgttcagtacttcatcaatgccatgcccaaataactgaaagaggcagcaattctgagctctctggtccctcaagatagt

SEQ ID NO: 396609 - DNA, 632 bp, Homo sapiens
gtgagctacaggcataatcaatgcatgttctacccagatccagaagaaagaacagtgcctaaggttgaggcagctagagaaggctcagggaggaggtgggaaccgagctgggtttggagttgagagagctcttgaaaagcaccaggaaggcaggggaagatgcggccctgcactttctgagggggaccattaagagatcaagttgactaaagcagagactttgtgtaggtgatgagcctgggaaagtagctatggatgccagactgagcacccatagcaggaccacgggatggagatgggaggggtcaggggccagggtrgggtggaatgtggggcagaggttcaggggaactgatcagagttgggaggtcatggagatggactatcttggggaatgggttcaaagcaaccagagttgcttctttctgacccaaaaacaaaaattaagaagatgagtgaagaagaagtaaaacagttgaaacagaaagaaagagaaaattatgagggagggaaggtaagggcagataagatttactgccacgttggtgtattttgttcagtacttcatcaatgccatgcccaaataactgaaagaggcagcaattctgagctctctggtccctcaagatagt

SEQ ID NO: 396610 - DNA, 632 bp, Homo sapiens
gtgagctacaggcataatcaatgcatgttctacccagatccagaagaaagaacagtgcctaaggttgaggcagctagagaaggctcagggaggaggtgggaaccgagctgggtttggagttgagagagctcttgaaaagcaccaggaaggcaggggaagatgcggccctgcactttctgagggggaccattaagagatcaagttgactaaagcagagactttgtgtaggtgatgagcctgggaaagtagctatggatgccagactgagcacccatagcaggaccacgggatggagatgggaggggtcaggggccagggtggggtggaatgtggrgcagaggttcaggggaactgatcagagttgggaggtcatggagatggactatcttggggaatgggttcaaagcaaccagagttgcttctttctgacccaaaaacaaaaattaagaagatgagtgaagaagaagtaaaacagttgaaacagaaagaaagagaaaattatgagggagggaaggtaagggcagataagatttactgccacgttggtgtattttgttcagtacttcatcaatgccatgcccaaataactgaaagaggcagcaattctgagctctctggtccctcaagatagt

SEQ ID NO: 396611 - DNA, 632 bp, Homo sapiens
gtgagctacaggcataatcaatgcatgttctacccagatccagaagaaagaacagtgcctaaggttgaggcagctagagaaggctcagggaggaggtgggaaccgagctgggtttggagttgagagagctcttgaaaagcaccaggaaggcaggggaagatgcggccctgcactttctgagggggaccattaagagatcaagttgactaaagcagagactttgtgtaggtgatgagcctgggaaagtagctatggatgccagactgagcacccatagcaggaccacgggatggagatgggaggggtcaggggccagggtggggtggaatgtggggcagaggttcaggggaactgatcagagttgggaggtcatggagatggactatcttggggaatgggttcaaagcaaccagagttgcttctttctgacccaaaaacaaaaattaagaagatgagtgaagaagaagtaaarcagttgaaacagaaagaaagagaaaattatgagggagggaaggtaagggcagataagatttactgccacgttggtgtattttgttcagtacttcatcaatgccatgcccaaataactgaaagaggcagcaattctgagctctctggtccctcaagatagt

SEQ ID NO: 396612 - DNA, 593 bp, Homo sapiens
caaacttttgggcttacagctgtgagtcactgaccccagcttgtattcttttgattttaaaaaaatattctgaatgtgatccaccaaattaatttcaccatccactaataggtagcaacctgaatgaaaaatactrttataaactttacacaaaaccagagattataaacatttgcttccaaggagagaggtaaaaggtacttgtttgctctgatgggccctgtttccttcagtgccaggaagagtggctctcagacctttcttctggcatccctcatgtatgcagtgttggttattattttcaaggccttggtaaccaaatgcccctagtgtgaccagtcagactgacagtccatatctgtaatatggtggtaagtttcctttgcatgtctttctttctggcatcttagaacttttacctaggaaattttctttttgcttgaagtacatcattaagaattttcagtgaaggcagattcttaaagtttttgttttccagaagagatcttggaaaatataaaaggttggcagttatttcttttagtacatgagatagtattacaccaatgctgttgagaagtctattgtgaggc

SEQ ID NO: 396613 - DNA, 593 bp, Homo sapiens
caaacttttgggcttacagctgtgagtcactgaccccagcttgtattcttttgattttaaaaaaatattctgaatgtgatccaccaaattaatttcaccatccactaataggtagcaacctgaatgaaaaatactgttataaactttacacaaaaccagagattataaacatttgcttccaaggagagaggtaaaaggtacttgtttgctctgatgggccctgtttccttcagtgccaggaagagtggctctcagacctttcttctrgcatccctcatgtatgcagtgttggttattattttcaaggccttggtaaccaaatgcccctagtgtgaccagtcagactgacagtccatatctgtaatatggtggtaagtttcctttgcatgtctttctttctggcatcttagaacttttacctaggaaattttctttttgcttgaagtacatcattaagaattttcagtgaaggcagattcttaaagtttttgttttccagaagagatcttggaaaatataaaaggttggcagttatttcttttagtacatgagatagtattacaccaatgctgttgagaagtctattgtgaggc

SEQ ID NO: 396614 - DNA, 489 bp, Homo sapiens
tcccactcttgttttttgtttctcccatgctgaattctgtgtaatttcttttgaactatcttgtagtttacaattttttttttttttttttttttttgagataagagttttgmtcttgttgctcgggctggagtgcaatggcaccatcttggctcactgcaacctctgcctcctgggttcaagcagttctcctacctcagcctcccaagtagctgggattacaggcatgcaccaccacgcccagctaatttttgtattctgagtagagacggggtttcaccatgttggccaggctggtctcgaactcctgacctcaggtgatctaccctcctcagcctcccaaagtgctggattacaggtgtgagccaccgtgccaggccttacattctctctcttaaagagaaaatgtaaggtatctaaatctgctgctaaaccatcattgtttttaattgtaataagggctcttttatgtactcacattgataagag

SEQ ID NO: 396615 - DNA, 489 bp, Homo sapiens
tcccactcttgttttttgtttctcccatgctgaattctgtgtaatttcttttgaactatcttgtagtttacaattttttttttttttttttttttttgagataagagttttgctcttgttgctcgggctggagtgcaatggcaccatcttggctcactgcaacctctgcctcctgggttcaagcagttctcctacctcagcctcccaagtagctgggattacaggcatgcaccaccacgcccagctaatttttgtattctgagtagagacggggtttcaccatgttggccaggctggtctygaactcctgacctcaggtgatctaccctcctcagcctcccaaagtgctggattacaggtgtgagccaccgtgccaggccttacattctctctcttaaagagaaaatgtaaggtatctaaatctgctgctaaaccatcattgtttttaattgtaataagggctcttttatgtactcacattgataagag

SEQ ID NO: 396616 - DNA, 489 bp, Homo sapiens
tcccactcttgttttttgtttctcccatgctgaattctgtgtaatttcttttgaactatcttgtagtttacaattttttttttttttttttttttttgagataagagttttgctcttgttgctcgggctggagtgcaatggcaccatcttggctcactgcaacctctgcctcctgggttcaagcagttctcctacctcagcctcccaagtagctgggattacaggcatgcaccaccacgcccagctaatttttgtattctgagtagagacggggtttcaccatgttggccaggctggtctcgaactcctgacctcaggtgatctaccctcctcagcctcccaaagtgctggattacaggtgtgagccaccgtgccaggccttacattctctctcttaaagagaraatgtaaggtatctaaatctgctgctaaaccatcattgtttttaattgtaataagggctcttttatgtactcacattgataagag

SEQ ID NO: 396617 - DNA, 439 bp, Homo sapiens
tgaaaactattgaaaactttaattttaaaatgcaaacattcttaaagtcctggttaattttataactataaaattagttataattttgagatttctgtcttgttttttataggggcagttttactcttaggtgactagaagtagatttcttcttttttataactataaaattaggtttacttttgttagaataaattaaagacagtgaayttgtaatttgaataactactaaaaatatacatgatgtattcttatttgggcccttgtgacaaaaatactattgtggctatagaaacctatcctatagtttgaagaactgagattactgtcagtattgagaacattcctccttcatcattagaaagattattaaaaaccagattcaaagaaactatcaatactacttatgaagtatgtctgtaaaaaaaattaagcctga

SEQ ID NO: 396618 - DNA, 484 bp, Homo sapiens
tctggaaggccatgagcaggagtaagataggctttgcacatgcacagagctgtgtgcaggcttggaaaagatcttagaaggtcctaaaccctcgtcaatggctcccttaaagttctggacaagaagatattgtcaaaatctaagtttaaggtggaattgtcaactgcttggatgagtgtggargacattccccaacatgcatgtagagcacctcagcaaaaacttggagatgtaaaccaaaaagaaaaatctaaggtcgtcctaccccaaccatctgaatggaaccctcctctctgtcaagggcattccaaagtttacctgaaaaagaagttcaggccatgatgggaaggcagagctggacaaacctggtaataccctcctcctttctggagttactaacagaacagactctaaatctgataagaaacatttacaatctagtctgtctgaagcctgctacctggaggcttcatttgcatgacaa

SEQ ID NO: 396619 - DNA, 484 bp, Homo sapiens
tctggaaggccatgagcaggagtaagataggctttgcacatgcacagagctgtgtgcaggcttggaaaagatcttagaaggtcctaaaccctcgtcaatggctcccttaaagttctggacaagaagatattgtcaaaatctaagtttaaggtggaattgtcaactgcttggatgagtgtggaagacattccccaacatgcatgtagagcacctcagcaaaaacttggagatgtaaaccaaaaagaaaaatctaaggtcgtcctaccccaaccatctgaatggawccctcctctctgtcaagggcattccaaagtttacctgaaaaagaagttcaggccatgatgggaaggcagagctggacaaacctggtaataccctcctcctttctggagttactaacagaacagactctaaatctgataagaaacatttacaatctagtctgtctgaagcctgctacctggaggcttcatttgcatgacaa

SEQ ID NO: 396620 - DNA, 484 bp, Homo sapiens
tctggaaggccatgagcaggagtaagataggctttgcacatgcacagagctgtgtgcaggcttggaaaagatcttagaaggtcctaaaccctcgtcaatggctcccttaaagttctggacaagaagatattgtcaaaatctaagtttaaggtggaattgtcaactgcttggatgagtgtggaagacattccccaacatgcatgtagagcacctcagcaaaaacttggagatgtaaaccaaaaagaaaaatctaaggtcgtcctaccccaaccatctgaatggaaccctcctctctgtcaagggcattccaaagtttacctgaaaaagaagttcaggccatgatgggaaggcagagctggacaaacctggtaataccctcctcctttytggagttactaacagaacagactctaaatctgataagaaacatttacaatctagtctgtctgaagcctgctacctggaggcttcatttgcatgacaa

SEQ ID NO: 396621 - DNA, 550 bp, Homo sapiens
ctccccaaattagcttttcacttaaccccatgctgaaacaaaatacaactaattctccaggtgaygttcaaatgctccaccaggaaagggaaaaaagcagtagctgcagataatttattatgtatataataatacgtccaatgcacttaaactcttaatttttatactatctacactgttaggtaaacaatattagctcctatcttaaaatgagagaaagggatgcagggaataacagctggaatttgaaccacatctgactccaaaaatgttctcttaacacaactctgctgccttgacaagatggcagatagatacaatgccgtctagtgtagctatgtggctacctgatctctgctgaagaaaactaaatgacagcaccatacccaaccctagaacctacaaaatgtccccttacaaaacagacacttaacaggaaattctttttccaaagaaattgtagtggtatcagaaaacaggtaaattttgaaaagtttcaaacttctctgtatcagcccaggaatccgaccagttctaacaagtgaggtca

SEQ ID NO: 396622 - DNA, 550 bp, Homo sapiens
ctccccaaattagcttttcacttaaccccatgctgaaacaaaatacaactaattctccaggtgacgttcaaatgctccaccaggaaagggaaaaaagyagtagctgcagataatttattatgtatataataatacgtccaatgcacttaaactcttaatttttatactatctacactgttaggtaaacaatattagctcctatcttaaaatgagagaaagggatgcagggaataacagctggaatttgaaccacatctgactccaaaaatgttctcttaacacaactctgctgccttgacaagatggcagatagatacaatgccgtctagtgtagctatgtggctacctgatctctgctgaagaaaactaaatgacagcaccatacccaaccctagaacctacaaaatgtccccttacaaaacagacacttaacaggaaattctttttccaaagaaattgtagtggtatcagaaaacaggtaaattttgaaaagtttcaaacttctctgtatcagcccaggaatccgaccagttctaacaagtgaggtca

SEQ ID NO: 396623 - DNA, 550 bp, Homo sapiens
ctccccaaattagcttttcacttaaccccatgctgaaacaaaatacaactaattctccaggtgacgttcaaatgctccaccaggaaagggaaaaaagcagtagctgcagakaatttattatgtatataataatacgtccaatgcacttaaactcttaatttttatactatctacactgttaggtaaacaatattagctcctatcttaaaatgagagaaagggatgcagggaataacagctggaatttgaaccacatctgactccaaaaatgttctcttaacacaactctgctgccttgacaagatggcagatagatacaatgccgtctagtgtagctatgtggctacctgatctctgctgaagaaaactaaatgacagcaccatacccaaccctagaacctacaaaatgtccccttacaaaacagacacttaacaggaaattctttttccaaagaaattgtagtggtatcagaaaacaggtaaattttgaaaagtttcaaacttctctgtatcagcccaggaatccgaccagttctaacaagtgaggtca

SEQ ID NO: 396624 - DNA, 550 bp, Homo sapiens
ctccccaaattagcttttcacttaaccccatgctgaaacaaaatacaactaattctccaggtgacgttcaaatgctccaccaggaaagggaaaaaagcagtagctgcagataatttattatgtatataataatacgtccaatgcacttaaactcttaatttttatactatctacactgttaggtaaacaatattagctcctatcttaaaatgagagaaagggatgcagggaataacagctggaatttgaaccacatctgactccaaaaatgttytcttaacacaactctgctgccttgacaagatggcagatagatacaatgccgtctagtgtagctatgtggctacctgatctctgctgaagaaaactaaatgacagcaccatacccaaccctagaacctacaaaatgtccccttacaaaacagacacttaacaggaaattctttttccaaagaaattgtagtggtatcagaaaacaggtaaattttgaaaagtttcaaacttctctgtatcagcccaggaatccgaccagttctaacaagtgaggtca

SEQ ID NO: 396625 - DNA, 541 bp, Homo sapiens
ttacttgaagaattcaatatttatttctgcctttttgactccttgactgtaaaatactgatctgatctgtagagagaacagtacatgtactattraggcacagggaatcctcagtgccttaatagatcgtaagtacttacttattctttcccatagaggcttacacatggtaggagaagagatttctggaatacctttcctccccaaagaaagctggtttcttttgtttgttaagtgagagagtggtaccacagggtttccaagatttccaaggctgatgaaaattcttaacttctgttgtctgcttgtcttgctttcttgaatttattttttgtatgttatgtatttattatttagagacaggatctccctgtgtcacccaggctggagtgcagtgtcacagtcataactcacggcagtgtcaacctcctgggctcaagtgattctccttccttggcctcctgagtagctaggaacacaggcatgctccactatgcctggctatttttttccccctggagacaggatcttgttgtgttgc

SEQ ID NO: 396626 - DNA, 541 bp, Homo sapiens
ttacttgaagaattcaatatttatttctgcctttttgactccttgactgtaaaatactgatctgatctgtagagagaacagtacatgtactattaaggcacagggaatcctcagtgccttaatagatcstaagtacttacttattctttcccatagaggcttacacatggtaggagaagagatttctggaatacctttcctccccaaagaaagctggtttcttttgtttgttaagtgagagagtggtaccacagggtttccaagatttccaaggctgatgaaaattcttaacttctgttgtctgcttgtcttgctttcttgaatttattttttgtatgttatgtatttattatttagagacaggatctccctgtgtcacccaggctggagtgcagtgtcacagtcataactcacggcagtgtcaacctcctgggctcaagtgattctccttccttggcctcctgagtagctaggaacacaggcatgctccactatgcctggctatttttttccccctggagacaggatcttgttgtgttgc

SEQ ID NO: 396627 - DNA, 533 bp, Homo sapiens
catctttgctcactgtaacctctgccttctgggctcaagagatcttcccacctcagcgccccaagtagctggggatacagatgagcaccaccacacctggmtaaggtttgcattttttggtagagacaggtgtcactatgttgcccaggctagtcttgaacttctgagcacagcagtctgcctgcctcggcctcccatactgttgggactacaggtgtgtgttactgctcccagctgggaggcaggcttttaaaggcatccaaaggaagatggaaatgctggtaagaaaggaaaatggtggtacataaattatgtaactagcagcactgtgactgttaactcttgtacctttttactgtgagactttaatcccttagtttgggtctggcctaatttctctgatggtaatactgtcaaggaacctagaggatatttacttattttagttgttacttgatttgagaaatggaaatttcctgtatttggtactgtaattagtaatttgtcttctgttcgattttagctggatatag

SEQ ID NO: 396628 - DNA, 221 bp, Homo sapiens
ttcacatgtactagtataagcacttagcatcactggtatttcagaaaatactgttttagctaagaaacaaaataactcaactatgtgatttaccttttttcctaaattttgattttgaaaaccagtgtctccattttgaaaataaattccattgaacaaaaacatcacttggatttgtataaaratgttagtttagagcaggggttggttagaacttgtgg

SEQ ID NO: 396629 - DNA, 537 bp, Homo sapiens
aaggaagaggggtgaagtagaaaagcaacaagctaatacaagaggagaaaaagtagatgagataacgtcaagacattctcacgagaaacagatgaagaggtggaaatgagtcagtccagcagcttaccaagtatcactgacaggagaggatgcatcctgtgtaaatactggagttcttgtctcagaagcacagggtatcatggaaatggagttgaaagctggggaactgatggaacgtctccatgaggagcaamtaactggagccatgggttggtaccaagatgttccctctgccttctacttttgatagaaactaagccagtatggcatggggctctgaaaatgggctgaggggaacatcggtagcctccactaaccccctgcccctacgctgttcctgaagtcccaggcagttaagacgtccacagtgaacggcacttaaaaagttcagacacagtgaaaattcaggaatataagacaatgtaaaacactatcagagaaatgaggcaaagaacgatataaaaaaggtagtatcat

SEQ ID NO: 396630 - DNA, 537 bp, Homo sapiens
aaggaagaggggtgaagtagaaaagcaacaagctaatacaagaggagaaaaagtagatgagataacgtcaagacattctcacgagaaacagatgaagaggtggaaatgagtcagtccagcagcttaccaagtatcactgacaggagaggatgcatcctgtgtaaatactggagttcttgtctcagaagcacagggtatcatggaaatggagttgaaagctggggaactgatggaacgtctccatgaggagcaactaactggagccatgggttggtaccaagatgttccctctgccttctactttygatagaaactaagccagtatggcatggggctctgaaaatgggctgaggggaacatcggtagcctccactaaccccctgcccctacgctgttcctgaagtcccaggcagttaagacgtccacagtgaacggcacttaaaaagttcagacacagtgaaaattcaggaatataagacaatgtaaaacactatcagagaaatgaggcaaagaacgatataaaaaaggtagtatcat

SEQ ID NO: 396631 - DNA, 537 bp, Homo sapiens
aaggaagaggggtgaagtagaaaagcaacaagctaatacaagaggagaaaaagtagatgagataacgtcaagacattctcacgagaaacagatgaagaggtggaaatgagtcagtccagcagcttaccaagtatcactgacaggagaggatgcatcctgtgtaaatactggagttcttgtctcagaagcacagggtatcatggaaatggagttgaaagctggggaactgatggaacgtctccatgaggagcaactaactggagccatgggttggtaccaagatgttccctctgccttctacttttgatagaaactaagccagtatggcatggggctctgaaaatgggctgaggggaacatyggtagcctccactaaccccctgcccctacgctgttcctgaagtcccaggcagttaagacgtccacagtgaacggcacttaaaaagttcagacacagtgaaaattcaggaatataagacaatgtaaaacactatcagagaaatgaggcaaagaacgatataaaaaaggtagtatcat

SEQ ID NO: 396632 - DNA, 537 bp, Homo sapiens
aaggaagaggggtgaagtagaaaagcaacaagctaatacaagaggagaaaaagtagatgagataacgtcaagacattctcacgagaaacagatgaagaggtggaaatgagtcagtccagcagcttaccaagtatcactgacaggagaggatgcatcctgtgtaaatactggagttcttgtctcagaagcacagggtatcatggaaatggagttgaaagctggggaactgatggaacgtctccatgaggagcaactaactggagccatgggttggtaccaagatgttccctctgccttctacttttgatagaaactaagccagtatggcatggggctctgaaaatgggctgaggggaacatcggtagcctccactaaccccctgcccctacgctgttcctgaagtcccaggcagttaagacgtccacagtgaacggcacttaaaaagttcagacacagtgaaaattcaggaatataagacaatgtaaaacactatcagagaaatgaggcaaagaaygatataaaaaaggtagtatcat

SEQ ID NO: 396633 - DNA, 497 bp, Homo sapiens
tataagtgaaaggtgtatgaagaattgctaaaacatttcctaaaatttagtcatcaaggccaggcgtggtggctcaaatctgtaatcctagcagtttgggaggctaaggtgggtggatcacgaggtcagcaagttcaagaccagcctsgccaagatggtgaaaccctatctctactaaaaatacaaaaattagccaggcacggtggcaggtgcctgtaatcccagctgctggggaggctgaggcagagaattgctggaagccaggaggcggaggttgcagtgagccaagatcatgccactgcactccagcctggcgacagagcgagactccagctcaaaaaaacaaacaaacaaacaaaaaaaaacttagtcatcaaacttttaactacgttagtcattttaatagcagctataaattaattgctactagctaagataaactgttagataacacagctcataatatagtactacttattttttattaatttagagta

SEQ ID NO: 396634 - DNA, 588 bp, Homo sapiens
aacaacggagaacacgaaacaaatctggtgaataccagaattaagacatgtgtcagccaggcgcagtggctcatgcctgtaatcccagcactttgggaggccgaggcgggtggatcacgaggtcaggagaccgagactatctgagggagaatcttcaggttttttcttctcttttgctgtaacaccagtcaaaaaaattgacaaagataaggtattaagtattgacgttaatactctacctgaaaataaaaaccatggaacctatctataggttaaaacagcatactgataaaaaacacatatacttygatgcagagatgtacgataatcatgaattagaattagcatcctgatttagttttctaccaaaaaccctaagtgaacacagaatctatttaaaaccaaagaaaacaaaaaaatcttgtgtttacttaatagtcattgaaaagaattactacaaatttctagaatttaaaaaggttaaaaattttaaagtgttgcctaactatacttagcatacaatagtttaccaaaatatccatgcatttgcagcaattgaaaaaaatcttaaaacataagcaagtatta

SEQ ID NO: 396635 - DNA, 588 bp, Homo sapiens
aacaacggagaacacgaaacaaatctggtgaataccagaattaagacatgtgtcagccaggcgcagtggctcatgcctgtaatcccagcactttgggaggccgaggcgggtggatcacgaggtcaggagaccgagactatctgagggagaatcttcaggttttttcttctcttttgctgtaacaccagtcaaaaaaattgacaaagataaggtattaagtattgacgttaatactctacctgaaaataaaaaccatggaacctatctataggttaaaacagcatactgataaaaaacacatatactttgatgcagagatgtacgataatcatgaattagaattagcatcctgatttagtkttctaccaaaaaccctaagtgaacacagaatctatttaaaaccaaagaaaacaaaaaaatcttgtgtttacttaatagtcattgaaaagaattactacaaatttctagaatttaaaaaggttaaaaattttaaagtgttgcctaactatacttagcatacaatagtttaccaaaatatccatgcatttgcagcaattgaaaaaaatcttaaaacataagcaagtatta

SEQ ID NO: 396636 - DNA, 588 bp, Homo sapiens
aacaacggagaacacgaaacaaatctggtgaataccagaattaagacatgtgtcagccaggcgcagtggctcatgcctgtaatcccagcactttgggaggccgaggcgggtggatcacgaggtcaggagaccgagactatctgagggagaatcttcaggttttttcttctcttttgctgtaacaccagtcaaaaaaattgacaaagataaggtattaagtattgacgttaatactctacctgaaaataaaaaccatggaacctatctataggttaaaacagcatactgataaaaaacacatatactttgatgcagagatgtacgataatcatgaattagaattagcatcctgatttagttttctaccaaaaaccctaagtgaacacagaatctatttaaaaccaaagaaaacaaaaaaatcttgtgtttacttaatagtcattgaaaagaattactacaaatttctagaatttaaaaaggttaaaaattttaaagtgttgcctaactatacttagcatacaatagtttaccaaaatatccaygcatttgcagcaattgaaaaaaatcttaaaacataagcaagtatta

SEQ ID NO: 396637 - DNA, 532 bp, Homo sapiens
gatgttatgaatcaatgtctgttcttgaacattatttattgtctttctctattaaacaattccaaaataaaatttccagcacaactaaatattgttgatgataagaggatttttaaaaaagttcttttaaaacagaagcttatatacaacttagaatctaaaaccaatagatttatggtaaaccttaaaactgaaccaaaacaaacaaaaaccaaagttttaatcatttaaaaatcatgtttattgaggtacaacttatagtaaaacctgcccttttcagcgtatagcactgagtcttgacaaatgcacagttaygtaccaccaccgaccaaggcctggcacatttttacctcctcaaagttctccctggctgcttctcccactccttggcaaccactaacctgttttctgtccttatagtactgcttttttcagtgtcatataagtagaatcacactgtacatagtattttgagtctgacctctgtcaactggcataatgcatttgagaattatccatgttgctgtactgg

SEQ ID NO: 396638 - DNA, 532 bp, Homo sapiens
gatgttatgaatcaatgtctgttcttgaacattatttattgtctttctctattaaacaattccaaaataaaatttccagcacaactaaatattgttgatgataagaggatttttaaaaaagttcttttaaaacagaagcttatatacaacttagaatctaaaaccaatagatttatggtaaaccttaaaactgaaccaaaacaaacaaaaaccaaagttttaatcatttaaaaatcatgtttattgaggtacaacttatagtaaaacctgcccttttcagcgtatagcactgagtcttgacaaatgcacagttatgtaccaccaccgaccaaggcctggcacattttyacctcctcaaagttctccctggctgcttctcccactccttggcaaccactaacctgttttctgtccttatagtactgcttttttcagtgtcatataagtagaatcacactgtacatagtattttgagtctgacctctgtcaactggcataatgcatttgagaattatccatgttgctgtactgg

SEQ ID NO: 396639 - DNA, 593 bp, Homo sapiens
tttcttttcttgatttcctggttccgaaatgccaaatttaaatccatcagcagacacagcgatggaaaatccttctttggttgacttaaattctgtattagaagaaccctgaaacataaatgaaggtgaattttcttgatccacatgcccaaaatagtcatgaaataaataccttcttcattcctaaacaatttatcaaatgatgttaacaataatgatgatgatgatgatgataacatttattgagcatttattaatgtgccagctgggcactgttctaagcactttacattattatctcattttaatatcctcaaaaaccctatgaattaaggtattattattaccctcatttyacatatgaggcaactgatgcattgagaggttaagaaacttgcctgtggtcaaaataagcagaagaacaagggtctaaatgcaccccaacactctgtcctcaaagctgtcacattcaactaccactgtaatattgagtcttcaatcaattgttatatatatagctgtatcaggcctgaaagtacttaccacatagtgggtcagcaagggcattacagttctatttctgttaaaacaga

SEQ ID NO: 396640 - DNA, 569 bp, Homo sapiens
ttcctaaacaatttatcaaatgatgttaacaataatgatgatgatgatgatgataacatttattgagcatttattaatgtgccagctgggcactgttctaagcactttacattattatctcattttaatatcctcaaaaaccctatgaattaaggtattattattaccctcatttcacatatgaggcaactgatgcattgagaggttaagaaacttgcctgtggtcaaaataagcagaagarcaagggtctaaatgcaccccaacactctgtcctcaaagctgtcacattcaactaccactgtaatattgagtcttcaatcaattgttatatatatagctgtatcaggcctgaaagtacttaccacatagtgggtcagcaagggcattacagttctatttctgttaaaacagaacgatgaaggatccaccaccaccactcccatttttaaaatattctaaatattcacacttattaacacaaaaataaggtgactaagaaggataatttctgtatttggagataaatttaaaatatctacattttaagggacataaaagttttaatagt

SEQ ID NO: 396641 - DNA, 593 bp, Homo sapiens
tttcttttcttgatttcctggttccgaaatgccaaatttaaatccatcagcagacacagcgatggaaaatccttctttggttgacttaaattctgtattagaagaaccctgaaacataaatgaaggtgaattttcttgatccacatgcccaaaatagtcatgaaataaataccttcttcattcctaaacaatttatcaaatgatgttaacaataatgatgatgatgatgatgataacatttattgagcatttattaatgtgccagctgggcactgttctaagcactttacattattatctcattttaatatcctcaaaaaccctatgaattaaggtattattattaccctcatttcacatatgaggcaactgatgcattgagaggttaagaaacttgcctgtggtcaaaataagcagaagaacaagggtctaaatgcaccccaacactctrtcctcaaagctgtcacattcaactaccactgtaatattgagtcttcaatcaattgttatatatatagctgtatcaggcctgaaagtacttaccacatagtgggtcagcaagggcattacagttctatttctgttaaaacaga

SEQ ID NO: 396642 - DNA, 532 bp, Homo sapiens
gatgttatgaatcaatgtctgttcttgaacattatttattgtctttctctattaaacaattccaaaataaaatttccagcacaactaaatattgttgatgataagaggatttttaaaaaagttcttttaaaacagaagcttatatacaacttagaatctaaaaccaatagatttatggtaaaccttaaaactgaaccaaaacaaacaaaaaccaaagttttaatcatttaaaaatcatgtttattgaggtacaacttatagtaaaacctgcccttttcagcgtatagcactgagtcttgacaaatgcacagttatgtaccaccaccgaccaaggcctggcacatttttacctcctcaaagttctccctggctgcttctcccactccttggcaaccrctaacctgttttctgtccttatagtactgcttttttcagtgtcatataagtagaatcacactgtacatagtattttgagtctgacctctgtcaactggcataatgcatttgagaattatccatgttgctgtactgg

SEQ ID NO: 396643 - DNA, 532 bp, Homo sapiens
gatgttatgaatcaatgtctgttcttgaacattatttattgtctttctctattaaacaattccaaaataaaatttccagcacaactaaatattgttgatgataagaggatttttaaaaaagttcttttaaaacagaagcttatatacaacttagaatctaaaaccaatagatttatggtaaaccttaaaactgaaccaaaacaaacaaaaaccaaagttttaatcatttaaaaatcatgtttattgaggtacaacttatagtaaaacctgcccttttcagcgtatagcactgagtcttgacaaatgcacagttatgtaccaccaccgaccaaggcctggcacatttttacctcctcaaagttctccctggctgcttctcccactccttggcaaccactaacctgttttctgtccttatagtwctgcttttttcagtgtcatataagtagaatcacactgtacatagtattttgagtctgacctctgtcaactggcataatgcatttgagaattatccatgttgctgtactgg

SEQ ID NO: 396644 - DNA, 531 bp, Homo sapiens
catgagccactggaccctggccttaactacatattttttacatctgcacagtgttttggaaaaagtggttcaactgaaagaatgaaaagttgggggcagaatttgctttaaaaaaaaattaaaaaaagggcattgaaaaaagtttcagtggtgttgggagggccttggaacaaggagtgaatggaagatgaggsagtggagggaggccatgtatggactctttctacagaccaggctgttgaaggagagagggctaacaggaaatgaagtgcagggggaagttttttgaagatgggagaaagaagacaacttttatatatttcatttcatttgattccttataaatttgtaaggaagatagagcttgtattatgtcagtgaagttgaaaatagagtacagaaaaattaagatacagcacccccaaaactgagaacttctgacataatacactgttggaaatatttatttcagagtgaagaaaatattggaagttaggcttgttaattggtctgcatggttcataattactc

SEQ ID NO: 396645 - DNA, 531 bp, Homo sapiens
catgagccactggaccctggccttaactacatattttttacatctgcacagtgttttggaaaaagtggttcaactgaaagaatgaaaagttgggggcagaatttgctttaaaaaaaaattaaaaaaagggcattgaaaaaagtttcagtggtgttgggagggccttggaacaaggagtgaatggaagatgagggagtggagggaggccatgtatggactctttctacagaccaggctgttgaaggagagagggctaacaggaaatgaagtgcaggsggaagttttttgaagatgggagaaagaagacaacttttatatatttcatttcatttgattccttataaatttgtaaggaagatagagcttgtattatgtcagtgaagttgaaaatagagtacagaaaaattaagatacagcacccccaaaactgagaacttctgacataatacactgttggaaatatttatttcagagtgaagaaaatattggaagttaggcttgttaattggtctgcatggttcataattactc

SEQ ID NO: 396646 - DNA, 537 bp, Homo sapiens
atcttcctgccttggactcccacagtgctgggaatacaggcatgagccactggaccctggccttaactacatattttttacatctgcacagtgttttggaaaaagtggttcaactgaaagaatgaaaagttgggggcagaatttgctttaaaaaaaaattaaaaaaagggcattgaaaaaagtttcagtggtgttgggagggccttggaacaaggagtgaatggaagatgagggagtggagggaggccatgtatggactctttctacagaccaggctgttgaaggagagagggctaacaggaaatgaagtgcagggggaagttttttgaagatgggagaaagaagacaacttttatatatttcatttcatttgattccttataaatttgtaaggaagatagagcttgtattatgtcagtgaagttgaaaatagagtacagaaaaattaagatacagcrcccccaaaactgagaacttctgacataatacactgttggaaatatttatttcagagtgaagaaaatattggaagttagg

SEQ ID NO: 396647 - DNA, 462 bp, Homo sapiens
atctagaattggtaccaaagtaaatacargcataccttggagatactgtaggttccattatagactaccacaataaagtgaatatcaccataaagcaaggcacacaaatattttgatttaccagtgtatgtaaatattatgtttatattctactgcagtctattaaatgttcaatagcgttatatttaaaaaaacaatgtgcatactttaatttaaaaatactttattgctaaaaaatgctactgatcatctgagctttcagtaaattgtaagattttttgctgatagaggatgttggtggctgctgactgatcccaacagtgattgctgaaggttggggtgcctctggcagtttcttacaataagacaacaatgaagtttgctacattgattgcctctttctttcatgaaagatttctctgtagcacttgatgctgtttgatagcattttttacccaaaag

SEQ ID NO: 396648 - DNA, 481 bp, Homo sapiens
cttgtattatgtcagtgaagttgaaaatagagtacagaaaaattaagatacagcacccccaaaactgagaacttctgacataatacactgttggaaatatttatttcagagtgaagaaaatattggaagttaggcttgttaattggtctgcatggttcataattactctttcttattaactatttaaggaacatgagaccaggaagttaaatacccaggtatatgcagatgtatatctagaattggtaccaaagtaaatacaggcataccttggagatactgtaggttccattatagactaccacaataaagtgaatatcaccataaagcaaggcacacaaatattttgatttaccagtgyatgtaaatattatgtttatattctactgcagtctattaaatgttcaatagcgttatatttaaaaaaacaatgtgcatactttaatttaaaaatactttattgctaaaaaatgctactgat

SEQ ID NO: 396649 - DNA, 481 bp, Homo sapiens
cttgtattatgtcagtgaagttgaaaatagagtacagaaaaattaagatacagcacccccaaaactgagaacttctgacataatacactgttggaaatatttatttcagagtgaagaaaatattggaagttaggcttgttaattggtctgcatggttcataattactctttcttattaactatttaaggaacatgagaccaggaagttaaatacccaggtatatgcagatgtatatctagaattggtaccaaagtaaatacaggcataccttggagatactgtaggttccattatagactaccacaataaagtgaatatcaccataaagcaaggcacacaaatattttgatttaccagtgtatgtaaatattatgtttatattctactgcagtctattaaatgttcaatagygttatatttaaaaaaacaatgtgcatactttaatttaaaaatactttattgctaaaaaatgctactgat

SEQ ID NO: 396650 - DNA, 481 bp, Homo sapiens
cttgtattatgtcagtgaagttgaaaatagagtacagaaaaattaagatacagcacccccaaaactgagaacttctgacataatacactgttggaaatatttatttcagagtgaagaaaatattggaagttaggcttgttaattggtctgcatggttcataattactctttcttattaactatttaaggaacatgagaccaggaagttaaatacccaggtatatgcagatgtatatctagaattggtaccaaagtaaatacaggcataccttggagatactgtaggttccattatagactaccacaataaagtgaatatcaccataaagcaaggcacacaaatattttgatttaccagtgtatgtaaatattatgtttatattctactgcagtctattaaatgttcaatagcgttatatttaaaaaamcaatgtgcatactttaatttaaaaatactttattgctaaaaaatgctactgat

SEQ ID NO: 396651 - DNA, 526 bp, Homo sapiens
ttcaatagcgttatatttaaaaaaacaatgtgcatactttaatttaaaaatactttattgctaaaaaatgctactgatcatctgagctttcagtaaattgtaagattttttgctgatagaggatgttggtggctgctgactgatcccaacagtgattgctgaaggttggggtgcctctggcagtttcttacaataagacaacaatgaagtttgctacattgattgcctctttctttcatgaaagatttctctgtagcacttgatgctgtttgatagcattttttacccaaaagtagaactttttttcaaaattgkagtcagctcaaaccctgccactgctttaacaactaaggttatatagtattctaaatcctttgttgtcattcaataatttcacagccttttcaccaggagtagtttccatctttaagaaaccactttcttgggtcatctgtaaggaacaactcctaatctgtgcaagttttatcatgagattgcagcaattcagtcacatcttcaggctcca

SEQ ID NO: 396652 - DNA, 389 bp, Homo sapiens
tagcataattcttaagagctctaggactttttgagtggcaaatgagcattagcttcaacgtcaagttaccagctgcattagcccctaacaagagactcagtttttatttatttatttatttatttatttatttatttatttatttatttatttttaaargagacaagagtctcaccttgttgtccaggctggccttgaactcctgggctcaagtgattctctcaccttggcctctcaaagtgctggaataacaggtgtggccccagcctgatctttgaagcaaggcattgattttccctctctagctgtgaaagtcctagatggcatcttcttctaatggaaggctcttttgtctacataaaacatcttgtttagtatagccacctcca

SEQ ID NO: 396653 - DNA, 389 bp, Homo sapiens
tagcataattcttaagagctctaggactttttgagtggcaaatgagcattagcttcaacgtcaagttaccagctgcattagcccctaacaagagactcagtttttatttatttatttatttatttatttatttatttatttatttatttatttttaaaggagacaagagtctcaccttgttgtccaggctggccttgaactcctgggctcaagtgattctctcaccttggcctctcaaagtgctggaataacaggtgtggccccagcctgatctttgaagcaaggcattgattttccctctctagctgtgaaagtcctagatggcatcttcttctaatggaaggctcttttgtctacataaaacaycttgtttagtatagccacctcca

SEQ ID NO: 396654 - DNA, 600 bp, Homo sapiens
aaaagttaaggacattgggagtaatatcaagtcattttggaaagaagggtgaatgatttttcatggttttcttaggcttttgatggatgaataggtgttaccagtactgttcagttgttacatattccagaagtcagtgctgagtttgaagtgattgaagaattagtatttatgcatagtctatgtgaaacaactacaagagaaaatattttcagaaaagttgagcaaacactaacttagtacaacctgaagtggaatccgctaagatgcrttacagttgatagtggcaaaaataactgtggagcagaaagacttgagttggacaaatttacaaagcttgttaaatgtcaggtgtttaaagcctgattatttattgtattatttattagcaggtactttgcagaaaatatttaaatctgtcatgttttagtgaactattatataatagtgtcagcagtgattttgacttgcatttgtggacttcatcatcatcaaatcctatgaatttttgttagatatagaggcagaatatactgaattgccattatacagagcaatttaatgacttggcagtggtaaagttttatttcagttttttgc

SEQ ID NO: 396655 - DNA, 600 bp, Homo sapiens
aaaagttaaggacattgggagtaatatcaagtcattttggaaagaagggtgaatgatttttcatggttttcttaggcttttgatggatgaataggtgttaccagtactgttcagttgttacatattccagaagtcagtgctgagtttgaagtgattgaagaattagtatttatgcatagtctatgtgaaacaactacaagagaaaatattttcagaaaagttgagcaaacactaacttagtacaacctgaagtggaatccgctaagatgcgttacagwtgatagtggcaaaaataactgtggagcagaaagacttgagttggacaaatttacaaagcttgttaaatgtcaggtgtttaaagcctgattatttattgtattatttattagcaggtactttgcagaaaatatttaaatctgtcatgttttagtgaactattatataatagtgtcagcagtgattttgacttgcatttgtggacttcatcatcatcaaatcctatgaatttttgttagatatagaggcagaatatactgaattgccattatacagagcaatttaatgacttggcagtggtaaagttttatttcagttttttgc

SEQ ID NO: 396656 - DNA, 617 bp, Homo sapiens
gaaagaagggtgaatgatttttcatggttttcttaggcttttgatggatgaataggtgttaccagtactgttcagttgttacatattccagaagtcagtgctgagtttgaagtgattgaagaattagtatttatgcatagtctatgtgaaacaactacaagagaaaatattttcagaaaagttgagcaaacactaacttagtacaacctgaagtggaatccgctaagatgcgttacagttgatagtggcaaaaataactgtggagcagaaagacttgagttggacaaatttacaaagcttgttaaatgtcaggtgtttaaagcctgattatttattgtattatttattagcaggtactttgcagaaaatatttaaatctgtcatgttttagtgaactattatataatagtgtcagcagtgattttgacttgcatttgtggacttcatcatcatcaaatcctatgaatttttgttagatatagaggcagaatatactgaattgccattmtacagagcaatttaatgacttggcagtggtaaagttttatttcagttttttgcgctgaggaatgagattgaaatttttctgaataatattgccctcaactgttaagtca

SEQ ID NO: 396657 - DNA, 514 bp, Homo sapiens
gttactgctggtctccccaagttaacatactttacctgagacatacacaaaattaacttttatccatctctctctctctctttttttttaaagtatttgcttgaggcataatcataatcaacttctaaagttacattttacttgatttgttgtcccaaatgtagacaaaaaacccataaayagccacaggcacagtggctcatgcctggaatcccagcactttggaaggctgaggctggaggagcccaggagttccagaccagcctaggcaacataacaagactctgtatctaaaaaatctgtttaaaaatgttttaaaaaatatttttaaacataaataacaagatttctgttgttaacaaagtaatgggtagtcattttacatgaactttaataaaacaataatagatgaactgtgttgtgcgttctacggtggctagaggaaaatataatcattttggggaatgccaatgcatgaactcctcaggagtaggcactcttccattaatcctcc

SEQ ID NO: 396658 - DNA, 514 bp, Homo sapiens
gttactgctggtctccccaagttaacatactttacctgagacatacacaaaattaacttttatccatctctctctctctctttttttttaaagtatttgcttgaggcataatcataatcaacttctaaagttacattttacttgatttgttgtcccaaatgtagacaaaaaacccataaatagccacaggcacagtggctcatgcctggaatcccagcactttggaaggctgaggctggaggagcccaggagttccagaccagcctaggcaacataacaagactctgtatctaaaaaatctgtttaaaaatgttttaaaaaatatttttaaacataaatawcaagatttctgttgttaacaaagtaatgggtagtcattttacatgaactttaataaaacaataatagatgaactgtgttgtgcgttctacggtggctagaggaaaatataatcattttggggaatgccaatgcatgaactcctcaggagtaggcactcttccattaatcctcc

SEQ ID NO: 396659 - DNA, 335 bp, Homo sapiens
atgtatttaattatatcctacagtttttaatatgtagaattgatgatgaatttgccttatgttatcttcaagctatgggctatttaaaagtatacttttagaaagtttctaaaattgttaccagaaattatgatctctccactttctttgaaaktttttacttgttttaacactcgtctatgtggttaatttttgaacttgtccacagtttcttgaagggaagtctatttctgcagctaaatctcatgttctgtatgtgtgcatttattctattttttcataattttaaatcttcatcctccctaattatttttatactttatttactgagagat

SEQ ID NO: 396660 - DNA, 752 bp, Homo sapiens
cagtttttaatatgtagaattgatgatgaatttgccttatgttatcttcaagctatgggctatttaaaagtatacttttagaaagtttctaaaattgttaccagaaattatgatctctccactttctttgaaattttttacttgttttaacactcgtctatgtggttaatttttgaacttgtccacagtttcttgaagggaagtctatttctgcagytaaatctcatgttctgtatgtgtgcatttattctattttttcataattttaaatcttcatcctccctaattatttttatactttatttactgagagatatattaaatatcctactagaagcatggatttgtctgtctcctcatctgtcaacttttgctttttgaggctgtacttgggtgcatatgattcaaaaaaatacatctttttttttaatttgaacttttatcaaaatgaaatgttttccttcatttatgtatgctttcaacattatgtatgatatagctatagtaactttggttagactttgcactgtgtatctttcacgtgtgtgtgtgtgtgtgtatttttttttccactgtgctgcccaggctatagtgcaggggctgttcacagacgtgtctgtggctccctgctgccttaaactcctgggctcaaatgatcctcctacctcagtctttagagtgatgtgtgccaccactgccaaataattgtttttatttctttagagatagaatttggctatattgcccaggct

SEQ ID NO: 396661 - DNA, 752 bp, Homo sapiens
cagtttttaatatgtagaattgatgatgaatttgccttatgttatcttcaagctatgggctatttaaaagtatacttttagaaagtttctaaaattgttaccagaaattatgatctctccactttctttgaaattttttacttgttttaacactcgtctatgtggttaatttttgaacttgtccacagtttcttgaagggaagtctatttctgcagctaaatctcatgttctgtatgtgtgcattkattctattttttcataattttaaatcttcatcctccctaattatttttatactttatttactgagagatatattaaatatcctactagaagcatggatttgtctgtctcctcatctgtcaacttttgctttttgaggctgtacttgggtgcatatgattcaaaaaaatacatctttttttttaatttgaacttttatcaaaatgaaatgttttccttcatttatgtatgctttcaacattatgtatgatatagctatagtaactttggttagactttgcactgtgtatctttcacgtgtgtgtgtgtgtgtgtatttttttttccactgtgctgcccaggctatagtgcaggggctgttcacagacgtgtctgtggctccctgctgccttaaactcctgggctcaaatgatcctcctacctcagtctttagagtgatgtgtgccaccactgccaaataattgtttttatttctttagagatagaatttggctatattgcccaggct

SEQ ID NO: 396662 - DNA, 752 bp, Homo sapiens
cagtttttaatatgtagaattgatgatgaatttgccttatgttatcttcaagctatgggctatttaaaagtatacttttagaaagtttctaaaattgttaccagaaattatgatctctccactttctttgaaattttttacttgttttaacactcgtctatgtggttaatttttgaacttgtccacagtttcttgaagggaagtctatttctgcagctaaatctcatgttctgtatgtgtgcatttaktctattttttcataattttaaatcttcatcctccctaattatttttatactttatttactgagagatatattaaatatcctactagaagcatggatttgtctgtctcctcatctgtcaacttttgctttttgaggctgtacttgggtgcatatgattcaaaaaaatacatctttttttttaatttgaacttttatcaaaatgaaatgttttccttcatttatgtatgctttcaacattatgtatgatatagctatagtaactttggttagactttgcactgtgtatctttcacgtgtgtgtgtgtgtgtgtatttttttttccactgtgctgcccaggctatagtgcaggggctgttcacagacgtgtctgtggctccctgctgccttaaactcctgggctcaaatgatcctcctacctcagtctttagagtgatgtgtgccaccactgccaaataattgtttttatttctttagagatagaatttggctatattgcccaggct

SEQ ID NO: 396663 - DNA, 752 bp, Homo sapiens
cagtttttaatatgtagaattgatgatgaatttgccttatgttatcttcaagctatgggctatttaaaagtatacttttagaaagtttctaaaattgttaccagaaattatgatctctccactttctttgaaattttttacttgttttaacactcgtctatgtggttaatttttgaacttgtccacagtttcttgaagggaagtctatttctgcagctaaatctcatgttctgtatgtgtgcatttattctattttttcataattttaaatcttcatcctccctaattatttttatactttatttactgagagatatattaaatatcctactagaagcatggatttgtctgtctcctcatctgtcaacttttgctttttgaggctgtacttgggtgcatatgattcaaaaaaatacatctttttttttaatttgaacttttatcaaaatgaaatgttttccttcatttatgtatgctttcaacattatgtatgatatagctatagtaactttggttagactttgcactgtgtatctttcacgtgtgtgtgtgtgtgtgtatttttttttccactgtgctgcccaggctatagtgcaggggctgttcacagacgtgtctgtggctccctgctgccttaaactcctgggctcaaatgatcctcctacctcagtctttagagwgatgtgtgccaccactgccaaataattgtttttatttctttagagatagaatttggctatattgcccaggct

SEQ ID NO: 396664 - DNA, 538 bp, Homo sapiens
cttttaaaatcattctatatctttgtattttaaatatgacttataaatagcatggaatgggattttaacaatttatccatctttaactggattacttaktccatttgcatgtatttgtattctgacatacttggattctgtatagatggtgagtggtgtgtatgtacatgcatgtgtgtttgtgtcattttgtcactttctatttatcctacttatgtttcttttttcctttcttgccttcttttcaattggtgggattttttttcttctctagtcattttaagttagtctttgtttatattcttttagtaactgtcatgctaacttaaatgtgcatatttaagttatgaaagttgaaaatttatcctcctcctgggtgataggataacttaagaatactttcattgcattaaactcctcttgagttatgctacaacagtatattttcaactttttgttttgacataattgcagattcacaggtgcttttaagaaataatataaagaaatccaatatagtcttcactcagtttctccc

SEQ ID NO: 396665 - DNA, 538 bp, Homo sapiens
cttttaaaatcattctatatctttgtattttaaatatgacttataaatagcatggaatgggattttaacaatttatccatctttaactggattacttagtccatttgcatgtatttgtattctgacatacttggattctgtatagatggtgagtggtgtgtatgtacatgcatgtgtgtttgtgtcattttgtcactttctatttatcctacttatgtttcttttttcctttcttgccttcttttcaattggtgggattttttttcttctctagtcattttaagttagtctttgtttatattcttttagtaactgtcatgctaayttaaatgtgcatatttaagttatgaaagttgaaaatttatcctcctcctgggtgataggataacttaagaatactttcattgcattaaactcctcttgagttatgctacaacagtatattttcaactttttgttttgacataattgcagattcacaggtgcttttaagaaataatataaagaaatccaatatagtcttcactcagtttctccc

SEQ ID NO: 396666 - DNA, 430 bp, Homo sapiens
ggtgagtggtgtgtatgtacatgcatgtgtgtttgtgtcattttgtcactttctatttatcctacttatgtttcttttttcctttcttgccttcttttcaattggtgggattttttttcttctctagtcattttaagttagtctttgtttatattcttttagtaactgtcatgctaacttaaatgtgcatatttaagttatgaaagttgaaaatttatcctcctcctgggtgataggataacttargaatactttcattgcattaaactcctcttgagttatgctacaacagtatattttcaactttttgttttgacataattgcagattcacaggtgcttttaagaaataatataaagaaatccaatatagtcttcactcagtttctcccaatggtaacgtcttgcataactacctttttcagatttca

SEQ ID NO: 396667 - DNA, 507 bp, Homo sapiens
gggatcattttcctcctgtctgaaatcttttagtatctgtttagtaatggtttccttgggcgagctccctcaatttctgcacattttaagctctattatgttagtctcatacttaattttttttattgtggtataagaggcatacaggtaaggagatcatgaacgtacaactcaaaattttcacatagttaacacctaagaaatggatatgaccagcaacccagaagtctctcttctgttttcttttagttgctgctcttacctcctcccaagacagggtgatctgcctgccttggcctcccaaagtgctgggattacagkcatgagccaccgcgcctggcctaaaatgaccatcttgtcttttgagacagagtcttgctctgtcaccccagctggagtgcagtggcatgatcatggctcactgcagcctcaatctccctggctcaagcgatcctcccaccttaacctcctgagtagctgggacaggaggcacagatgccacaccca

SEQ ID NO: 396668 - DNA, 575 bp, Homo sapiens
cagaggactgacagaatttagggcaaaagaaaagcagcaggacttaatgtcaagaaatacaaagataaccaaagaaaagaggctggagttaaatcttaagtgaagtaaaaggaattaaagctaaatgatgagtaaatacattgaggaacagggggtgaattaagatatgtagcatttccatgtttaaaccttgcaaaaacttctcattgcagaccgaacagracccaaactccttcccttgcttacaagcctacatgatctagcctttgttcgccttgatgatgtctctactaccctcacctagtaggctactatgctccaagtaaaatgacatgctgtctgttcatgaatcatgccaagtccactcctcaaggtctgtgtagtggtctgttccctctccctggaatgttctttcctcttatcttgcatgattggtttcttaccattcagttttcctattcaggaagtatatctggttgtatctcctagatggatttttagtgtaaaatttccagacaaggttaatgtatccttgtatcatcatgaaaataatgttgcaacaatgaccagccatt

SEQ ID NO: 396669 - DNA, 575 bp, Homo sapiens
cagaggactgacagaatttagggcaaaagaaaagcagcaggacttaatgtcaagaaatacaaagataaccaaagaaaagaggctggagttaaatcttaagtgaagtaaaaggaattaaagctaaatgatgagtaaatacattgaggaacagggggtgaattaagatatgtagcatttccatgtttaaaccttgcaaaaacttctcattgcagaccgaacagaacccaaactccttcccttgcttayaagcctacatgatctagcctttgttcgccttgatgatgtctctactaccctcacctagtaggctactatgctccaagtaaaatgacatgctgtctgttcatgaatcatgccaagtccactcctcaaggtctgtgtagtggtctgttccctctccctggaatgttctttcctcttatcttgcatgattggtttcttaccattcagttttcctattcaggaagtatatctggttgtatctcctagatggatttttagtgtaaaatttccagacaaggttaatgtatccttgtatcatcatgaaaataatgttgcaacaatgaccagccatt

SEQ ID NO: 396670 - DNA, 575 bp, Homo sapiens
cagaggactgacagaatttagggcaaaagaaaagcagcaggacttaatgtcaagaaatacaaagataaccaaagaaaagaggctggagttaaatcttaagtgaagtaaaaggaattaaagctaaatgatgagtaaatacattgaggaacagggggtgaattaagatatgtagcatttccatgtttaaaccttgcaaaaacttctcattgcagaccgaacagaacccaaactccttcccttgcttacaagcctacatgatctagcctttgttcgccttgatgatgtctctactaccctcacctagtaggctactatgctccaagtaaaatgacatgctgtctgttcatgaatcatgccaagtccactcctcaaggtctgtgtagtggtctgttccctctccctggaatgttctttcctcttatcttgcatgattggyttcttaccattcagttttcctattcaggaagtatatctggttgtatctcctagatggatttttagtgtaaaatttccagacaaggttaatgtatccttgtatcatcatgaaaataatgttgcaacaatgaccagccatt

SEQ ID NO: 396671 - DNA, 503 bp, Homo sapiens
agccaacaatacattttagtaattattactttaccatctagagtgattaccttatcacgatacatttttcttcmaactacctgctttttgatgttactggaaaatatgttatagacatattacatttctacatgtcaaatactcagcaatacattatgcatatattattattattattattattattatcatcattgagacggagtccccctctgttgcccaggctggagtgcggtggcacagtcttcgctcactgcaagctccatctcctggcttcaggccattctcctgactcagcctcccgagtagctgggactacaggcgcccgccatcacgcccggctaattttttgtatttttagtaaagacggggtttcattatgttagccaggatgctctcgatctcctggcctcgtaatacgcccgcctcagcctcctgaaatgctgagattacaggcgtgagccatcgtgcccggccattatacacatattattttataaaca

SEQ ID NO: 396672 - DNA, 566 bp, Homo sapiens
tcccaaaaagaaaaggggaaaaaataatggagccaaagaaatatttttcaaaataactgccaaaaatattctaaaagaagtgacagaaaatcaaacttcagatataggaaactcagagaatgtcaaatagaacaaaaacaaataagaattacatcttgaaaaatctttaaaaaatcaactctaaattttatatcttgctccaaatatatagagatataaataggttatcttcaagatatggagaaagccatatcatggaaacactaaaataaagctgtgggaaggaccacattgatattagacacaacagagttcagaacaagaaatagtatcagagatgagagataatagataatataatcatcaattctcaagaagatgtaaacctcctactaattagggtatgcagctaacaacagaacctccaaatacatgaggaaaaacatgaaagaawtcaaaggtgaactagaaaaatccaaaattatatttgcagacttcaacacttttgtcttagtaatagacagactaggcacaatctcagtaatcatgtggaagataagaacaac

SEQ ID NO: 396673 - DNA, 566 bp, Homo sapiens
tcccaaaaagaaaaggggaaaaaataatggagccaaagaaatatttttcaaaataactgccaaaaatattctaaaagaagtgacagaaaatcaaacttcagatataggaaactcagagaatgtcaaatagaacaaaaacaaataagaattacatcttgaaaaatctttaaaaaatcaactctaaattttatatcttgctccaaatatatagagatataaataggttatcttcaagatatggagaaagccatatcatggaaacactaaaataaagctgtgggaaggaccacattgatattagacacaacagagttcagaacaagaaatagtatcagagatgagagataatagataatataatcatcaattctcaagaagatgtaaacctcctactaattagggtatgcagctaacaacagaacctccaaatacatgaggaaaaacatgaaagaaatcaaaggtgaactagaaaaatccaaaattatatttgcagacttcaacacttttgtcttagtaatagacagactaggcacaatytcagtaatcatgtggaagataagaacaac

SEQ ID NO: 396674 - DNA, 460 bp, Homo sapiens
tttttacattgttttcttttcctccagttagggcttgaggtttgtctctggagagtgactgtcaattggagccctgcctttctggggttctggtcagggsgttgtggatgcttaacatgtgcctttcacaggacacttccttaccccagcagtggccaggtgtgcatcccacgaccaggcctccctctcacagaacatctgttgagactaggagatgcctggtgactgttgcctgacctgtgtcctgtgtatttctgacaagagccactctcagagaccctggccaggaggagagttaggttccagtgtaggtcagctcagacacatggaggccacaggaccaaacatgggaaatcacagaagtggttttattactcacagatccagagagaagagggtagctgaaaagagggtttagctgtgtccccagccaaatctcatcttgaattcccacatgttg

SEQ ID NO: 396675 - DNA, 460 bp, Homo sapiens
tttttacattgttttcttttcctccagttagggcttgaggtttgtctctggagagtgactgtcaattggagccctgcctttctggggttctggtcagggcgttgtggatgcttaacatgtgcctttcacaggacacttccttaccccagcagtggccaggtgtgcatcccacgaccaggcctccctctcacagaacwtctgttgagactaggagatgcctggtgactgttgcctgacctgtgtcctgtgtatttctgacaagagccactctcagagaccctggccaggaggagagttaggttccagtgtaggtcagctcagacacatggaggccacaggaccaaacatgggaaatcacagaagtggttttattactcacagatccagagagaagagggtagctgaaaagagggtttagctgtgtccccagccaaatctcatcttgaattcccacatgttg

SEQ ID NO: 396676 - DNA, 396 bp, Homo sapiens
acatctgttgagactaggagatgcctggtgrctgttgcctgacctgtgtcctgtgtatttctgacaagagccactctcagagaccctggccaggaggagagttaggttccagtgtaggtcagctcagacacatggaggccacaggaccaaacatgggaaatcacagaagtggttttattactcacagatccagagagaagagggtagctgaaaagagggtttagctgtgtccccagccaaatctcatcttgaattcccacatgttgtgggagggaacaggttggaggaaattgaatcatgggggcaggtctttcccatgctgttcttctgatagtgaataagtctcacaagatctgatggttttataaaggggagtttccctgcacaaactctctt

SEQ ID NO: 396677 - DNA, 396 bp, Homo sapiens
acatctgttgagactaggagatgcctggtgactgttgcctgacctgtgtcctgtgtatttctgacaagagccactctcagagaccctggccaggaggagagttaggttccagtgtaggtcagctcagacacatggaggccacaggaccaaacatgggaaatcacagaaktggttttattactcacagatccagagagaagagggtagctgaaaagagggtttagctgtgtccccagccaaatctcatcttgaattcccacatgttgtgggagggaacaggttggaggaaattgaatcatgggggcaggtctttcccatgctgttcttctgatagtgaataagtctcacaagatctgatggttttataaaggggagtttccctgcacaaactctctt

SEQ ID NO: 396678 - DNA, 396 bp, Homo sapiens
acatctgttgagactaggagatgcctggtgactgttgcctgacctgtgtcctgtgtatttctgacaagagccactctcagagaccctggccaggaggagagttaggttccagtgtaggtcagctcagacacatggaggccacaggaccaaacatgggaaatcacagaagtrgttttattactcacagatccagagagaagagggtagctgaaaagagggtttagctgtgtccccagccaaatctcatcttgaattcccacatgttgtgggagggaacaggttggaggaaattgaatcatgggggcaggtctttcccatgctgttcttctgatagtgaataagtctcacaagatctgatggttttataaaggggagtttccctgcacaaactctctt

SEQ ID NO: 396679 - DNA, 610 bp, Homo sapiens
atagtcaggaagcagtatggatatatggttaagtatatacactatacacttaactgaggttaagcagagatcatagtgcctgacttgaagcacctgmtctaccacagatgatcttctagaagctgtataaattaaacctctgaaggtttacatttcctcatttgaaaaatggaaataataaagtaaaccctcatgaggtccttaagagtttaaatgaaataatccatataaagtgcttaagtgctgaacatagcatctggtatgcaataatcactctataaatgctaattggtaaaattatcatcattgttattgttagtccaactatagtagtagcatggaaccaggattctgaaaagtgtggcctgcagatcagggtcagtgcagacttactggtttgcagtgagatctggagcttgtgccagaatgtaaataggcgatgtcactaaacatactgattactgttcagctgactttttaaaaatagcaagacctcttcagtgtaggaagcagttagttgatttacattctggtgcaagctctttaccttgccacaaaccagcagcagagttgacatggagtattggaccaatgatcccactctccaaaa

SEQ ID NO: 396680 - DNA, 610 bp, Homo sapiens
atagtcaggaagcagtatggatatatggttaagtatatacactatacacttaactgaggttaagcagagatcatagtgcctgacttgaagcacctgctctaccacagatgatcttctagaagctgtataaattaaacctctgaaggtttacatttcctcatttgaaaaatggaaataataaagtaaaccctcatgaggtccttaagagtttaaatgaaataatccatataaagtgcttaagtgctgaacatagcatctggtatgcaataatcactctataaatgctaattggtaaaattatcatcattgttattgttagtccaactatagtagtagcatggaaccaggattctgaaaagtgtggcctgcagatcagggycagtgcagacttactggtttgcagtgagatctggagcttgtgccagaatgtaaataggcgatgtcactaaacatactgattactgttcagctgactttttaaaaatagcaagacctcttcagtgtaggaagcagttagttgatttacattctggtgcaagctctttaccttgccacaaaccagcagcagagttgacatggagtattggaccaatgatcccactctccaaaa

SEQ ID NO: 396681 - DNA, 610 bp, Homo sapiens
atagtcaggaagcagtatggatatatggttaagtatatacactatacacttaactgaggttaagcagagatcatagtgcctgacttgaagcacctgctctaccacagatgatcttctagaagctgtataaattaaacctctgaaggtttacatttcctcatttgaaaaatggaaataataaagtaaaccctcatgaggtccttaagagtttaaatgaaataatccatataaagtgcttaagtgctgaacatagcatctggtatgcaataatcactctataaatgctaattggtaaaattatcatcattgttattgttagtccaactatagtagtagcatggaaccaggattctgaaaagtgtggcctgcagatcagggtcagtgcagacttactggtttgcagtgagatcyggagcttgtgccagaatgtaaataggcgatgtcactaaacatactgattactgttcagctgactttttaaaaatagcaagacctcttcagtgtaggaagcagttagttgatttacattctggtgcaagctctttaccttgccacaaaccagcagcagagttgacatggagtattggaccaatgatcccactctccaaaa

SEQ ID NO: 396682 - DNA, 610 bp, Homo sapiens
atagtcaggaagcagtatggatatatggttaagtatatacactatacacttaactgaggttaagcagagatcatagtgcctgacttgaagcacctgctctaccacagatgatcttctagaagctgtataaattaaacctctgaaggtttacatttcctcatttgaaaaatggaaataataaagtaaaccctcatgaggtccttaagagtttaaatgaaataatccatataaagtgcttaagtgctgaacatagcatctggtatgcaataatcactctataaatgctaattggtaaaattatcatcattgttattgttagtccaactatagtagtagcatggaaccaggattctgaaaagtgtggcctgcagatcagggtcagtgcagacttactggtttgcagtgagatctggagcttgtgccagaatgtaaataggcgatgtcactaaacatactgattactgttcagctgactttttaaaaatagcaagacctcttcagtgtargaagcagttagttgatttacattctggtgcaagctctttaccttgccacaaaccagcagcagagttgacatggagtattggaccaatgatcccactctccaaaa

SEQ ID NO: 396683 - DNA, 423 bp, Homo sapiens
atctggagcttgtgccagaatgtaaataggcgatgtcactaaacatactgattactgttcagctgactttttaaaaatagcaagacctcttcagtgtaggaagcagttagttgatttacattctggtgcaagctctttaccttgccacaaaccagcagcagagttgacrtggagtattggaccaatgatcccactctccaaaaaataatagtcctttattctgaagacgttattattcactcataatacctcattaactttctttttttctaaacattgtaataatagattataagtatattgtttatgagttcagcagatatttattgatcacatagtttgtgcacagccctgtatcttattttgcaggagttgcaaagctggctcagaaattaatcttgcctttaggaagtctaccataaa

SEQ ID NO: 396684 - DNA, 423 bp, Homo sapiens
atctggagcttgtgccagaatgtaaataggcgatgtcactaaacatactgattactgttcagctgactttttaaaaatagcaagacctcttcagtgtaggaagcagttagttgatttacattctggtgcaagctctttaccttgccacaaaccagcagcagagttgacatggagtattggaccratgatcccactctccaaaaaataatagtcctttattctgaagacgttattattcactcataatacctcattaactttctttttttctaaacattgtaataatagattataagtatattgtttatgagttcagcagatatttattgatcacatagtttgtgcacagccctgtatcttattttgcaggagttgcaaagctggctcagaaattaatcttgcctttaggaagtctaccataaa

SEQ ID NO: 396685 - DNA, 613 bp, Homo sapiens
ctcaaatgtcaacactcttatacactacacataaaagaaatcaagcaagttaaaatattaataataagtaatatataataagtaacaattacaaagcaaattaacatttggggaggagggataaagtaaacagctcttggctgggcatggtggctcacgcttttaacccccgcactttcagaggctgaggcaggtggatcatttgagctcaggagttcaaaaccagcttgggcaacatggtgaaactccatctctacaaaaaatacaataattaggtaggcatggtgacatgcacctatagtcccagctactcatgagcctggggtgggaaaattgcttgagcccaggaggttgaggctgcagtaagctgtgatcacgctactgcactctagcctgggcaacaaaaktgagaacctgtctataaaaatttttaaaaaaaagcccttaaatggtttatcaactaaacggtttatttgaatcaataatgaaaattcctagacagcattttttctttttacttttattcatcattgaaaagacagggagtaagaaaaggaaaaaagcaacatgttataataatattttcccatattaatccaagaacataataaca

SEQ ID NO: 396686 - DNA, 523 bp, Homo sapiens
aacagctcttggctgggcatggtggctcacgcttttaacccccgcactttcagaggctgaggcaggtggatcatttgagctcaggagttcaaaaccagcttgggcaacatggtgaaactccatctctacaaaaaatacaataattaggtaggcatggtgacatgcacctatagtcccagctactcatgagcctggggtgggaaaattgcttgagcccaggaggttgaggctgcagtaagctgtgatcacgctactgcactctagcctgggcaacaaaattgagaacctgtctataaaaattttwaaaaaaaagcccttaaatggtttatcaactaaacggtttatttgaatcaataatgaaaattcctagacagcattttttctttttacttttattcatcattgaaaagacagggagtaagaaaaggaaaaaagcaacatgttataataatattttcccatattaatccaagaacataataacaaaaactcagtgagaactcatattaccaatttgaagaat

SEQ ID NO: 396687 - DNA, 523 bp, Homo sapiens
aacagctcttggctgggcatggtggctcacgcttttaacccccgcactttcagaggctgaggcaggtggatcatttgagctcaggagttcaaaaccagcttgggcaacatggtgaaactccatctctacaaaaaatacaataattaggtaggcatggtgacatgcacctatagtcccagctactcatgagcctggggtgggaaaattgcttgagcccaggaggttgaggctgcagtaagctgtgatcacgctactgcactctagcctgggcaacaaaattgagaacctgtctataaaaatttttaaaaaaaagcccttaaatggtttatcaactaaacggtttatttgaatcaataatgaaaattcctagacagcattttttctttttacttttattcatcattgaaaagacagggagtaagaaaaggaaaaaagcaacatgttataataatattttcccatattaatccaagaacayaataacaaaaactcagtgagaactcatattaccaatttgaagaat

SEQ ID NO: 396688 - DNA, 581 bp, Homo sapiens
gagggattataatcaccaaaattctaaaggaaaattatgtttatatctaataataaaagctaacatttaattaagcataatcctcattcaacagatgaggaacctaaaacccaaagagtcattatcactgttccacttatctctatatccctacaaaaatactcactcttgatctgtaacaatgcctccttaaactccctgaatggcagcttcaggtaaaaacttcccagaaagtttgaaataacaakgataaaaggaaaattcttggagccacataaaaaagaaaacagatcattacaaaaaaagaagaatcgggcatcagttctcattaccaatactgaattaaaaagaaacccccaaaaaatcattattttcctaggtctataaaaaattatttaaaaccaaaattttaatgtctgttaagctaacattcaagtccatggatagcaaatgtaaataggttaaattctctagtaaaagacagcaactttcaaaatatgcaaaatatactacttaacacatacacatattttacatgtaactatactacagatttcatttatgtatgtgtgtgtgtgtac

SEQ ID NO: 396689 - DNA, 423 bp, Homo sapiens
atctggagcttgtgccagaatgtaaataggcgatgtcactaaacatactgattactgttcagctgactttttaaaaatagcaagacctcttcagtgtaggaagcagttagttgatttacattctggtgcaagctctttaccttgccacaaaccagcagcagagttgacatggagtattggaccaatgatcccactctccaaaaaataatagtcctttattctgaagacgttattattcactcataatacctcattaactttctttttttctaaacattgtaataatagattataagtatattgtttatgagttcagcagatatttaytgatcacatagtttgtgcacagccctgtatcttattttgcaggagttgcaaagctggctcagaaattaatcttgcctttaggaagtctaccataaa

SEQ ID NO: 396690 - DNA, 423 bp, Homo sapiens
atctggagcttgtgccagaatgtaaataggcgatgtcactaaacatactgattactgttcagctgactttttaaaaatagcaagacctcttcagtgtaggaagcagttagttgatttacattctggtgcaagctctttaccttgccacaaaccagcagcagagttgacatggagtattggaccaatgatcccactctccaaaaaataatagtcctttattctgaagacgttattattcactcataatacctcattaactttctttttttctaaacattgtaataatagattataagtatattgtttatgagttcagcagatatttattgatcacatagtttgtgyacagccctgtatcttattttgcaggagttgcaaagctggctcagaaattaatcttgcctttaggaagtctaccataaa

SEQ ID NO: 396691 - DNA, 625 bp, Homo sapiens
tgtattatttttaaatgattaagaaacatcaaaaaaatctctgagacatggcaaatgtggtattcagaggaaaaaatatagcttcaaacatgcaaaactgtaagactaaagaattacaataaataatgcccgattcaaaaattaagcctataagaatcaatatataatccatgagattcgcaatctaggtaagtaaacccaccctaatactgtgtttattaaaatgctgttaatgagatccgagatttaaacaactgttcgctttagaaaatgaaataaagctgactgaaataaaacctaatctatgaaattattctgtatatgaattgacctgaagtaatgaacagttcaatgactgactcatgactcttkttctggtccaggctaatcattctagttggcatactattaaacacacatttctgattgaaacatctgctaaaaaaataacatcaaacgacattacaaaatcaaaatggagactgctaagagtgggatttttctcctgccagtatctttcctttctgccacatcctcctccctgctgccacagcaatctttctaaaggaatacaaatatattctgaatcacacgcaaacccctcaatacagaatgtgtggtaggc

SEQ ID NO: 396692 - DNA, 526 bp, Homo sapiens
actgattactgttcagctgactttttaaaaatagcaagacctcttcagtgtaggaagcagttagttgatttacattctggtgcaagctctttaccttgccacaaaccagcagcagagttgacatggagtattggaccaatgatcccactctccaaaaaataatagtcctttattctgaagacgttattattcactcataatacctcattaactttctttttttctaaacattgtaataatagattataagtatattgtttatgagttcagcagatatttattgatcacatagtttgtgcacagccctgtatcttattttgcaggagttgcaaagctggctcagaaattaatcttgcctttaggaagtctaccataaacccgcaagaggaaataagtgaaaatctaaataaatgtgttgaatatatgcagtgaktgtttgcaatagtgttatagcttggttccaaagatttcaatatagacagatgtttccttttgctgagctgctaccagaataggacagaattaa

SEQ ID NO: 396693 - DNA, 526 bp, Homo sapiens
actgattactgttcagctgactttttaaaaatagcaagacctcttcagtgtaggaagcagttagttgatttacattctggtgcaagctctttaccttgccacaaaccagcagcagagttgacatggagtattggaccaatgatcccactctccaaaaaataatagtcctttattctgaagacgttattattcactcataatacctcattaactttctttttttctaaacattgtaataatagattataagtatattgtttatgagttcagcagatatttattgatcacatagtttgtgcacagccctgtatcttattttgcaggagttgcaaagctggctcagaaattaatcttgcctttaggaagtctaccataaacccgcaagaggaaataagtgaaaatctaaataaatgtgttgaatatatgcagtgattgtttgcaatagtgttatagcttggttccaaagatttcaatatagacrgatgtttccttttgctgagctgctaccagaataggacagaattaa

SEQ ID NO: 396694 - DNA, 480 bp, Homo sapiens
ctgagtgtgacccaagccaataggcagtaagaaaatggtgagctcagcagggtgtggtggctcatgcctgtaatcccagcactttgggaggccaaggcaggaggatcacgaggtcatgagatcgagaccatcctggctaacgcrgtaaaaccccgtttctactaaaaatacaaaaaaaaaaaatagccagcatggtggcgcacacctgtaatcccggccacttgggaggctgaggcacgagaatcacttgaacccaggaggcagaggttgcagtgagccgagactgcaccactgcactccagcctgtgcaacagagcaagactctgtctcaaaaaaaaaaaaaaaaagaaaaagaaaatggcgagctcagccctacaactgcatagaactgaattcctcccacacctgaatgcaccagaagaggattcacccccggagcctccacccaggtaacaccttgatttgaatcttgtgagacct

SEQ ID NO: 396695 - DNA, 480 bp, Homo sapiens
ctgagtgtgacccaagccaataggcagtaagaaaatggtgagctcagcagggtgtggtggctcatgcctgtaatcccagcactttgggaggccaaggcaggaggatcacgaggtcatgagatcgagaccatcctggctaacgcggtaaaaccccgtttctactaaaaatacaaaaaaaaaaaatagccagcatggtggcgcacacctgtaatcccggccacttgggaggctgaggcacgagaatcacttgaacccaggaggcagaggttgcagtgagccgagactgcaccactgcactccagcctgtgcaacagagcaagactctgtctcaaaaaaaaaaaaaaaaagaaaaagaaaatggcgagytcagccctacaactgcatagaactgaattcctcccacacctgaatgcaccagaagaggattcacccccggagcctccacccaggtaacaccttgatttgaatcttgtgagacct

SEQ ID NO: 396696 - DNA, 604 bp, Homo sapiens
gagctcagcagggtgtggtggctcatgcctgtaatcccagcactttgggaggccaaggcaggaggatcacgaggtcatgagatcgagaccatcctggctaacgcggtaaaaccccgtttctactaaaaatacaaaaaaaaaaaatagccagcatggtggcgcacacctgtaatcccggccacttgggaggctgaggcacgagaatcacttgaacccaggaggcagaggttgcagtgagccgagactgcaccactgcactccagcctgtgcaacagagcaagactctgtctcaaaaaaaaaaaaaaaaagaaaaagaaaatggcgagctcagccctacaactgcatagaactgaattcctcccacacctgaatgcaccagaagakgattcacccccggagcctccacccaggtaacaccttgatttgaatcttgtgagaccttaaacagagagcacagttgagcctgccctgagttctgacctaagtaaatgggtgctgttttaagatattaattttatgataattgctttataataatagataacaaatagagcagcagcatttcaaggccctccatgctttggtctctgccaaatcactatta

SEQ ID NO: 396697 - DNA, 604 bp, Homo sapiens
gagctcagcagggtgtggtggctcatgcctgtaatcccagcactttgggaggccaaggcaggaggatcacgaggtcatgagatcgagaccatcctggctaacgcggtaaaaccccgtttctactaaaaatacaaaaaaaaaaaatagccagcatggtggcgcacacctgtaatcccggccacttgggaggctgaggcacgagaatcacttgaacccaggaggcagaggttgcagtgagccgagactgcaccactgcactccagcctgtgcaacagagcaagactctgtctcaaaaaaaaaaaaaaaaagaaaaagaaaatggcgagctcagccctacaactgcatagaactgaattcctcccacacctgaatgcaccagaagaggattcacccccggagcctccacccaggtaacaccttgatttgaatcttgtgagaccttaaacagagagcacagttgagcctgccctgagttctgacctaagtaaatgggtgctgttttaagatattaattttatgrtaattgctttataataatagataacaaatagagcagcagcatttcaaggccctccatgctttggtctctgccaaatcactatta

SEQ ID NO: 396698 - DNA, 602 bp, Homo sapiens
gacataaagttagccaataaactatgggtaatatgcaagaatcagtaagcattattatttgccagcagctaagccaagtactttataagaattactttattcccatctatgccaggcacagtggctcacgcatgtaatcccaacactttggaaggcagaggtgggtggatcacctgaggtcaggagttttagaccaccctggccaacatggtgagaccccgtttctattaaaaatacaaaaattagctgggcctggtggcaggcgcctgtaatcccagctacttggaaggctgaggcaggagaatcagttgaacccatgaggtagaggttgcagtgagctgagatcgtgccactgcactccagcctgggcaacagagtgagactccatctcaaaaacaaaaacaaaaacaaaaaaaaagaaattactttattcccatctaaccaccaccactttaggtagatatcactatttttcattttrcaaatgaagcagagaggttaaattccttgttcaagtccatagagtcaggaaatgaaaaaggaactgaactcaaggagttcataattatttatatacaaataataaagacaaattcatcgac

SEQ ID NO: 396699 - DNA, 528 bp, Homo sapiens
tatatcaaggttagtatcctacctggcatctctccaatactgggttaagagtttttcttctcaagtaacctgtattatattaagatgatattaactgaaataatcagatagatgaatgcatcataaagctaattctaagatatctgtcctcagccaaaagcagaaaagggatacacataacttccacataaaacatccacccccatttttttggttattcttaaaagctcataatgtatacaatgataaaatttattgtttcaaattagggtttttgaaattgaaatattagtttaaacatatttgctkaacacaactttaaagttaataagaagacactgcatattacagaagagttaaatacttcaaaaagtgggaaaaattttaaaagctttcatttgagtaggagtaaacacagacacactaagaatctagttggatacacttaaatcatgtcttttaagaacataagaacagattatttgcttcctctttagtccaaaaccttggtgtaattatagtccatat

SEQ ID NO: 396700 - DNA, 331 bp, Homo sapiens
aagtatacagacactttttaagaaactgtgaaactgttttccaaagttaagaatattatttccaacaagtcagaaattccagtcctaagtatttacccaagaaacatgaaaagatacatctacaacaaagcatgttacataaatgctcacagcagctttatatactggccaaaaattgaacgaaacttaactgtaagctagtgaatggaccaatctcaaaaycattatgctaagtaaaaaaaggcagacggaaaagattctatactgtatggttccattcatatattagtctagaaaaggcaaaactataggaaagcaacagatcggtgat

SEQ ID NO: 396701 - DNA, 331 bp, Homo sapiens
aagtatacagacactttttaagaaactgtgaaactgttttccaaagttaagaatattatttccaacaagtcagaaattccagtcctaagtatttacccaagaaacatgaaaagatacatctacaacaaagcatgttacataaatgctcacagcagctttatatactggccaaaaattgaacgaaacttaactgtaagctagtgaatggaccaatctcaaaacsattatgctaagtaaaaaaaggcagacggaaaagattctatactgtatggttccattcatatattagtctagaaaaggcaaaactataggaaagcaacagatcggtgat

SEQ ID NO: 396702 - DNA, 331 bp, Homo sapiens
aagtatacagacactttttaagaaactgtgaaactgttttccaaagttaagaatattatttccaacaagtcagaaattccagtcctaagtatttacccaagaaacatgaaaagatacatctacaacaaagcatgttacataaatgctcacagcagctttatatactggccaaaaattgaacgaaacttaactgtaagctagtgaatggaccaatctcaaaaccattatgctaagtaaaaaaaggcagayggaaaagattctatactgtatggttccattcatatattagtctagaaaaggcaaaactataggaaagcaacagatcggtgat

SEQ ID NO: 396703 - DNA, 591 bp, Homo sapiens
ttcagcggcaaaaagccgcggcggcgagggcaaagagccccaaaatgccgcggcggcaggggctaaattccgcgaggctgggggcagaaagacgtaaaaacccgcagcggcrgcaggaaaaatccacggcggcaaaaagccgcgtcggcgggggcaaaatagtggaaatggggtagaaggccagcacagctttgcattcctggagtgtgatgtggaaggaaaagtgcagaggaagacaaacaaagatgtaagtaggcttgactcagtgcagctaagagcccagatgttatcttgatgttatctatcagctaattttttctattttagtagagaaggggttttaccaccttggccaggatggtctcgatctcctgacctcatgatccacgcacctcagcctcccaaagtggtgggattagaggcatgagccacaaagtgctcaaaaaatctattaattaaaaatgtgtatgtagccgtctttaatctaccatgtccattagcagataaatactataagcaaaataacaacaatgaaagaaacatagacttagagtagatactctgatttatttaataaaaatttgaaaatag

SEQ ID NO: 396704 - DNA, 591 bp, Homo sapiens
ttcagcggcaaaaagccgcggcggcgagggcaaagagccccaaaatgccgcggcggcaggggctaaattccgcgaggctgggggcagaaagacgtaaaaacccgcagcggcagcaggaaaaatccacggcggcaaaaagccgcgtcggcgggggcaaaatagtggaaatggggtagaaggccagcacagctttgcattcctggagtgtgatgtggaaggaaaagtgcagaggaakacaaacaaagatgtaagtaggcttgactcagtgcagctaagagcccagatgttatcttgatgttatctatcagctaattttttctattttagtagagaaggggttttaccaccttggccaggatggtctcgatctcctgacctcatgatccacgcacctcagcctcccaaagtggtgggattagaggcatgagccacaaagtgctcaaaaaatctattaattaaaaatgtgtatgtagccgtctttaatctaccatgtccattagcagataaatactataagcaaaataacaacaatgaaagaaacatagacttagagtagatactctgatttatttaataaaaatttgaaaatag

SEQ ID NO: 396705 - DNA, 533 bp, Homo sapiens
tttattttattttattttgagagagggtctcactttgtcacccaagatggagtgcagtcatgtgatcagagctcactgaagccttcacatactgtgctyaaacgattctcccacctcagcctcctgagtagcagggacggcaggtgcatgacaccatactagctaatttttgtaaagatggggtttcaccatgttgccctggctgatctccaactcctggactcaagagatctggccaccttagcctcccaaagtgctgggattatagttttgaggcaccgcgatcagcccagccttaaaaaaggctgactagagatctttatctatgtatatctatatctatttataaaataaacatgtgtttattatataaaatatatattattaatatataaattttttttcaaggtagaaatatataaagaggttacatgtagagcctcggtcattgtgtagtaaagctcaaggcctttgaagaaatgccccttgcctcttttgtctgtgctagaatccgagaagggaaatcagcagat

SEQ ID NO: 396706 - DNA, 533 bp, Homo sapiens
tttattttattttattttgagagagggtctcactttgtcacccaagatggagtgcagtcatgtgatcagagctcactgaagccttcacatactgtgctcaaacgattctcccacctcagcctcctgagtagcagggacggcaggtgcatgacaccatactagctaatttttgtaaagatggggtttcaccatgttgccctggctgatctccaactcctggactcaagagatctggccaccttagcctcccraagtgctgggattatagttttgaggcaccgcgatcagcccagccttaaaaaaggctgactagagatctttatctatgtatatctatatctatttataaaataaacatgtgtttattatataaaatatatattattaatatataaattttttttcaaggtagaaatatataaagaggttacatgtagagcctcggtcattgtgtagtaaagctcaaggcctttgaagaaatgccccttgcctcttttgtctgtgctagaatccgagaagggaaatcagcagat

SEQ ID NO: 396707 - DNA, 533 bp, Homo sapiens
tttattttattttattttgagagagggtctcactttgtcacccaagatggagtgcagtcatgtgatcagagctcactgaagccttcacatactgtgctcaaacgattctcccacctcagcctcctgagtagcagggacggcaggtgcatgacaccatactagctaatttttgtaaagatggggtttcaccatgttgccctggctgatctccaactcctggactcaagagatctggccaccttagcctcccaaagtgctgggattatagttttgaggcaccgcgatcagcccagccttaaaaaaggctgactagagatctttatctatgtatakctatatctatttataaaataaacatgtgtttattatataaaatatatattattaatatataaattttttttcaaggtagaaatatataaagaggttacatgtagagcctcggtcattgtgtagtaaagctcaaggcctttgaagaaatgccccttgcctcttttgtctgtgctagaatccgagaagggaaatcagcagat

SEQ ID NO: 396708 - DNA, 533 bp, Homo sapiens
tttattttattttattttgagagagggtctcactttgtcacccaagatggagtgcagtcatgtgatcagagctcactgaagccttcacatactgtgctcaaacgattctcccacctcagcctcctgagtagcagggacggcaggtgcatgacaccatactagctaatttttgtaaagatggggtttcaccatgttgccctggctgatctccaactcctggactcaagagatctggccaccttagcctcccaaagtgctgggattatagttttgaggcaccgcgatcagcccagccttaaaaaaggctgactagagatctttatctatgtatatctatatctatttataaaataaacatgtgtttattatataaaatatatattattaatatataaattttttttcaaggtagaaatatataaagaggktacatgtagagcctcggtcattgtgtagtaaagctcaaggcctttgaagaaatgccccttgcctcttttgtctgtgctagaatccgagaagggaaatcagcagat

SEQ ID NO: 396709 - DNA, 548 bp, Homo sapiens
cctgggccatttgagggtaggtgctggggaggaaagggaagtttgcatccctcctgctgtggagagaacccgtgggaagcacagaccttgtcctaactgaaggcagaccccttgctaaccagcttctcatcagccaaccctggatgagtttccatgtctatttactaaataatccttattgcttttcttcatatgggyaaagtatggtttacagggactattgttcctttgaacacccatcgtgcaaactgcttcctgttgtgggaaaacaggtttccatatgtgtcttattgggaaacacataggcaatttctatgtttttactgcatctatttcatggatatgggaactgaatagtgcccatcaaaggctctcctgctgttggaaattgatctgagagcgcggaaggacataattctttctttgttcctgggcagcggtggttgagggatcattttgtggcagctacagtggcaatgatggaggcagaatggagggatcagtaccaagacaaggagagacttggcctcacaatggcagcattgcag

SEQ ID NO: 396710 - DNA, 595 bp, Homo sapiens
ttaagatgaaaggaaaccttatgaatgaaaagaagccagatgagaggcacttaactgagaatgaaaagaaactgagtggacaaaataattatgagaagatgaaccttcaaatcagaaagagggaaaaaagcttatttgatactatgggaactcaaaagagagtgaacacaaatgtgaaaattccaggagtaaagaaaagtagcayagctgaattaagagcatgagaaaatgtatacaattttgagtaataagaacagaaatcaaaagtaactattgtatgttatattttagtagagcaacactgaagaagaatgaaaacaagaaataatattaaatatgaacataaggagaagagaataatatttttaaaattttgagtttctaagtttacctgaaattttaattttggtttcttatgtaataccagagttattaggaagttattagctaataacactattttcagtgatattttaagtatttgtcctagaaaaatttctattttttaaaaatgtatatttaaaaatacattaaatgtgtatatatatcaatcatatgtatcgatttctgttttttttttgaattgcaaatgaaa

SEQ ID NO: 396711 - DNA, 595 bp, Homo sapiens
ttaagatgaaaggaaaccttatgaatgaaaagaagccagatgagaggcacttaactgagaatgaaaagaaactgagtggacaaaataattatgagaagatgaaccttcaaatcagaaagagggaaaaaagcttatttgatactatgggaactcaaaagagagtgaacacaaatgtgaaaattccaggagtaaagaaaagtagcacagctgaattaagagcatgagaaaatgtatacaattttgagtaataagaacagaaatcaaaagtaactattrtatgttatattttagtagagcaacactgaagaagaatgaaaacaagaaataatattaaatatgaacataaggagaagagaataatatttttaaaattttgagtttctaagtttacctgaaattttaattttggtttcttatgtaataccagagttattaggaagttattagctaataacactattttcagtgatattttaagtatttgtcctagaaaaatttctattttttaaaaatgtatatttaaaaatacattaaatgtgtatatatatcaatcatatgtatcgatttctgttttttttttgaattgcaaatgaaa

SEQ ID NO: 396712 - DNA, 595 bp, Homo sapiens
ttaagatgaaaggaaaccttatgaatgaaaagaagccagatgagaggcacttaactgagaatgaaaagaaactgagtggacaaaataattatgagaagatgaaccttcaaatcagaaagagggaaaaaagcttatttgatactatgggaactcaaaagagagtgaacacaaatgtgaaaattccaggagtaaagaaaagtagcacagctgaattaagagcatgagaaaatgtatacaattttgagtaataagaacagaaatcaaaagtaactattgtatgttatattttagtagagcaacactgaagaagaatgaaaacaagaaataatattaaatatgaacatawggagaagagaataatatttttaaaattttgagtttctaagtttacctgaaattttaattttggtttcttatgtaataccagagttattaggaagttattagctaataacactattttcagtgatattttaagtatttgtcctagaaaaatttctattttttaaaaatgtatatttaaaaatacattaaatgtgtatatatatcaatcatatgtatcgatttctgttttttttttgaattgcaaatgaaa

SEQ ID NO: 396713 - DNA, 544 bp, Homo sapiens
atgctgtaattcaatgtatttgaatactttaagaatgttacatttatagttaacagacattgacctataaattttctttcatataatgatgctgtgagrcaatctaagaagaattaaaatttaaattcatgtattcctacattttcctctgttctctaactgtaatatattttaattacagatggaggaacagatagatgttagataaataggtatataatagatagatcatccaaaattcttattcttatggttttatgcagtcagtatttacctctatttttctacatgtttatccttccaatttagttaattacttcctgcacctttgatgtcatatatataaacaggaaataacacgtggtggccagaatgtagagagagccacaagacttgtgaataaaatccacaggcaagcatgtggcgattccttttgcagttttggagggaatgccaaaccctatgtttgctgtggaaaagagtatggtagttcctcaaaacatcaaaatgatattgccatatgactcagcagcgccacatctca

SEQ ID NO: 396714 - DNA, 491 bp, Homo sapiens
tatggttttatgcagtcagtatttacctctatttttctacatgtttatccttccaatttagttaattacttcctgcacctttgatgtcatatatataaacaggaaataacacgtggtggccagaatgtagagagagccacaagacttgtgaataaaatccacaggcaagcatgtggcgattccttttgcagttttggagggaatgccaaaccctatgtttgctgtggaaaagagtatggtagttcctcaaaasatcaaaatgatattgccatatgactcagcagcgccacatctcaggatagcaaaagaattgaaagcagagtcttgaaaaaatatttgcacatccatgtttgcagcagcattattggcaatagctaaaacgtagaagcacgtgaagtgtccaacaacagatgaatggataagcacaatatgatatatacatacaatagaatattattcagccttaaacatgagggaaatattctgacata

SEQ ID NO: 396715 - DNA, 491 bp, Homo sapiens
tatggttttatgcagtcagtatttacctctatttttctacatgtttatccttccaatttagttaattacttcctgcacctttgatgtcatatatataaacaggaaataacacgtggtggccagaatgtagagagagccacaagacttgtgaataaaatccacaggcaagcatgtggcgattccttttgcagttttggagggaatgccaaaccctatgtttgctgtggaaaagagtatggtagttcctcaaaacatcaaaatgatattgccatatgactcagcagcgccacatctcaggatagcaaaagaattgaaagyagagtcttgaaaaaatatttgcacatccatgtttgcagcagcattattggcaatagctaaaacgtagaagcacgtgaagtgtccaacaacagatgaatggataagcacaatatgatatatacatacaatagaatattattcagccttaaacatgagggaaatattctgacata

SEQ ID NO: 396716 - DNA, 430 bp, Homo sapiens
cacataaaattcgttttaatgcatgtgtttatgcatagctttctatttttctcttttctatttatattccaaattagaatataatgctaatcaagcatagtggctgtgtttcttgcttcctgtagtctgcaggtagcatacaaatgtaataaactacttattcatgtcacatctatttattttctgccttataccaagcttgtgggattctcttaaatacaacatttttatacttacayctaggcaatacccattagcatcgccttcctaaatcaggggaaattgagcctctgtaaggtggagtaacttcctaagatacaaaactcagcattaaagtctgtatacttcaatatcctgcccccttctcatttgtctttactgccttttatgtatgtgttagatattcaataaattctgttttttaaactga

SEQ ID NO: 396717 - DNA, 430 bp, Homo sapiens
cacataaaattcgttttaatgcatgtgtttatgcatagctttctatttttctcttttctatttatattccaaattagaatataatgctaatcaagcatagtggctgtgtttcttgcttcctgtagtctgcaggtagcatacaaatgtaataaactacttattcatgtcacatctatttattttctgccttataccaagcttgtgggattctcttaaatacaacatttttatacttacatctaggcaatacccattagcatcgccttcctaaatcaggggaaattgagcctctgtaaggtggagtaacttmctaagatacaaaactcagcattaaagtctgtatacttcaatatcctgcccccttctcatttgtctttactgccttttatgtatgtgttagatattcaataaattctgttttttaaactga

SEQ ID NO: 396718 - DNA, 430 bp, Homo sapiens
cacataaaattcgttttaatgcatgtgtttatgcatagctttctatttttctcttttctatttatattccaaattagaatataatgctaatcaagcatagtggctgtgtttcttgcttcctgtagtctgcaggtagcatacaaatgtaataaactacttattcatgtcacatctatttattttctgccttataccaagcttgtgggattctcttaaatacaacatttttatacttacatctaggcaatacccattagcatcgccttcctaaatcaggggaaattgagcctctgtaaggtggagtaacttcctaagatacaaaactcagcattaaagtctgtatacttcaatatcctgcccycttctcatttgtctttactgccttttatgtatgtgttagatattcaataaattctgttttttaaactga

SEQ ID NO: 396719 - DNA, 575 bp, Homo sapiens
attggtagctaatctttgcatgctgttctctgaacttgagtgaaagctgtccatcaggcatacagggaatgatggaaaaagtgacaacagaagatgaatgctatgtcactaaccttcaaatatgaccttccttgtcttttaaattcttgatatcttaagacttcattaattcatctctctttgccctkggttcaacattgtgctataccaaaactcatgtaaaacaatgatctaaggtaataaaaatggcatttttctttcatgtggatgcaagctaactggcatttttacaatcaacatatttcctttgtcaatttttgattctgtattggaagtaattcatgggtatttctgaagggaagatggtgtttctgtgttcattgtgatccaaactgtttttagacctagtggcgtttgtaaaacaatttgtgccagctgaccaaggaccactgtggcagaaagcagcaaacttgcgtaagatgtcactgcctcatcagttggctttgaaaactaggggcttactctatagtcttatgaatcaaagacattgatagatgtagtataagattacaatc

SEQ ID NO: 396720 - DNA, 575 bp, Homo sapiens
attggtagctaatctttgcatgctgttctctgaacttgagtgaaagctgtccatcaggcatacagggaatgatggaaaaagtgacaacagaagatgaatgctatgtcactaaccttcaaatatgaccttccttgtcttttaaattcttgatatcttaagacttcattaattcatctctctttgccctgggttcaacattgtgctataccaaaactcatgtaaaacaatgatctaaggtaataaaaatggcatttttctttcatgtggatgcaagctaactggcatttttacaatcaacatatttcctttgtcaatttttgattctgtattggaagtaattcatgggtatttctgaagggaagatggtgtttctgtgttcattgtgatycaaactgtttttagacctagtggcgtttgtaaaacaatttgtgccagctgaccaaggaccactgtggcagaaagcagcaaacttgcgtaagatgtcactgcctcatcagttggctttgaaaactaggggcttactctatagtcttatgaatcaaagacattgatagatgtagtataagattacaatc

SEQ ID NO: 396721 - DNA, 575 bp, Homo sapiens
attggtagctaatctttgcatgctgttctctgaacttgagtgaaagctgtccatcaggcatacagggaatgatggaaaaagtgacaacagaagatgaatgctatgtcactaaccttcaaatatgaccttccttgtcttttaaattcttgatatcttaagacttcattaattcatctctctttgccctgggttcaacattgtgctataccaaaactcatgtaaaacaatgatctaaggtaataaaaatggcatttttctttcatgtggatgcaagctaactggcatttttacaatcaacatatttcctttgtcaatttttgattctgtattggaagtaattcatgggtatttctgaagggaagatggtgtttctgtgttcattgtgatccaaactgtttttagacctagtggcgtttgtaaaacaatttgtgccagctgaccaaggaccactgtggcagaaagcagcaaacttgcgtaagatgtcactgcctcatmagttggctttgaaaactaggggcttactctatagtcttatgaatcaaagacattgatagatgtagtataagattacaatc

SEQ ID NO: 396722 - DNA, 580 bp, Homo sapiens
agtataagattacaatcatattttccttttgacagtcacattataaagcatgatgtattgtaattaatctcaattagctgatcacaattaaaattaataaggtttcttattgctgataaaaatcatgactctcctgttctcaaatgtgcaagaaattcttgtaattttaatacaaatttgcatattattactaattgatttaatctcattggatttggttcatggacccaatttattaaaatattgataatggggtaatgatttgtctccccatttcatttacactaaaagccacaattcttacaatggtctgcaagcccatcattatctgccgcatgttaaccgccaaaattcttttatatcttcacccttcatcttaccagtgttcctggccacctcactgtcctatagacatgccaacaagctgctgtcttatgacgaagactagttaatttcttggcctggaaagatagccctccatatatccattgatgatctcattcaacttcctcaagtctttactgaaacctcacattctcratgagacctattcagtatttcaaactgcctcccagttgca

SEQ ID NO: 396723 - DNA, 503 bp, Homo sapiens
ctattttcatctaaatagaatcatacaataggtggccttttgtgcctggcttctttcagttggcataatgctatcaagtttcatatacgtattggtactttatttctttttataaccgtataatattcaatttcacggatataacattttgtttatccaataatatttttattgacatttgagttgtgttcagtttttggctattttaaatactgctgctaaaaatayttgtgtacaatttgtgtttgaacacctctttccaataatctgggtgtatacctaggaataaatttctaggtcatatgacaattctatgtttaatatatttagaagccatcaaagtattttccaaagtggccaattctagccatagagtgtctaactgtggttttgatttgtagttgcctgatgagtgatgctattgagtatgtttttatgggattattgaccgttcgtgtatcttcttgggaaacacatctattcctatcatttatcagttttga

SEQ ID NO: 396724 - DNA, 503 bp, Homo sapiens
ctattttcatctaaatagaatcatacaataggtggccttttgtgcctggcttctttcagttggcataatgctatcaagtttcatatacgtattggtactttatttctttttataaccgtataatattcaatttcacggatataacattttgtttatccaataatatttttattgacatttgagttgtgttcagtttttggctattttaaatactgctgctaaaaatacttgtgtacaatttgtgtttgaacacctctttccaataatctgggtgtatacctaggaataaatttctaggtcatatgacaattctatgtttaatatatttagaagccatcaaagtattttccaaagtggccaattstagccatagagtgtctaactgtggttttgatttgtagttgcctgatgagtgatgctattgagtatgtttttatgggattattgaccgttcgtgtatcttcttgggaaacacatctattcctatcatttatcagttttga

SEQ ID NO: 396725 - DNA, 225 bp, Homo sapiens
aaaaagttaggtatcacctttcttctctgcagatggcctgagatgggttaatttraaggaatgcttccaaacctgaggtgacccctgagaacagcataatccactgctgtctcctacattcagtttctcagtctgtgatcttttaattttgtggggagggaagccagtcctttaaagcgatcttcagcatgatggcagagccaaggagtgtggacaggtggcacg

SEQ ID NO: 396726 - DNA, 557 bp, Homo sapiens
cagtacatacaacaagactccgatcttcctttttaatgagtaaaaatatatcctttgagacagcattaaagaaagagcaccttgtataaattcaattcaaagagacaagatattcttgactctgaagtcttgttcgttgatacagcaatgtaattaataataagaagaaaagcaggacatagatgtggagactattttaatcaaaaattgtctatagattttgatgataaaatttaaaaatctactgtatttagttagttacaaaaaactaggttataggaacatatttggtcaataaaacacccctaccaaatgctgacaagaaaaaaagttaggtatcacctttcttctctgcagatggcctgagatgggttaatttaaaggaatgyttccaaacctgaggtgacccctgagaacagcataatccactgctgtctcctacattcagtttctcagtctgtgatcttttaattttgtggggagggaagccagtcctttaaagcgatcttcagcatgatggcagagccaaggagtgtggacaggtggcacggtgtctg

SEQ ID NO: 396727 - DNA, 225 bp, Homo sapiens
aaaaagttaggtatcacctttcttctctgcagatggcctgagatgggttaatttaaaggaatgcttccaaacctgaggtgacccctgagaacagcataatccactgctgtctccyacattcagtttctcagtctgtgatcttttaattttgtggggagggaagccagtcctttaaagcgatcttcagcatgatggcagagccaaggagtgtggacaggtggcacg

SEQ ID NO: 396728 - DNA, 225 bp, Homo sapiens
aaaaagttaggtatcacctttcttctctgcagatggcctgagatgggttaatttaaaggaatgcttccaaacctgaggtgacccctgagaacagcataatccactgctgtctcctacattcagtttctcagtctgtgmtcttttaattttgtggggagggaagccagtcctttaaagcgatcttcagcatgatggcagagccaaggagtgtggacaggtggcacg

SEQ ID NO: 396729 - DNA, 225 bp, Homo sapiens
aaaaagttaggtatcacctttcttctctgcagatggcctgagatgggttaatttaaaggaatgcttccaaacctgaggtgacccctgagaacagcataatccactgctgtctcctacattcagtttctcagtctgtgatcttttaattttgkggggagggaagccagtcctttaaagcgatcttcagcatgatggcagagccaaggagtgtggacaggtggcacg

SEQ ID NO: 396730 - DNA, 557 bp, Homo sapiens
cagtacatacaacaagactccgatcttcctttttaatgagtaaaaatatatcctttgagacagcattaaagaaagagcaccttgtataaattcaattcaaagagacaagatattcttgactctgaagtcttgttcgttgatacagcaatgtaattaataataagaagaaaagcaggacatagatgtggagactattttaatcaaaaattgtctatagattttgatgataaaatttaaaaatctactgtatttagttagttacaaaaaactaggttataggaacatatttggtcaataaaacacccctaccaaatgctgacaagaaaaaaagttaggtatcacctttcttctctgcagatggcctgagatgggttaatttaaaggaatgcttccaaacctgaggtgacccctgagaacagcataatccactgctgtctcctacattcagtttctcagtctgtgatcttttaattttgtggggagggaagccagtcctttaaagcratcttcagcatgatggcagagccaaggagtgtggacaggtggcacggtgtctg

SEQ ID NO: 396731 - DNA, 584 bp, Homo sapiens
acagatagtgtgtgtatatatgatatacatgcaaacacactacatgaatataattttttaaaaagttgctatgtagacaaaatagaatgtaarttagaaacatttattaaaataagttagtctaaccagtgtaataaaagttttaagttattaagaagatgtgatgacttaaatgtgcattagcctgatacatatatacatatatacacacacaccacacactctctctcacacgcacacacacaaacacgtagagagtcaaattatataaagcaaaaatatcagcaagtaagtagaaatggataagcccccaaattattatagacatttcaaacacacatccttcagtaataaagaagaaattaaaagagtaagttttaaaagaagctactagattttaaaaagggcaaatgttatataaggaacatgaatattataattcatgtcattttcgtgttcataccgaatacttacaaaaattaacattttctagaccataccacaaattcaaacaattttcacggaaataacgtgacacaatatatttcctaaacaaacagcaatgaaggtaaatatcagtacaa

SEQ ID NO: 396732 - DNA, 509 bp, Homo sapiens
aaagaactgataatgcaaatgattcttgtttataaacatgcaaatcaacctgccttggaaagccaatccttctccatgtggcaaagccmcttatgcatcaatttccagtttatttcaatattctgagtaatagatgtgtccgtccctttgggttcccttttgaactggttgtaacatctcactgctcacttcattaataaaatatttaacatttatatttatatgagtgatggtttttcctgtttttgaaaagttaccctttaacaaatataacatgcacaggtgagttaatgccatgcttctcaaagtatggcctgtggaaggagcagcctggtgctccctcgcagtatttttgacagaagtgcagaccactgggccccacctcaggagtgtggagttgtagccggatccctttcactgacacattaaagttagagccaccctaggttaatacacatcactgaccggcctcaaggaataggagtgctgggtctatcagtctctcccaa

SEQ ID NO: 396733 - DNA, 509 bp, Homo sapiens
aaagaactgataatgcaaatgattcttgtttataaacatgcaaatcaacctgccttggaaagccaatccttctccatgtggcaaagccacttatgcatcaatttccagtttatttcaatattctgagtaatagatgtgtccgtccctttgggttcccttttgaactggttgtaacatctcactgctcacttcattaataaaatatttaacatttatatytatatgagtgatggtttttcctgtttttgaaaagttaccctttaacaaatataacatgcacaggtgagttaatgccatgcttctcaaagtatggcctgtggaaggagcagcctggtgctccctcgcagtatttttgacagaagtgcagaccactgggccccacctcaggagtgtggagttgtagccggatccctttcactgacacattaaagttagagccaccctaggttaatacacatcactgaccggcctcaaggaataggagtgctgggtctatcagtctctcccaa

SEQ ID NO: 396734 - DNA, 509 bp, Homo sapiens
aaagaactgataatgcaaatgattcttgtttataaacatgcaaatcaacctgccttggaaagccaatccttctccatgtggcaaagccacttatgcatcaatttccagtttatttcaatattctgagtaatagatgtgtccgtccctttgggttcccttttgaactggttgtaacatctcactgctcacttcattaataaaatatttaacatttatatttatatgagtgatrgtttttcctgtttttgaaaagttaccctttaacaaatataacatgcacaggtgagttaatgccatgcttctcaaagtatggcctgtggaaggagcagcctggtgctccctcgcagtatttttgacagaagtgcagaccactgggccccacctcaggagtgtggagttgtagccggatccctttcactgacacattaaagttagagccaccctaggttaatacacatcactgaccggcctcaaggaataggagtgctgggtctatcagtctctcccaa

SEQ ID NO: 396735 - DNA, 509 bp, Homo sapiens
aaagaactgataatgcaaatgattcttgtttataaacatgcaaatcaacctgccttggaaagccaatccttctccatgtggcaaagccacttatgcatcaatttccagtttatttcaatattctgagtaatagatgtgtccgtccctttgggttcccttttgaactggttgtaacatctcactgctcacttcattaataaaatatttaacatttatatttatatgagtgatggtttttcctgtttttgaaaagttaccctttaacaaatataacatgcacaggtgagttaatgccatgcttctcaaagtatggcctgtggaaggagcagcctggtgctccctcgcagtatttttgacagaartgcagaccactgggccccacctcaggagtgtggagttgtagccggatccctttcactgacacattaaagttagagccaccctaggttaatacacatcactgaccggcctcaaggaataggagtgctgggtctatcagtctctcccaa

SEQ ID NO: 396736 - DNA, 331 bp, Homo sapiens
cttctgatctccaccgcgcctcctccccttccacggtgactcaaaccttmaggcagtgaaaataaggagactcacaaactaggagactacagcttcagaccacacattttccactgagccagtacctgagcaaaaactagttttctggagttggggggatgaggaagattcaatattgaaagtgtccttggtggcatttcaaagctcaacatcatctaacaaaaattttattcctttttcatttctgttagggaatgtttagtttttcctctttgataatgaaaatttggttaacaaacattgctttggaccaatcttccttttcacaaat

SEQ ID NO: 396737 - DNA, 331 bp, Homo sapiens
cttctgatctccaccgcgcctcctccccttccacggtgactcaaaccttaaggcagtgaaaataaggagactcacaaactaggagactacagcttcagaccacacattttccactgagccagtacctgagcaaaaactagttttctggagttggggggatgaggaagattyaatattgaaagtgtccttggtggcatttcaaagctcaacatcatctaacaaaaattttattcctttttcatttctgttagggaatgtttagtttttcctctttgataatgaaaatttggttaacaaacattgctttggaccaatcttccttttcacaaat

SEQ ID NO: 396738 - DNA, 331 bp, Homo sapiens
cttctgatctccaccgcgcctcctccccttccacggtgactcaaaccttaaggcagtgaaaataaggagactcacaaactaggagactacagcttcagaccacacattttccactgagccagtacctgagcaaaaactagttttctggagttggggggatgaggaagattcratattgaaagtgtccttggtggcatttcaaagctcaacatcatctaacaaaaattttattcctttttcatttctgttagggaatgtttagtttttcctctttgataatgaaaatttggttaacaaacattgctttggaccaatcttccttttcacaaat

SEQ ID NO: 396739 - DNA, 603 bp, Homo sapiens
gctcaacatcatctaacaaaaattttattcctttttcatttctgttagggaatgtttagtttttcctctttgataatgaaaatttggttaacaaacattgctttggaccaatcttccttttcacaaatcactgaggtgtgtctatccacaagttctcagttcagcctacattttccagtcttccatttacctattcaactaatacctgagtgcctggcatgtgtcggccctgtgaacatgctggtgacagtgtgagcaggcagggctggttcctgtcctcatgaagcttatactacctgaggctggggtgtagaaattgacacatttaaaaagccactgagactttaaaaaaaaaaaaaatatatatatatatatatatatatatatggcatacaaagatgctgagctggagctttggaaaatgaagaaaaagtaatacaaatttaaaatgtgacatcgaggaatgaagaycatcacttaccatatcctatgtttaaaaaatctaatgtccataggaagttgtctgggaggtgggcagggtttcatactgtaatgagtatttagaaagtttagaaaagttctaatggttcttaatttaagaat

SEQ ID NO: 396740 - DNA, 603 bp, Homo sapiens
gctcaacatcatctaacaaaaattttattcctttttcatttctgttagggaatgtttagtttttcctctttgataatgaaaatttggttaacaaacattgctttggaccaatcttccttttcacaaatcactgaggtgtgtctatccacaagttctcagttcagcctacattttccagtcttccatttacctattcaactaatacctgagtgcctggcatgtgtcggccctgtgaacatgctggtgacagtgtgagcaggcagggctggttcctgtcctcatgaagcttatactacctgaggctggggtgtagaaattgacacatttaaaaagccactgagactttaaaaaaaaaaaaaatatatatatatatatatatatatatatggcatacaaagatgctgagctggagctttggaaaatgaagaaaaagtaatacaaatttaaaatgtgacatcgaggaatgaagatcatcacttamcatatcctatgtttaaaaaatctaatgtccataggaagttgtctgggaggtgggcagggtttcatactgtaatgagtatttagaaagtttagaaaagttctaatggttcttaatttaagaat

SEQ ID NO: 396741 - DNA, 603 bp, Homo sapiens
gctcaacatcatctaacaaaaattttattcctttttcatttctgttagggaatgtttagtttttcctctttgataatgaaaatttggttaacaaacattgctttggaccaatcttccttttcacaaatcactgaggtgtgtctatccacaagttctcagttcagcctacattttccagtcttccatttacctattcaactaatacctgagtgcctggcatgtgtcggccctgtgaacatgctggtgacagtgtgagcaggcagggctggttcctgtcctcatgaagcttatactacctgaggctggggtgtagaaattgacacatttaaaaagccactgagactttaaaaaaaaaaaaaatatatatatatatatatatatatatatggcatacaaagatgctgagctggagctttggaaaatgaagaaaaagtaatacaaatttaaaatgtgacatcgaggaatgaagatcatcacttaccatatcctatgtttaaaaaakctaatgtccataggaagttgtctgggaggtgggcagggtttcatactgtaatgagtatttagaaagtttagaaaagttctaatggttcttaatttaagaat

SEQ ID NO: 396742 - DNA, 603 bp, Homo sapiens
gctcaacatcatctaacaaaaattttattcctttttcatttctgttagggaatgtttagtttttcctctttgataatgaaaatttggttaacaaacattgctttggaccaatcttccttttcacaaatcactgaggtgtgtctatccacaagttctcagttcagcctacattttccagtcttccatttacctattcaactaatacctgagtgcctggcatgtgtcggccctgtgaacatgctggtgacagtgtgagcaggcagggctggttcctgtcctcatgaagcttatactacctgaggctggggtgtagaaattgacacatttaaaaagccactgagactttaaaaaaaaaaaaaatatatatatatatatatatatatatatggcatacaaagatgctgagctggagctttggaaaatgaagaaaaagtaatacaaatttaaaatgtgacatcgaggaatgaagatcatcacttaccatatcctatgtttaaaaaatctaatgtccataggaagttgtctgggaggtgggcagggtttcatactgtaatgagtatttagaaagtttagaaragttctaatggttcttaatttaagaat

SEQ ID NO: 396743 - DNA, 552 bp, Homo sapiens
  misc_feature (1)...(552): n = A,T,C or G
ctagggcaacggagaaaagattagcctgagtcccagtatgacttaactgttactgtgttactcttgaaatttcggccaccataaagtcagtaagactgtattttttatggactcatcacaacaatcattattcctattcaacaattggggaaactgaagtataaagaagtcatggtcaattattcaatggtagatccagaacttgaaccagcactggcttaacacagagctcaggatcttaagtgamttccaagatcataagaccagtaagggcaccaagatttctaacttagagtagatacattttatatagaatttggttaagtattccttaaaatatcactttaatatgccacaagaataaccacagaatagtgttactttaaagtaacaagatataaatagaagcccaaaatgttaagtggggttttacaatcaagaagacacaccagaataagatatttttaaaataccatgtacgttaaagagatcatacttccttaccctaataaatagccatgtagtacaagttttaactttttaattaaaaan

SEQ ID NO: 396744 - DNA, 522 bp, Homo sapiens
  misc_feature (1)...(522): n = A,T,C or G
gacttaactgttactgtgttactcttgaaatttcggccaccataaagtcagtaagactgtattttttatggactcatcacaacaatcattattcctattcaacaattggggaaactgaagtataaagaagtcatggtcaattattcaatggtagatccagaacttgaaccagcactggcttaacacagagctcaggatcttaagtgacttccaagatcataagaccagtaagggcaccaagatttctaacttagagtagatacattttatatagaatttggttaagtattccttaaaatatcactttaatatgccacaagaataaccacagaatagtgttactttaaagtaamaagatataaatagaagcccaaaatgttaagtggggttttacaatcaagaagacacaccagaataagatatttttaaaataccatgtacgttaaagagatcatacttccttaccctaataaatagccatgtagtacaagttttaactttttaattaaaaannnnnnnnnn

SEQ ID NO: 396745 - DNA, 522 bp, Homo sapiens
  misc_feature (1)...(522): n = A,T,C or G
gacttaactgttactgtgttactcttgaaatttcggccaccataaagtcagtaagactgtattttttatggactcatcacaacaatcattattcctattcaacaattggggaaactgaagtataaagaagtcatggtcaattattcaatggtagatccagaacttgaaccagcactggcttaacacagagctcaggatcttaagtgacttccaagatcataagaccagtaagggcaccaagatttctaacttagagtagatacattttatatagaatttggttaagtattccttaaaatatcactttaatatgccacaagaataaccacagaatagtgttactttaaagtaacaagatayaaatagaagcccaaaatgttaagtggggttttacaatcaagaagacacaccagaataagatatttttaaaataccatgtacgttaaagagatcatacttccttaccctaataaatagccatgtagtacaagttttaactttttaattaaaaannnnnnnnnn

SEQ ID NO: 396746 - DNA, 522 bp, Homo sapiens
  misc_feature (1)...(522): n = A,T,C or G
gacttaactgttactgtgttactcttgaaatttcggccaccataaagtcagtaagactgtattttttatggactcatcacaacaatcattattcctattcaacaattggggaaactgaagtataaagaagtcatggtcaattattcaatggtagatccagaacttgaaccagcactggcttaacacagagctcaggatcttaagtgacttccaagatcataagaccagtaagggcaccaagatttctaacttagagtagatacattttatatagaatttggttaagtattccttaaaatatcactttaatatgccacaagaataaccacagaatagtgttactttaaagtaacaagatataaatagaagcccaaaatgttaagtggggttttacaatcaagaagacacaccagaataagatatttttaaaataccatgtamgttaaagagatcatacttccttaccctaataaatagccatgtagtacaagttttaactttttaattaaaaannnnnnnnnn

SEQ ID NO: 396747 - DNA, 498 bp, Homo sapiens
gtaattcccactgcctggaatcccttgccctcattctttgttgggtcattctgcagacccagtactacttcctcttgggagcctttgtccatctcctcttcccccaatctccgaaccccaccaagacgtcagtagttcttgagcaaccctctgcttaattttcctgggatgaccaaaactaacactgyctgatccgttgttcaatccccaatccctagaacagagctgcaacataacaggaactataaatgaatgaatggataaagacagcactgaagaacttgaaattatagtttacacatgtaaacagtaacataaatctgaagaaataaagtttttttttgtttgttttttcgagatggagtctcgctctgtcaccaggctggagtgcagtggtgcaatctggcctcactgcaacctccgcctcccgggttcaagcgatttccctgcctcagcctcagcgtcccaagtagctaggactccaggcacgcgccacaa

SEQ ID NO: 396748 - DNA, 431 bp, Homo sapiens
aaaacgcttctttgaaaatttttttaatcttgatttatataagcatttatttcttgataagatttgaattataacctaattgatagacttaatattcttcggggctaagactacatgagaaaaaaatgttatacagattttttaaatgattcctgggcttaaggaaaaaattacttttaaatccttaccagtctcccagataattartgagcaggtgttgcctgggagtgtaaagatttttaggtcttatgacctcgtggccgcttggtccaaaaaataagattacttgcctctttccttattcttaccggatagaatgagactcgtttaaaacatctcgtttaggttagaaaagaaaatgggagaccatatttgtaattgacctaacatttataagtacctgatttaaatgaactttactcaaagcacac

SEQ ID NO: 396749 - DNA, 419 bp, Homo sapiens
cttaaggaaaaaattacttttaaatccttaccagtctcccagataattagtgagcaggtgttgcctgggagtgtaaagatttttaggtcttatgacctcgtggccgcttggtccaaaaaataagattacttgcctctttccttattcttaccggatagaatgagactcktttaaaacatctcgtttaggttagaaaagaaaatgggagaccatatttgtaattgacctaacatttataagtacctgatttaaatgaactttactcaaagcacactccacaaaaggcacttcaaatttcactggagcacagccctttgtgttgtagaataatgtagaataaaatggctttcttttttaacaccaccacaacactcaaggaaatgaaagtaggtaaggcatctatctgtgaacagcagtgc

SEQ ID NO: 396750 - DNA, 431 bp, Homo sapiens
aaaacgcttctttgaaaatttttttaatcttgatttatataagcatttatttcttgataagatttgaattataacctaattgatagacttaatattcttcggggctaagactacatgagaaaaaaatgttatacagattttttaaatgattcctgggcttaaggaaaaaattacttttaaatccttaccagtctcccagataattagtgagcaggtgttgcctgggagtgtaaagatttttaggtcttatgacctcgtggccgcttggtccaaaaaataagattacttgcctctttccttattcttaccggatagaatgagactcgtttaaaayatctcgtttaggttagaaaagaaaatgggagaccatatttgtaattgacctaacatttataagtacctgatttaaatgaactttactcaaagcacac

SEQ ID NO: 396751 - DNA, 419 bp, Homo sapiens
cttaaggaaaaaattacttttaaatccttaccagtctcccagataattagtgagcaggtgttgcctgggagtgtaaagatttttaggtcttatgacctcgtggccgcttggtccaaaaaataagattacttgcctctttccttattcttaccggatagaatgagactcgtttaaaacatctcgtttaggttagaaaagaaaatgggasaccatatttgtaattgacctaacatttataagtacctgatttaaatgaactttactcaaagcacactccacaaaaggcacttcaaatttcactggagcacagccctttgtgttgtagaataatgtagaataaaatggctttcttttttaacaccaccacaacactcaaggaaatgaaagtaggtaaggcatctatctgtgaacagcagtgc

SEQ ID NO: 396752 - DNA, 423 bp, Homo sapiens
cttaaggaaaaaattacttttaaatccttaccagtctcccagataattagtgagcaggtgttgcctgggagtgtaaagatttttaggtcttatgacctcgtggccgcttggtccaaaaaataagattacttgcctctttccttattcttaccggatagaatgagactcgtttaaaacatctcgtttaggttagaaaagaaaatgggagaccatatttgtaattgacctaacatttataagtacctgatttaaatgaactttactcaaagcacactccacaaaaggcacttcaaatttcactggagcacagccctttgtgttgtagaataatgtagaataaaatggctttcttttttaacaccaccacaacactcaaggaaatgaaagtaggtaagrcatctatctgtgaacagcagtgctatc

SEQ ID NO: 396753 - DNA, 423 bp, Homo sapiens
cttaaggaaaaaattacttttaaatccttaccagtctcccagataattagtgagcaggtgttgcctgggagtgtaaagatttttaggtcttatgacctcgtggccgcttggtccaaaaaataagattacttgcctctttccttattcttaccggatagaatgagactcgtttaaaacatctcgtttaggttagaaaagaaaatgggagaccatatttgtaattgacctaacatttataagtacctgatttaaatgaactttactcaaagcacactccacaaaaggcacttcaaatttcactggagcacagccctttgtgttgtagaataatgtagaataaaatggctttcttttttaacaccaccacaacactcaaggaaatgaaagtaggtaaggcatmtatctgtgaacagcagtgctatc

SEQ ID NO: 396754 - DNA, 348 bp, Homo sapiens
acatagataattaaaagatgtgtattcatggatcaagacttaaaacattaaagatttttgctgcttcatcagtgatattctcaatgatactctacattatttttactgtagttgtagtgcyagttgagaatgtgacaacttctaatacagcttggtgccagctgccttcagttttggaaatgcatcaacagtattacccaccatagcttttgcaccatgtaacaatttttgcttcaattgttaaacattattttggaaactcaaggaacagtaaagtctgttttattgcccatatttttactatttgtttgttctttcttccttcaggatgttctgagaatccttctt

SEQ ID NO: 396755 - DNA, 363 bp, Homo sapiens
tttactatttgtttgttctttcttccttcaggatgttctgagaatccttctttttatcattctcctttctggttcaataacttttctcactattcttttggtgtagttttgtctcatgactaatttttagttctcattcatctcacaatttcttgatttccctttcattactaatggatgtttttgctggatatagaattctttgttgtcrgttcttttaggacttgcaaaaatgttatgctgctttgttctggcctccatggtttcaggtgagaaatctgctgtcatttgagttgtttttcatctgtggataaggtgtcatttctcttatttatctcaaggtttttaagtttagtcattagt

SEQ ID NO: 396756 - DNA, 363 bp, Homo sapiens
tttactatttgtttgttctttcttccttcaggatgttctgagaatccttctttttatcattctcctttctggttcaataacttttctcactattcttttggtgtagttttgtctcatgactaatttttagttctcattcatctcacaatttcttgatttccctttcattactaatggatgtttttgctggatatagaattctttgttgtcggttcttttaggacttrcaaaaatgttatgctgctttgttctggcctccatggtttcaggtgagaaatctgctgtcatttgagttgtttttcatctgtggataaggtgtcatttctcttatttatctcaaggtttttaagtttagtcattagt

SEQ ID NO: 396757 - DNA, 363 bp, Homo sapiens
tttactatttgtttgttctttcttccttcaggatgttctgagaatccttctttttatcattctcctttctggttcaataacttttctcactattcttttggtgtagttttgtctcatgactaatttttagttctcattcatctcacaatttcttgatttccctttcattactaatggatgtttttgctggatatagaattctttgttgtcggttcttttaggacttgcaaaaatgttatgytgctttgttctggcctccatggtttcaggtgagaaatctgctgtcatttgagttgtttttcatctgtggataaggtgtcatttctcttatttatctcaaggtttttaagtttagtcattagt

SEQ ID NO: 396758 - DNA, 616 bp, Homo sapiens
ttgtttgcatcttttgactatattttcaaattcctcttcagattttcstggttcttagtatggtatgacatgttatatttgattgaatcgtttgcattttaagtgttgtgttatgaagctctgcattttatttaaatccccgcttttagtaggatttatctgaaactttgcttttggggtggaggtggggcacagtcttgttactactccaggtatatgtgaagattccagtttcatagtaggcctttgttgactcattgatggagacgtgcacctagtaaatgctgagtaggaatgaaaactctggacttgcattatacctttgtgaataccaccctggctcaaaaggttcctgcttttcacttggcctccactgacactgggatggaggggtggttaagttatcactgggcagtgctttgagtttggattctccagtaggcctctcctgtcatatctctgtagagggagggatagggatatgtccttatcattgggtgggtgttgaactcaggctccgcactttttttccacccacactctagagggaggaagccgcgttactgctcagtgggtatgagtgtcctgtgtccccacttggcctgctgtggtatca

SEQ ID NO: 396759 - DNA, 616 bp, Homo sapiens
ttgtttgcatcttttgactatattttcaaattcctcttcagattttcgtggttcttagtatggtatgacatgttatatttgattgaatcgtttgcattttaagtgttgtgttatgaagctctgcattttatttaaatccccgcttttagtaggatttatctgaaactttgcttttggggtggaggtggggcacagtcttgttactactccaggtrtatgtgaagattccagtttcatagtaggcctttgttgactcattgatggagacgtgcacctagtaaatgctgagtaggaatgaaaactctggacttgcattatacctttgtgaataccaccctggctcaaaaggttcctgcttttcacttggcctccactgacactgggatggaggggtggttaagttatcactgggcagtgctttgagtttggattctccagtaggcctctcctgtcatatctctgtagagggagggatagggatatgtccttatcattgggtgggtgttgaactcaggctccgcactttttttccacccacactctagagggaggaagccgcgttactgctcagtgggtatgagtgtcctgtgtccccacttggcctgctgtggtatca

SEQ ID NO: 396760 - DNA, 486 bp, Homo sapiens
tcctgtcatatctctgtagagggagggatagggatatgtccttatcattgggtgggtgttgaactcaggctccscactttttttccacccacactctagagggaggaagccgcgttactgctcagtgggtatgagtgtcctgtgtccccacttggcctgctgtggtatcatgttgtctgtgggtaggagtggggaatggcttactatgtcctccttttaagtctttgcaaaaggtatatggcttggggttttatttgttccctttggcttaaactggttggttgttgtctgtgagttttttttttttttcttggtagctggccgcttccctgcttttttgacaagagacagtagaattttcttggagttttatgtatgtgtgtgcctgttggtgtttctgagttgtctgcttctctagcaacttttcttgtatacatgagtcagaaaggaaacctagggaattcatcctcttgtgtttcttggcac

SEQ ID NO: 396761 - DNA, 486 bp, Homo sapiens
tcctgtcatatctctgtagagggagggatagggatatgtccttatcattgggtgggtgttgaactcaggctccgcacyttttttccacccacactctagagggaggaagccgcgttactgctcagtgggtatgagtgtcctgtgtccccacttggcctgctgtggtatcatgttgtctgtgggtaggagtggggaatggcttactatgtcctccttttaagtctttgcaaaaggtatatggcttggggttttatttgttccctttggcttaaactggttggttgttgtctgtgagttttttttttttttcttggtagctggccgcttccctgcttttttgacaagagacagtagaattttcttggagttttatgtatgtgtgtgcctgttggtgtttctgagttgtctgcttctctagcaacttttcttgtatacatgagtcagaaaggaaacctagggaattcatcctcttgtgtttcttggcac

SEQ ID NO: 396762 - DNA, 486 bp, Homo sapiens
tcctgtcatatctctgtagagggagggatagggatatgtccttatcattgggtgggtgttgaactcaggctccgcactttttttccacccacactctagagggaggaagccrcgttactgctcagtgggtatgagtgtcctgtgtccccacttggcctgctgtggtatcatgttgtctgtgggtaggagtggggaatggcttactatgtcctccttttaagtctttgcaaaaggtatatggcttggggttttatttgttccctttggcttaaactggttggttgttgtctgtgagttttttttttttttcttggtagctggccgcttccctgcttttttgacaagagacagtagaattttcttggagttttatgtatgtgtgtgcctgttggtgtttctgagttgtctgcttctctagcaacttttcttgtatacatgagtcagaaaggaaacctagggaattcatcctcttgtgtttcttggcac

SEQ ID NO: 396763 - DNA, 567 bp, Homo sapiens
ccctggctcaaaaggttcctgcttttcacttggcctccactgacactgggatggaggggtggttaagttatcactgggcagtgctttgagtttggattctccagtaggcctctcctgtcatatctctgtagagggagggatagggatatgtccttatcattgggtgggtgttgaactcaggctccgcactttttttccacccacactctagagggaggaagccgcgttactgctcagtgggtatgagtgtcctgtgtccccacttggcctgctgtggtatcatgttgtctgtgggtaggagtggggaatggcttactatgtcctccttttaagtctttgcaaaaggtatatggcttggggttttatttgttccctttggcttaaactggttggttgttgtctgtgagttttttttttttttcttggtagctggccgcttccctgcttttttgacaagagacagtagaattttcttggagttttatrtatgtgtgtgcctgttggtgtttctgagttgtctgcttctctagcaacttttcttgtatacatgagtcagaaaggaaacct

SEQ ID NO: 396764 - DNA, 486 bp, Homo sapiens
tcctgtcatatctctgtagagggagggatagggatatgtccttatcattgggtgggtgttgaactcaggctccgcactttttttccacccacactctagagggaggaagccgcgttactgctcagtgggtatgagtgtcctgtgtccccacttggcctgctgtggtatcatgttgtctgtgggtaggagtggggaatggcttactatgtcctccttttaagtctttgcaaaaggtatatggcttggggttttatttgttccctttggcttaaactggttggttgttgtctgtgagttttttttttttttcttggtagctggccgcttccctgcttttttgacaagagacagtagaattttcttggagttttatgtatgtgtgtgcctgttggtgtttctgagttgtctgcttctctagcaacttttcttgtatayatgagtcagaaaggaaacctagggaattcatcctcttgtgtttcttggcac

SEQ ID NO: 396765 - DNA, 405 bp, Homo sapiens
gtttctaatgagaagtcaggtgtggcgtcagtagtatcattattcccatgtatatartaatgttttgatattctctggctgctttcaggattttctctttatctttggttttcagcagtctgactatgatgtgcctaggtgtggttttctttgtgttcatcctgcttgggggttgctgagcttcttgaaagtgtaagttgatatttttcaccaaatttgtgaaaagcttgacttttatttcttattctttttctgtctcatttctctctcctcttcctctgtaactctaattacatgaatgttagtatatttgatattttgtaggttactgagggtctgttcttcttcttcccagtgtttttacttttagttcctcagaatagatacactattcatgtattttca

SEQ ID NO: 396766 - DNA, 405 bp, Homo sapiens
gtttctaatgagaagtcaggtgtggcgtcagtagtatcattattcccatgtatataataatgttttgatattctctggctgctttcaggattttctctttatmtttggttttcagcagtctgactatgatgtgcctaggtgtggttttctttgtgttcatcctgcttgggggttgctgagcttcttgaaagtgtaagttgatatttttcaccaaatttgtgaaaagcttgacttttatttcttattctttttctgtctcatttctctctcctcttcctctgtaactctaattacatgaatgttagtatatttgatattttgtaggttactgagggtctgttcttcttcttcccagtgtttttacttttagttcctcagaatagatacactattcatgtattttca

SEQ ID NO: 396767 - DNA, 405 bp, Homo sapiens
gtttctaatgagaagtcaggtgtggcgtcagtagtatcattattcccatgtatataataatgttttgatattctctggctgctttcaggattttctctttatctttggttttcagcagtctgactatgatgtgcctaggtgtggttttctttgtrttcatcctgcttgggggttgctgagcttcttgaaagtgtaagttgatatttttcaccaaatttgtgaaaagcttgacttttatttcttattctttttctgtctcatttctctctcctcttcctctgtaactctaattacatgaatgttagtatatttgatattttgtaggttactgagggtctgttcttcttcttcccagtgtttttacttttagttcctcagaatagatacactattcatgtattttca

SEQ ID NO: 396768 - DNA, 267 bp, Homo sapiens
tggtgcaccgtgtagaataagtaggttatgtgagcaaataaattgggaggctattgtaatccagagaaaaaaggtagtgacttaggtgagaatgctgtgagtatgagtggtattagtggtgagaagtcgttaggccatggatgtatttcataggactggccaagagaactgcagctaaattggagtgtagggagtgaaatggagaactcaaagatgactctcagcactggaaggtgacakctgccactgaagcaggctgatgcctct

SEQ ID NO: 396769 - DNA, 267 bp, Homo sapiens
tggtgcaccgtgtagaataagtaggttatgtgagcaaataaattgggaggctattgtaatccagagaaaaaaggtagtgacttaggtgagaatgctgtgagtatgagtggtattagtggtgagaagtcgttaggccatggatgtatttcataggactggccaagagaactgcagctaaattggagtgtagggagtgaaatggagaactcaaagatgactctcagcactggaaggtgacagctgycactgaagcaggctgatgcctct

SEQ ID NO: 396770 - DNA, 666 bp, Homo sapiens
gtttagctgtgtccccagccaaatctcatcttgaattcccacatgttgtgggagggaacaggtgtgaggtaattgaatcatgggggcaggtctttcccatgctgttcttctgatagtgaataagtctcacaagatctgatggttttataaaggggagtttccctgcacaagctctcttgtcttgtctgctgccatgtgagacgtgcctttcaccttgygccatgattgtgaggcctacccagccatgtagaactgtgtgtctattaaacttctttcttctggaaattacccactcttgggcatgtctttaccagcggtgtgaaaatggactaatacagtagcacacctcatagggctgaacaaaatggggaagatgagtggggagcaggagagagaaaaggggtctgtgggactccagcctttattaggcccagagcattacccaaataagttttccacggggtctagtcggtggggtgagtgccagcaggcacatttcttggctcccgctgcaactaagcaggtcactctggcatgtgggggctgtccatgtgggctgtgaggtctgtggggtgagtcaggtaggttgtatccaacggttctgtagtgggtattcatcaggaggaggcaactgtgtagggtgaatttctgggccagccatactga

SEQ ID NO: 396771 - DNA, 666 bp, Homo sapiens
gtttagctgtgtccccagccaaatctcatcttgaattcccacatgttgtgggagggaacaggtgtgaggtaattgaatcatgggggcaggtctttcccatgctgttcttctgatagtgaataagtctcacaagatctgatggttttataaaggggagtttccctgcacaagctctcttgtcttgtctgctgccatgtgagacgtgcctttcaccttgtgccatgattgtgaggcctacccagccatgtagaactgtgtgtctattaaacttctttcttctggaaattacccactcttgggcatgtctttaccagcggtgtgaaaatggactaatacagtagcacacctcatagggctgaacaaaatggggaagatgagtggggagcaggagagagaaaaggggtctgtgggactccagcctttattaggcccagagcattacccaaataagttttccacggggtctagtcggtggggtgagtgycagcaggcacatttcttggctcccgctgcaactaagcaggtcactctggcatgtgggggctgtccatgtgggctgtgaggtctgtggggtgagtcaggtaggttgtatccaacggttctgtagtgggtattcatcaggaggaggcaactgtgtagggtgaatttctgggccagccatactga

SEQ ID NO: 396772 - DNA, 666 bp, Homo sapiens
gtttagctgtgtccccagccaaatctcatcttgaattcccacatgttgtgggagggaacaggtgtgaggtaattgaatcatgggggcaggtctttcccatgctgttcttctgatagtgaataagtctcacaagatctgatggttttataaaggggagtttccctgcacaagctctcttgtcttgtctgctgccatgtgagacgtgcctttcaccttgtgccatgattgtgaggcctacccagccatgtagaactgtgtgtctattaaacttctttcttctggaaattacccactcttgggcatgtctttaccagcggtgtgaaaatggactaatacagtagcacacctcatagggctgaacaaaatggggaagatgagtggggagcaggagagagaaaaggggtctgtgggactccagcctttattaggcccagagcattacccaaataagttttccacggggtctagtcggtggggtgagtgccagcaggcacatttcttggctcccgctgcaactaagcaggtcactctggcrtgtgggggctgtccatgtgggctgtgaggtctgtggggtgagtcaggtaggttgtatccaacggttctgtagtgggtattcatcaggaggaggcaactgtgtagggtgaatttctgggccagccatactga

SEQ ID NO: 396773 - DNA, 666 bp, Homo sapiens
gtttagctgtgtccccagccaaatctcatcttgaattcccacatgttgtgggagggaacaggtgtgaggtaattgaatcatgggggcaggtctttcccatgctgttcttctgatagtgaataagtctcacaagatctgatggttttataaaggggagtttccctgcacaagctctcttgtcttgtctgctgccatgtgagacgtgcctttcaccttgtgccatgattgtgaggcctacccagccatgtagaactgtgtgtctattaaacttctttcttctggaaattacccactcttgggcatgtctttaccagcggtgtgaaaatggactaatacagtagcacacctcatagggctgaacaaaatggggaagatgagtggggagcaggagagagaaaaggggtctgtgggactccagcctttattaggcccagagcattacccaaataagttttccacggggtctagtcggtggggtgagtgccagcaggcacatttcttggctcccgctgcaactaagcaggtcactctggcatgtgggggctgtccatgtgggctgtgaggtctgtggggtgagtcaggtaggttgtatccaacggttctgtagtgggyattcatcaggaggaggcaactgtgtagggtgaatttctgggccagccatactga

SEQ ID NO: 396774 - DNA, 549 bp, Homo sapiens
tctgtttatgatatatgatagactcttgctattcttagaattctttaagactcacaaacccacaaactggaatatttgtagaggctcctggtcgtcccttgaatcatacatccaaaccccaaattaactcctttcaacatttattaaagctgctttcttcttgatcaattcagaagagttattatgttgaaaagtacaaagctgcactgagattcagacaatggcatgtatcacccttgctctagcagatcattgatctttgtggggccgcttgtaarttgcagatgctgaggaggcaacatcaagtatgaggggactcttgaaccgtttgtactagtgattatcttttccccatgtctgtctctttacttacactgttattggagctataccttcttcactggtaatttccactcctaaatccaaatatagtgagtgactaattaataattacgggctgagtaaataataaattagtcattttttatcctttagggatcatatgcttctaagagcaacatctgatagtattttatcatcgatatcatt

SEQ ID NO: 396775 - DNA, 549 bp, Homo sapiens
tctgtttatgatatatgatagactcttgctattcttagaattctttaagactcacaaacccacaaactggaatatttgtagaggctcctggtcgtcccttgaatcatacatccaaaccccaaattaactcctttcaacatttattaaagctgctttcttcttgatcaattcagaagagttattatgttgaaaagtacaaagctgcactgagattcagacaatggcatgtatcacccttgctctagcagatcattgatctttgtggggccgcttgtaaattgcagatgctgaggaggcaacatmaagtatgaggggactcttgaaccgtttgtactagtgattatcttttccccatgtctgtctctttacttacactgttattggagctataccttcttcactggtaatttccactcctaaatccaaatatagtgagtgactaattaataattacgggctgagtaaataataaattagtcattttttatcctttagggatcatatgcttctaagagcaacatctgatagtattttatcatcgatatcatt

SEQ ID NO: 396776 - DNA, 543 bp, Homo sapiens
ttaaacacttctatcaggaattcactatgtttctggatttatgtgacttttttgttcccttctgtttatgatatatgatagactcttgctattcttagaattctttaagactcacaaacccacaaactggaatatttgtagaggctcctggtcgtcccttgaatcatacatccaaaccccaaattaactcctttcaacatttattaaagctgctttcttcttgatcaattcagaagagttattatgttgaaaagtacaaagctgcactgagattcagacaatggcatgtatcacccttgctctagcagatcattgatctttgtggggccgcttgtaaattgcagatgctgaggaggcaacatcaagtatgaggggactcttgaaccgtttgtactagtgattatcttttycccatgtctgtctctttacttacactgttattggagctataccttcttcactggtaatttccactcctaaatccaaatatagtgagtgactaattaataattacgggctgagtaaataataaattagtcattt

SEQ ID NO: 396777 - DNA, 536 bp, Homo sapiens
tcttctgccaagcgtatttagggtaaattaatgatagagtggagctgcaagtttgtggcatcctgaaatgtctgttggagagtagaaaagggccatagattttgtaataaggytttcaatattgacttgatcaatagctgtatggagtggtttgtgccaaatctagtatctgtgaatgtattttgtgataagtattgtattatttttggaggtgtgttgcctgctcagatacaaattgcaattctgtattttatgtgataaaacatcctgacacccctgaaattttcttttcctcttgggtcaagtatatttggcattgattttctgcattttcaaggcttgaaatgaaatctgtgagcaagaagttcacagagtttatttcaagggataggtatatttctagagataaaattgaaagcgtgcagtgttattatataattgtgatgaagttgagctttgctagtttgaagtatctaataaagtttaacactttttaaaagatccttcaaaaagggcagttttcttgccatatgtaa

SEQ ID NO: 396778 - DNA, 536 bp, Homo sapiens
tcttctgccaagcgtatttagggtaaattaatgatagagtggagctgcaagtttgtggcatcctgaaatgtctgttggagagtagaaaagggccatagattttgtaataaggctttcaatattgasttgatcaatagctgtatggagtggtttgtgccaaatctagtatctgtgaatgtattttgtgataagtattgtattatttttggaggtgtgttgcctgctcagatacaaattgcaattctgtattttatgtgataaaacatcctgacacccctgaaattttcttttcctcttgggtcaagtatatttggcattgattttctgcattttcaaggcttgaaatgaaatctgtgagcaagaagttcacagagtttatttcaagggataggtatatttctagagataaaattgaaagcgtgcagtgttattatataattgtgatgaagttgagctttgctagtttgaagtatctaataaagtttaacactttttaaaagatccttcaaaaagggcagttttcttgccatatgtaa

SEQ ID NO: 396779 - DNA, 536 bp, Homo sapiens
tcttctgccaagcgtatttagggtaaattaatgatagagtggagctgcaagtttgtggcatcctgaaatgtctgttggagagtagaaaagggccatagattttgtaataaggctttcaatattgacttgatcaatagctgtatggagtggtttgtgccaaatctagtatctgtgaatgtattttgtgataagtattgtattatttttggaggtgtgttgcctgctcagatacaaattgcaattctgtattttatgtgataaaacatcctgacacccctgaaattttcttttcctyttgggtcaagtatatttggcattgattttctgcattttcaaggcttgaaatgaaatctgtgagcaagaagttcacagagtttatttcaagggataggtatatttctagagataaaattgaaagcgtgcagtgttattatataattgtgatgaagttgagctttgctagtttgaagtatctaataaagtttaacactttttaaaagatccttcaaaaagggcagttttcttgccatatgtaa

SEQ ID NO: 396780 - DNA, 536 bp, Homo sapiens
tcttctgccaagcgtatttagggtaaattaatgatagagtggagctgcaagtttgtggcatcctgaaatgtctgttggagagtagaaaagggccatagattttgtaataaggctttcaatattgacttgatcaatagctgtatggagtggtttgtgccaaatctagtatctgtgaatgtattttgtgataagtattgtattatttttggaggtgtgttgcctgctcagatacaaattgcaattctgtattttatgtgataaaacatcctgacacccctgaaattttcttttcctcttgggtcaagtatatttggcattgattttctgcattttcaaggcttgaaatgaaatctgtgagcaagaagttcacagagtttatttcaagggataggtatatttctagagataaaattgaaagcgtgcagtgttattatataattgtgatgaagttgagctttgytagtttgaagtatctaataaagtttaacactttttaaaagatccttcaaaaagggcagttttcttgccatatgtaa

SEQ ID NO: 396781 - DNA, 593 bp, Homo sapiens
tgctcaaatattctatccttcactggggaccatcatttattaaaaaatggcctgaaatcaattccaagtctagctgcagtgaagcttctagtgggaaatgcaagttaagtaatttgttttctttctaaaaggataaattaaaatagacawtgattcaaagaacaaaacaccttaatagaaaacataatggaatgctttgatattatcattcagggaattttgcttcctttgtggtagctagattgagtgaaggagattgcttaggtgtaatgagcaaatcttataattgcaagtataacccaagctgcatatcatcatttagatcaataagcctcattaaatattaaatattaccttttaacttttatgcaattaagcagaatttaaaaataaaagttttaaaaattaaactttttattactaagtatcttaaaatacaaatctcatagctcattattattgtcaagaaaagaatacatgaaaatttataaataaggttttctctctagtaagtttacagtcttgcattaaatattggttattggaacccgcaatgtccaagattatgattaagtatcaatgaagtatgactc

SEQ ID NO: 396782 - DNA, 465 bp, Homo sapiens
gtgggaaatgcaagttaagtaatttgttttctttctaaaaggataaattaaaatagacaatgattcaaagaacaaaacamcttaatagaaaacataatggaatgctttgatattatcattcagggaattttgcttcctttgtggtagctagattgagtgaaggagattgcttaggtgtaatgagcaaatcttataattgcaagtataacccaagctgcatatcatcatttagatcaataagcctcattaaatattaaatattaccttttaacttttatgcaattaagcagaatttaaaaataaaagttttaaaaattaaactttttattactaagtatcttaaaatacaaatctcatagctcattattattgtcaagaaaagaatacatgaaaatttataaataaggttttctctctagtaagtttacagtcttgcattaaatattggttattggaacccgcaat

SEQ ID NO: 396783 - DNA, 465 bp, Homo sapiens
gtgggaaatgcaagttaagtaatttgttttctttctaaaaggataaattaaaatagacaatgattcaaagaacaaaacaccttaatagaaaacataatggaatgctttgatattatcattcagggaattttgcttcctttgtggtagctagattgagtgaaggagattgcttaggtgtaatgagcaaatcttataattgcaagtataacccaagctgcatatcatcatttagatcaataagcctcattaaatattaaatattaccttttaacttttatgcaattaagcagaatttaaaaataaaagttttaaaaattaaastttttattactaagtatcttaaaatacaaatctcatagctcattattattgtcaagaaaagaatacatgaaaatttataaataaggttttctctctagtaagtttacagtcttgcattaaatattggttattggaacccgcaat

SEQ ID NO: 396784 - DNA, 580 bp, Homo sapiens
acaaaaaaatcaatttaacgaggaatgtagattaatatcatagtattgtctcaactgtgtgcaaccactacttataaaaaatgatataagaaatgcagtctgaaatctgaattctaaataacaatgtagggccattatccctctgggacccttagggtcaaaataagagaaaagagatgaatggtgggttggaagtaagtcaatgatccttgtcaattttttgtatctgtcaagaaaagcatctgcttgaggacatccattttcctgcttctgagttacagaataatagktgcctatcctgaatgtaacattccctgacacggactctgtgtctatgctgcttaggtggtttgtgcatgagaaagtgtttaacatctgaaaatggagacaatccttagagaaagatacatatgaattttaaaaggaaatatacctacgatagaaatgaaacaaatagcataaatatctagctgtattttgtctttttggtaactgttacaatatatacattttcaaacaactaagttcagcactgacttcgggagaatctagataaaactgaactgacatataataagca

SEQ ID NO: 396785 - DNA, 584 bp, Homo sapiens
ctgactgaggtgcagtggtgcaatcatagctcatcacagccccaaactcctaggttcatatggtcctctcatctcagcctcctgatagctatgaccacrggtgtgcactactatgcccagctcgtttattttatattttgttttcatttcatttgtaaagactgggtcttgctatgttgcccaggcaggtcacgaactcctatcttcaagcagtcctctaacctaggcctccctaagtactgagattataggcatgagccattgcatctggctcaaaagtatttctgtcttagtggctttagcaaagaagtgccattttggggacatatacaatggtgtgctgtttgggagtgatacaaaaataattataagaatggaatgaatatgtcagtatgttttcaaaagcaagttatcccaagtttttaaacaagcataattttagagtttttgtaactaacttagggtttaaatgtagcaaaaattttaaacattatcatgaatacacatacaattttaatcaatttggtttccaagatgaatttacatgcttaaattgctaatttcaagttgctgctagatatgag

SEQ ID NO: 396786 - DNA, 584 bp, Homo sapiens
ctgactgaggtgcagtggtgcaatcatagctcatcacagccccaaactcctaggttcatatggtcctctcatctcagcctcctgatagctatgaccacaggtgtgcactactatgcccagctcrtttattttatattttgttttcatttcatttgtaaagactgggtcttgctatgttgcccaggcaggtcacgaactcctatcttcaagcagtcctctaacctaggcctccctaagtactgagattataggcatgagccattgcatctggctcaaaagtatttctgtcttagtggctttagcaaagaagtgccattttggggacatatacaatggtgtgctgtttgggagtgatacaaaaataattataagaatggaatgaatatgtcagtatgttttcaaaagcaagttatcccaagtttttaaacaagcataattttagagtttttgtaactaacttagggtttaaatgtagcaaaaattttaaacattatcatgaatacacatacaattttaatcaatttggtttccaagatgaatttacatgcttaaattgctaatttcaagttgctgctagatatgag

SEQ ID NO: 396787 - DNA, 492 bp, Homo sapiens
aaaacacatggcagcttccaccttkttcaccctgggtgaaagtagctaccatactgcaaggacattcaagcaaccctacagagcttaatgcattacattacagaggtcttctgctaacagacagcattaacttgctagccatgttaagtgagccgtcttgaaattggatgccctagcctcagtcaagcctttggatgactgcaggcctaatcaacatattgaccaagacagaacaacctagctaaagcatttctcaaatcaggacccacagaagctctatattagtttgctattgttgtataacaaatgaacatctcaggaaatatacatatattgtctagtatattttctcttatacagtttctgtgggtcaggatttcatttaagaaaatacatgtttattcttttttaagtggtttttttacttccttttctttaaatttattttttatttcaataggtttttggggaaccgatggtgtttggttacat

SEQ ID NO: 396788 - DNA, 492 bp, Homo sapiens
aaaacacatggcagcttccacctttttcaccctgggtgaaagtagctaccatactgcaaggacattcaagcaaccctacagagcttaatgcattacattacagaggtctyctgctaacagacagcattaacttgctagccatgttaagtgagccgtcttgaaattggatgccctagcctcagtcaagcctttggatgactgcaggcctaatcaacatattgaccaagacagaacaacctagctaaagcatttctcaaatcaggacccacagaagctctatattagtttgctattgttgtataacaaatgaacatctcaggaaatatacatatattgtctagtatattttctcttatacagtttctgtgggtcaggatttcatttaagaaaatacatgtttattcttttttaagtggtttttttacttccttttctttaaatttattttttatttcaataggtttttggggaaccgatggtgtttggttacat

SEQ ID NO: 396789 - DNA, 492 bp, Homo sapiens
aaaacacatggcagcttccacctttttcaccctgggtgaaagtagctaccatactgcaaggacattcaagcaaccctacagagcttaatgcattacattacagaggtcttctgctaacagacagcattracttgctagccatgttaagtgagccgtcttgaaattggatgccctagcctcagtcaagcctttggatgactgcaggcctaatcaacatattgaccaagacagaacaacctagctaaagcatttctcaaatcaggacccacagaagctctatattagtttgctattgttgtataacaaatgaacatctcaggaaatatacatatattgtctagtatattttctcttatacagtttctgtgggtcaggatttcatttaagaaaatacatgtttattcttttttaagtggtttttttacttccttttctttaaatttattttttatttcaataggtttttggggaaccgatggtgtttggttacat

SEQ ID NO: 396790 - DNA, 492 bp, Homo sapiens
aaaacacatggcagcttccacctttttcaccctgggtgaaagtagctaccatactgcaaggacattcaagcaaccctacagagcttaatgcattacattacagaggtcttctgctaacagacagcattaacttgctagccatgttaagtgagccgtcttgaaattggatgccctagcctcagtcaagcctttggatgactgcaggcctaatcaacatattgaccaagacagaacaacctagctaaagcatttctcaaatcaggacccacagaagctctatattagtttgctattgttgtayaacaaatgaacatctcaggaaatatacatatattgtctagtatattttctcttatacagtttctgtgggtcaggatttcatttaagaaaatacatgtttattcttttttaagtggtttttttacttccttttctttaaatttattttttatttcaataggtttttggggaaccgatggtgtttggttacat

SEQ ID NO: 396791 - DNA, 583 bp, Homo sapiens
ttctgtgggtcaggaatttggtcacaactcaactgggttcactgcatagggtttcacaaggttgcaggcaaggcgtcagctgagctaggttcaagctcattgaggttgttgacaaaattcatttccttatgtctgtatgattgtgtagctatgttttttattgggtattggctggaggccaccctcaggtcttagacaccamctgctgttgggcttcctcaatatggtcacacacttcatcaaatcagcaaggagaatcttgtgtgcatgccagcaatatgtctatctcatatcctaatgtatgtctctctcctcctcctctcctcttctctctcctttcttctgtgcacacacacacacacacacacacacacacacatatcacaggagtaacaacccatcacatttgcaatattatgtcagttagaaacaagtcacagatcctactcacactcactcgatttcatccaaaagtttgggcagtgatcccatccacactaaaaaaggaagagatcatacagagtataacaccaggacatcgagatcatgggaaacatcttagaagtctgcctatcacagataa

SEQ ID NO: 396792 - DNA, 325 bp, Homo sapiens
ttgtgtgcatgccagcaatatgtctatctcatatcctaatgtatgtctctctcctcctcctctcctcttcyctctcctttcttctgtgcacacacacacacacacacacacacacacacatatcacaggagtaacaacccatcacatttgcaatattatgtcagttagaaacaagtcacagatcctactcacactcactcgatttcatccaaaagtttgggcagtgatcccatccacactaaaaaaggaagagatcatacagagtataacaccaggacatcgagatcatgggaaacatcttagaagtctgcctatcacagataat

SEQ ID NO: 396793 - DNA, 522 bp, Homo sapiens
ccacctgctgttgggcttcctcaatatggtcacacacttcatcaaatcagcaaggagaatcttgtgtgcatgccagcaatatgtctatctcatatcctaatgtatgtctctctcctcctcctctcctcttctctctcctttcttctgtgcrcacacacacacacacacacacacacacacatatcacaggagtaacaacccatcacatttgcaatattatgtcagttagaaacaagtcacagatcctactcacactcactcgatttcatccaaaagtttgggcagtgatcccatccacactaaaaaaggaagagatcatacagagtataacaccaggacatcgagatcatgggaaacatcttagaagtctgcctatcacagataataaatacttgttgttgtttgaagacattaagtttcaggtaatttcttatgcagcaatagataactaattagtaagagttgtgcctaactaatcaggcacaagttagaatataaggagtgaagagttatcactataga

SEQ ID NO: 396794 - DNA, 325 bp, Homo sapiens
ttgtgtgcatgccagcaatatgtctatctcatatcctaatgtatgtctctctcctcctcctctcctcttctctctcctttcttctgtgcacacacacacacacacacacacacacacacatatcacaggagtaacaacccatcacatttgcaatattatgtcagttagaaacaagtcacagatcctactcacactyactcgatttcatccaaaagtttgggcagtgatcccatccacactaaaaaaggaagagatcatacagagtataacaccaggacatcgagatcatgggaaacatcttagaagtctgcctatcacagataat

SEQ ID NO: 396795 - DNA, 522 bp, Homo sapiens
ccacctgctgttgggcttcctcaatatggtcacacacttcatcaaatcagcaaggagaatcttgtgtgcatgccagcaatatgtctatctcatatcctaatgtatgtctctctcctcctcctctcctcttctctctcctttcttctgtgcacacacacacacacacacacacacacacacatatcacaggagtaacaacccatcacatttgcaatattatgtcagttagaaacaagtcacagatcctactcacactcactcgatttcatccaaaagtttgggcagtgatcccatccrcactaaaaaaggaagagatcatacagagtataacaccaggacatcgagatcatgggaaacatcttagaagtctgcctatcacagataataaatacttgttgttgtttgaagacattaagtttcaggtaatttcttatgcagcaatagataactaattagtaagagttgtgcctaactaatcaggcacaagttagaatataaggagtgaagagttatcactataga

SEQ ID NO: 396796 - DNA, 325 bp, Homo sapiens
ttgtgtgcatgccagcaatatgtctatctcatatcctaatgtatgtctctctcctcctcctctcctcttctctctcctttcttctgtgcacacacacacacacacacacacacacacacatatcacaggagtaacaacccatcacatttgcaatattatgtcagttagaaacaagtcacagatcctactcacactcactcgatttcatccaaaagtttgggcagtgatcccatccacactaaaaaaggaagagatcatacagagyataacaccaggacatcgagatcatgggaaacatcttagaagtctgcctatcacagataat

SEQ ID NO: 396797 - DNA, 522 bp, Homo sapiens
ccacctgctgttgggcttcctcaatatggtcacacacttcatcaaatcagcaaggagaatcttgtgtgcatgccagcaatatgtctatctcatatcctaatgtatgtctctctcctcctcctctcctcttctctctcctttcttctgtgcacacacacacacacacacacacacacacacatatcacaggagtaacaacccatcacatttgcaatattatgtcagttagaaacaagtcacagatcctactcacactcactcgatttcatccaaaagtttgggcagtgatcccatccacactaaaaaaggaagagatcatacagagtataacaccaggacatcgagatcatgggaaacatcttagaagtctgcctatcacagataataaatacttgttgttgtttgaagacattaagtttyaggtaatttcttatgcagcaatagataactaattagtaagagttgtgcctaactaatcaggcacaagttagaatataaggagtgaagagttatcactataga

SEQ ID NO: 396798 - DNA, 398 bp, Homo sapiens
gttcagtaaaaattattcctggtttacagaggagaaaactgagactcagaaaggctactcatttatttgaagtctcacagccttcataatgttattcatgcactctttatgccctagatagttggagaaattacaggggagaatctcagaaataactaaaataattgaagatgtaatcaagaaacaaaagtacagtgtttgaatagagaccaactaaagacagctgggactggttcagtctrcatataattgaaaggtaaatcactaggaaaaggaagaaatctctgggtttcaagatgaaatagaagtcatgagaattctataaatttaaattcaagttcactgaagagagctaggagtcagctactgtttgctgcagataatattcagtaaggagc

SEQ ID NO: 396799 - DNA, 398 bp, Homo sapiens
gttcagtaaaaattattcctggtttacagaggagaaaactgagactcagaaaggctactcatttatttgaagtctcacagccttcataatgttattcatgcactctttatgccctagatagttggagaaattacaggggagaatctcagaaataactaaaataattgaagatgtaatcaagaaacaaaagtacagtgtttgaatagagaccaactaaagacagctgggactggttcagtctacmtataattgaaaggtaaatcactaggaaaaggaagaaatctctgggtttcaagatgaaatagaagtcatgagaattctataaatttaaattcaagttcactgaagagagctaggagtcagctactgtttgctgcagataatattcagtaaggagc

SEQ ID NO: 396800 - DNA, 398 bp, Homo sapiens
gttcagtaaaaattattcctggtttacagaggagaaaactgagactcagaaaggctactcatttatttgaagtctcacagccttcataatgttattcatgcactctttatgccctagatagttggagaaattacaggggagaatctcagaaataactaaaataattgaagatgtaatcaagaaacaaaagtacagtgtttgaatagagaccaactaaagacagctgggactggttcagtctacatataattgaaaggtaaatcactaggaaarggaagaaatctctgggtttcaagatgaaatagaagtcatgagaattctataaatttaaattcaagttcactgaagagagctaggagtcagctactgtttgctgcagataatattcagtaaggagc

SEQ ID NO: 396801 - DNA, 455 bp, Homo sapiens
agtgtttgaatagagaccaactaaagacagctgggactggttcagtctacatataattgaaaggtaaatcactaggaaaaggaagaaatctctgggtttcaagatgaaatagaagtcatgagaattctataaatttaaattcaagttcactgaagagagctaggagtcagctactgtttgctrcagataatattcagtaaggagctaactgctaatgcactggcctggggaagtgtttaatgtcaaatagaaaccaacactagtaaaatacttccaggaggtaagaatttttttttttttgagacagagtcttgctctgtccccaaggctggaatgcagtggcatgatcttggctcactgcaacctccacttcccaggttcaagcaattctcctgactcagtctccctagtagctgggattacaggcacacaccaccatgcccagctgatttttg

SEQ ID NO: 396802 - DNA, 455 bp, Homo sapiens
agtgtttgaatagagaccaactaaagacagctgggactggttcagtctacatataattgaaaggtaaatcactaggaaaaggaagaaatctctgggtttcaagatgaaatagaagtcatgagaattctataaatttaaattcaagttcactgaagagagctaggagtcagctactgtttgctgcagataatattyagtaaggagctaactgctaatgcactggcctggggaagtgtttaatgtcaaatagaaaccaacactagtaaaatacttccaggaggtaagaatttttttttttttgagacagagtcttgctctgtccccaaggctggaatgcagtggcatgatcttggctcactgcaacctccacttcccaggttcaagcaattctcctgactcagtctccctagtagctgggattacaggcacacaccaccatgcccagctgatttttg

SEQ ID NO: 396803 - DNA, 594 bp, Homo sapiens
attacaggggagaatctcagaaataactaaaataattgaagatgtaatcaagaaacaaaagtacagtgtttgaatagagaccaactaaagacagctgggactggttcagtctacatataattgaaaggtaaatcactaggaaaaggaagaaatctctgggtttcaagatgaaatagaagtcatgagaattctataaatttaaattcaagttcactgaagagagctaggagtcagctactgtttgctgcagataatattcagtaaggagctaactgctaatgcactggcctggggaagtgtttaawgtcaaatagaaaccaacactagtaaaatacttccaggaggtaagaatttttttttttttgagacagagtcttgctctgtccccaaggctggaatgcagtggcatgatcttggctcactgcaacctccacttcccaggttcaagcaattctcctgactcagtctccctagtagctgggattacaggcacacaccaccatgcccagctgatttttgtagttttaatagagatgcggtttcaccatgttggccagggtggtctcaaattcctgacctcaggtgatccgcccg

SEQ ID NO: 396804 - DNA, 455 bp, Homo sapiens
agtgtttgaatagagaccaactaaagacagctgggactggttcagtctacatataattgaaaggtaaatcactaggaaaaggaagaaatctctgggtttcaagatgaaatagaagtcatgagaattctataaatttaaattcaagttcactgaagagagctaggagtcagctactgtttgctgcagataatattcagtaaggagctaactgctaatgcactggcctggggaagtgtttaatgtcaaatagaaaccaacactagtaaaatacttccaggaggtaagaatwtttttttttttgagacagagtcttgctctgtccccaaggctggaatgcagtggcatgatcttggctcactgcaacctccacttcccaggttcaagcaattctcctgactcagtctccctagtagctgggattacaggcacacaccaccatgcccagctgatttttg

SEQ ID NO: 396805 - DNA, 603 bp, Homo sapiens
gctaggagtcagctactgtttgctgcagataatattcagtaaggagctaactgctaatgcactggcctggggaagtgtttaatgtcaaatagaaaccaacactagtaaaatacttccaggaggtaagaatttttttttttttgagacagagtcttgctctgtccccaaggctggaatgcagtggcatgatcttggctcactgcaacctccacttcccaggttcaagcaattctcctgactcagyctccctagtagctgggattacaggcacacaccaccatgcccagctgatttttgtagttttaatagagatgcggtttcaccatgttggccagggtggtctcaaattcctgacctcaggtgatccgcccgccttggcctctcaaagagctgggattacaggcatgagccactgcaccttgctgctccttctttttttgtaatggacctgggagatccttaggaatgagggaaagactcatttctttgaatagggcagaatattaaagactagccagccttcaggcttatggtggttgctgctattctgttgaacgtaaaccatagcctttagaaaggagcaagtctttgtgggatacacag

SEQ ID NO: 396806 - DNA, 442 bp, Homo sapiens
cggctgatttttgtatttttagtagagtcggggtttcaccatgttkgccaggctcgtcttgaactctcgacctcaggtgatcctccccccttggcctctcaaaatactgggattacaggtgtgagccactggccctggctgctgctcctttttttgtaatggacctgggagatctttaggaatgagggaaatgatcgtttctttgaataaggcagaatactaaagaatagccagccctcaggctcatggtggttgctgctattctgttgaacgtgaaccatagcctttagaaaggagcaagtctttgtggaagacacaggatttgaagtgcaacaaaggggtggaaacccagctgaccatgataccttcaagtgagtttttccactgaatttgattattttctcatttggcacttctttctgggttttttaagcagcccaaa

SEQ ID NO: 396807 - DNA, 442 bp, Homo sapiens
cggctgatttttgtatttttagtagagtcggggtttcaccatgtttgccaggctsgtcttgaactctcgacctcaggtgatcctccccccttggcctctcaaaatactgggattacaggtgtgagccactggccctggctgctgctcctttttttgtaatggacctgggagatctttaggaatgagggaaatgatcgtttctttgaataaggcagaatactaaagaatagccagccctcaggctcatggtggttgctgctattctgttgaacgtgaaccatagcctttagaaaggagcaagtctttgtggaagacacaggatttgaagtgcaacaaaggggtggaaacccagctgaccatgataccttcaagtgagtttttccactgaatttgattattttctcatttggcacttctttctgggttttttaagcagcccaaa

SEQ ID NO: 396808 - DNA, 442 bp, Homo sapiens
cggctgatttttgtatttttagtagagtcggggtttcaccatgtttgccaggctcgtcttgaactctcgacctcaggtgatcctccccccttggcctctcaaaatactgggattacaggtgtgagccactggccctggctgctgctcctttttttgtaatggacctgggagatctttaggaatgagggaaatgatcgtttctttgaataaggcagaatactaaagamtagccagccctcaggctcatggtggttgctgctattctgttgaacgtgaaccatagcctttagaaaggagcaagtctttgtggaagacacaggatttgaagtgcaacaaaggggtggaaacccagctgaccatgataccttcaagtgagtttttccactgaatttgattattttctcatttggcacttctttctgggttttttaagcagcccaaa

SEQ ID NO: 396809 - DNA, 589 bp, Homo sapiens
gctcgtcttgaactctcgacctcaggtgatcctccccccttggcctctcaaaatactgggattacaggtgtgagccactggccctggctgctgctcctttttttgtaatggacctgggagatctttaggaatgagggaaatgatcgtttctttgaataaggcagaatactaaagaatagccagccctcaggctcatggtggttgctgctattctgttgaacgtgaaccatagcctttagaaaggagcaagtctttgtggaagacacaggatttgaagtgyaacaaaggggtggaaacccagctgaccatgataccttcaagtgagtttttccactgaatttgattattttctcatttggcacttctttctgggttttttaagcagcccaaaaactctaggtgattttacttttgtaattgtattctcttgggaatgctcattcctgattcctcatttcaccaaataggtgtgtaaccttcttgtttctgcccataataattctggagtctttaaacaaaacgactgtgacttttcatgatgagtagaagataggttttactcatgctacaatcaatattaattccttac

SEQ ID NO: 396810 - DNA, 442 bp, Homo sapiens
cggctgatttttgtatttttagtagagtcggggtttcaccatgtttgccaggctcgtcttgaactctcgacctcaggtgatcctccccccttggcctctcaaaatactgggattacaggtgtgagccactggccctggctgctgctcctttttttgtaatggacctgggagatctttaggaatgagggaaatgatcgtttctttgaataaggcagaatactaaagaatagccagccctcaggctcatggtggttgctgctattctgttgaacgtgaaccatagcctttagaaaggagcaagtctttgtggaagacacaggatttgaagtgcaacaaaggggtggaaaccsagctgaccatgataccttcaagtgagtttttccactgaatttgattattttctcatttggcacttctttctgggttttttaagcagcccaaa

SEQ ID NO: 396811 - DNA, 589 bp, Homo sapiens
gctcgtcttgaactctcgacctcaggtgatcctccccccttggcctctcaaaatactgggattacaggtgtgagccactggccctggctgctgctcctttttttgtaatggacctgggagatctttaggaatgagggaaatgatcgtttctttgaataaggcagaatactaaagaatagccagccctcaggctcatggtggttgctgctattctgttgaacgtgaaccatagcctttagaaaggagcaagtctttgtggaagacacaggatttgaagtgcaacaaaggggtggaaacccagctgaccatgataccttcaagtgagtttttccactgaatttgattattttctcatttggcacttctttctgggttttttaagcagcccaaaaactctaggtgattttacttttgtaattgtattctcttgggaatgctsattcctgattcctcatttcaccaaataggtgtgtaaccttcttgtttctgcccataataattctggagtctttaaacaaaacgactgtgacttttcatgatgagtagaagataggttttactcatgctacaatcaatattaattccttac

SEQ ID NO: 396812 - DNA, 567 bp, Homo sapiens
ccaaaaactctaggtgattttacttttgtaattgtattctcttgggaatgctcattcctgattcctcatttcaccaaataggtgtgtaaccttcttgtttctgcccataataattctggagtctttaaacaaaacgactgtgacttttcatgatgagtagaagataggttttactcatgctacaatcaatattaattccttacagttcaaagacactgaggccctgwctaataatatagaagttgaacttggacttgggagatgactcctgcctctcgtactctctgtggctctgctttctattattttactcataagcttgttttgtctccttgctgagaattgtcaaacatgaaatgtaatttcaggttatagtgaagaaagatgacataggcagaagaaattggcaatcatttggcctgtacatgttgctttttgttttttttctggacttaagatatagaccacaccttgacatttctggcctttgagtctttcacaactgttattataatgcattagctcttctagaagttagaagtgaatttggattaagtctttcataag

SEQ ID NO: 396813 - DNA, 567 bp, Homo sapiens
ccaaaaactctaggtgattttacttttgtaattgtattctcttgggaatgctcattcctgattcctcatttcaccaaataggtgtgtaaccttcttgtttctgcccataataattctggagtctttaaacaaaacgactgtgacttttcatgatgagtagaagataggttttactcatgctacaatcaatattaattccttacagttcaaagacactgaggccctgactwataatatagaagttgaacttggacttgggagatgactcctgcctctcgtactctctgtggctctgctttctattattttactcataagcttgttttgtctccttgctgagaattgtcaaacatgaaatgtaatttcaggttatagtgaagaaagatgacataggcagaagaaattggcaatcatttggcctgtacatgttgctttttgttttttttctggacttaagatatagaccacaccttgacatttctggcctttgagtctttcacaactgttattataatgcattagctcttctagaagttagaagtgaatttggattaagtctttcataag

SEQ ID NO: 396814 - DNA, 644 bp, Homo sapiens
gagtctttaaacaaaacgactgtgacttttcatgatgagtagaagataggttttactcatgctacaatcaatattaattccttacagttcaaagacactgaggccctgactaataatatagaagttgaacttggacttgggagatgactcctgcctctcgtactctctgtggctctgctttctattattttactcataagcttgttttgtctccttgctgagaattgtcaaacatgaaatgtaatttcaggttatagtgaagaaagatgacataggcagaagaaattggcaatcatttggcctgtacatgttgctttttgttttttttctggacttaagatatagaccacaccttgayatttctggcctttgagtctttcacaactgttattataatgcattagctcttctagaagttagaagtgaatttggattaagtctttcataaggtggctaaatgaatttatatggctcatcacaattcactagattggttaagcaggaaatttacagagatttttttctttgctgtaaatgtttttctaaattgaaaaacttctaatactgtcttctggagtagtcctagaaataagtgcaagtgtttttggcaggaggccacataaacatttctgcttctctgtgcc

SEQ ID NO: 396815 - DNA, 527 bp, Homo sapiens
tgcttctctgtgccttatgggtagcattgatataaattgttaaaaataatgattgtagataatgtatcagagtttgggctcagccgcggtagctgctgttgacccagagggaccactgggatcctcacatctcagggcagcacatcgtttgcagcaatggttgcttctatgcaaccttttatgaaattaggtgaggcccttgcttagaattttttaaaagcttaatatgagtttatatctctttaaatatcagtttctaatatttttttaaaggcctatgtttacaacaaatttgggagatacctatatgctctactaacyagtgttcttttgtggtgctttagaaattctggcttacttgtatttttgctggccttctaatgatttcactcatcaatcagaagatatttgtgtccacctccctgcttcctctccggtgatcttgtctattcttggccattttagagttgacttagcagccttcacaaaactgattggaatttccactgggattaaattgataggtc

SEQ ID NO: 396816 - DNA, 468 bp, Homo sapiens
attttttaaaagcttaatatgagtttatatctctttaaatatcagtttctaatatttttttaaaggcctatgtttacaacaaatttgggagatacctatatgctctactaactagtgttcttttgtggtgctttagaaattctggcttacttgtatttttgctggccttctaatgatttcactcatcaatcagaagatatttgtgtccacctccctgcttcctctccggtgatcttgtctattcttggccattttagagttgacttarcagccttcacaaaactgattggaatttccactgggattaaattgataggtcatttttgggagacctttgcaatattgaactttccaatccgtgaactttacttatctgcccatttattatgtttgtttttggtagattacaaaattatatgatcactccaaaaattaccttgccctttatagtaaaaccttccattgtaa

SEQ ID NO: 396817 - DNA, 597 bp, Homo sapiens
atttttgctggccttctaatgatttcactcatcaatcagaagatatttgtgtccacctccctgcttcctctccggtgatcttgtctattcttggccattttagagttgacttagcagccttcacaaaactgattggaatttccactgggattaaattgataggtcatttttgggagacctttgcaatattgaactttccaatccgtgaactttacttatctgcccatttattatgtttgtttttggtagattacaaaattatatgatcactccaaaaattaccttgccctttatwgtaaaaccttccattgtaaacttctggcaatcactgatctgtgttcctctagcattgcttttttttcagaattttatacaaatggaatcgttcaggatgtagccttttgagtctggctactttcatgtactgcatcacagttattcctttttattgccaaatagtaatccattgtataaatactacatggtttgcttatttgtttgtcattggaggaatatggactattttcactttttggtaaattataagtggattggaattcacaaggtgctttttgtctgagcataggttttcatttc

SEQ ID NO: 396818 - DNA, 613 bp, Homo sapiens
ataaatactacatggtttgcttatttgtttgtcattggaggaatatggactattttcactttttggtaaaytataagtggattggaattcacaaggtgctttttgtctgagcataggttttcatttcacttgtgcaaatgcctaagggtaggattgccgagtcacatggtccgtgtacgtttgactttatcagaacctgccaaattgtcttccaaagtgctgtgccacttctgtttctttaataaatacaggggtattcaagctgtctgtttcttcttgagttttggtagtctgtctttcaaggaattgacctatttcacctaatttgtagaatttagaagcatatagttgttttgtttttgtagtatccattatagccttctagtgtctacaggatttgtaataatattcctttcatttctggtattggcaatttgtgttttctcttcttcctttgtcagtctgctagaggcttcctcatttgattgatttccacctcccaccacccctgcaaagaaccaactttggatttcgttgaatttttttcctttactgtttttgtttaaatattactgatttagtctgtttttcttatgcctgatttgagtttatt

SEQ ID NO: 396819 - DNA, 641 bp, Homo sapiens
cacctccctgcttcctctccggtgatcttgtctattcttggccattttagagttgacttagcagccttcacaaaactgattggaatttccactgggattaaattgataggtcatttttgggagacctttgcaatattgaactttccaatccgtgaactttacttatctgcccatttattatgtttgtttttggtagattacaaaattatatgatcactccaaaaattaccttgccctttatagtaaaaccttccattgtaaacttctggcaatcactgatctgtgttcctctagcattgcttttttttcagaattttatacaaatggaatcgttcaggatgtagccttttgagtctggctactttcatgtactgcatcacagttattcctttttattgccaaatagtaatccattgtataaatactacatggtttgcttatttgtttgtcattggaggaatatggactattttcactttttggtaaattataagtggattggaattcacaargtgctttttgtctgagcataggttttcatttcacttgtgcaaatgcctaagggtaggattgccgagtcacatggtccgtgtacgtttgactttatcagaacctgccaaattgtcttccaaagtgctgtg

SEQ ID NO: 396820 - DNA, 613 bp, Homo sapiens
ataaatactacatggtttgcttatttgtttgtcattggaggaatatggactattttcactttttggtaaattataagtggattggaattcacaaggtgctttttgtctgagcataggttttcatttcacttgtgcaaatgcctaagggtaggattgccgagtcacatggtccgtgtacgtttgactttatcagaacctgccaaattgtcttccaaagtgctgtgccacttctgtttctttaataaatacaggggtattcaagctgtctgtttcttcttgagttttggtagtctgtctttcaaggaattgacctatttcacctaatttgtagaatttagaagcatatagttgttttgtttttgtagtatccattatagccttctagtgtctacaggatttgtaataatattcctttcatttctggtattggcaatttgtgttttctcttcttcctttktcagtctgctagaggcttcctcatttgattgatttccacctcccaccacccctgcaaagaaccaactttggatttcgttgaatttttttcctttactgtttttgtttaaatattactgatttagtctgtttttcttatgcctgatttgagtttatt

SEQ ID NO: 396821 - DNA, 506 bp, Homo sapiens
ttctggtattggcaatttgtgttttctcttcttcctttgtcagtctgctagaggcttcctcatttgattgatttccacctcccaccacccctgcaaagaaccaactttggatttcgttgaatttttttcctttactgtttttgtttaaatattactgatttagtctgtttttcttatgcctgatttgagtttatttggttctttttttacttaaagtaaatgcttacattattgatttgatgcttcatttctcataatttagtgctataaattgmcctgtaagcacgtattttgataagatgatgtcatatttattaagttcaaactgttttccaatttgtcttaagatactctctttgacctatgggccatttagaagtacaccatttaacttctcatagttgggaatgttctagaaatgttctagattcctagtttaattctgtcatcagagaaaataattcactgaattttaattgtttaactttagggtttgttttatgact

SEQ ID NO: 396822 - DNA, 506 bp, Homo sapiens
ttctggtattggcaatttgtgttttctcttcttcctttgtcagtctgctagaggcttcctcatttgattgatttccacctcccaccacccctgcaaagaaccaactttggatttcgttgaatttttttcctttactgtttttgtttaaatattactgatttagtctgtttttcttatgcctgatttgagtttatttggttctttttttacttaaagtaaatgcttacattattgatttgatgcttcatttctcataatttagtgctataaattgacctgtaagcacrtattttgataagatgatgtcatatttattaagttcaaactgttttccaatttgtcttaagatactctctttgacctatgggccatttagaagtacaccatttaacttctcatagttgggaatgttctagaaatgttctagattcctagtttaattctgtcatcagagaaaataattcactgaattttaattgtttaactttagggtttgttttatgact

SEQ ID NO: 396823 - DNA, 545 bp, Homo sapiens
aaagagaatgccaggtatgcgatgataatcagcaacggttgttcacacaatatatcaaatcagtatttgaattagcttttgaattacgaggacaaatggatcaagtcttgactcattagtaggtaaatcttattaggctgaaatgtgttttcgcctgtttttccacaaggagattgcagatttgcaaacctcagctgctctcattttatgctctcaccaatccaaaagctgaagttcatcaatcagtgtgtctaagtgttcactagttatataccattttgtagtttaggctatctttccaacttcctaaatcatcaccttcatttgaccttgtttttttccactatcacttctttactgaccatataaagaatacaagtaagttcttattttcttattgttcattttagtctaatttcatcaaaatatcataattctttaatttcattttaatttcaaagattaaaagaaacctacatagaaataagtttaagattgtatttgcgttattttgrcatcaatttgctatcctccctcatacacat

SEQ ID NO: 396824 - DNA, 545 bp, Homo sapiens
aaagagaatgccaggtatgcgatgataatcagcaacggttgttcacacaatatatcaaatcagtatttgaattagcttttgaattacgaggacaaatggatcaagtcttgactcattagtaggtaaatcttattaggctgaaatgtgttttcgcctgtttttccacaaggagattgcagatttgcaaacctcagctgctctcattttatgctctcaccaatccaaaagctgaagttcatcaatcagtgtgtctaagtgttcactagttatataccattttgtagtttaggctatctttccaacttcctaaatcatcaccttcatttgaccttgtttttttccactatcacttctttactgaccatataaagaatacaagtaagttcttattttcttattgttcattttagtctaatttcatcaaaatatcataattctttaatttcattttaatttcaaagattaaaagaaacctacatagaaataagtttaagattgtatttgcgttattttgasatcaatttgctatcctccctcatacacat

SEQ ID NO: 396825 - DNA, 506 bp, Homo sapiens
ttctggtattggcaatttgtgttttctcttcttcctttgtcagtctgctagaggcttcctcatttgattgatttccacctcccaccacccctgcaaagaaccaactttggatttcgttgaatttttttcctttactgtttttgtttaaatattactgatttagtctgtttttcttatgcctgatttgagtttatttggttctttttttacttaaagtaaatgcttacattattgatttgatgcttcatttctcataatttagtgctataaattgacctgtaagcacgtattttgataagatgatgtcatatttattaagttcaaactgttttccaatttgtcttaagatactctctttgacctatgggccatttagaagtacaccatttaacttctcatakttgggaatgttctagaaatgttctagattcctagtttaattctgtcatcagagaaaataattcactgaattttaattgtttaactttagggtttgttttatgact

SEQ ID NO: 396826 - DNA, 593 bp, Homo sapiens
tagtttaattctgtcatcagagaaaataattcactgaattttaattgtttaactttagggtttgttttatgacycagaatatgatctctcaccaccgccatccagataattcttcaggttttgacgtttcccaacctgtctgctggttacttttcagagtacttaggtcattgttatttatattttgtccagagtttcaaattgtgatcagtggaaatgacaggccatagcatgcatacgccatcctggccagcatcacaggtggtcagtatatctttctgttgttgttttgagacagggtctcactctgttgcccaggctggagcacagtggcatgatcagggatcactgcattctcaacctgctaggctcaagtgatcctcccacctcagcctcctgaatagctgggtctataggtgtgctgccatgcccagctaatttttgtattttttataaagactggattttgccttgttgcccaggctggtctcaaactcctgagctcaggccatcctctcactcgggcctcccaaactactaggattataggtatgaccaccacacctggctagtacatcttaaaaataatttct

SEQ ID NO: 396827 - DNA, 516 bp, Homo sapiens
agaaaataattcactgaattttaattgtttaactttagggtttgttttatgactcagaatatgatctctcaccaccgccatccagataattcttcaggttttgacgtttcccaacctgtctgctggttacttttcagagtacttaggtcattrttatttatattttgtccagagtttcaaattgtgatcagtggaaatgacaggccatagcatgcatacgccatcctggccagcatcacaggtggtcagtatatctttctgttgttgttttgagacagggtctcactctgttgcccaggctggagcacagtggcatgatcagggatcactgcattctcaacctgctaggctcaagtgatcctcccacctcagcctcctgaatagctgggtctataggtgtgctgccatgcccagctaatttttgtattttttataaagactggattttgccttgttgcccaggctggtctcaaactcctgagctcaggccatcctctcactcgggcctcccaaact

SEQ ID NO: 396828 - DNA, 593 bp, Homo sapiens
tagtttaattctgtcatcagagaaaataattcactgaattttaattgtttaactttagggtttgttttatgactcagaatatgatctctcaccaccgccatccagataattcttcaggttttgacgtttcccaacctgtctgctggttacttttcagagtacttaggtcattgttatttatattttgtccagagtttcaaattgtgatcagtggaaatgacaggccrtagcatgcatacgccatcctggccagcatcacaggtggtcagtatatctttctgttgttgttttgagacagggtctcactctgttgcccaggctggagcacagtggcatgatcagggatcactgcattctcaacctgctaggctcaagtgatcctcccacctcagcctcctgaatagctgggtctataggtgtgctgccatgcccagctaatttttgtattttttataaagactggattttgccttgttgcccaggctggtctcaaactcctgagctcaggccatcctctcactcgggcctcccaaactactaggattataggtatgaccaccacacctggctagtacatcttaaaaataatttct

SEQ ID NO: 396829 - DNA, 526 bp, Homo sapiens
tttaactttagggtttgttttatgactcagaatatgatctctcaccaccgccatccagataattcttcaggttttgacgtttcccaacctgtctgctggttacttttcagagtacttaggtcattgttatttatattttgtccagagtttcaaattgtgatcagtggaaatgacaggccatagcatgcatacgccatcctggccagcatcacaggtggtcagtatatctttctgttgttgttttgagacagggtctcactctgttgcccaggctggagcacagtggcatgatcagggatcactgcattctcaacctgctaggctcaagtgatcctcccacctcagcctcctgaatagctgggtctataggtgtgctgccatgcccagctaatttttgtattttttataaagackggattttgccttgttgcccaggctggtctcaaactcctgagctcaggccatcctctcactcgggcctcccaaactactaggattataggtatgaccaccacacctggctagt

SEQ ID NO: 396830 - DNA, 568 bp, Homo sapiens
tattaatagttctgtcttctagccttactgtggtaagttgaaggaagttttcatttttgtttttgttggttttagggtttttgytggtttttgttttctttaccagagtgagggtacttttttctctatctgatactttctgaaactcttaaggagttcggtcaaaagtggaaaacaatcaaatttctatttttggtgttttcctctttgttctccaaacttgtcatggtctacattcaatgtgttgcactcacatggaatgtctgtctctcagacctttactcgtccacagtctaaaggagactggccaggcgcggtagctcacgcctgtaatcccacactttggaaggccgaggcgggcggattacgaggtcaggagatcgagaccatcctagctaacatggtgaaaccccgtctctactaaaaatacaaaaagttagctgggcatggtggcgggcacctgtagccccagctactcgggaggctgagccaggagaatggcgtgaacccgggaggcggagcttgcagtgagcagagattgggccactgtactccaacctgggtgacc

SEQ ID NO: 396831 - DNA, 568 bp, Homo sapiens
tattaatagttctgtcttctagccttactgtggtaagttgaaggaagttttcatttttgtttttgttggttttagggtttttgctggtttttgttttctttaccagagtgagggtacttttttctctatctgatactttctgaaactcttaaggagttcggtcaaaagtggaaaacaatcaratttctatttttggtgttttcctctttgttctccaaacttgtcatggtctacattcaatgtgttgcactcacatggaatgtctgtctctcagacctttactcgtccacagtctaaaggagactggccaggcgcggtagctcacgcctgtaatcccacactttggaaggccgaggcgggcggattacgaggtcaggagatcgagaccatcctagctaacatggtgaaaccccgtctctactaaaaatacaaaaagttagctgggcatggtggcgggcacctgtagccccagctactcgggaggctgagccaggagaatggcgtgaacccgggaggcggagcttgcagtgagcagagattgggccactgtactccaacctgggtgacc

SEQ ID NO: 396832 - DNA, 568 bp, Homo sapiens
tattaatagttctgtcttctagccttactgtggtaagttgaaggaagttttcatttttgtttttgttggttttagggtttttgctggtttttgttttctttaccagagtgagggtacttttttctctatctgatactttctgaaactcttaaggagttcggtcaaaagtggaaaacaatcaaatttctatttttggtgttttcctctttgttctccaaacttgtcatggtctacattcaatktgttgcactcacatggaatgtctgtctctcagacctttactcgtccacagtctaaaggagactggccaggcgcggtagctcacgcctgtaatcccacactttggaaggccgaggcgggcggattacgaggtcaggagatcgagaccatcctagctaacatggtgaaaccccgtctctactaaaaatacaaaaagttagctgggcatggtggcgggcacctgtagccccagctactcgggaggctgagccaggagaatggcgtgaacccgggaggcggagcttgcagtgagcagagattgggccactgtactccaacctgggtgacc

SEQ ID NO: 396833 - DNA, 543 bp, Homo sapiens
gcgcggtagctcacgcctgtaatcccacactttggaaggccgaggcgggcggattacgaggtcaggagatcgagaccatcctagcwaacatggtgaaaccccgtctctactaaaaatacaaaaagttagctgggcatggtggcgggcacctgtagccccagctactcgggaggctgagccaggagaatggcgtgaacccgggaggcggagcttgcagtgagcagagattgggccactgtactccaacctgggtgaccgagcaagactccgtctcaaaaaaaaataaataaaagttaaataaataaataaaggggctgcaggagcatgctgccccagtttctggaaagtctttcaggattaggctaatgcccactaaatgcacttctctctcctactgggggtgctacacggtttagcatttagctctgtaggatgctttcgtatagaattttatctcatatggatgggtcttgtacctctgactagattaaatatgtttggagctaagtgcatgacttacgcttcttctgtgttgcttttagc

SEQ ID NO: 396834 - DNA, 543 bp, Homo sapiens
gcgcggtagctcacgcctgtaatcccacactttggaaggccgaggcgggcggattacgaggtcaggagatcgagaccatcctagctaacatggtgaaaccccgtctctactaaaaatacaaaaagttagctgggcatggtggcgggcacctgtagccccagctactcgggaggctgagccaggagaatggcgtgaacccgggaggcggagcttgcagtgagcagagattgggccactgtactccaacctgggtgaccgagcaagactccrtctcaaaaaaaaataaataaaagttaaataaataaataaaggggctgcaggagcatgctgccccagtttctggaaagtctttcaggattaggctaatgcccactaaatgcacttctctctcctactgggggtgctacacggtttagcatttagctctgtaggatgctttcgtatagaattttatctcatatggatgggtcttgtacctctgactagattaaatatgtttggagctaagtgcatgacttacgcttcttctgtgttgcttttagc

SEQ ID NO: 396835 - DNA, 543 bp, Homo sapiens
gcgcggtagctcacgcctgtaatcccacactttggaaggccgaggcgggcggattacgaggtcaggagatcgagaccatcctagctaacatggtgaaaccccgtctctactaaaaatacaaaaagttagctgggcatggtggcgggcacctgtagccccagctactcgggaggctgagccaggagaatggcgtgaacccgggaggcggagcttgcagtgagcagagattgggccactgtactccaacctgggtgaccgagcaagactccgtctcaaaaaaaaataaataaaagttaaataaataaataaaggggctgcaggagcatgctgccccagtttctggaaagtctttcaggattaggctaatgcccactaaatgcacttctctctcctactgggrgtgctacacggtttagcatttagctctgtaggatgctttcgtatagaattttatctcatatggatgggtcttgtacctctgactagattaaatatgtttggagctaagtgcatgacttacgcttcttctgtgttgcttttagc

SEQ ID NO: 396836 - DNA, 602 bp, Homo sapiens
taaagcaaacagttttgcacatcactttggaaaatttcactaaaaataaaaaccttgagaatataataagtaaataaaatttaaaaccacaaaacattactgtgtttgtgggggggggggttctgatttacagaataaccacatagtaattataattattataacgtccagttttcaaaaaaagttacaagacatacaaagaattggaaagtatggctcattcaaaggaacaaaacaaactgacagaaagtatctctaaggaaacccagacttcaaacttaytacacaaagactttaaaactactctcttcattatactcaaatgtcaaaaggaaaacataaacaaagaaatcaaggaatcagaaaaaatattaaaaagtaggaatatcaacaaagagataacagaaattctggagtggaaaactacaatgataataattcaaaaatcaccagagggatttcagagtatatttgcacacacagaagaagtcatgaacttgaagataagaaaatggaaaatactgactctgagaaacagaaagaataacaaataaaaaatgagcagagactaaggaatctgtgggacatcatcaaatagacca

SEQ ID NO: 396837 - DNA, 602 bp, Homo sapiens
taaagcaaacagttttgcacatcactttggaaaatttcactaaaaataaaaaccttgagaatataataagtaaataaaatttaaaaccacaaaacattactgtgtttgtgggggggggggttctgatttacagaataaccacatagtaattataattattataacgtccagttttcaaaaaaagttacaagacatacaaagaattggaaagtatggctcattcaaaggaacaaaacaaactgacagaaagtatctctaaggaaacccagacttcaaacttattacacaaagactttaaaactactctcttcattatactcaaatgtcaaaaggaaaacataaacaaagaaatcaaggaatcagaaaaaatattaaaaagtaggaatatcaacaaagagataacagaaattctggagtggaaaactacartgataataattcaaaaatcaccagagggatttcagagtatatttgcacacacagaagaagtcatgaacttgaagataagaaaatggaaaatactgactctgagaaacagaaagaataacaaataaaaaatgagcagagactaaggaatctgtgggacatcatcaaatagacca

SEQ ID NO: 396838 - DNA, 390 bp, Homo sapiens
ttgacattttgggctagctaattccttgtcacgggcagtatgtcctgtgtgtaggatgttaagcagcatttctggcctccacccactagatatagtagcacacccgcgcccctcccctcctccctgcccccgtgacaaccaaaaatgtctttagacattgccagatgtcccttgggcagcaaaaattgctccctctccccagttaagagccatagttctagagtacagaatyagtaccactaaataaaagttattggtgtgtttagaacagtgcctagcacatagctggtactcaaatatttgttgaataaatgagtagtcagattttcattgtgaattaaaaacagaacaaaacttgatgtctgacctttcaagttgcttttacaaaag

SEQ ID NO: 396839 - DNA, 365 bp, Homo sapiens
attgacattttgggctagctaattccttgtcacgggcagtatgtcctgtgtgtaggatgttaagcagcatttctggcctccacccactagatatagtagcacacccgcgcccctcccctcctccctgcccccgtgacaaccaaaaatgtctttagacattgccagatgtcccttgggcagcaaaaattgctccctctccccagttaagagccatagttctagagtacagaattagtaccactaaataaawgttattggtgtgtttagaacagtgcctagcacatagctggtactcaaatatttgttgaataaatgagtagtcagattttcattgtgaattaaaaacagaacaaaacttgatgtct

SEQ ID NO: 396840 - DNA, 365 bp, Homo sapiens
attgacattttgggctagctaattccttgtcacgggcagtatgtcctgtgtgtaggatgttaagcagcatttctggcctccacccactagatatagtagcacacccgcgcccctcccctcctccctgcccccgtgacaaccaaaaatgtctttagacattgccagatgtcccttgggcagcaaaaattgctccctctccccagttaagagccatagttctagagtacagaattagtaccactaaataaaagttattggygtgtttagaacagtgcctagcacatagctggtactcaaatatttgttgaataaatgagtagtcagattttcattgtgaattaaaaacagaacaaaacttgatgtct

SEQ ID NO: 396841 - DNA, 561 bp, Homo sapiens
tatactcccctcaatccaagacaaaaagaaaaagcaaagaaaatgcagtgtattttgagaagcattcacttattcaatagccactaaacaatttgctatgtgggattgaagctctgcggaggggccaactagagatcacagatttggtagataggagtagcaagtcagatgctaagggctgaattcatctggcagagccttttatttggcccagcatggtggggtttgttgtggagtttttttcttaggtataacattaaatgtctttaggcatttacagtttgccacaggccctatcatttcctattgcttgcactaatccacttcacrtatttaattacctggctgccccctgttgtaaagggtagttaaaatcatgacagtatgtcagataacccaaaggaaaaagaaaaggccatagagtcctgcaagtactttatataaataggcagtggaagggaactctggggaaagaaaatcagaaggaaaggtagaagagataagaggagaaatcaaaaaaggactggcaagtcattaaatgaaattaatatggatcaatgc

SEQ ID NO: 396842 - DNA, 449 bp, Homo sapiens
ggcatgtcacccaaatctgaaatgaaatgcaaggtagccaatgaaatatatggcagccacgctggaaattttgagaaatattttccttccttgcaagacagagaggctgaagaacaaagactttttccactctatttccttgctgaatgtaaaactgttatgtgcagagataatttctggattatcagcagctatgtgatcagaaggagcaatatcrccaacactgcagacagtggggcagaaacagagaatcgtgtcctcggtaatgttactgagccagtcactgaaacaatatggagactgcctaactccagacttcctgttatactaacaagaactatccttgtggcttaaattattgctagtcaaatgttgtttctttcactaaaacattccaaccaaatatcatacactgtggcaaaaacatttattgccttccaacaccattc

SEQ ID NO: 396843 - DNA, 449 bp, Homo sapiens
ggcatgtcacccaaatctgaaatgaaatgcaaggtagccaatgaaatatatggcagccacgctggaaattttgagaaatattttccttccttgcaagacagagaggctgaagaacaaagactttttccactctatttccttgctgaatgtaaaactgttatgtgcagagataatttctggattatcagcagctatgtgatcagaaggagcaatatcgccaacactgcagacagtggggcagaaacagagaatcgtgtcctcrgtaatgttactgagccagtcactgaaacaatatggagactgcctaactccagacttcctgttatactaacaagaactatccttgtggcttaaattattgctagtcaaatgttgtttctttcactaaaacattccaaccaaatatcatacactgtggcaaaaacatttattgccttccaacaccattc

SEQ ID NO: 396844 - DNA, 534 bp, Homo sapiens
ggagctctaagttctatgactacacagcagatagtatagaaataataatagttgatacctcttttggctgtaagttgaagaggaaactaaaaaagggttgtaaattttaaaactttgattttaccatgagtgcttcttattataattattaggttcttgcagtactggagttgattacataaaactgattacttgggtttaattaattaattccacagcaagagataataagaattatccccactcagataaatgaaagtgggtaaagaaaatagggccaaagataaaaaataaattatcaattgtaagagagattttttgatgaaccaacttcataaataaagctgctattctttgacttgatttgaacctggggaagctaatggtagaaaggatctgcgtcattgtctgstgtgaaaaatggacaaatttggatttgttttttaatgtgcttgtttaagagtctggtcatgatttgttttgggtggaattttgtgacttgaatagagttgatggttattgtacttggtgtaa

SEQ ID NO: 396845 - DNA, 526 bp, Homo sapiens
ctggtcatgatttgttttgggtggaattttgtgacttgaatagagttgatggttattgtacttggtgtaattataaattgaacaattccttcttatagggaatacaagaaagtgtttagagtatttgttttgatgtgtacaacttgttcctctctttccagaattaaagaccttactctycctgcaaaaacttttaatactctgtactaatctctactattgtctttcttcctctcttattatattgctccagctgtgatgtctctcatcctgtcacttctttggcactgagatacaatctttctcttagaataatttgttagccttcttataaattgtgtacctgaactcatatatgattggagcctcttaatatgtaaagcacttgaaatggaatgaccctgggtaagagttcccatcatgtccccttactgcatgtggaggtcttatttttaagctctttgcagtctcttttattaggttccctgggtatagtgaatgcttaataaataatgatgaaggtttt

SEQ ID NO: 396846 - DNA, 614 bp, Homo sapiens
ccatgcacaaacatgcacattaataaatttcatatgcttattttcttatgaatcttccttttgtcagttgatttttaaagaacttcagagggcaaaggggaactttttctttggcccctacacaagtacaggaccttctacacctcaaaatttccttttttaaatctcagattggcagcagatttcatcttttgtgttctcatatcatctcagtctggataagcaagcgttcaatcaccataatagaatttttactctgaagaaaggggcacattatgagccatcaaaaaataataataaatgcmattggcaaaaaataaaatatttcccagagttcatttcaaatagtcagaaaagagtggattaaactaggaatttagcctaaatgttgcaactgaggttattttctatgcaacactgtgtcttctaggttcaccaaggctgaattgttaaaactccttcatatactttcattcattttctaacactttgcagataaatgtacttattttactttttgtgaaatacggaggatcaaaatgacttaaacaagaactctcacacatcatttatcatcctcaatttcctcatttataaaataatatcaacaataa

SEQ ID NO: 396847 - DNA, 614 bp, Homo sapiens
ccatgcacaaacatgcacattaataaatttcatatgcttattttcttatgaatcttccttttgtcagttgatttttaaagaacttcagagggcaaaggggaactttttctttggcccctacacaagtacaggaccttctacacctcaaaatttccttttttaaatctcagattggcagcagatttcatcttttgtgttctcatatcatctcagtctggataagcaagcgttcaatcaccataatagaatttttactctgaagaaaggggcacattatgagccatcaaaaaataataataaatgccattggcaaaaaataaaatatttcccagagttcatttcaaatagtcagaaaagagtggattaaactaggaatttagcctaaatgttgcaactgaggttattttctatgcaacactgtgtcttctaggttcaccaaggctgaattgttaaaactccttcatatactttcattcattttctaacactttgcagataaatktacttattttactttttgtgaaatacggaggatcaaaatgacttaaacaagaactctcacacatcatttatcatcctcaatttcctcatttataaaataatatcaacaataa

SEQ ID NO: 396848 - DNA, 469 bp, Homo sapiens
aattaacagattaaaagaaaaaaatcatgatgaccttaatataagggaaaatacacttagtaaaagctcaacacttattcatggaaaagcatcttttaaattataaatagagaagatctttcttaacctgataatggttatcttgggcatatatacagtgaagcttcagaagcactttcattaaaggcagaaatatactgatttcattgcttctatactttgctacctctacttaaccttgtgtcaaatgccccagcctatacaagacaatacaaatgaatcaaagttaggattaagagaaaaaataaattaaaatatcaatatgcatatgctatatgattgccaataccccaacaagatctacaaatgaattgcaagcatgttcttacacaacacaaatatttaaaacacacawgcacatatatatatgtttacttatttatgaatttacaatttatgagaagtgttt

SEQ ID NO: 396849 - DNA, 430 bp, Homo sapiens
gccccttttcttaaaccagaagctgtgraaatagacatcttaggaaaaccaaccagtagaaatctcataacttgcactaaattaaacattatttcttaaaaatagtgaaaagacatgccatacattgttagaagatagctatgagtcatgtaaacaaatacgagatttaataatataaataatttatgcaagtgataagaaaaagacagtagcccaacagaaaaatgggcaaagtttatgaaagacaatttattttgaaaatccaaatggccaaataaacataataaaagacatttaactccagtggtagtcaggtaggcaaaacatggaatagggactgagaaataatctcacattgatgtgagcataatttggcactgtcactttagaaaacagtttgacagttgtcaagttgaagacccagcaattt

SEQ ID NO: 396850 - DNA, 554 bp, Homo sapiens
tggctttgcagggtacagcctcctcccagctgttttcatgtgctggcattgagtgtctgcagcttttccacgtgaatggtgcaagctgctggtagatctaccattctggggtctggaggacggtggccctcttctcacagctccactaggcagtacgccagtagggactctacgtgggggctcccaccccacatttcccttctgcrctgccctagcagaggttcttcatgagcaccctgccctggcagcaaatttctgcctggggcatccaggtgtttctatacatcttctgaaatctaggcggaggttcccaaaccccaattcttgacttctgtgcactcacaggctcaacaccatgtagaagctgccaagtgttggggcttgtaccctctgaagctacagcccaagctctacattggctcctatcagccatggctggagtggctgggatgcagggcatcaagtctcaagactgcacacagcatggggacccagggcccaacccatgaaaccattttctcttaggcctctgggcctgtaatgggaggggctgc

SEQ ID NO: 396851 - DNA, 554 bp, Homo sapiens
tggctttgcagggtacagcctcctcccagctgttttcatgtgctggcattgagtgtctgcagcttttccacgtgaatggtgcaagctgctggtagatctaccattctggggtctggaggacggtggccctcttctcacagctccactaggcagtacgccagtagggactctacgtgggggctcccaccccacatttcccttctgcgctgccctagcagaggttcttcatgagcaccctgccctggcagcaaatttctgcctggggcatccaggtgtttctatacatcttctgaaatctaggcggaggttcccaaaccccaattcttgacttctgtgcactcacaggctcaacaccatgtagaagctgccaagtgttggggcttktaccctctgaagctacagcccaagctctacattggctcctatcagccatggctggagtggctgggatgcagggcatcaagtctcaagactgcacacagcatggggacccagggcccaacccatgaaaccattttctcttaggcctctgggcctgtaatgggaggggctgc

SEQ ID NO: 396852 - DNA, 554 bp, Homo sapiens
tggctttgcagggtacagcctcctcccagctgttttcatgtgctggcattgagtgtctgcagcttttccacgtgaatggtgcaagctgctggtagatctaccattctggggtctggaggacggtggccctcttctcacagctccactaggcagtacgccagtagggactctacgtgggggctcccaccccacatttcccttctgcgctgccctagcagaggttcttcatgagcaccctgccctggcagcaaatttctgcctggggcatccaggtgtttctatacatcttctgaaatctaggcggaggttcccaaaccccaattcttgacttctgtgcactcacaggctcaacaccatgtagaagctgccaagtgttggggcttgtaccctctgaagctacagcccaagctctacattggctcctatcagccatggctggagtggctgggatgyagggcatcaagtctcaagactgcacacagcatggggacccagggcccaacccatgaaaccattttctcttaggcctctgggcctgtaatgggaggggctgc

SEQ ID NO: 396853 - DNA, 554 bp, Homo sapiens
tggctttgcagggtacagcctcctcccagctgttttcatgtgctggcattgagtgtctgcagcttttccacgtgaatggtgcaagctgctggtagatctaccattctggggtctggaggacggtggccctcttctcacagctccactaggcagtacgccagtagggactctacgtgggggctcccaccccacatttcccttctgcgctgccctagcagaggttcttcatgagcaccctgccctggcagcaaatttctgcctggggcatccaggtgtttctatacatcttctgaaatctaggcggaggttcccaaaccccaattcttgacttctgtgcactcacaggctcaacaccatgtagaagctgccaagtgttggggcttgtaccctctgaagctacagcccaagctctacattggctcctatcagccatggctggagtggctgggatgcagggcatcaagtctcaagactgcayacagcatggggacccagggcccaacccatgaaaccattttctcttaggcctctgggcctgtaatgggaggggctgc

SEQ ID NO: 396854 - DNA, 459 bp, Homo sapiens
cactggggaagaagatgtagacagaaatctcagggattatgaaatactagctttaaactcagacagtccccaaaggcactgtccactgctgttaaaaatcagtttaaaaaatttgagttatgaccagagaccacttcgagtggatcttacagaactcttatcccatctgtttcagtaacaaactgtcccaaaacagtggttcgctacagtgatattagttgtgctcatacatttgccacttgggcaggacttggcagggaaagctcatctctgctctatttaacattaactggggtgcctcaaaggygaggattagaatcatctccaagattatttactcacatgtctggccattgatgctgctgttggcaggaagcttactcagccagagctgttagccagggcacctaaatgtggccactggatgtagactgggcttcctcacaaaatggtggttat

SEQ ID NO: 396855 - DNA, 459 bp, Homo sapiens
cactggggaagaagatgtagacagaaatctcagggattatgaaatactagctttaaactcagacagtccccaaaggcactgtccactgctgttaaaaatcagtttaaaaaatttgagttatgaccagagaccacttcgagtggatcttacagaactcttatcccatctgtttcagtaacaaactgtcccaaaacagtggttcgctacagtgatattagttgtgctcatacatttgccacttgggcaggacttggcagggaaagctcatctctgctctatttaacattaactggggtgcctcaaaggtgaggattagaatcatctcyaagattatttactcacatgtctggccattgatgctgctgttggcaggaagcttactcagccagagctgttagccagggcacctaaatgtggccactggatgtagactgggcttcctcacaaaatggtggttat

SEQ ID NO: 396856 - DNA, 351 bp, Homo sapiens
tttttctttaaccaaatcacaagaaaattatagccagacactagatgtatcccaagaagttgctagtaatgcaaagaaaaatattaaaaataggggctttatggatagcatagttcaaggataacaaatgcattgttagcaaatccagaaccttaatgcagaatatataaaacagatagaaaaaatcaacaagcacatgctcattaaaacayggcaatatgtgactctgtttaactacattttattctgtgggtctgggcagaagctatctactttgtgcagttgtcgactacttccaaatacctaaaaactgtctcttctcaattttctgcttctgaaggatacacacct

SEQ ID NO: 396857 - DNA, 587 bp, Homo sapiens
tattgaaagtttgattgccaaatcatcgtaatgaatagggatcagaacaatgagcagaattcccaccaggagattgagagagaaaaataaccaagagataatggtattctggaggctaaatgaaataaaattttcccgggagattgaataagcaactgtgtaaaatgctactaataagttgtgtaaaaggaggactgataattgcccatcagtctggcaatatgatggccactggcaatcttttcaagcacagtgtgcatagggaagggaaagcttgattttcctgtgttccrggtatgagaacagcgaaatagtctctctcccactcccagcttctcacttccaatctatgatatcccatggtatgaaagagacaatgccctgctctaagaaataacctgtgtttattgatacagaatgagtcgtcccctattctgtgcccaaaggttttcatcatggcttctctgtatggtttcatcttctccaaatgagcaaagaccgtatcttacatggcgctttccctctgttccaaactcctggtaacatttttgacatacatatgaagtttccacctcatttaaaaggaa

SEQ ID NO: 396858 - DNA, 587 bp, Homo sapiens
tattgaaagtttgattgccaaatcatcgtaatgaatagggatcagaacaatgagcagaattcccaccaggagattgagagagaaaaataaccaagagataatggtattctggaggctaaatgaaataaaattttcccgggagattgaataagcaactgtgtaaaatgctactaataagttgtgtaaaaggaggactgataattgcccatcagtctggcaatatgatggccactggcaatcttttcaagcacagtgtgcatagggaagggaaagcttgattttcctgtgttccaggtatgagaacagcgaaatagtctctctcccactcccagcttctcacttccaatctatgatatcccatggtatgaaagagacaatgccctgctstaagaaataacctgtgtttattgatacagaatgagtcgtcccctattctgtgcccaaaggttttcatcatggcttctctgtatggtttcatcttctccaaatgagcaaagaccgtatcttacatggcgctttccctctgttccaaactcctggtaacatttttgacatacatatgaagtttccacctcatttaaaaggaa

SEQ ID NO: 396859 - DNA, 615 bp, Homo sapiens
tggcaccctcctatactttgtaatttcaaccagaaaccaaagaaagattctgacaccttattctcagacacattttacaaggtgagtgcaaaaattgcgttttttgcattgttggaatttgctgtttgatcatggaatacattcttaaataaatgtggttatcttatatatcattttaatgggcatttcttgcattattatatatatattttttttgctaatgacattacttgctgtttattttgtgcttattttagactatggaaattaggttagacaaaaggcaaattccagcagttttyttattcgagttaaaaatgggtagtaaggctgtggagatagcttgcaacatcaacagtgcatttggcccaggaactgcagtggtggttcgagaagttttgcaaaggagacgagagccttgaagatgaggagcatagtcgccggccatcagaagttgacagtgaccaattgagagcaatcatcaaagctgatcttccttttttttttttaaattatactttaagttttagggtacatgtgcacaacgtgcaggtttgttacatatgtatacatgtgccatgttggtgtgctgtacctattaacccgtcatttaac

SEQ ID NO: 396860 - DNA, 555 bp, Homo sapiens
tgaaacctccataaaaacccaaaaggagagctttcagattcctgaacacatggaggtgtctggagagtggcatgcctggggaaatcatgaaagctccaagtccccacccatagacctcactctgtatatctcttcatctggctgtttgtttatattctttgcaatatccttcataataaatgggtaaatgtaagtaaagtgtttccctgagttctgtgagccatcctgggaaattaattgacataaggagctggtcataagaaccatgatttatagctggccagtcagaagtacaggygacaatctgggactcggcctctgaagtaggaacagtcttgcaggactgagctctcaacctgtaggatctgatgttctctccaggtagatggtgtcacaattcaactgaattataggacatgcagttggtgtctgctggaaaattgcttggctggtgtatggggaaaaccctatacacattttgaagaccagagatgaagtattatgtgttgagtatagtattgagtgtgacagtagaaaaaaacagtttttttctcc

SEQ ID NO: 396861 - DNA, 608 bp, Homo sapiens
atccaatttttctcctacttgatgtgactatattttaaaaatacatttacaaatatgagactagaagtaataacatcttttttttcactgctaaacgtcaagtcaatcacaaagaagaagtccagaatttaccaaagatattttaggtagtggagaactcgtaaatgtataacaaccaggtctctaaaagaaaaatgtcctgacatgacgtttgccaatttctatggtataaatactccaaacatagcctactttaggccrtttaaggtcacgtcagctagcttgcaaagtttctggaaaactttacaattgattcctgcaagccagaagaagctatcaccagcacaccactggctgcacaatacacaactttttgctaccagcagtggaaattttgacatctgtatctactaaggagctgggtcactcaggtccactggatgttctttacctcagcaaaaaaataaaaaataaaaaaataaaaacactcatgcaatgatatttttgctgaagatgaataatcatataaaacaaactaccttttttgaatggctactttgtgctggccatctaattttatattcattaactctattaattctcactgc

SEQ ID NO: 396862 - DNA, 570 bp, Homo sapiens
tgccttccactatggttggaaatttcctgaagcctcccagaagcaggtgccactatgcttcctgtacagcctacagaatcgtgagcaaattaaaccacttttcttataaattacccagtctcgattctttctttatacaagtgtgagaatggactaatacagatgtcatcacactgctataaagaaatacctgagactgggtaatttataaaggaaagaggtttaattgactcacagttgtgcatggcttgagagrcctcaacttacaatcttggtggaaggtagaagggaagcaaagcgccttcttcacaaggtggcagaaaggagaagagtgagtagctaagggggaagagccccttataaagccatcagatctcatgagaactcactcactatcacaagaacagcataggaaaacttccccatgatccaatgatctcccaccaggtctctccctagaaatgtgggaattatgggaattacaattcaagatgagatttgggtggagacacaaagcctaaccatattattccacccctggcccctcccaaatctaatatcctcacattt

SEQ ID NO: 396863 - DNA, 598 bp, Homo sapiens
acagtattagtaataattaccagctaaagtaaataataccggtcaaactaatatatttgtaatcatacagttttagcgtcttaatttctaccacccactgctagccaccatcaccatttgtctcaccttctgaaagagacgcaatctaaataaattggctctgtttaggcagcaggcaaggtgaaccctttgggtggttacaaagtcagtgaatggaatattatgactttctgttttaacaaacatcctagactagtaatgtccaatcaaaacataatgtgagccacaaatacaagtaccttataagatkttatatttttgagtagctacattataaaatataagagatgcatacctgctctccctggtatgccctgctttggattgaatttttaagtgtaaatcagaatatatctttcctgcttactctatgccctgctactggatttaatttttaagtgtaaatccgaatatatctttcctgcttattctgcaaagacttctctcaactcagaagaacattcaacgtttctccctaagtaacaaggccccgactgacctgtccctgcctgtctctctgatccccatccttctccct

SEQ ID NO: 396864 - DNA, 614 bp, Homo sapiens
gtcctggagttcaaaggactgagaatctggagtcctgacacaaaagagcaggagaagaaggttttcccagggccagaagaaagagagctcacctttcctctgttttttttttgttgttgttctactcctcaatctgatccctgagtcaattgaatggtgcctctcatattggatgagggtgaatctttagtaagtccactgattcaaatgacaatctcttctggaaacaccctcacagacacactcagaaacaacrttttaacagaaattacaggtgcatgacaccacacgtggcgaatttttaaattttcttttttatagagataaactcccactatgttgcccaggctggtctcaaacacatagactcaagcaattctcctgcctcggcctcccaaagtgctcagattacaggcatgagccaccacacccagccccagattattcatagaatatttatataatttcattaagcttgtatatcaaatcatacacagaatataatttttgagaggatttttatatgatcagtaaagttgaaaatacccagatttaccctttagttctctccattttaatttcattataaaaattgtgcttatagaaggtacaat

SEQ ID NO: 396865 - DNA, 484 bp, Homo sapiens
acccagatttaccctttagttctctccattttaatttcattataaaaattgtgcttatagaaggtacaattactttactttcrctcactgaggtctttatattgaacctgcatatattatgttttaatatttttactcctaacacttaagagtaccgtataattttgaattaaattaataaatatccttctttcaggtagagagaatttcacctataagagcatggataaataacaaaacatggtcactgggttttggcactaatcactctgttttaaaaacactagcttcttggcttaacacattgtattacagcttattttgtgtctgtttctgctactgttctcttaatccctggcaagcagaaagtatattttcaaaaaaaaaaaaagtgttctcaatgctttccttaatagttactgaaatacttcagtaaaacagaaaaaaaagtgataataaataaatattttactagatatgactt

SEQ ID NO: 396866 - DNA, 484 bp, Homo sapiens
acccagatttaccctttagttctctccattttaatttcattataaaaattgtgcttatagaaggtacaattactttactttcgctcactgaggtctttatattgaacctgcatatattatgttttaatatttttactcctaacacttaagagtaccgtataattttgaattaaattaataaatatccttctttcaggtagagagaatttcacctataagagcatggataaataacaaaacatggtcactgggttttggcactaatcactctgttttaaaaacactagcttcttggcttaacacattgtattacagcttattttgtgtctgtttctgctactgttctcttaatccctggcaagcagaaagtatatttycaaaaaaaaaaaaagtgttctcaatgctttccttaatagttactgaaatacttcagtaaaacagaaaaaaaagtgataataaataaatattttactagatatgactt

SEQ ID NO: 396867 - DNA, 576 bp, Homo sapiens
ttaacatttctattaataatttttatactgattacttgctgaaatattatttcagcaataataaaaattattaatagaaatgttaataaacattaacagtagttgggttaaatttaatagtaaagttgatttcacaggttttttaatgtggctgctagaaattttaagattatataaggtacttgtatttgcggctcacatatattttgattrgacatcactagtctaggatgtttgttaaaatagcaagtcataatgttccatttacagacattgtgaccacccaaagtgttcaccttgcctactgcctaaacagagccaatttaactagattggctcccctagacaggggaattgcaatggagaaagagtaattcatgcagagccagctgtgtgggagaccagagttttattattactcaaatcagtctccttgagcattcaggcatcagagtttttaaagataatttggctggtagggggcttggaaagtggggagtgatgattggtcaggttggagatggaatcatagtgggggttgaagtgagattttcttgctgttttctgctccagggt

SEQ ID NO: 396868 - DNA, 576 bp, Homo sapiens
ttaacatttctattaataatttttatactgattacttgctgaaatattatttcagcaataataaaaattattaatagaaatgttaataaacattaacagtagttgggttaaatttaatagtaaagttgatttcacaggttttttaatgtggctgctagaaattttaagattatataaggtacttgtatttgcggctcacatatattttgattggacatcactagtctaggatgtttgttaaaatagcaagtcatmatgttccatttacagacattgtgaccacccaaagtgttcaccttgcctactgcctaaacagagccaatttaactagattggctcccctagacaggggaattgcaatggagaaagagtaattcatgcagagccagctgtgtgggagaccagagttttattattactcaaatcagtctccttgagcattcaggcatcagagtttttaaagataatttggctggtagggggcttggaaagtggggagtgatgattggtcaggttggagatggaatcatagtgggggttgaagtgagattttcttgctgttttctgctccagggt

SEQ ID NO: 396869 - DNA, 603 bp, Homo sapiens
aacaccttgtagtcagggatgcgtcaattacaatgttgtcatggaattgaagtgtgagaatattcacttgaagttactttgtttttaatatagactatgaatcttatgattttgtctcctctttgttgtgatgacttaraaatgtaaatgcaaatttgtgactctgtttagccttatacatgacagaatggtttaaatttctgtgttacagttttatgaatgaaattaccatttttctccccttaaattcctttgactcccatattctcaattaatttgtgttttgtgcaattttaaacaacctcactttgtgtgtgtgtgaataaagcaagatataaataaatatggagtaatcttttattttatttaattttttatttttattttactttaagttctgggatacatgtgctgaatgtgcaggtttgttacataggtatacatgtgccatggtggtttgctgcacctattaacccgtcatctaggctttaaagccccgcatgcgctggctatttatcctaatgctctcccttctcttgctccccagcccccgacaggtcccatgtgtgatgttcctccctctgtgtccatgtgttctcattg

SEQ ID NO: 396870 - DNA, 555 bp, Homo sapiens
gaagtgtgagaatattcacttgaagttactttgtttttaatatagactatgaatcttatgattttgtctcctctttgttgtgatgacttaaaaatgtaaatgcaaatttgtgactctgtttagccttatacatgacagaatggtttaaatttctgtgttacagttttatgaatgaaattaccatttttctccccttaaattcctttgactcccatattctcaattaatttgtgttttgtgcaattttaaacaacctcactttgtgtgtgtgtgaataaagcaagatataaataaatatggagtaatcttttattttatttaattttttatttttattttactttaagttctgggatacatgtgctgaatgtgcaggtttgttacataggtatacatgtgccatgrtggtttgctgcacctattaacccgtcatctaggctttaaagccccgcatgcgctggctatttatcctaatgctctcccttctcttgctccccagcccccgacaggtcccatgtgtgatgttcctccctctgtgtccatgtgttctcattg

SEQ ID NO: 396871 - DNA, 603 bp, Homo sapiens
aacaccttgtagtcagggatgcgtcaattacaatgttgtcatggaattgaagtgtgagaatattcacttgaagttactttgtttttaatatagactatgaatcttatgattttgtctcctctttgttgtgatgacttaaaaatgtaaatgcaaatttgtgactctgtttagccttatacatgacagaatggtttaaatttctgtgttacagttttatgaatgaaattaccatttttctccccttaaattcctttgactcccatattctcaattaatttgtgttttgtgcaattttaaacaacctcactttgtgtgtgtgtgaataaagcaagatataaataaatatggagtaatcttttattttatttaattttttatttttattttactttaagttctgggatacatgtgctgaatgtgcaggtttgttacataggtatacatgtgccatggtggtttgctgcacctattaacccgtcatctaggctttaaagccccgcatgcgytggctatttatcctaatgctctcccttctcttgctccccagcccccgacaggtcccatgtgtgatgttcctccctctgtgtccatgtgttctcattg

SEQ ID NO: 396872 - DNA, 633 bp, Homo sapiens
atgtgtgaaatggggaaaaaagaacatagtcaaaacaatttgtcttcctggaattaaggctaagtgtgttggagcaaaagaagctttctctctgcgttctgaatgataactgagtccgctgagataaactgacaatagatcaaytaacaagagaaaaggcacacaaattcattaatgtgcaagcacacaggagccaaacaaagtgtgaaactcaaagaagtaccagatggttgaagtttaaataccgtcttcataggggagagggaagtgggggaatgtagacaatttcagaggaagagtaaatgatttttaagggagatgaatgggtgtaaagaacagacaatagcccaggacagggaactggtatagtgtcaacttagtcttccttcctgagttaggcatcagtttcccctaattgatgaaatatctggagaagggattcacaacagttgaatatcttctgggggatctggcctttaggtagataggaaacttcagagaaaacccttctctgcatttgctgctgcctaggttctctcagtttgaagtctgaagcagcatattttgaaatattgttttctgagcctcagtaggtgaaaacactcaacctcaggctgtcacagactgcttatt

SEQ ID NO: 396873 - DNA, 560 bp, Homo sapiens
tcttcatttactgaagaaatttcaacatttttacatacatgcaaagtgattacacacaggyaacattgtgataatgcactttcatagagtaaaatttgcaaaaaaatgtataaaacacattcaaatgctctaaaagtctccatacaatttatacctccaatattggaaattatgggaagacaaaatttataacatagcaaattgtaaaaaagtaatgctgacaattaaaaatagtgaaaaaatagaaaaaagaaaaagaaacaagaacaccaccctcaaaactaaaaagaaaaaattcaagcacatgaagaagtgtattacagggatagattatgggtaattgcagaagataatccataagagctggcagattttcatgatcattaactgtctttttaagtcttgcctcacaatgaatagctttctttttttctctttttctctgttaagatatggctctcctaagaaaatagtttacattcactttctatgtggcaccactgtctttcaaattcttatatgattcaatatataccaacgtgagcattccctgctaaatt

SEQ ID NO: 396874 - DNA, 552 bp, Homo sapiens
attcaggatttcaacatttgcgattaagcattcaggactgtgtctttcaggattatcatccaaattcaaaacatcaacattaacagtagtttggaggaagttgattccaaccctcatgaatgactttgaaggatttaaggcttcagtggataaaaatcactgcagatgtggtggaaatggcaagagaattygaattcgaagtggagtctgaagatgcgactgaattgctgcaatctcatgataaaatttgaatggatgaggagtttctttttatggatgaacaaagaaagtgagggttttttttagtggactctactcctggggaagatgctgtgaacattgttaaaatgaaaacaaaggatttaaaatattatgtaaatttatttgataaggcaacggcagggtttgagaagattgacttcaattttgaaagaacttctatagtaggtaaaagactatcaaacatatctcatgctacagagaaatcttttgtgaaatgaagaatcaattcatgtggcaaacttccttgtcttattttaagaaattgttgca

SEQ ID NO: 396875 - DNA, 552 bp, Homo sapiens
attcaggatttcaacatttgcgattaagcattcaggactgtgtctttcaggattatcatccaaattcaaaacatcaacattaacagtagtttggaggaagttgattccaaccctcatgaatgactttgaaggatttaaggcttcagtggataaaaatcactgcagatgtggtggaaatggcaagagaattcgaattcgaagtggagtctgaagatgcgactgaattgctgmaatctcatgataaaatttgaatggatgaggagtttctttttatggatgaacaaagaaagtgagggttttttttagtggactctactcctggggaagatgctgtgaacattgttaaaatgaaaacaaaggatttaaaatattatgtaaatttatttgataaggcaacggcagggtttgagaagattgacttcaattttgaaagaacttctatagtaggtaaaagactatcaaacatatctcatgctacagagaaatcttttgtgaaatgaagaatcaattcatgtggcaaacttccttgtcttattttaagaaattgttgca

SEQ ID NO: 396876 - DNA, 481 bp, Homo sapiens
tattagggatagctttgtcccttcacatttttgaaattttgaaaggtcaamtgaggagactttgacaatctggggtgataaaagatatactttgtggaaaacatttagcttttgaaagcagagattcttcatctgtcttgctcattagtctctccccagacaatatttcttgagtcatacatttacaaaaatgtttgtgtaaagacaaaaggtccctgtaatgaaggtggtttaatatcagacaacaatagctgctgcagttctatgataatagctattgtggattccttttacttgtctcaatttttttttaacgtataaaatcagtatttcatggtgtagtgatcaggtataaacacattttgtaaatgtttctgacaggcttagagtgggaaacattaaattttgagagttacatttactgtgttagaactaaagttgtgacactctagagtgaaatggcattgcagatcaacttgtg

SEQ ID NO: 396877 - DNA, 634 bp, Homo sapiens
ttttttcgctcttagaagtgtaattgttaccagctaaaaatctgtaagggtctgaagcaacctcaattcttgccttctcagaagaaacaaattcaattgaggggcgtaaggcagaaagagaaactgcggcaagttttagagcaggagtgagtttactaaaaagctttagaacaggaatgaaaggaagtaaagtatacttggaagagggccacgaaggtgacttgagagatcaagtgcatggtttgaccgtttgacttggggttttatatgttgacatacttccagggtcttgcatctcttctcccctgattctttccttgggaggaggcgtggtgtccatatgtgcagtggcctgctagtgcttsggaggtgagcatgtacagtgtgtctactggagttgtacacatgctcacttgaggcattcttcccttaccaatcgaatgtccctggaaggccatacaccagttaaactctgccattttgcctcttaatgtgtctgcttgaggccacccgcccaactcctgagatcttatcaggaagctgttgatcacccgtttcagttgtatctatttattgggagaccgcctttctcagggactggctgtgaccaattattattttagagacgcagtgt

SEQ ID NO: 396878 - DNA, 652 bp, Homo sapiens
tccttcacagcattttctgattctttagttgcagaaggtgagcaactaagaagcttagcataaaatggagctacccgactaaaaggaagttaagcagacctctcagcaaaaggatagacaaaattggagttcaacaaggaacagaggacctagaaatctccctaggcattgagacccctaaaaagctaatccctagctgaaaaggcaaactagaaatgcaccagctgccacaaraactgaaatctagcctcaaggcatttcagcctgattggaccaagaggatctacctctaagccagaagaaaactacaatttctttggagggagatcccatctaaagactttttctcttaggtcaatgtctggcttttgatcataaataaccaggtatatcagtcagcagggctaaatgatgcatgcagtgcacacacatgcgcgggcacacacacacaaaaagagcgagagtgacagtgagagggagaggagaaatctatagctttaaatgtttccatgtacagaaaataaaaatacttccaaatatatttatgaatattgtatttatactaaacttgaccaaagctgaacacatgtgttctcttcccatcactttcccttcatctccctcatatacattacacacaataaaatacagg

SEQ ID NO: 396879 - DNA, 652 bp, Homo sapiens
tccttcacagcattttctgattctttagttgcagaaggtgagcaactaagaagcttagcataaaatggagctacccgactaaaaggaagttaagcagacctctcagcaaaaggatagacaaaattggagttcaacaaggaacagaggacctagaaatctccctaggcattgagacccctaaaaagctaatccctagctgaaaaggcaaactagaaatgcaccagctgccacaaaaactgaaatctagcctcaaggcatttcagcctgattggaccaagaggatctacctctaagccagaagaaaactacaatttctttggagggagatcccatctaaagactttttctcttaggtcaatgtctggcttttgatcataaataaccaggtatatcagtcagcagggctaaatgatgcatgcagtgcacacacatgcgcgkgcacacacacacaaaaagagcgagagtgacagtgagagggagaggagaaatctatagctttaaatgtttccatgtacagaaaataaaaatacttccaaatatatttatgaatattgtatttatactaaacttgaccaaagctgaacacatgtgttctcttcccatcactttcccttcatctccctcatatacattacacacaataaaatacagg

SEQ ID NO: 396880 - DNA, 588 bp, Homo sapiens
tcatgtgttattaatatctagtttcataaaattgtggtcaaaaagctactttatatgatttcaatcttcttctatttgctaagatttctactgtggcctaacatataatctattctgaagaatgcgccatgtgtgcttaagaagaacagatatcctgttactattggagggaatgttctgcatatgtctattaggtccatttggtctaaagtgtttcccaagtctcaagaaaataataatgtttctttattaattttctgcctggattatctctctgttgttgaaagtgggatactgaagtccccctactattattgtattgtaatctatattttggtgctccaatgttcggtgtgcatagatttataattattgtatcctcttgataaactgacccctttattattatataatatccctcttcatctctacttatagattttgatgtaatgacaattttgtctgatataagcatagctaccccygctctcttttggttttcatttgtgtgaaatatatcccttttctttctatctatttttgtccttaaaagtgagctaaggttcttataggcagcatatagttggg

SEQ ID NO: 396881 - DNA, 528 bp, Homo sapiens
attccttccaggattacattcagtaacaaagccagtgatttattgcatacaagcagcaactctaataaaaattaactcaaaagcttgaaagtgaagctttgggcaaaagaattacaggcaaatggaaattttttwaaaaaagcaaagatcacaatatttagaacaaacaggttttattcatgattggtaaaaaaatacgaagtaggacaaaggcactttgtatcaataaagaggtcaatataaataagtaactgtcataaatatttattaaatatgtatgcaaaattcagaaagcacaaaacttcagaagcattttttaaaagacaatttataatgctatttttcagctgatgggagatcaagtgaaaaaacataagtgagatttaggaggacataagcaattaatggaggataactaatatgtccatatttattcaaatactcatggaataatagccaaagtggacaaagtattgggcctcaatgaaaaccttagcatactccaacaagtaaaaatagtgtataatt

SEQ ID NO: 396882 - DNA, 528 bp, Homo sapiens
attccttccaggattacattcagtaacaaagccagtgatttattgcatacaagcagcaactctaataaaaattaactcaaaagcttgaaagtgaagctttgggcaaaagaattacaggcaaatggaaatttttttaaaaaagcaaagatcacaatatttagaacaaacaggttttattcatgrttggtaaaaaaatacgaagtaggacaaaggcactttgtatcaataaagaggtcaatataaataagtaactgtcataaatatttattaaatatgtatgcaaaattcagaaagcacaaaacttcagaagcattttttaaaagacaatttataatgctatttttcagctgatgggagatcaagtgaaaaaacataagtgagatttaggaggacataagcaattaatggaggataactaatatgtccatatttattcaaatactcatggaataatagccaaagtggacaaagtattgggcctcaatgaaaaccttagcatactccaacaagtaaaaatagtgtataatt

SEQ ID NO: 396883 - DNA, 528 bp, Homo sapiens
attccttccaggattacattcagtaacaaagccagtgatttattgcatacaagcagcaactctaataaaaattaactcaaaagcttgaaagtgaagctttgggcaaaagaattacaggcaaatggaaatttttttaaaaaagcaaagatcacaatatttagaacaaacaggttttattcatgattggtaaaaaaatacgaagtaggacaaaggcactttgtatcaataaagaggtcaatataaataagtaactgtcataaatatttattaaatatgtatgcaaaattcagaaagcacaaaacttcagaagcattttttaaaagacaatttataatgctatttttcagctgatgggagatcaagtgaaaaaacataagtgagatttaggargacataagcaattaatggaggataactaatatgtccatatttattcaaatactcatggaataatagccaaagtggacaaagtattgggcctcaatgaaaaccttagcatactccaacaagtaaaaatagtgtataatt

SEQ ID NO: 396884 - DNA, 572 bp, Homo sapiens
ctttctgtgtctaaatttacacctaatgccttaatggctgccagttaaacatgcttgactagataaatcacaggtgaaattttgtacctcatgttgtactacatcagaaaatttgtaatgtcaggttgacctacagttgagacattaagagtgatcactggtttgtgtgatatctgatatctgatactgatatcatccttcagttagattgccccttttgcaagtatgggatgctatgaaggtctacttccccataagccttcacttagtgaattttagcagcaatgtttctctttcttaagcttccactgaaatataatataattgaattacrcaaatcataattgtatagctcaaggaattagttcagagtgaacacacccatgaaactaccaacctgggtcaagaaacactcaaaggacataggaggctcctcatgccccaaccacattacttccctctcccttttcccaaaatgtaaccactgtcctgatgtcaaatggcaaagaataatttaccccctataaatagactaatacagaaagtgtttgtatttgttcctcttgttcaaa

SEQ ID NO: 396885 - DNA, 572 bp, Homo sapiens
ctttctgtgtctaaatttacacctaatgccttaatggctgccagttaaacatgcttgactagataaatcacaggtgaaattttgtacctcatgttgtactacatcagaaaatttgtaatgtcaggttgacctacagttgagacattaagagtgatcactggtttgtgtgatatctgatatctgatactgatatcatccttcagttagattgccccttttgcaagtatgggatgctatgaaggtctacttccccataagccttcacttagtgaattttagcagcaatgtttctctttcttaagcttccactgaaatataatataattgaattacacaaatcataattgtatagctcaaggaattagttcagagtgaacacacccatgaaactaccaacctgggtcaagaaacactcaaaggacataggaggctcctcatgccccaaccacattacttccctctcccttytcccaaaatgtaaccactgtcctgatgtcaaatggcaaagaataatttaccccctataaatagactaatacagaaagtgtttgtatttgttcctcttgttcaaa

SEQ ID NO: 396886 - DNA, 571 bp, Homo sapiens
aagcaaacatcatctttcctctccagtacctgtaacaactcccttcyttcttgccccataaaaatccgtattatacagagaaacccaactgacttttaaaatatgaatgagatcatgcccttttttttgcttaaaatgatctgtggattctcaacatattagaataaaatgtaaatcaccaagtcctataaaattcatgtaatctgaccccctctccaatttcatctcctatcactctgtatcccctcattattctgctttttttttttttctgattgttgagcctattgccaagattgagcctgcctctgagtctttgttcttctattttgctctgtttggaatgttctacccccaggtttctgcagaactggtttcaaattcctactcctcaaagagactttcttaaataactgaacctaaactgacctttcctctttctccttctttcctacagcctatcctgtagtcattccttatcaccttctgttttatttttatgccatttttctttgctctcagaaattatcaactcccacaccttagaagtccacagaagagcttgtgtatc

SEQ ID NO: 396887 - DNA, 539 bp, Homo sapiens
cttacacaaaattctaaattaacataataaatatactttattataagtaggaacctaaaagtgtaatctctagctttggagaaataagaagttttagagatccccaataacatacatgatgccacaattatacctgctgtcctgatgcaaagccactgcataaggttttactggttgcatcttctatgaggatgcccatcaatggggaaagtggagcacaatcacaataatgctgtgctctccaactccggacactggactgggactgctttccccagtttgcagcagataaygaacctcattttctaattttgtaaagaatacttaggtgaggtaagctatgagcttgaggagggtatatacctggagagtctgtctttctccaagtccataaagaaagctatttgggatagctgcatgtcatttcaaagggtctacccttacagacatgagtgtttgtaatgaatagcatatttttataaagactcttaaatacatttacatatggtgctgtgctcttttttaatttctgaaactta

SEQ ID NO: 396888 - DNA, 652 bp, Homo sapiens
aattattttgattaaaaagtaatttaatatggttatactacttacacaaaattctaaattaacataataaatatactttattataagtaggaacctaaaagtgtaatctctagctttggagaaataagaagttttagagatccccaataacatacatgatgccacaattatacctgctgtcctgatgcaaagccactgcataaggttttactggttgcatcttctatgaggatgcccatcaatggggaaagtggagcacaatcacaataatgctgtgctctccaactccggacactggactgggactgctttccccagtttgcagcagataatgaacctcattttctaattttgtaaagaatacttaggtgaggtaagctatgagcttgaggagggtatatacctggagagtctgtctttctccaagtccataaagaaagctatttgggatagctgcatgtcatttcaaagggtctacccttacagacatgagtgtttgtaatgaatagcatatttttataaagactcttaaatacatttacatatggtgctgygctcttttttaatttctgaaacttaaatggaaagatagtaaattcaaaatttggggcaaatttctgttccaaggaggttgtcacatgagtttgccttt

SEQ ID NO: 396889 - DNA, 609 bp, Homo sapiens
atacagaaaaaaataaaaatcaagaacctaatgcttatcactagagaaagtcaccttcactagacgaagataggaaggaaakaaggaggaagaggagaccacaaaacaaccaggaaacaagtccatacttatcaataataacattaaatgtaaatagactaaattctgcaattgaaagacataaaatggctggagagatgaaaaacaagatacaataatctgttgcctacaagaaacacacttcatctataaagacacacatagactgaaactaaaggaatggaaacaagatattccatgccaatggaaaccaaaagagagtaggagtcactatacttatatcagaaaaaatacatttcaagaaaaaaactgtaagaagagacaaagaaggtcactatataatgatagaggggtcaattcagcaagaggatataagaattgtacaaatatatgcacccaacactggagcactgagatatatatatatataggaaatattatcagagttaaagtgagagataggccccaatacttataatagctggagacttcaacaccccactttcagcattgaacagatcttccaaacagaaaatcaacaaagaaaca

SEQ ID NO: 396890 - DNA, 609 bp, Homo sapiens
atacagaaaaaaataaaaatcaagaacctaatgcttatcactagagaaagtcaccttcactagacgaagataggaaggaaataaggaggaagaggagaccacaaaacaaccaggaaacaagtccatacttatcaataataacattaaatgtaaatagacyaaattctgcaattgaaagacataaaatggctggagagatgaaaaacaagatacaataatctgttgcctacaagaaacacacttcatctataaagacacacatagactgaaactaaaggaatggaaacaagatattccatgccaatggaaaccaaaagagagtaggagtcactatacttatatcagaaaaaatacatttcaagaaaaaaactgtaagaagagacaaagaaggtcactatataatgatagaggggtcaattcagcaagaggatataagaattgtacaaatatatgcacccaacactggagcactgagatatatatatatataggaaatattatcagagttaaagtgagagataggccccaatacttataatagctggagacttcaacaccccactttcagcattgaacagatcttccaaacagaaaatcaacaaagaaaca

SEQ ID NO: 396891 - DNA, 414 bp, Homo sapiens
gatactttaaagtgctgttgaattcaatttgctgatatttgttgaggattttgcatctacattcattaggaatatttaattttttttcttgtagtgccattgtctggttttgctattagggttatgctagcttcacaaaaagagtttagaattgttctttcttctttaattttttatgaatgtttgagaaatattggcattaattcttccttaaatgttggcagaattctccagtaaagtcatctgcacctgatattttctttgctgaaagatttttgattactcatttaaacaccttacgagctatagatttgttcatattttgtatttcttcttgattcagtgttgtaagttgtatatttccagtaatttgatgtttttmtaggttatccaattactaccataatcattcgc

SEQ ID NO: 396892 - DNA, 428 bp, Homo sapiens
tctccttggctcactctgaggtcatactgcagcttttacgttttccttcagtactgtgagctcttgccagggaggtttttaagtagatttaggtagatataactttgggtcctggattaagtcacaytttccattgtcttttctgcattgtataccactatttcctggtaataagatccagacgtcaaagaatcccagggtagtactgctgtactagcctaagcattaatattaaagagctgttatctttccagggtcacatggcatatatgaaaaacaggcatattatttcatttatcctttcaacaatttttcaaggttagattattaatttctccattttatggatggaaaaattaaagctcagggatttttcagtaaactgcctgagactgcacaagaccaggattcaaatttgtatctccatg

SEQ ID NO: 396893 - DNA, 598 bp, Homo sapiens
tgtgctggtagaacaggatcgtgagtctgtcagtcacacctcagtcaggaaaacagaagccgacagccgtggatgggactgagagagcaacagggaggcagagtacttttggaggagtacagagagtatctcttcttgcccagagattactaaactgctaccaacccggggctgaagccctctgacccgcactcgcycttcctgtctggaatcactgcagccgccgtgttgaagccgcctcacttctgtgggaggaactcaggagcccacgtcacactgttgctctggaaaacgtcaccaaggctgctcgcactgacattggctacggccatggttagagccgagccatctgctgctgtggctgctgcatagcctgcctcaagcagaaaacaaatgctgtcctccatcttcctacccttcatccagtacctctcaccctacatcttcccagaagccagacggtgtgagagtcaggtctataggcttccagtcccccaccatctagaagggagcccaggaaagtgggaaggggctggtcccagcagaagagcgaccagtccgctctcgtggcttttccccatccacaaacatcgtcgac

SEQ ID NO: 396894 - DNA, 598 bp, Homo sapiens
tgtgctggtagaacaggatcgtgagtctgtcagtcacacctcagtcaggaaaacagaagccgacagccgtggatgggactgagagagcaacagggaggcagagtacttttggaggagtacagagagtatctcttcttgcccagagattactaaactgctaccaacccggggctgaagccctctgacccgcactcgcccttcctgtctggaatcactgcagccgccgtgttgaagccgcctcacttctgtgggaggaactcaggagcccacgtcacactgttgctctggaaaacgtcaccaaggctgctcgcactgacattggctacggccatggttagagccgagccatctgctgctgtggctgctgcatagcctgcctcaagcagaaaacaaatgctgtcctccatcttcctacccttcatccagtacctctcaccctacatcttcccagaagccagacggtgtgagagtcaggtctayaggcttccagtcccccaccatctagaagggagcccaggaaagtgggaaggggctggtcccagcagaagagcgaccagtccgctctcgtggcttttccccatccacaaacatcgtcgac

SEQ ID NO: 396895 - DNA, 598 bp, Homo sapiens
tgtgctggtagaacaggatcgtgagtctgtcagtcacacctcagtcaggaaaacagaagccgacagccgtggatgggactgagagagcaacagggaggcagagtacttttggaggagtacagagagtatctcttcttgcccagagattactaaactgctaccaacccggggctgaagccctctgacccgcactcgcccttcctgtctggaatcactgcagccgccgtgttgaagccgcctcacttctgtgggaggaactcaggagcccacgtcacactgttgctctggaaaacgtcaccaaggctgctcgcactgacattggctacggccatggttagagccgagccatctgctgctgtggctgctgcatagcctgcctcaagcagaaaacaaatgctgtcctccatcttcctacccttcatccagtacctctcaccctacatcttcccagaagccagacggtgtgagagtcaggtctataggcttccagtcccccaccatctagaagggagcccaggaaagtgggaaggggctggtcccagcagaagagcgaccagtccgctctcgtggcttytccccatccacaaacatcgtcgac

SEQ ID NO: 396896 - DNA, 586 bp, Homo sapiens
ttaggtgaacttgaagcagtacttggatttgagaattgtccttgagtgtgttctgcaataaattatttaagtgagatgtggaggaactaattggttaataaccataattgggattaaagagtaattttgatttttaaaagatgcttataaggataaatattcagttgtctcattttgctattaaaaaaaataagtctccttcaatgacttcatataatgggaaacacaggtgggctaaatgctaccctcgtgttgaggtgactagccgttgtcaaagcccctgctgggggcaggctactggaggcaagctgtttgcctgtgctttgccctaaggatattgactattattatttatgatttatgttgctcagtgaatgtacattgtgcagagcaatagattaaatggtgctgaacaaagaacacacttccagcccccaggaggggacttaaaatgtagacacttaagtgacacagttcargacttgcatggagcttgcgggtgtggggcaccctgagcacaatggctgagggagaagttgactctttattaaggagagaagaaagccggcaattgggtctgagttag

SEQ ID NO: 396897 - DNA, 551 bp, Homo sapiens
gtttataatgtatattgatgtaatataaataacaacaaaagaacaatggattagaaggaaatgggaacatactgatataaagtttttacattatattgaatatatgtcaatattgaatatatgtcaatattgacttgaagttaaaaatgaatattgtattatattacctagaatataaacacaaagaaaaataaacattcaatataataactaaaatacatttattcaacacacacacacaaaaaccattaacttaataaaagaggaataaaagaagaaaggagaccaataaagagcaaagggcagcagactagatctggacccaaccctatcagtggttctgttagacttgagtagactcaccccaagccaggcctcatcctactatggaccatgaggaaaacatggcttgcagtgtgctcrtgagctaagaatggtttttatctatttaaaagactgttaagggaagagaaagataagagcacacataaaaatgaagacaaagatggggaagatgataatgattataagaaacagagaagaggaggagg

SEQ ID NO: 396898 - DNA, 551 bp, Homo sapiens
gtttataatgtatattgatgtaatataaataacaacaaaagaacaatggattagaaggaaatgggaacatactgatataaagtttttacattatattgaatatatgtcaatattgaatatatgtcaatattgacttgaagttaaaaatgaatattgtattatattacctagaatataaacacaaagaaaaataaacattcaatataataactaaaatacatttattcaacacacacacacaaaaaccattaacttaataaaagaggaataaaagaagaaaggagaccaataaagagcaaagggcagcagactagatctggacccaaccctatcagtggttctgttagacttgagtagactcaccccaagccaggcctcatcctactatggaccatgaggaaaacatggcttgcagtgtgctcgtgagctaagaatgktttttatctatttaaaagactgttaagggaagagaaagataagagcacacataaaaatgaagacaaagatggggaagatgataatgattataagaaacagagaagaggaggagg

SEQ ID NO: 396899 - DNA, 558 bp, Homo sapiens
cctcatatgaatgagataatgcagtatttttctttctgcacttggattatttcacttaatatactgtcctccaggatcatccatgttgacagtaatgacagcattttattctgttgtatgactaactaaatatcattccattgtatctgtttatgtaatacatacataaatgtatgtatacaagcatatgtagatataccattcttcaaatatattattttgcatttatttttattaaaagtatatttctcccttatctaaatgctgataaaaatatgaggtattttcagtcsttcctcttaataaaagccaaagttaaaggtctgtttccctgttttttaataagattctatttcttgctgatttttttgagttccctgcacattctgcatattactgcttaatcgtaagcatggtttggattttttttttcctttctgtataatgtctgtttcctctgtggtttatttgttttctttgccaaaactttttattagtttaattcggtcccatttatttatttttgtttttgttgcatttgcttttggggtatttgtc

SEQ ID NO: 396900 - DNA, 558 bp, Homo sapiens
cctcatatgaatgagataatgcagtatttttctttctgcacttggattatttcacttaatatactgtcctccaggatcatccatgttgacagtaatgacagcattttattctgttgtatgactaactaaatatcattccattgtatctgtttatgtaatacatacataaatgtatgtatacaagcatatgtagatataccattcttcaaatatattattttgcatttatttttattaaaagtatatttctcccttatctaaatgctgataaaaatatgaggtattttcagtccttcctcttaataaaagccaaagttaaaggtctgtttccctgttttttaataagattctwtttcttgctgatttttttgagttccctgcacattctgcatattactgcttaatcgtaagcatggtttggattttttttttcctttctgtataatgtctgtttcctctgtggtttatttgttttctttgccaaaactttttattagtttaattcggtcccatttatttatttttgtttttgttgcatttgcttttggggtatttgtc

SEQ ID NO: 396901 - DNA, 463 bp, Homo sapiens
agtaaaattctagaagagaaacctaataaaaaactcacaataaatcacagaggaaacagacattatatagaatgtgaaataaattccaaactatacttacgattaagcagtaatatgcagactctgcagggaactcaaaaaaatcggcaagaaaaaagaatcattaaaaaatggggaaactgccctttaactttggcttttattaaaaggaaggcctgaaaagacctcaaatttttatcagtatttagataagggrgatatattttaatgaaaataaatgcaaaataatatatttgaagaatggtatgtctacatatgcttgtatacatacatgtatgtacatacataaacacatacaatggaatgatacttagtcatacaacagaataaaatgctgtcgttactgtcaacatggatgatcctggaggatatattaagtgaaataagccaggcacagaaagaa

SEQ ID NO: 396902 - DNA, 541 bp, Homo sapiens
ctttgtagattgtacaaaatgagtgtttccaacctatggaataaaaaggaaggtttaactctgtgagataaatccacacatcacaaagcatcttcacagatggcttgtttctaatttttattgtgggatattctgtttttcactaaaggcctcaagcgctccgaaatgtccctttgtagattctataacaagagtgttttaaaactgctgaatcaaaacaaatgtataaccctttgagaggaatccacacatcacaaagcatattttcagatacttgtttctagttattaaagcaagatattcagtttttcagtatatgcctcattgggctcagaaatgtctcatagtagattttgagacatagtagattttgaaacacaaaaatagtgtttcctacctgccgaatcaaaacaacagtttaaacctgtgagatgactccaaacctcgcaaagcattttcacagatagtygtttcctagtttttatcacaggatactcggtttttcagtataggcatcaatgaactctgaaatgtccactca

SEQ ID NO: 396903 - DNA, 521 bp, Homo sapiens
aatgtcttcacataaaaactagaaagaagctttctgagaagcttctttgtgatgagtgcattcacctcacagagttgaaccattcttttgcttgagcagtttggaaacagtctttttgttgaatctgcaagaggatatttgtgaggcctttgaggcctattgttgaaaaaggaactatcttcacataaaaactagacagaaagtttctttttttgttgtttctttagtgccctttattataaatcccttctttttttagttttrtgacattggttttttttttaagaagacaagttggttttttgtagaatgtccctaaatttctatttgcttgtttcctcatgcttagattttgggaagagtactaactaggtgatgtttagttgctcccctttaaatgacatgtttttaagtcaataaaataaaacaagcaataccacaatgctatctcctccatcttagagacccatcctagcatttcatcatagtcattcagtaaaatattcttcccttagggttgg

SEQ ID NO: 396904 - DNA, 573 bp, Homo sapiens
aggcctcaatgggctcagaaacgttcctttgttgattctacaaaaaatgtgtttccaaccaactgaatcaaaacaaaagtttaactctgcaagatcaactcacacatcacaaagcattttcacagatagcttgtttctagtttttatcaagagatactcgatttttttttattgtagacttcagtgtgctctgaaatgtcctttcatagattctacaaaaacagtgttttcaacctgctgaattaaaatgaaagttaaactctgtaagatgaaatcatacatcamaaagcattttcacaaatagattgtttctggtttttattgtgggatatttggtttttcaatataagcatcaatgggcttcgaaatgttccttcttaaattttacaaagagactgttttcaacttcctgaataaaaacagtggataaatctgtgagatgaatccacacattacaaagcattttcacaggtaattattttttagtttttctcatggaatattgtgtttttcaatataggcttcaatggaccctaaaatgccctctcttaaattttacagaaacagtgtttg

SEQ ID NO: 396905 - DNA, 512 bp, Homo sapiens
gaatctacacatcacaaagcattttcagatatagctcrcttctagtttttatcacgggatattctgtttttcactataggcctcaaagggctccaaaatgtccctttgtagattctgcaaaatgagggtttttaacctgctgaacataaacagaggtttacctctgtgagataaatccacacatcacaaaacatgttcaaaggtagttttttatctagtttttatcacatgatattcagtttttcactataggcctaatgggctctgaaatttccctttttagattctacagagtgtttacaacctgctgaatcaaaacaaggttttaactatgtgagatgaatccatacatctaaagcgttttcacaaattgtttgtttttatagggggatagtcagttttttactacaggccacaaaaagctcagaaatgtcttcttttagattctaccagaagagtgtttccaacctgctgtatataaatataggtttagctctgtgaaataaatccac

SEQ ID NO: 396906 - DNA, 550 bp, Homo sapiens
ttttcacataaaactttttctatttttcatcatgggacatttgcatttttactacaggcctcaatgggctccaaagtgtctcttcataggttctacaaaaaaaggtgtctccaacctgccttccatagattttccagaaacagtgttttcaacccgctgaatcaaaacaaagatttaactctgtgtgatgaatccagacatcagaaagcattttcacagatagcttgtttatagttttaatcacaggatattcactttttcactataagcctaaataagctttgaaatatccctttgaagattctataagaagaatgtttccaacctgctgaattgaaacaatggtttacctgtgggagatgaattcacacatcacaaagaattttcacagatatcttgtttctaytttttatcatgggatattcagttttccactgtaggcctcactgggctttgtagtattccttcatagattctacaaaatggatgttcccaacttgctgaatcaaaataggtttatctccgtgagataaatccacacatcacaaag

SEQ ID NO: 396907 - DNA, 450 bp, Homo sapiens
ttagttgaatctgaagtcagactttttgatctcctagttcattcagaagagtgaggtcaagtttaacaaaagaggaagtctcctcaaaagaagatgtaatgatgtgccaggcacagtggctcacgcctgtaatcccagtactttgggaggccaaggcgggcagatcacctgaggttgggagtttgagaccagcctgaccaacatggagaaaccccatctatataaaaaatacaaaattatctgagcgtggtgatgcatgcctgcaatcccagctactcaggaggctgaggcaggagaattgcttgaacccgggaggcggaggttgcggtgagcagagatcacaccattgcactccagcctgggcaacaagcgcaaaactctgtctcaaaaaaaaaaaaraaagaaaaagaaaaaaaagatgtcatgatgcttaataagagggtgaaacct

SEQ ID NO: 396908 - DNA, 572 bp, Homo sapiens
agaatgagttgtcccctccccatcagccctgaaagtcttcaggagagaagagataaccatctgttccagttggccatttgggaaattaaaattttaaatcattagttgattttccagtcctcactagtgtcattgtgtttctatatccacgtaagtatatatttaactaaaatgcattgaaattaatgctgcaagtgagtatccactgagtattatgaaaacagagtcaggctcaattcactagtttcaaaatgcatatgccagctctcatgctccatttgtgggtaaactggtgtcacttttttggagagcaacctggyaataaccattataatttaaaatgcaccatcctttaaaccctgctaggaaggccacaggcgaaagaaagctgatatcctcccaccggaaacaatctgaaagcctatcaatatagtcttgattaaattaaaagggtacatctgtgtgtgagagtctatataattgtttaaaagaatgaggtagaactgtttgtgttaattttgaaaagatatccaaatactgtatattattaaatccaagtatatatttaataa

SEQ ID NO: 396909 - DNA, 498 bp, Homo sapiens
tggtggttccaatcctggagcctcttcttcaagtgccgtcattcctagtcctaattctgctgctgcttgtgctgtgcccatcctgtctcatctccgagaactgacctccattcatgaggacccagatatggcagccatgagctggggataggttggggcagtggggagttaactgggttggaaagaaaactagttgtggctaggaatagactgccaaaagtagggggtggtcagaaagttaaaggaacccctagatggggtgaaggatgctctgcattcactctctgaggaaaaggcacagtttgccttactttacaatgctttaagaaccaggaataaacatgtaagagcaattaatgtaaaaacttaaaatctcaatagacgtggtcmtaactacacacactgggcttaagtttgcttctgttctatcttcgaatcttttttataatttatttatttatttgtagagacaaggatcttgccatgttgcccaggctg

SEQ ID NO: 396910 - DNA, 498 bp, Homo sapiens
tggtggttccaatcctggagcctcttcttcaagtgccgtcattcctagtcctaattctgctgctgcttgtgctgtgcccatcctgtctcatctccgagaactgacctccattcatgaggacccagatatggcagccatgagctggggataggttggggcagtggggagttaactgggttggaaagaaaactagttgtggctaggaatagactgccaaaagtagggggtggtcagaaagttaaaggaacccctagatggggtgaaggatgctctgcattcactctctgaggaaaaggcacagtttgccttactttacaatgctttaagaaccaggaataaacatgtaagagcaattaatgtaaaaacttaaaatctcaatagacgtggtcctaactacacacactgggcttaagtttgcttctgttctatcttcgaatctttttwataatttatttatttatttgtagagacaaggatcttgccatgttgcccaggctg

SEQ ID NO: 396911 - DNA, 534 bp, Homo sapiens
gggtatttttggttgtcacaaatggaggggtcatccagtggttagaagccagggatgctacaaaacattctacaatgcacagcttccaacaaagtattagcttgccccaaatgtcaatagtgctcagattaagcagccctggtctacatgatcatgcagttggattattctactagtctgtatgtctaactcttgtctcttcctccctttccaacagcaccagataaatattcccaaagtggtgcttttattacataattcctctgctcaaaaactcttctgctcayataatggttattcattaccaatgcacattaaatctaaatttctcattgagtagccaaaatatgttactctttgaatccatgttagatgctgtccctgaacattttatccccagccaagagtactccttcaccatctaatgatctctaaaacagtatcatgtatatagtacccaattgctatattgcttattaaattaattttcgaaaggcttatttacaacttcatccaacacttctgtgaagtctt

SEQ ID NO: 396912 - DNA, 520 bp, Homo sapiens
gtgtagctctgtcagccttgtttttaaaaatgaaagaaaaaatatctccctctaacatcacccaaagggaaatttccaagcaatggaatatatcatgattctcacatctagcctagagagctcctgactagaaaagtaactttcaaaaactgtttcctcatctgctgaaaaacaaaatttaaacagtcccctggttcactctttttggggggagaaggggagcagaaaggaaatatgagagagtctacattgcatgctagacacggccacatttataatacatcgaattctcttaatccttttttttcaaactaagcgaacataagttcagagargtaatttgccaaggacctatgactagttagtgctaaagataaaattcaaaaccaggcctctgaatttccgaccccctactcttcccaccacagcggaatgcctcacctatcaaaaataaaaatttctaatggcctgttgagcttttccatgatctcttcacctaagtaactatttccaattaatg

SEQ ID NO: 396913 - DNA, 520 bp, Homo sapiens
gtgtagctctgtcagccttgtttttaaaaatgaaagaaaaaatatctccctctaacatcacccaaagggaaatttccaagcaatggaatatatcatgattctcacatctagcctagagagctcctgactagaaaagtaactttcaaaaactgtttcctcatctgctgaaaaacaaaatttaaacagtcccctggttcactctttttggggggagaaggggagcagaaaggaaatatgagagagtctacattgcatgctagacacggccacatttataatacatcgaattctcttaatccttttttttcaaactaagcgaacataagttcagagaggtaatttgccaaggacctatgactagttagtgctaaagataaaattcaaaaccaggcctctgaatttccgaccccctactcttcccaccacagcggaatgcctcacctatcaaaaataaaaatttctaatggcctrttgagcttttccatgatctcttcacctaagtaactatttccaattaatg

SEQ ID NO: 396914 - DNA, 586 bp, Homo sapiens
actcggcatgattagaaatcagcggattaggtggttctttttatttwtttttattttttaaattagcttctttgactgttctcagcttccttactcagatgaatttcaagtatatcatttaaatgatcaccttcctctataatgttcgtgtttggtcaattaaataaatgttgtcatgggtactactgccgatcacaggtgctgtatcaagttggaaatgtcagactctggcagctgcctggacccatttcagcacctggcggatgcaggtggcctccctctcttttgctctgttgagctgatggcggctgtatcccccaaatgaacaagagaggatggtgacagtgatgaagtcgaaaatgcactgggatctctgtgatgtcaacccccctccccccatcatcacgaggcccagcgtgatggggagagaatactggctgtgcagacgacagccaaaacgtttctgtcgctgacacacgacagcctctggccaagaggcagggaaggacagtgcagccaatggaacaggcatagaccaggagcagtcagtggccaagaggagtaagaaaaaatccacacaagtgag

SEQ ID NO: 396915 - DNA, 586 bp, Homo sapiens
actcggcatgattagaaatcagcggattaggtggttctttttatttatttttattttttaaattagcttctttgactgttctcagcttccttactcagatgaatttcaagtatatcatttaaatgatcaccttcctctataatgttcgtgtttggtcaattaaataaatgttgtcatgggtactactgccgatcacaggtgctgtatcaagttggaaatgtcagactctggcagctgcctggacccatttcagcacctggyggatgcaggtggcctccctctcttttgctctgttgagctgatggcggctgtatcccccaaatgaacaagagaggatggtgacagtgatgaagtcgaaaatgcactgggatctctgtgatgtcaacccccctccccccatcatcacgaggcccagcgtgatggggagagaatactggctgtgcagacgacagccaaaacgtttctgtcgctgacacacgacagcctctggccaagaggcagggaaggacagtgcagccaatggaacaggcatagaccaggagcagtcagtggccaagaggagtaagaaaaaatccacacaagtgag

SEQ ID NO: 396916 - DNA, 586 bp, Homo sapiens
actcggcatgattagaaatcagcggattaggtggttctttttatttatttttattttttaaattagcttctttgactgttctcagcttccttactcagatgaatttcaagtatatcatttaaatgatcaccttcctctataatgttcgtgtttggtcaattaaataaatgttgtcatgggtactactgccgatcacaggtgctgtatcaagttggaaatgtcagactctggcagctgcctggacccatttcagcacctggcggatgcaggtggcctccctctcttttgctctgttgagctgatggcggctgtatcccccaaatgaacaagagaggatggtgacagtgatgaagtcgaaaatgcactgggatctctgtgatgtcaacccccmtccccccatcatcacgaggcccagcgtgatggggagagaatactggctgtgcagacgacagccaaaacgtttctgtcgctgacacacgacagcctctggccaagaggcagggaaggacagtgcagccaatggaacaggcatagaccaggagcagtcagtggccaagaggagtaagaaaaaatccacacaagtgag

SEQ ID NO: 396917 - DNA, 586 bp, Homo sapiens
actcggcatgattagaaatcagcggattaggtggttctttttatttatttttattttttaaattagcttctttgactgttctcagcttccttactcagatgaatttcaagtatatcatttaaatgatcaccttcctctataatgttcgtgtttggtcaattaaataaatgttgtcatgggtactactgccgatcacaggtgctgtatcaagttggaaatgtcagactctggcagctgcctggacccatttcagcacctggcggatgcaggtggcctccctctcttttgctctgttgagctgatggcggctgtatcccccaaatgaacaagagaggatggtgacagtgatgaagtcgaaaatgcactgggatctctgtgatgtcaaccccccyccccccatcatcacgaggcccagcgtgatggggagagaatactggctgtgcagacgacagccaaaacgtttctgtcgctgacacacgacagcctctggccaagaggcagggaaggacagtgcagccaatggaacaggcatagaccaggagcagtcagtggccaagaggagtaagaaaaaatccacacaagtgag

SEQ ID NO: 396918 - DNA, 566 bp, Homo sapiens
attttccatgatgtaaacgtgttccaggttatttcaaatgccggcttgagcgtgctccagattgcaccaaacgtccaggagcataggaagggttaggcagctgccagtggatccccagccataggaggggcctttggatttggggcggggacaggaagattggcagtgtgcagagggggaatgtgcttggaggtttgcagaaggggagtgcccgctgggctggggtgggcattcatgcagctcagcagattggagacaagtacattatggtggattggggccagacatcccaatgcggggggctggagagtgtcctgtagccaacaggccactggagaactccatgctgggagtgatgggatgaaagtgtgtttggagcctatttttctggaaggtagcaggactcaagggagagataactgtgaggggtaacaggaggcagaaaccaggaagtccacctgtgagatgcggtccacamcaggagccagccaccaaaatctaaaggatggcattaaggcaaggagtattttgaaagaataatccaatgcaacaatttgtttagtttg

SEQ ID NO: 396919 - DNA, 590 bp, Homo sapiens
ccaatactacacctttcagaacttccaaaaaattttgtcaatatgtgtgaaagggtatctaattgttaattttcattttcatgattattattaggttgagcactttttcacatgcttatgggctatttatgctaacttcttgaggtgttatttttcacttattaatttataggagagctttatatattctggatactaaacctgtctaggtaacatgtgttgcaaatatctctgccaagttttgcatatttttttctcattgcggtatccaataaacagaagtcttaaatttttatgtgatcaagttagtttttactcttgccgtttgttcttcttccctatgtaaagataaaagagatgctccacagtttttttctaagaatgttgagaaggtatctttatccattaaaatatatttttaggtttggtctatgggattaagtttcaatttccttttttcccccttatggagaccagtggtcccagtgttgcttattgtaaaatttactatcttcacttaaccacaakaaaagctgtgttacaaaatatgtttccaagtatgtgtgaaaaatatatttatctttatgatt

SEQ ID NO: 396920 - DNA, 637 bp, Homo sapiens
tggcatgatttgatttgtgtgaaggcaatgaaatgatacacagatacaccgaagcctcccaaaagaatcctggttccaagattcaagaagatggattaatgtttttccattaattgttggaatttatgccatttttttactatgtgccatcaattttaaagcacttctgaaaagagataacaatctacaatagctggcattttaaattcataaaaatatagtattttcttctatttttatacatttatgatgcattatttcttatttcccaggaattttactacctttgttttgaatgattaaaaaggaaacatagcaccttttttcaacacatcaccaagatagcctagttaatattcttctctttctgaagtagttgaattgggakagacagcttgccaggcctgctgccacttgtcagcatcgcatccctacattcaaccacacttgcatctaacgaccgtctctttcattaaatttcttttgcaccttttcttcctgaatgagtgcatgatagttaattttcctgtgcacttgcatgtctcaagaaggttttaattctttttgtattgcattaatatttaagttaagtttataattgcaaaatgatttatactcacaacattgaagactcctt

SEQ ID NO: 396921 - DNA, 447 bp, Homo sapiens
ggtgtgctcacaaacatgagtgctcatgacactagtcatacaaactcaaattcccattacagttgtatacaaacatgatggccgacaagaaggaagttcctttaagcccacttggagcattaagacaaatttaccatgtgaatccctaattgaactctgagttacttctgtgaaggaatgaagaatgatatcataaatgaatttcatatagcactcaaagctccccctctatatggttcaggatagacttgagtatccacggttctggagtgcaagggaggagaaaggaaaggtgcattcagacaaaaaaaawgtgtacagaacacaccacggatatcagaagaggctgctcatggcaaggcgtggtggctcgtacctgtaatcccagcactatgggaggccgaggtgggtggatcacctgagctcaggagttcaggaccagcctgg

SEQ ID NO: 396922 - DNA, 447 bp, Homo sapiens
ggtgtgctcacaaacatgagtgctcatgacactagtcatacaaactcaaattcccattacagttgtatacaaacatgatggccgacaagaaggaagttcctttaagcccacttggagcattaagacaaatttaccatgtgaatccctaattgaactctgagttacttctgtgaaggaatgaagaatgatatcataaatgaatttcatatagcactcaaagctccccctctatatggttcaggatagacttgagtatccacggttctggagtgcaagggaggagaaaggaaaggtgcattcagacaaaaaaaaagtgtacagaacacaccasggatatcagaagaggctgctcatggcaaggcgtggtggctcgtacctgtaatcccagcactatgggaggccgaggtgggtggatcacctgagctcaggagttcaggaccagcctgg

SEQ ID NO: 396923 - DNA, 445 bp, Homo sapiens
gtgctcacaaacatgagtgctcatgacactagtcatacaaactcaaattcccattacagttgtatacaaacatgatggccgacaagaaggaagttcctttaagcccacttggagcattaagacaaatttaccatgtgaatccctaattgaactctgagttacttctgtgaaggaatgaagaatgatatcataaatgaatttcatatagcactcaaagctccccctctatatggttcaggatagacttgagtatccacggttctggagtgcaagggaggagaaaggaaaggtgcattcagacaaaaaaaaagtgtacagaacacaccacggatatcagaagaggctgctcatggcaaggcgtggtggctcstacctgtaatcccagcactatgggaggccgaggtgggtggatcacctgagctcaggagttcaggaccagcctggg

SEQ ID NO: 396924 - DNA, 452 bp, Homo sapiens
tgcctctgggatcagggactctaatctggaaataggtagtmggagaggtcggtgatgcagtctctggatcagagacctgagctatatggggttagagaggggccctgggcaggcgagtctctggggagtgtggtgagaatccttgtgtaagatgctgggaggaggtggggtcagggctggggtccgtgggccgacgggttgggggatggccagcgtcagggatcagtagtagagattctatgtgccctgatcgccagtggaggttttaaatacagagtattcatgagtttagcaatgttattcgcctctcattatttaaataatttgaaattttccccaataactagtgtcttagaagtcatgaaaatttcagaaaatgacaggtctcctgagttcgtgatgggagttgggcagcagtcgcatacgagcacctggagagtccttgccagttc

SEQ ID NO: 396925 - DNA, 349 bp, Homo sapiens
cggggccacagtcatctgaaactcacttacatggctgacaattgatgttggctgttgcctggagaagacatatgtggcstggtggaatggaatggtgactagattcaagaaagagcttcccaggaggaaggctaccaagagaccgaagtagaggcttcagtttcttaaaaaaaaaaaaaaaaaaaaaaaatcgggcaaggcacgatggctcatgcatgtaatcccagcactttgggaggccaaggcaggcagatcacaaggtcatgagatcgagaccatcctggccaacatagtgaaacccgtctccaataaaaaaaaaaaatacaaaaattagctgggcatggtggtg

SEQ ID NO: 396926 - DNA, 349 bp, Homo sapiens
cggggccacagtcatctgaaactcacttacatggctgacaattgatgttggctgttgcctggagaagacatatgtggcgtggtggaatggaatggtgactagattcaagaaagagcttcccaggagsaaggctaccaagagaccgaagtagaggcttcagtttcttaaaaaaaaaaaaaaaaaaaaaaaatcgggcaaggcacgatggctcatgcatgtaatcccagcactttgggaggccaaggcaggcagatcacaaggtcatgagatcgagaccatcctggccaacatagtgaaacccgtctccaataaaaaaaaaaaatacaaaaattagctgggcatggtggtg

SEQ ID NO: 396927 - DNA, 349 bp, Homo sapiens
cggggccacagtcatctgaaactcacttacatggctgacaattgatgttggctgttgcctggagaagacatatgtggcgtggtggaatggaatggtgactagattcaagaaagagcttcccaggaggaaggctaccaagagaccgaagtagaggcttcagtttcttaaaaaaaaaaaaaaaaaaaaaaaatcgggcaaggcacgatggctcaygcatgtaatcccagcactttgggaggccaaggcaggcagatcacaaggtcatgagatcgagaccatcctggccaacatagtgaaacccgtctccaataaaaaaaaaaaatacaaaaattagctgggcatggtggtg

SEQ ID NO: 396928 - DNA, 592 bp, Homo sapiens
tacatggatggcagcaggcaaartgagagcttgtgcagggaaactctcatttttaaaaccatcagatctcgtgagactcattcactatcatgagaacagcacagagcaaaatgaatcaacagttgacaaattaaggattaacttatgcaagatttgactgagaatactgaagaaaacattctcgacatactcgacatcattagttattaaagaaatgcaaacgaaacgtataatgagctgcctcttcaaacctactagattcaacaaatatttattatttatttgctctatgccagaaatgtgtcttcatgccaggttaagaaaaagagaaaacagaaaaaaaaatagctgtccctgacaggaagagcttacgttctttctttttgggcgagaaaggcagtgaaaaattaaaaaaagaaacgcagtattaacatgcggataagttctagggtgaaatttgaatgcagatccagagtgactgtctgcctctcaaaagaattctgctgagatgtctagaattaagtagagtagcaagcaaatatctacagcgcatgtctctttcaaagacagaaaaacaaagtggtttttaagg

SEQ ID NO: 396929 - DNA, 592 bp, Homo sapiens
tacatggatggcagcaggcaaagtgagagcttgtgcagggaaactctcatttttaaaaccatcagatctcgtgagactcattcactatcatgagaacagcacagagcaaaatgaatcaacagttgacaaattaaggattaacttatgcaagatttgactgagaatactgaagaaaacattctcgacatactcgacatcattagttattaaagaaatgcaaacgaaamgtataatgagctgcctcttcaaacctactagattcaacaaatatttattatttatttgctctatgccagaaatgtgtcttcatgccaggttaagaaaaagagaaaacagaaaaaaaaatagctgtccctgacaggaagagcttacgttctttctttttgggcgagaaaggcagtgaaaaattaaaaaaagaaacgcagtattaacatgcggataagttctagggtgaaatttgaatgcagatccagagtgactgtctgcctctcaaaagaattctgctgagatgtctagaattaagtagagtagcaagcaaatatctacagcgcatgtctctttcaaagacagaaaaacaaagtggtttttaagg

SEQ ID NO: 396930 - DNA, 592 bp, Homo sapiens
tacatggatggcagcaggcaaagtgagagcttgtgcagggaaactctcatttttaaaaccatcagatctcgtgagactcattcactatcatgagaacagcacagagcaaaatgaatcaacagttgacaaattaaggattaacttatgcaagatttgactgagaatactgaagaaaacattctcgacatactcgacatcattagttattaaagaaatgcaaacgaaacgtataatgagctgcctcttcaaacctactagattcaacaaatatttattattyatttgctctatgccagaaatgtgtcttcatgccaggttaagaaaaagagaaaacagaaaaaaaaatagctgtccctgacaggaagagcttacgttctttctttttgggcgagaaaggcagtgaaaaattaaaaaaagaaacgcagtattaacatgcggataagttctagggtgaaatttgaatgcagatccagagtgactgtctgcctctcaaaagaattctgctgagatgtctagaattaagtagagtagcaagcaaatatctacagcgcatgtctctttcaaagacagaaaaacaaagtggtttttaagg

SEQ ID NO: 396931 - DNA, 626 bp, Homo sapiens
gttctttcttttttttgttaagaaatagggtctcactatgttgcccaggttgtagtgcagtgactattcaaaggggtcatcccactactgataagcagaggagttttattctgctcaatttttgagttgaccactccttaggcaacctggtggtcctctgctccctggaagctaacatattgatgccaaacttagtgcagacacttcctcagcatagtgcatacaacccagaamtcctgggctcaagtgttcctcccgcctcagcatcctgagtagctgggacaacaggtgtgtgtcacctggctgaaaggtatttttaaatacaaatgttgtccaggagtgacagaagctggagaattggactacttgatggaggctttgtacaagctttgaacaataataacaacaaaattgaaatgccaaaaatattgtttagcagttaaccaccaataaaaggaagccagccatttcacacagaggattttgttaattgattgcgtgattcaaggaaataatattattaggtgtgtattagtccattattgcattgctataaagaaatacctgagattgggtaatttataaagaaaagaggtttaactgactcacagttctgcatgctgtac

SEQ ID NO: 396932 - DNA, 626 bp, Homo sapiens
gttctttcttttttttgttaagaaatagggtctcactatgttgcccaggttgtagtgcagtgactattcaaaggggtcatcccactactgataagcagaggagttttattctgctcaatttttgagttgaccactccttaggcaacctggtggtcctctgctccctggaagctaacatattgatgccaaacttagtgcagacacttcctcagcatagtgcatacaacccagaaatcctgggctcaagtgttcctcccgcctcagcatcctgagtagctgggacaacaggtgtgtgtcacctggctgaaaggtatttttaaatacaaatgttgtccaggagtgacagaagctggagaattggactacttgatggaggctttgtacaagctttgaacaataataacaacaaaattgaaatgccaaaaatattgtttagcagttaaccaccaataaaaggaagccagycatttcacacagaggattttgttaattgattgcgtgattcaaggaaataatattattaggtgtgtattagtccattattgcattgctataaagaaatacctgagattgggtaatttataaagaaaagaggtttaactgactcacagttctgcatgctgtac

SEQ ID NO: 396933 - DNA, 593 bp, Homo sapiens
tgagactgaaagttatagagagcacaggcttactcgaaaattagtagacaaaagaacatctgtaagttcaatcatgaaggagtgccagaattaaagagaaaataaggaaataataaagggaatcttttgatgtgaggaaccaattgggctaccaactcagcctgccagcctgccattccagtgacagtaggaaataaatgttctgtaagttatttggaaattagaggacaaagtaattgtttgttctataggtagagaaacatttttgtaaatgataatacagctgttctaccgatttctcttaattttcaaaatttttgaaggggtacactatattttcatgatttgttcattctgatttccaactcatatttgttcatcattttctctttamattttaaaaagttgaaagacattcatatcacaaaattttcacaggataatttttctagttgcaactgtagatttatgtggatatatacaaatctctctagtgacacatctaaagattaatgttatgttctgttccatagggagcaaatataccacatgaaacatcgcaactatgaatccaactagactgtatgggaaac

SEQ ID NO: 396934 - DNA, 593 bp, Homo sapiens
tgagactgaaagttatagagagcacaggcttactcgaaaattagtagacaaaagaacatctgtaagttcaatcatgaaggagtgccagaattaaagagaaaataaggaaataataaagggaatcttttgatgtgaggaaccaattgggctaccaactcagcctgccagcctgccattccagtgacagtaggaaataaatgttctgtaagttatttggaaattagaggacaaagtaattgtttgttctataggtagagaaacatttttgtaaatgataatacagctgttctaccgatttctcttaattttcaaaatttttgaaggggtacactatattttcatgatttgttcattctgatttccaactcatatttgttcatcattttctctttaawttttaaaaagttgaaagacattcatatcacaaaattttcacaggataatttttctagttgcaactgtagatttatgtggatatatacaaatctctctagtgacacatctaaagattaatgttatgttctgttccatagggagcaaatataccacatgaaacatcgcaactatgaatccaactagactgtatgggaaac

SEQ ID NO: 396935 - DNA, 315 bp, Homo sapiens
aaccagcttaaaaaaaaagaccaccacttgtagaaaacagttaatatttygatggtttacctggaagtttactgggcataaatttataaaatacatttatggatggaaataaactgttttactaaacaatattacagaattctgaatagatgctgattaagcagcaaatcaacaaaactgtttatttaccagtttggtggctattatgctaattagatcatctgtttaaaatgtgtccatatggacaatttttctgtaaatgttttctttatctccacattgtgtggtagtattttcatagaaccaagtagaaat

SEQ ID NO: 396936 - DNA, 604 bp, Homo sapiens
taaattaggtattgatgggacgtatttcaaaataataagaggaaacacttttcaacatgttttatgagtctaccrttatccccataccaaaaccataaaacagacattacaagaaaatgtcctgtagacaaatatgtattttgatgatgaatttagatttcaaaaacttcagcaaaatattatccaattaaatcctctcatgtctgtgtgtgtgtgtgtgtgcatgcacgtgtgtttgtaaaatatatcattactaattggcgtttatcttgggagttcaagatggtttccatattcaatcaacccatcaatgtggactatggtcacttgaaaagaccagcaaatcctctgcacaaaaggccactagaaattcattaaagcagccttccatcattctcgaaattgaccaaagcattcaactacctgagaaatatttatgtttggaaagctattgaaatgcaattaaaaatatcaggaaacctgtttttaccttttgtcctaatcttgctaaatccttcttaattttaggagacactgcttctccttccactgttcttttactttctccttcccctttgtttttgcctcccccttcctctccctt

SEQ ID NO: 396937 - DNA, 604 bp, Homo sapiens
taaattaggtattgatgggacgtatttcaaaataataagaggaaacacttttcaacatgttttatgagtctaccgttatccccataccaaaaccataaaacagacattrcaagaaaatgtcctgtagacaaatatgtattttgatgatgaatttagatttcaaaaacttcagcaaaatattatccaattaaatcctctcatgtctgtgtgtgtgtgtgtgtgcatgcacgtgtgtttgtaaaatatatcattactaattggcgtttatcttgggagttcaagatggtttccatattcaatcaacccatcaatgtggactatggtcacttgaaaagaccagcaaatcctctgcacaaaaggccactagaaattcattaaagcagccttccatcattctcgaaattgaccaaagcattcaactacctgagaaatatttatgtttggaaagctattgaaatgcaattaaaaatatcaggaaacctgtttttaccttttgtcctaatcttgctaaatccttcttaattttaggagacactgcttctccttccactgttcttttactttctccttcccctttgtttttgcctcccccttcctctccctt

SEQ ID NO: 396938 - DNA, 604 bp, Homo sapiens
taaattaggtattgatgggacgtatttcaaaataataagaggaaacacttttcaacatgttttatgagtctaccgttatccccataccaaaaccataaaacagacattacaagaaaatgtcctgtagacaaatatgtattttgatgatgaatttagatttcaaaaacttcagcaaaatattatccaattaaatcctctcatgtctgtgtgtgtrtgtgtgtgcatgcacgtgtgtttgtaaaatatatcattactaattggcgtttatcttgggagttcaagatggtttccatattcaatcaacccatcaatgtggactatggtcacttgaaaagaccagcaaatcctctgcacaaaaggccactagaaattcattaaagcagccttccatcattctcgaaattgaccaaagcattcaactacctgagaaatatttatgtttggaaagctattgaaatgcaattaaaaatatcaggaaacctgtttttaccttttgtcctaatcttgctaaatccttcttaattttaggagacactgcttctccttccactgttcttttactttctccttcccctttgtttttgcctcccccttcctctccctt

SEQ ID NO: 396939 - DNA, 604 bp, Homo sapiens
taaattaggtattgatgggacgtatttcaaaataataagaggaaacacttttcaacatgttttatgagtctaccgttatccccataccaaaaccataaaacagacattacaagaaaatgtcctgtagacaaatatgtattttgatgatgaatttagatttcaaaaacttcagcaaaatattatccaattaaatcctctcatgtctgtgtgtgtgtgtgtgtgcatgcacgtgtgtttgtaaaatatatcattactaattggcgtttatcttgggagttcaagatggtttccatattcaatcaacccatcaatgtggactayggtcacttgaaaagaccagcaaatcctctgcacaaaaggccactagaaattcattaaagcagccttccatcattctcgaaattgaccaaagcattcaactacctgagaaatatttatgtttggaaagctattgaaatgcaattaaaaatatcaggaaacctgtttttaccttttgtcctaatcttgctaaatccttcttaattttaggagacactgcttctccttccactgttcttttactttctccttcccctttgtttttgcctcccccttcctctccctt

SEQ ID NO: 396940 - DNA, 529 bp, Homo sapiens
tttcaacatgttttatgagtctaccgttatccccataccaaaaccataaaacagacattacaagaaaatgtcctgtagacaaatatgtattttgatgatgaatttagatttcaaaaacttcagcaaaatattatccaattaaatcctctcatgtctgtgtgtgtgtgtgtgtgcatgcacgtgtgtttgtaaaatatatcattactaattggcgtttatcttgggagttcaagatggtttccatattcaatcaacccatcaatgtggactatggtcacttgaaaagaccagcaaatcctctgcacraaaggccactagaaattcattaaagcagccttccatcattctcgaaattgaccaaagcattcaactacctgagaaatatttatgtttggaaagctattgaaatgcaattaaaaatatcaggaaacctgtttttaccttttgtcctaatcttgctaaatccttcttaattttaggagacactgcttctccttccactgttcttttactttctccttcccctttg

SEQ ID NO: 396941 - DNA, 496 bp, Homo sapiens
ttaattacatgtatatatacatgtatacaatagatagtctatatataaaatatcatttcatgtcatgttatattaatataaagaaaatgaggagtacctctgcaatagagaaatctggaagacattacctttcaaatgatcaaaattaaaatcaccactgatgggaaaaattaatttcatatataacctgaagaaatatgataagaagagcatagcaycatgttggtgattttattgccaataatgcatgtcttgacacctcattatgagaaaacaccagacaaatcgaaattgggagacattctaaaaatagaatccattggaatattaccttcaaaaaatgtttaggatgctatgaagggtgaagaaggactatggaatgcttctgatttaaagaagttaaagagacatagaaaccaggaacaacacattatcctgaagtggattgttttttataaaaagcatcagggcagtttgtgaactagaatgggtcctc

SEQ ID NO: 396942 - DNA, 496 bp, Homo sapiens
ttaattacatgtatatatacatgtatacaatagatagtctatatataaaatatcatttcatgtcatgttatattaatataaagaaaatgaggagtacctctgcaatagagaaatctggaagacattacctttcaaatgatcaaaattaaaatcaccactgatgggaaaaattaatttcatatataacctgaagaaatatgataagaagagcatagcaccatgttggtgattttattgccaataatgcatgtcttgacacctcattatgagaaaacaccagacaaatcgaaattgggagacattctaaaaatagaatccattggaatattaccttcaaaaaatgtttaggatgctatgaaggktgaagaaggactatggaatgcttctgatttaaagaagttaaagagacatagaaaccaggaacaacacattatcctgaagtggattgttttttataaaaagcatcagggcagtttgtgaactagaatgggtcctc

SEQ ID NO: 396943 - DNA, 547 bp, Homo sapiens
gcaggaaatcacagatagcattcctattatttaagcaagcaataacttttattgttttaagagttggaggtttaattttttcagcattactgttaccacaattattacaggaaatgaaaccagtaaaaaaaaaatagagggaacaargtttattgacatctatgaggcattttctttcccctaatattacatactctagattttatttctgcacaaaaaatattctctatgtctagcctaaagaactatgtcttattcatatttatactcttcatagatcaaaagtgtgcttaaaatactgtacatttaatgagttatttttgaatgtaagcaactttgaattcatctttgcatttttaatcttatgtttctattaaatgtattattaaattctactaacactttcctcaaaataattctcaatattttggtttttaattttttactgcctttgcattctcctggcagagacccatttcacctctcctatagattatttcataaagattttatcgtctgtatcatatatatttacaatattaaaagt

SEQ ID NO: 396944 - DNA, 547 bp, Homo sapiens
gcaggaaatcacagatagcattcctattatttaagcaagcaataacttttattgttttaagagttggaggtttaattttttcagcattactgttaccacaattattacaggaaatgaaaccagtaaaaaaaaaatagagggaacaaggtttattgacatctatgaggcattttctttcccctaatattacatactctagattttatttctgyacaaaaaatattctctatgtctagcctaaagaactatgtcttattcatatttatactcttcatagatcaaaagtgtgcttaaaatactgtacatttaatgagttatttttgaatgtaagcaactttgaattcatctttgcatttttaatcttatgtttctattaaatgtattattaaattctactaacactttcctcaaaataattctcaatattttggtttttaattttttactgcctttgcattctcctggcagagacccatttcacctctcctatagattatttcataaagattttatcgtctgtatcatatatatttacaatattaaaagt

SEQ ID NO: 396945 - DNA, 589 bp, Homo sapiens
ctaagacacaataaaattttaaatatgttatttacacaatgatttatgactcaggcagctccaaaccataaaagtggcttaagagcaccactgagggatcacagggggaggcttttagaggacaggcacagaagaaaactaaagatartatttgactatttatagttgtacagttatttgtaccttatttggtaccaaagttgtacgttattaggtctatcccactggaaagtcttcagttgtatgattatgtgtgttggctacttctgattggttgaacttaagttctgtttttctttaatatagaaattgataatagctcaagtttcccttatatctgtagatcaaacaaggtttagatcacttatgatgcctaactggttttgtctgctcagaaattcttcaggcctggactccattttaatttactttaatgattgttactttaaatttggattaaacagtggattcatatgtactgagtgaaaaaaaaatggaaatagatgttataaaatttatttgaaatcattcagccaggatgttttaaacagcataaattagcagaattaccaaaaacacattttgaaaa

SEQ ID NO: 396946 - DNA, 370 bp, Homo sapiens
ggcaccaccttacatgactgatgcccagtaaaagccctggagaccaaaacttaaatgagcttctctgattgacaacacttcaatatgctgtcaaatattgttgctgggagaattacgtgtgttcttatgggattccactgggagaggacacctgaaagcttgtacctgatatcttctacatttctccccatgggmtttttttctttgttgattttaatctgtatcttttcattgtagtaaactgtaactatgaatgtaatgtgttttctaagacctgtgaatcattatagttaatctttgagcctaagggtggtcataaggagccccaacacactaataaattactttcataaagaatatataaaagctg

SEQ ID NO: 396947 - DNA, 612 bp, Homo sapiens
tggtttcataagaatttagaattgctttctctaattctatgaaaaatgatgtcagtattttgataggaagtgcattgaatctgtagattgcttttagcagtaaggtcattttcacaaatatgattcttcytatccatgagcatgggatgtatttccatttgtttatatcatctctaatttatttcagcagtttttgtagctctccttatggagatctttcacttatttggttaagtgtatttcaattttttttctgctgctattgtaaaagaaattgagttcttgatttgattctcagcttgatcattgttggtgctatgcagtagtactaatttgtgtacattcattttgtaacctaagattttatgaattcattcatcaaatagaagagtcttttggtggaattcttaggcttatctaagtatatgcttaaatcatcagcaaacagagataatttgtcttcctcttttccagcttggatgccctttatttcttcctcttgcttgattgctctgggtaggacttccagtactatgttaagtagaagtggtgaaaatgggcatccttaacttgttctagccctcagtgggaagactttcaacttttccccat

SEQ ID NO: 396948 - DNA, 438 bp, Homo sapiens
tggtgaaaccctctctactaaaaatacaaaaattagctgggcatggtggcacacaactgtagtcccaactactcaggaggcggaggcacaagaattgcttgaacccaggaggcagagcctgcagtgagccaagatggtgccactgtacgccagcctggatgacaaarcaagactctgtctcaaaaaaaaaaaaaaaaaaaaaaacagaaaggaaaatgttaacactgactgcacaaaaataaaaataatcaaataaccactaaaaactactatgaacacctcaatgcacacaaactagaaaaccttgaaaagatggataaattcctggacacatacacccacccaagactaagccaggaagaaattgattgcctgaacagaccagcaacaagctccaaaattgaaccagtaacaaatagcctaccaaccaaaaaaagc

SEQ ID NO: 396949 - DNA, 605 bp, Homo sapiens
gaaagcaatatggtgattcctcaaagagctaaaagcagaactgctatttaactcagtaatcccagtactgggtatatacccagaggaatataaaccagtctaccataaagacacttgcacatgtaaatgttcatcgcagcaatattcacaatagcaaagacatggaatcagcctaaatgcccatcaatgacagattggataaagaaartgtggtacatatacaccatggagtaccatgcagctgtaagaaagaatgagattatgtcgtttgcaggaacatggctagagctggaggctattatcctcagcaactaacgcaggaacagaaaaccaaatactgcatgttcttacttgtaagtgaaggctaaatgatgagaacttattaacacaaagagggaaacagcagacactggggtctgcttgagcatgcagtgtgggaggtgggagaggagtggaaacagtaactgttgggtactgggcttaattcctgggtgattaaataacctgtacaacaagaccccatgacatgagtttacctttgtaacaaatcttcacatgtacccctgaccttacaataaaagttaaaagaaaaaaaaaaaaagcca

SEQ ID NO: 396950 - DNA, 605 bp, Homo sapiens
gaaagcaatatggtgattcctcaaagagctaaaagcagaactgctatttaactcagtaatcccagtactgggtatatacccagaggaatataaaccagtctaccataaagacacttgcacatgtaaatgttcatcgcagcaatattcacaatagcaaagacatggaatcagcctaaatgcccatcaatgacagattggataaagaaagtgtggtacatatacaccatggagtaccatgcagctgtaaraaagaatgagattatgtcgtttgcaggaacatggctagagctggaggctattatcctcagcaactaacgcaggaacagaaaaccaaatactgcatgttcttacttgtaagtgaaggctaaatgatgagaacttattaacacaaagagggaaacagcagacactggggtctgcttgagcatgcagtgtgggaggtgggagaggagtggaaacagtaactgttgggtactgggcttaattcctgggtgattaaataacctgtacaacaagaccccatgacatgagtttacctttgtaacaaatcttcacatgtacccctgaccttacaataaaagttaaaagaaaaaaaaaaaaagcca

SEQ ID NO: 396951 - DNA, 581 bp, Homo sapiens
caattgttaatcgttctaattgttagaacaattgttaatcrttctaattgttagaacaattgttaattgttctaacaatcttaattcttctaactaatgatctattttatttctattttcaaataaccaaattttgtttcattaaacttttgtatttttatttcaatttcatttagttctgctgtaatctttcttttcttctcctggctttaagtttgatttgttgtttctatagtttcttgaggtatgacattatgttgcgaatttgtaatctttcagacttttttacgtaggtgttcagtgctagaaactttccttttagcattgcttttgctatgtcccagaggttttgataacttgtgtcactataatcatccatttaaagaattttttaatttctttcttcatttcattgttaacccagtaatcattaagaagcagattgttcaatttccaggtaattgtatagttttaagggttccttttggagctcatttctagttttatttcactgtgacctgagaagatactttatataattttgactttttaaaatttattgagatttgtttttgtggcct

SEQ ID NO: 396952 - DNA, 581 bp, Homo sapiens
caattgttaatcgttctaattgttagaacaattgttaatcattctaattgttagaacaattgttaattgttctaacaatcttaattcttctaactaatgatctattttatttctattttcaaataaccaaattttgtttcattaaacttttgtatttttatttcaatttcatttagttctgctktaatctttcttttcttctcctggctttaagtttgatttgttgtttctatagtttcttgaggtatgacattatgttgcgaatttgtaatctttcagacttttttacgtaggtgttcagtgctagaaactttccttttagcattgcttttgctatgtcccagaggttttgataacttgtgtcactataatcatccatttaaagaattttttaatttctttcttcatttcattgttaacccagtaatcattaagaagcagattgttcaatttccaggtaattgtatagttttaagggttccttttggagctcatttctagttttatttcactgtgacctgagaagatactttatataattttgactttttaaaatttattgagatttgtttttgtggcct

SEQ ID NO: 396953 - DNA, 581 bp, Homo sapiens
caattgttaatcgttctaattgttagaacaattgttaatcattctaattgttagaacaattgttaattgttctaacaatcttaattcttctaactaatgatctattttatttctattttcaaataaccaaattttgtttcattaaacttttgtatttttatttcaatttcatttagttctgctgtaatctttcttttcttctcctggctttaagtttgatttgttgtttctatagtttcttgaggtatgacattatgttgcgaatttgtaatctttcagacttttttacgtaggtgttcagtgctagaaactttccttttagcattgcttttgctatgtcccagaggttttgataacttgtgtcactataatcatccatttaaagaattttttaatttctttcttcatttcattgttaamccagtaatcattaagaagcagattgttcaatttccaggtaattgtatagttttaagggttccttttggagctcatttctagttttatttcactgtgacctgagaagatactttatataattttgactttttaaaatttattgagatttgtttttgtggcct

SEQ ID NO: 396954 - DNA, 573 bp, Homo sapiens
ctgctgttagtctaataggttttcctttataggttacttgttgcttttgtctcactgttcttagaattcatttcttcatgttgactttagatagcttgattactatatggctttgtaatgtcagttttgcagtgaacctccccagagctcattgagtttcttgtatttggacatctaaatatctagcaaggctagcaaagttttcttcaattatgccctcaaataagtattcaaaaagttttgctgtttcttctccctyaggaacagcaattgctatatttggccattttacatagtcacctatttctaagagactttgcttatttctttgaattctttttctggcatttcaaagatttcatcttggttgggatccattgctggggacttagtgtgttctttttgaggtgttatagaaccctattttgtcctattgccggaattatttttctggtttcttctcatttggatagagtatatcttctaattacttttgagactatatcttctaattatttttgaatttattttttgatttgactgtgatttttcacttttttttttcactttgag

SEQ ID NO: 396955 - DNA, 586 bp, Homo sapiens
ttgctggggacttagtgtgttctttttgaggtgttatagaaccctattttgtcctattgccggaattatttttctggtttcttctcatttggatagagtatawcttctaattacttttgagactatatcttctaattatttttgaatttattttttgatttgactgtgatttttcacttttttttttcactttgaggatgtgactttaatgtttatagtttattgtaacctaattcagctctgggtgctttcaggggtgaagactgtataagttccctggttatttaaaatgtttgtatgttggctttctcagatgctagttgtggtaacattatgctcagtgtgtgtgtggaggttcactgtttcctgtggggtagcaatggcagaggtctcatgaagcttatctagttcccaagtggtgtgcacttttttgcctttttttttctcccagtgttttctttacctggttgaataattcagatttcaggccagtaggggaggtgtccctgagtgaaaaccagcagattggtaaatgcaatacccaatggtgggaagaagcccaagccttgaccaaggcatctgtggg

SEQ ID NO: 396956 - DNA, 527 bp, Homo sapiens
ctttgggtgcatttaagatggtattgaggcaatatctagaggtaataactggaaattttctataagtcattaaagaaaaaaaattttcacattcaggaattggacaagttctgaacagaattgataaaaataaatccaaactagaaagaacactgatttggtgaatattttaaaaagaagctagttcactgaaaaactaatacaataatgcaatggcataccaagttccaaatgcaaaatatacagtgcaagatagaatactatacacagtgctgagactttttgggtctacaaaattttaagaaagcrcactcatggattcattgaacaaccctttttaaagtaacaaagaaagaaaaaagaaaacactaaaaaagacaagtgtgagaagcaagtggcaactgtaaacctgttaaatgtaagggtaaatctaaataagcattaattatttgaaaatgtgaggccaggagtccagtccaacctgggtaacaaagtgaggcatgagttacaattaaaatactagaaaa

SEQ ID NO: 396957 - DNA, 586 bp, Homo sapiens
ttgctggggacttagtgtgttctttttgaggtgttatagaaccctattttgtcctattgccggaattatttttctggtttcttctcatttggatagagtatatcttctaattacttttgagactatatcttctaattatttttgaatttattttttgatttgactgtgatttttcacttttttttttcactttgaggatgtgactttaatgtttatagtttattgtaasctaattcagctctgggtgctttcaggggtgaagactgtataagttccctggttatttaaaatgtttgtatgttggctttctcagatgctagttgtggtaacattatgctcagtgtgtgtgtggaggttcactgtttcctgtggggtagcaatggcagaggtctcatgaagcttatctagttcccaagtggtgtgcacttttttgcctttttttttctcccagtgttttctttacctggttgaataattcagatttcaggccagtaggggaggtgtccctgagtgaaaaccagcagattggtaaatgcaatacccaatggtgggaagaagcccaagccttgaccaaggcatctgtggg

SEQ ID NO: 396958 - DNA, 586 bp, Homo sapiens
ttgctggggacttagtgtgttctttttgaggtgttatagaaccctattttgtcctattgccggaattatttttctggtttcttctcatttggatagagtatatcttctaattacttttgagactatatcttctaattatttttgaatttattttttgatttgactgtgatttttcacttttttttttcactttgaggatgtgactttaatgtttatagtttattgtaacctaattcagctctgggtgctttcaggggtgaagactgtataagttccctggttatttaaaatgtttgtatgttggctttctcagatgctagttgtggtaacattatgctcagtgtgtgtgtggaggttcactgtttcctgtggggtagcaatggyagaggtctcatgaagcttatctagttcccaagtggtgtgcacttttttgcctttttttttctcccagtgttttctttacctggttgaataattcagatttcaggccagtaggggaggtgtccctgagtgaaaaccagcagattggtaaatgcaatacccaatggtgggaagaagcccaagccttgaccaaggcatctgtggg

SEQ ID NO: 396959 - DNA, 586 bp, Homo sapiens
ttgctggggacttagtgtgttctttttgaggtgttatagaaccctattttgtcctattgccggaattatttttctggtttcttctcatttggatagagtatatcttctaattacttttgagactatatcttctaattatttttgaatttattttttgatttgactgtgatttttcacttttttttttcactttgaggatgtgactttaatgtttatagtttattgtaacctaattcagctctgggtgctttcaggggtgaagactgtataagttccctggttatttaaaatgtttgtatgttggctttctcagatgctagttgtggtaacattatgctcagtgtgtgtgtggaggttcactgtttcctgtggggtagcaatggcagaggtctcatgaagcttatctagttcccaagtggtgtgcacktttttgcctttttttttctcccagtgttttctttacctggttgaataattcagatttcaggccagtaggggaggtgtccctgagtgaaaaccagcagattggtaaatgcaatacccaatggtgggaagaagcccaagccttgaccaaggcatctgtggg

SEQ ID NO: 396960 - DNA, 538 bp, Homo sapiens
tggtttcttctcatttggatagagtatatcttctaattacttttgagactatatcttctaattatttttgaatttattttttgatttgactgtgatttttcacttttttttttcactttgaggatgtgactttaatgtttatagtttattgtaacctaattcagctctgggtgctttcaggggtgaagactgtataagttccctggttatttaaaatgtttgtatgttggctttctcagatgctagttgtggtaacattatgctcagtgtgtgtgtggaggttcactgtttcctgtggggtagcaatggcagaggtctcatgaagcttatctagttcccaagtggtgtgcacttttttgcctttttttttctcccagtgttttctttacctggttgaataattcagatttcaggccagtaggggaggtgtccctgagtgaaaaccagcagattggtaaatgcaatacccaatggtgggaagaagyccaagccttgaccaaggcatctgtgggagctcttagtgaaatgcactgaggtc

SEQ ID NO: 396961 - DNA, 542 bp, Homo sapiens
tatatgggcattttgtaattattattttttaataatataaatgtttcctttttaatatgaatttttcaagagttttataattgactgattattcattaaaatttaatgaaggacaggaattggctatttttctgaatgacaaaaattaggaaatttttagagagatgatgaatttatcctagaatrtatggaaagagtaaatcttgttatatagaacaagcaactttccaatccgaaggatcttagaataataaaaattttttttcttataattgttttcttataattgtttcaaagtaatactttagaccaaaaattgtatatctcagtaggtggcctatatgataattaaaaaattaaaagctaagttaattaaatttttaattaatttaatttttattaattttaattatcaatcttcattgaagaattttgtccaaaaaatgtggacaatatgtgtcataaggattaatcaccataaaatagtccccaaaggaaattaaaggactgattagatagtactaaaataacaatcatacaaa

SEQ ID NO: 396962 - DNA, 506 bp, Homo sapiens
cttgttactaaaacatacagaacagacagaaagttaaaattggttaatttctatctaatctggataagataaacacaatgagtgaaataaatmattatgtcaaataacaaaaacctcatgcatagaaacttcaacatttctgaataacaaaaagtataacattatgtagggcaatgttccacttttgtatcaactagaaataagccctgaatctgaatgatgaaattttaatagtaactgttgaccacagggcagagtttactctcttggtcagatgcttttgtgaatgacacaaactgtgtgtccagatcacttttccctataatcacttcaaattacttgactttttgatctcttccttttttctgtctcttttttgtccacaacagatattccaaatatccaccgagttttcaaatactccagtccatatttggtcttccattcctagcagaagtactttgtcttctacttcccagaataatgttaattatcttattttagac

SEQ ID NO: 396963 - DNA, 506 bp, Homo sapiens
cttgttactaaaacatacagaacagacagaaagttaaaattggttaatttctatctaatctggataagataaacacaatgagtgaaataaataattatgtcaaataacaaaaacctcatgcatagaaacttcaacatttctgaataacaaaaagtataacattatgtagggcaakgttccacttttgtatcaactagaaataagccctgaatctgaatgatgaaattttaatagtaactgttgaccacagggcagagtttactctcttggtcagatgcttttgtgaatgacacaaactgtgtgtccagatcacttttccctataatcacttcaaattacttgactttttgatctcttccttttttctgtctcttttttgtccacaacagatattccaaatatccaccgagttttcaaatactccagtccatatttggtcttccattcctagcagaagtactttgtcttctacttcccagaataatgttaattatcttattttagac

SEQ ID NO: 396964 - DNA, 506 bp, Homo sapiens
cttgttactaaaacatacagaacagacagaaagttaaaattggttaatttctatctaatctggataagataaacacaatgagtgaaataaataattatgtcaaataacaaaaacctcatgcatagaaacttcaacatttctgaataacaaaaagtataacattatgtagggcaatgtkccacttttgtatcaactagaaataagccctgaatctgaatgatgaaattttaatagtaactgttgaccacagggcagagtttactctcttggtcagatgcttttgtgaatgacacaaactgtgtgtccagatcacttttccctataatcacttcaaattacttgactttttgatctcttccttttttctgtctcttttttgtccacaacagatattccaaatatccaccgagttttcaaatactccagtccatatttggtcttccattcctagcagaagtactttgtcttctacttcccagaataatgttaattatcttattttagac

SEQ ID NO: 396965 - DNA, 544 bp, Homo sapiens
ttttctctgcacaagctctttttttgcctgctgccacccacataagatgtgtcttgctcctttttgccatgattgtgagtcctccccagccatgtggaactgtatgtccaataaacctttttcttttgtaagttgtccagtcgtgggtatgtctttatcagcagtgttaaaatggactaatacaatcactctatcaaatgagataatatttattcctttaccactgacaactctctctcggctcttctattcaatcatgttactgatagacgctttgctttttgtttttgttgtttaacctgattgttatagsttattttatgaatttctgttcttcttttaattttacaacaattttactatttctccttacatgtttataagtcatatggagactccttctcatctaccctgaccccagaatattaaaacttttcagagtttcaggattaattccattatatggacatgattccttgagataggaaaaactgattggattgtgacattagacttatcagaatctaagatcttacaaaatata

SEQ ID NO: 396966 - DNA, 614 bp, Homo sapiens
tgtctgggttttatctctttcctcttatcagaaaaatgcaataggtccagaaagcatgataacattttatggtctctgtactagagttgtttttcagcataatgtggccttgacagagagacctgaacttgaaagctgcttcttttcaaccaagaaacagagctgctttatttgtatgtattttatttgttcaatctagaaacataaaggtaaagtgcacattacaaagatttttgagtctctaaaaactattaataattcaagtaattaactatatggggaccataaaacctgaggatataaagagtggccctcaggccaggcacagtggcgcatgcctgtaatcccagctacttcggaggctgaggcaggataatcgcctgaacccgggaggaggaggttgyggtgagccaagattgtgccattgcactccagcctgggcaacaagagcaaaactccatggccctcataacagacatccaagacctaaattcatttcatcagttcattcgacaaatgtcctttgagtgcctcaggtgcctgaccttgcgaggggtttcacatcatcaggcaacaccatgtgagtcctttttgtttgtttgtttgtttgtttg

SEQ ID NO: 396967 - DNA, 602 bp, Homo sapiens
atttctgtggttggctgagttccccctctcttagctccctaaggaatacctcaaacatgggagggaactggcacttctattgtcccatctcattaataagtttaattaacccaaggcaacatttgccaacattaattccagattgggggcatgaagtgaagcatgctggcaaatttcagcctcatgagactcctccagcttgckcttgatggccaaaaatggataaaacctatacccttgggttctgcaactggtgacacatacctggccactattgctcatgtgggctcactgatctgcaggagacaatgctgcctaaatgtatcctttcaggtttgtcactgtgtctttctgcagaagcatttgcacctctcttctgtgaccctccatgttgtgagcaggggcccggatgcagacctgcaccagtgtttccagctgaaatcccgcgcagaggcagtgtcctgccttcctgtgaccaaagtgagtcattgtggggacagacaggcttgtttagcaaggctctgcccgtgtttctcctggctgctcagcctggctctgtgtgcaaggaaggatggaaacagtgcccatggcaacccctgtat

SEQ ID NO: 396968 - DNA, 602 bp, Homo sapiens
atttctgtggttggctgagttccccctctcttagctccctaaggaatacctcaaacatgggagggaactggcacttctattgtcccatctcattaataagtttaattaacccaaggcaacatttgccaacattaattccagattgggggcatgaagtgaagcatgctggcaaatttcagcctcatgagactcctccagcttgctcttgatggccaaaaatggataaaacctatacccttgggttctgcaactggtgacacatacctggccactattgctcatgtgggctcactgatctgcaggagacaatgctgcctaaatgtatcctttcaggkttgtcactgtgtctttctgcagaagcatttgcacctctcttctgtgaccctccatgttgtgagcaggggcccggatgcagacctgcaccagtgtttccagctgaaatcccgcgcagaggcagtgtcctgccttcctgtgaccaaagtgagtcattgtggggacagacaggcttgtttagcaaggctctgcccgtgtttctcctggctgctcagcctggctctgtgtgcaaggaaggatggaaacagtgcccatggcaacccctgtat

SEQ ID NO: 396969 - DNA, 602 bp, Homo sapiens
atttctgtggttggctgagttccccctctcttagctccctaaggaatacctcaaacatgggagggaactggcacttctattgtcccatctcattaataagtttaattaacccaaggcaacatttgccaacattaattccagattgggggcatgaagtgaagcatgctggcaaatttcagcctcatgagactcctccagcttgctcttgatggccaaaaatggataaaacctatacccttgggttctgcaactggtgacacatacctggccactattgctcatgtgggctcactgatctgcaggagacaatgctgcctaaatgtatcctttcaggtttgtcactgtgtctttctgcagaagcatttgcacctctcttctgtgaccctccatgttgtgagcaggggccsggatgcagacctgcaccagtgtttccagctgaaatcccgcgcagaggcagtgtcctgccttcctgtgaccaaagtgagtcattgtggggacagacaggcttgtttagcaaggctctgcccgtgtttctcctggctgctcagcctggctctgtgtgcaaggaaggatggaaacagtgcccatggcaacccctgtat

SEQ ID NO: 396970 - DNA, 602 bp, Homo sapiens
atttctgtggttggctgagttccccctctcttagctccctaaggaatacctcaaacatgggagggaactggcacttctattgtcccatctcattaataagtttaattaacccaaggcaacatttgccaacattaattccagattgggggcatgaagtgaagcatgctggcaaatttcagcctcatgagactcctccagcttgctcttgatggccaaaaatggataaaacctatacccttgggttctgcaactggtgacacatacctggccactattgctcatgtgggctcactgatctgcaggagacaatgctgcctaaatgtatcctttcaggtttgtcactgtgtctttctgcagaagcatttgcacctctcttctgtgaccctccatgttgtgagcaggggcccggatgcagacctgcaccagtgttyccagctgaaatcccgcgcagaggcagtgtcctgccttcctgtgaccaaagtgagtcattgtggggacagacaggcttgtttagcaaggctctgcccgtgtttctcctggctgctcagcctggctctgtgtgcaaggaaggatggaaacagtgcccatggcaacccctgtat

SEQ ID NO: 396971 - DNA, 511 bp, Homo sapiens
cagtgtggtattgtgaagggatggatacatggatcaacggaacataatagagcacctagacatagacccacacaaatatggccaagagttttggcaaaggtgcaaaagcaagttaatggatacaggctaatcctttcagcaatggcgttggaacagttcacccctcaccacgctttctgcctgcctggcactgacgggggactccttgctcaaagggcaggtcaccaagagcccctgatatggtttggatttgtgtccccacccccaaatctcatgtcgatttgtaatccccacgtgttggaggaggggcctggtgagaggtgattggatcrtgggggcagatttcccccttgctgttcttgcgatagtgagtgagttctcatgagatctgcctgcttgaaagtgtgtagcacttttccccttcgctctctctttttctctctctctctctcctgttgccatggtaaagacatacttgtttccccttcatcttccgcaaggattgtaagtt

SEQ ID NO: 396972 - DNA, 374 bp, Homo sapiens
tgtccatctcccgtcctactcttgcttccctgcttatctgtcttgtctctatgttccaacttccatcacctttattaacctggtttcatctgctgctaaatgagcgcctgttatagttttggccatctacaatgttcaggaagattggtgaatgcaaasttcataaattacggcttctgggagttatcacagccacattgttagactcagctgagtgtagtgctgccttagtgaaagtcagtgatatggattaagaatgttagttgtaacaatgaaatggaagatgattctggagagagcagaagcccagtgccatctttaactgtcccagaaatcctcacggtagagggacagttgtagaggactttatagtt

SEQ ID NO: 396973 - DNA, 485 bp, Homo sapiens
ttataaatatttttattttaaaaataacagttttaaatgtaagtcactttctaatgtaattaatgggacctaaaaaatagtgatttgataaccaacatcacctgggtcagaattgtataacaactactttaacagtgacaagcattacatatttccttcttcctgtatttatatcatcattcaacttccctacaggtttttctcctattaaaacacaatttgtgctcraattttttttactgattttcctatcatacatctgtaacaattacatgaatccaaattgtaaaatagttttgaaaatagaagtctcagttataatattttcattctaattgagttagctttagctttgcaaatatttctattgtacaactgataaaaatcacttaaaataataaaaattttgataaaattattaaacatgaaaagtcaacatttactagaaatcagtatttatgagatggactgggtgattttcaaat

SEQ ID NO: 396974 - DNA, 580 bp, Homo sapiens
gatcattcttcctttacacattgatgtaaggaatatatcatacaaactagtctygatttttgtcatttagaagactagtcttgtaattaattggcaatttagtattccatgtgagatatccagtgtccatgtacgtcatattagatccatacacatgtaacaagcaaagagggtatgttttattttttgaatgctaatgtaacatgtagggacattttaaaaaatcgccttgacatattttctatttggaatagttttaaatactttggataatgtgttgtatttgtatttctaaagaagaaaatcttatgcaaccaacttaattgaataagaaataaatcattcccagaaataatttattttctaatgttaacataatgtgtacattctgagaaattattaataaaatgtttaaaagataggcttctggggtgaactcctagaattagctaggtatgttttttctgtttgcctaggacaatgacctaataagatggttaatcatcattggactcataaaaacaaacaaataaaaagccaactaaccatttaaagtgagactttaacatcagaaaaagga

SEQ ID NO: 396975 - DNA, 621 bp, Homo sapiens
actatagtcaccctgtgggctatcaaatagtaggtcttattcattctttttaactattttttgtacccataaatcatccccatcttcctacccccacacccccatgaccctttccagcctctggtaaccatccttctrctcactgtgtccatgaattcaattgttttgatgtttagatcccacaaataactgagaacatgcaatgtttgtctttctgtgcctggattatttcagttaacataatgatctccagttcattttgttgcaaatgactagatttcattctttctatagctgaatagtactccattgtgtatatgtcccacttttttttacgcattcatctgctgatgcacacttacattgcttccatatcttagttattgtaaacagtgctgcaacaaacatggaagtacagataatcttagatatacgaattcgctttcttttgggtatatacccagcagtgggattgctggatcacgtggtagctcaatttttagttccttgaggaacctccagactgttcttcatagtggtcctactaatttttattgctaccaacagtgtacaaggaattccttttactccacaacctcaccagcatttgttattgcctgt

SEQ ID NO: 396976 - DNA, 564 bp, Homo sapiens
tttcttgggctggtcggtctgaggacctgaggtcgtagatggatctttctcacggagcaaagagcaggaggaygggggattgatctcccaagggaggtcccccgatccaagtcacggcaccaaatttcatgtgtgtccatgtgaagagaccaccaaacaggctttgtgtgagcaataaagctgtttatttcacctggatgcggttgggctgagtccgaaaagagagtcagtgaagggagataagggtggggccgttttataggatttgggaaggtaaaggaaaattacagtcaaagggggttgttctctggtgggcaggggcgggggtcacaaggtgctcggtgggggagcttctgagccaggagaaggaaattcaaagggttagtcactcagttaaggtggggcaggaacaaatcacaatggtggaatgtcatcagttaaggcggggcagggcctttcacttcttttgtgattcttcagttacttcaggccatctcggcgtatacgtgcaagtcacaggggatgggatggcttggcttgggctcagagacctgacagtggcaa

SEQ ID NO: 396977 - DNA, 564 bp, Homo sapiens
tttcttgggctggtcggtctgaggacctgaggtcgtagatggatctttctcacggagcaaagagcaggaggacgggggattgatctcccaagggaggtcccccgatccragtcacggcaccaaatttcatgtgtgtccatgtgaagagaccaccaaacaggctttgtgtgagcaataaagctgtttatttcacctggatgcggttgggctgagtccgaaaagagagtcagtgaagggagataagggtggggccgttttataggatttgggaaggtaaaggaaaattacagtcaaagggggttgttctctggtgggcaggggcgggggtcacaaggtgctcggtgggggagcttctgagccaggagaaggaaattcaaagggttagtcactcagttaaggtggggcaggaacaaatcacaatggtggaatgtcatcagttaaggcggggcagggcctttcacttcttttgtgattcttcagttacttcaggccatctcggcgtatacgtgcaagtcacaggggatgggatggcttggcttgggctcagagacctgacagtggcaa

SEQ ID NO: 396978 - DNA, 564 bp, Homo sapiens
tttcttgggctggtcggtctgaggacctgaggtcgtagatggatctttctcacggagcaaagagcaggaggacgggggattgatctcccaagggaggtcccccgatccaagtcacggcaccaaatttcatgtgtgtccrtgtgaagagaccaccaaacaggctttgtgtgagcaataaagctgtttatttcacctggatgcggttgggctgagtccgaaaagagagtcagtgaagggagataagggtggggccgttttataggatttgggaaggtaaaggaaaattacagtcaaagggggttgttctctggtgggcaggggcgggggtcacaaggtgctcggtgggggagcttctgagccaggagaaggaaattcaaagggttagtcactcagttaaggtggggcaggaacaaatcacaatggtggaatgtcatcagttaaggcggggcagggcctttcacttcttttgtgattcttcagttacttcaggccatctcggcgtatacgtgcaagtcacaggggatgggatggcttggcttgggctcagagacctgacagtggcaa

SEQ ID NO: 396979 - DNA, 564 bp, Homo sapiens
tttcttgggctggtcggtctgaggacctgaggtcgtagatggatctttctcacggagcaaagagcaggaggacgggggattgatctcccaagggaggtcccccgatccaagtcacggcaccaaatttcatgtgtgtccatgtgaagagaccaccaaacaggctttgtgtgagcaataaagctgtttatttcacctggatgcggttgggctgartccgaaaagagagtcagtgaagggagataagggtggggccgttttataggatttgggaaggtaaaggaaaattacagtcaaagggggttgttctctggtgggcaggggcgggggtcacaaggtgctcggtgggggagcttctgagccaggagaaggaaattcaaagggttagtcactcagttaaggtggggcaggaacaaatcacaatggtggaatgtcatcagttaaggcggggcagggcctttcacttcttttgtgattcttcagttacttcaggccatctcggcgtatacgtgcaagtcacaggggatgggatggcttggcttgggctcagagacctgacagtggcaa

SEQ ID NO: 396980 - DNA, 550 bp, Homo sapiens
acctggcgcccgtaagagccttgtgaaaggttagggccatctccactaagagtccttcccttggtcaccaatttacaaatttgtaaatcaaaaggtatgagagataggtcttaatcaatttagaagtttattttgcaaaggttaaggatgcaygggggagacaggcctgtgcctttctcaaaagattattttgagggcttcaatatttaaaggggaaaaataggttgaaggggaaggagaggtgagggtatgttcacaattctgaatccacaggttgccagagaaaaatgagcaggtaggtaaatagtcaagtatgtatgcatcttgcacttagtaaactgacactttaaacaagataaagtgaacatagagtacctactcctggagatatttaacctttatacctgtagctacctgcttaggaacaaaagaaaaagccgcttttggtgactcagcttcattttgtttcttttggcatagtaaattggggtcccaagtatttatttcctttcacagaattcacttgcaataatgttaaacaaggttcctt

SEQ ID NO: 396981 - DNA, 541 bp, Homo sapiens
caggataggatggctagagtgggctgtaattgaatatttctctctgtaatatggtaggctagaactggctgaagttgggtatttcctttacctcaggtcagttaagcttagataacaccagagcttatgaggctccaattaattagtttttcctgagggcaagtctcataatccctattaaaaacaaagtgctctggcctatttcaaaatrattcctttctctttcactctgctagaatgagaagatttttctccaacatttactataagatccaggtcgagctcctgaagagaaaatcatcaaaaaagggggtccttgaattggtccccctggagttattagccctcagacttgtccaacctgaggctctagcaattcaattatagtacatttttttttcttttttaccctagcactatttcctttctggtttttgttatgagtttctgctccaggaagctgttactccttatatttactttgtctctccatctccaatcttggagacagtggtttgccacatgtcctcatctcttttat

SEQ ID NO: 396982 - DNA, 541 bp, Homo sapiens
caggataggatggctagagtgggctgtaattgaatatttctctctgtaatatggtaggctagaactggctgaagttgggtatttcctttacctcaggtcagttaagcttagataacaccagagcttatgaggctccaattaattagtttttcctgagggcaagtctcataatccctattaaaaacaaagtgctctggcctatttcaaaatgattsctttctctttcactctgctagaatgagaagatttttctccaacatttactataagatccaggtcgagctcctgaagagaaaatcatcaaaaaagggggtccttgaattggtccccctggagttattagccctcagacttgtccaacctgaggctctagcaattcaattatagtacatttttttttcttttttaccctagcactatttcctttctggtttttgttatgagtttctgctccaggaagctgttactccttatatttactttgtctctccatctccaatcttggagacagtggtttgccacatgtcctcatctcttttat

SEQ ID NO: 396983 - DNA, 526 bp, Homo sapiens
caaatatgtagggattcttatttaaaaatgttttctaccattgcctgccataattgcactgtggcagatattgtctgtacgatacctactttttgmaacctgttgagttctctttttcttttcaacttttattttaggttcagggggtacatatgcaggtttgttacataggtaaattgtgtgtcatgggagtttggtgtacagattatttcagcactcagataataatcatagttaccaacaggtacttttttagatttcaccctcctcctaccctccaccctcaagtaggcctcagcatctattgttcacctgtttgtgtccatgtgtactgttgggatttttttatgtccgaatatatcatcagtttttgtaattctccctcatgtacttgagaaaaatgcatattctttgaattgttggatgtagttttttttttttttttttgagacagagtctcactctttcacccaggctagagtgcagtggagcaatctcggctcactgcagcctctgtcgcccagtt

SEQ ID NO: 396984 - DNA, 526 bp, Homo sapiens
caaatatgtagggattcttatttaaaaatgttttctaccattgcctgccataattgcactgtggcagatattgtctgtacgatacctactttttgcaacctgttgagttctctttttcttttcaacttttattttaggttcagggggtacatatgcaggtttgttacataggtaaattgtgtgtcatgggagtttggtgtacagattatttcagcactcagataataatcatagttaccaacaggtacttttttagatttcaccctcctcctaccctccaccctcaagtaggcctcagcatctattgttcacctgtttgtgtccatgtgtactgttgggatttttttatgtccraatatatcatcagtttttgtaattctccctcatgtacttgagaaaaatgcatattctttgaattgttggatgtagttttttttttttttttttgagacagagtctcactctttcacccaggctagagtgcagtggagcaatctcggctcactgcagcctctgtcgcccagtt

SEQ ID NO: 396985 - DNA, 526 bp, Homo sapiens
caaatatgtagggattcttatttaaaaatgttttctaccattgcctgccataattgcactgtggcagatattgtctgtacgatacctactttttgcaacctgttgagttctctttttcttttcaacttttattttaggttcagggggtacatatgcaggtttgttacataggtaaattgtgtgtcatgggagtttggtgtacagattatttcagcactcagataataatcatagttaccaacaggtacttttttagatttcaccctcctcctaccctccaccctcaagtaggcctcagcatctattgttcacctgtttgtgtccatgtgtactgttgggatttttttatgtccgratatatcatcagtttttgtaattctccctcatgtacttgagaaaaatgcatattctttgaattgttggatgtagttttttttttttttttttgagacagagtctcactctttcacccaggctagagtgcagtggagcaatctcggctcactgcagcctctgtcgcccagtt

SEQ ID NO: 396986 - DNA, 625 bp, Homo sapiens
tctactatcttagaatattatgccaatttactcccttccctgttgccttttaatgttttcttatactttttgaattgatatatttatctctcttacaacaaggcaaatactgtagcatattgctatggtctgaatatttgtactgtctctgatccaaaggtaaagacttygagaagtgattaggtcatgaaagcagacccctcatgaatgggcttagtgtttttataaaagagaccccagagagctattttgcccttcccactgtgagattactgtaagaagatggccctcttcctgctgctgtcctgatctcagacttttcaacctctggaactgtgacaagtaaatttctgttgtttataaggtactcagttttgttgtatgctatattttgctatatttttaatagaagccccaaacatactaaaatacatgttctcatgttctttgatacgcctctttaacctttatactctctgatactatctcgattttccatctaaaattttaaattttagatattatatctattttctttccttttctatttttggtctcattttttaaaagacaattacaaaattatcaagtgttttattcaccttgttttacaaatctcacacaa

SEQ ID NO: 396987 - DNA, 577 bp, Homo sapiens
aatacttcagagctattctagatatgaagcaagatttgtatgtgtaagcaaaattttagttatcttattcgtcataaaaagtttgtttttgaaatcatttctcatttgactaaaaagtaagtattgacaggtttttgaatcaaaccaagtgggtgttgttttcttcctaggcaagaacctagaaaacatttcattttattctaccataacacactgtgagaatgaaataaacacatggcccttgacaagtaggctcaactgccactgcattatactgggtaaaatgcttatactaggttattgctgcatgttaattgcttccccttaacaattttcctctgtactgctcatcgcatctatactttcttgtctstaaaatccatcagtggattttaagctttttgaagtcaaggaactcaactgatttgttcagaactgtagaatagcacctggcataaagtaaatgcaaaataattggatgggaactaatgaatgaataaataacatttttgaagcttcacttgtagtttatttgatttaaatgcaagaattttgctttctgttttaacatgcggac

SEQ ID NO: 396988 - DNA, 577 bp, Homo sapiens
aatacttcagagctattctagatatgaagcaagatttgtatgtgtaagcaaaattttagttatcttattcgtcataaaaagtttgtttttgaaatcatttctcatttgactaaaaagtaagtattgacaggtttttgaatcaaaccaagtgggtgttgttttcttcctaggcaagaacctagaaaacatttcattttattctaccataacacactgtgagaatgaaataaacacatggcccttgacaagtaggctcaactgccactgcattatactgggtaaaatgcttatactaggttattgctgcatgttaattgcttccccttaacaattttcctctgtactgctcatcgcatctatactttcttgtctctaaaatccatcagtggattttaarctttttgaagtcaaggaactcaactgatttgttcagaactgtagaatagcacctggcataaagtaaatgcaaaataattggatgggaactaatgaatgaataaataacatttttgaagcttcacttgtagtttatttgatttaaatgcaagaattttgctttctgttttaacatgcggac

SEQ ID NO: 396989 - DNA, 577 bp, Homo sapiens
aatacttcagagctattctagatatgaagcaagatttgtatgtgtaagcaaaattttagttatcttattcgtcataaaaagtttgtttttgaaatcatttctcatttgactaaaaagtaagtattgacaggtttttgaatcaaaccaagtgggtgttgttttcttcctaggcaagaacctagaaaacatttcattttattctaccataacacactgtgagaatgaaataaacacatggcccttgacaagtaggctcaactgccactgcattatactgggtaaaatgcttatactaggttattgctgcatgttaattgcttccccttaacaattttcctctgtactgctcatcgcatctatactttcttgtctctaaaatccatcagtggattttaagctttttgaagtcaaggaactcaactgatttgttcagaactgtagaatagcacctggcataaagtaaatgcaaaataattggatgggaactaatgaatgaataaataacatttttgaagcttcacttgtagtttatttkatttaaatgcaagaattttgctttctgttttaacatgcggac

SEQ ID NO: 396990 - DNA, 588 bp, Homo sapiens
tacaatttcccaagccttctctggcatcatttagaattctaacctgattaaaagacctgacttcagctcttaggtgtttaggtataaagaatgccatccccttaaatggtgatttgatcttagttgagtgacatccatactcatagacagttcctatacattcattaggcaagtagactggaaaatgcctcagtctttcgggtttgaggctggtgatagagctccttcaagtggtgcatagcagtaatgtaataccaaacacgtggccctctcacccagcccttgagtgccctccatcagcaaaaggccctttattgaagctaaatggaggagggcatttggaatggctgcctcccaaagacactccagagtgaacttccttctgtttgttcacatgtattcagtcatttgctacagctattctgagttacttaaaccacaaaaatctctttacatatgcacacacatgcacacaagcamcctctcaaaccattcccttctgtctctctttcacacacacacacacacacacacacacacacacacacacacacagtgttggcaggatgtatcagaattcaaataatg

SEQ ID NO: 396991 - DNA, 593 bp, Homo sapiens
ctaaacctgatcttagccaaaaggctgagaagcagtatcacacccagatatatgcaaagcaaayattaatagatctaaagggagagagacacttcaacacaaaaatagttgaggaattcaacatcccactctcagaaccagacagctcatctagacagaaaattaataaataaacgttggatttaaactgcattttaggccaatggacttcacagatatttacagaacattttgttgaacagctgcagagtactcattgtcagcacatggaactattctccaggatagaccagatgctaggatacaaaataagtctcaaaacattttttaaaaatctaaattatatcaagtttcttctcagaccacaatgaataaaactagaaatcaataacaaaagaaactttggaaactgtataaatacatgaaaattaaaaaaaatgtctctgaatgacctttgggtcaaagagataattaaggaataaatcaataaatttcttgaaacaaatgaaaatggaaacaacacaaagtagtagtcaaaaggaagtttaacacaataaatatcaacaacaaaaaactaaaaatgtttcaaataa

SEQ ID NO: 396992 - DNA, 574 bp, Homo sapiens
ctgcttactagcatagcaccaagttacytctaattccaccctttcccctgtgtataaggttatgatagcaactgggataaagagccattgcttagtgggcagcctgtgataatgctaatctacaatcccccggctctactcttgcactcaaattatccttcatatgccacgttctccacactctttgtaccccttggggaagaggtatctggtaagaaaacatctcaatatcatcttgattctcattttattcaggcactatttggccaaaggctagtaatcacaggaatatgcattggcatgcatattaatagtaaagaactcccagctacttgggaggctgaggcaggagaatggcgtgaacccgggaggcggagcttgcagtgagccaagatcgcgccattgcactccagcctgggcgacagagcgagactccatctcaaaaaaaaaaaaaaaaaaaaaaaaagaaaagtagagaactgtttattcagcatggtaaggaaaagatgtattgcattactgaaatattcaagttgataaacaggttaccttaaatctgttttgtgcaatctgc

SEQ ID NO: 396993 - DNA, 574 bp, Homo sapiens
ctgcttactagcatagcaccaagttacttctaattccaccctttcccctgtgtataaggttatgatagcaactgggataaagagccattgcttagtgggcagcctgtgataatgctaatctacaatcccccggctctactcttgcactcaaattatccttcatatgccacgttctccacactctttgtaccccttggggaagaggtatctggtaagaaaacatctcaatatcatcttgattctcattttattcaggcactatttggccaaaggctagtaatcacaggaatatgcattggcatgcatattaatagtaaagaactcccagctacttgggaggctgaggcaggagaatggcgtgaacccgggaggcggagcttgcagtgagccaagatcgcgccattgcactccagcctgggcgacagagcgagactccatctcaaraaaaaaaaaaaaaaaaaaaaaagaaaagtagagaactgtttattcagcatggtaaggaaaagatgtattgcattactgaaatattcaagttgataaacaggttaccttaaatctgttttgtgcaatctgc

SEQ ID NO: 396994 - DNA, 541 bp, Homo sapiens
atgtcactctgcttaaagctttctaaaaacttcgcatctcattcagaggacaaactaaattcttgtaattgtcctaactttatgactcaaaggatggtctgcagaccagcaacatcagctgaatctcagaaccaaccccagggccactgaatcacaatctgyagtttactaagagcctcgggtgattcaaatgcccatcaaagtgagaaacaacgttgacatattctctcattcccttttacttctcagcattcatcttctgtgctttctccgtggtcattgcattttagccacacaggcctccttgcaggtcatccatgcaccagacttcctcctgctgaagaaactttgccttcactgttcacttaggctagaagtcttctttcccagatatccacatgactgtcctctttactattatcaggtcttcttcaaatgtcaccaactatgtgagccatacgttgactaccctacttgatactgcaaccacccccaacccaccacacatactccttatgtgtctttactgggttatttttct

SEQ ID NO: 396995 - DNA, 567 bp, Homo sapiens
aatttacaaaagtcatcaaacttttcaagtcatgggrtcctgtccttagctctaaagtaaaaaagataaactatgttcttctaccccacaggttgctataagggtaaaaatgacataggtaaaaatctttggaactactaaagtcatgtgcatgtattaacaaaagtaccaaaagtagactttagggttagaggatacagacaccctgcttccattgataaaggtctaagagatactgtatggacattgaatacttgtttgagttgataatatatccctgagttaattgtctagcagccagtgttccataatccagaatttattgtctgcagtgtttattaattacctatttgacatttaccatgttaatttattttcaattatatattttgcccctacagctaaattaaagcatttgactcaaaacatgtaggtaaaatctttctttaatcttgttgatatcaatatacagtaatctatcaattttttacagtttattgtcagaagaaaaattataaaattgttgtgaaattttatccaaagagaatgtaataaaagtaagacaaa

SEQ ID NO: 396996 - DNA, 540 bp, Homo sapiens
atccaatccaataaataatttatatacctagaatggtctggaagaattaatgtgaatttggagtcatggttttctgctacttcctgtgaaaacttagtatactctctctatcaaatataaactttgtctctcaagttgcatcaggacctgggagcccaaacaaaactttggaccaaatcatttctatgcctcttcagctctaaaatatttttatataataatctagagtgagaaaaacatcaaaacatcatgatatataatgttttgcctgctcatatctgctctattcttttatctgcaccagttacctcyttctccttgtttttctctcatgatataatgtatcaccctttaccttgattctctttggcccttcactcagtgcagggccatcagtagaacagggctcaaggaataaatcaaccatccgggccaatctaagcaaattacataaaagattgatgtgatcagatgttttggaaacctgctacacaaaatgtgatctactgactagaagcatcagtatcatttaggagctta

SEQ ID NO: 396997 - DNA, 627 bp, Homo sapiens
gccatcagtagaacagggctcaaggaataaatcaaccatccgggccaatctaagcaaattacataaaagattgatgtgatcagatgttttggaaacctgctacacaaaatgtgatctactgactagaagcatcagtatcatttaggagcttattagaaatgcagaattttatcctgttcctaccaattcaggttttaaaaaaagatttttaaaagattgcccagttatttgtgtggacattaaaatttggcactaagaaatgtcattctggaaggatgacaaaagatgaatttgggaagcaaatgcctgaaggcaaaaggttacttattcattttattttttctgtgatattcagagtaagaaccaaaacacatagtatgtaygaaaagaaataaattgttaaagagttgaaaaatatttattcacttttctgaaagttcaccaggtaaagctaaaattggagcagttagaggttttactatggtgtatatctgaatctaaacaagccttaaggaccagagagggtactatttcgtttacttcagcaaaaaattaaagccttttagtttatcaattcaggaagcagactaactaggattatcctctttaaattacttctaaaacagt

SEQ ID NO: 396998 - DNA, 510 bp, Homo sapiens
aatggaccagggagtggctcctaaggacacacaccgaggatgctgtaggcatggaagagaaaggtgcagcccagtctggaatgatattcatcacatattgattgatcaactaaaatcattagattgtttttcacctgtaatgccagaaagtgggattactcctaatttataacttgtaaaagctgtttactaaattttcagtgagaaaatttataattattctagctaaaattcaatgttttttttttwaatttatttccaaggtagtttggaatgtgaattttgtcagagatcttttcgaacttttttttttatctgtaaatttggtactgtgtgtttcactcaacttattgatacaactcttgacaagtactgggagatggcacaatactgcaggtagcacttatattcaggcagaaactgggccacttatcatcacttaataaacctggctgttcacacttctgtgaatccacatcacagatctcttattcaggccacactttgcca

SEQ ID NO: 396999 - DNA, 522 bp, Homo sapiens
ggcctcacaaccatagtggaaggtgaaaggcatgtctcacatggcagcagacaagagaagagttgttcaggggaactcccccttatagaaccatcagatcttgtgagacttattcactmtcatgagaacagcatgggaaagacttgcccccatgattcaattacctcccatagggtccctcctacaacatgtgggaattcaagatgagatttgggtggagacacaccaaaccatatcagtctagaactccattggttggacaaatgggtttgtctggagtttcagaagcaaacaataaagttagacattacagctttattttcctgggtagaaattccctggaacaaaatttaaagtcgtttaatataggcttagtcctcacagttaaactctgggaccccagggatatcaattcttagtatttggaaatgataacaatcatcactaactctccacaccagaagcagaacagagagggagacagagagagagagagagagagagagaaagagattctctcat

SEQ ID NO: 397000 - DNA, 657 bp, Homo sapiens
aaatggtagcagttaattcaatgattttcatatgggctttattttatttatgagtagtgataaaaattcaataaaaaatgaaaaagcatataaaaaggaaaaggtaaaatgaataaatgatttcagataagtttatttcagtgtgacttcatatgtaacctacaaatcacatgaagtatcttaatcattcgccttcctgttttgtttattctacagctattatcatcactattatcaaattagacgttagttcttgccacctaaactggtgtttggtagttacgtggccaggggtgaaactataatagttcagtagatgttaaatgcaaaaacattataaattagtgttctctgaaaacactgaagttttgatgaatacccattgttttcctctcatcttttataataattcataagggacaattatttacatattattttcttccagaaatgaaaacaataaaggcagatattaaattctrgtgttcctattatttgctcatatcttccacatgctggttcttggatgaagtgattggttcaccacaatcctaggacagtgctttgaacatcagtgtcatagcctactacatgggacacatcaacagcatagcatctaatacaaccaaatggtactggtacatgaagttgtttaga

SEQ ID NO: 397001 - DNA, 388 bp, Homo sapiens
gggcatatctttatatatcctatttctgggtttttaggcactgcataataataactracagtaaccgcatgctagacactattctaaatgctttatacatagcatctcatgtaacctcgcctgcagctctacgtgagagaggtacctttactgtcctcattttacaaatgaggagctaaggcacatgaaaactcggaaaactggcaaaagttacagagacataattgccagaaccaggatttaaagtgagtcaatgcaactgtaggacctgtgcttttaaccacagctgtttttcttgccttgtaaaatattaaaggttccttggcccacaccggagtgcttgaattctctaaagaagttttcaaaaaagctatccatctcatctgcg

SEQ ID NO: 397002 - DNA, 388 bp, Homo sapiens
gggcatatctttatatatcctatttctgggtttttaggcactgcataataataactgacagtaaccrcatgctagacactattctaaatgctttatacatagcatctcatgtaacctcgcctgcagctctacgtgagagaggtacctttactgtcctcattttacaaatgaggagctaaggcacatgaaaactcggaaaactggcaaaagttacagagacataattgccagaaccaggatttaaagtgagtcaatgcaactgtaggacctgtgcttttaaccacagctgtttttcttgccttgtaaaatattaaaggttccttggcccacaccggagtgcttgaattctctaaagaagttttcaaaaaagctatccatctcatctgcg

SEQ ID NO: 397003 - DNA, 523 bp, Homo sapiens
aaatgctttttcatggcagatttttgtatacattaggaattttacttactgccataatcattaccttggtcatggattttgaaaaagctatggtacttgactccagagtcttacaaagcctagggaagtgcctaaaattactgtcttcttgatgctgatttatgaagcaaatcaaatcttttctctcaggaagttttattgtgatatatgcagagtccattgataaaagacrtacaagatagaaaagatgcataaagagagaaataaacaaatacagtgagtcagaagatccaagaattacgtgaacgacattgagaaaaaaagtcaaaaagggaagaagcaaaggcaggacactggtgggcactaacatgaagacacccacttctcaggagacaaaccaacagagccagggctttgttatctgagcttctcccaggctgggagttgctgctgttgcattctgaaaatctcagttatcaatgaattctggttctgaatctgcagggatttctttctggcttct

SEQ ID NO: 397004 - DNA, 546 bp, Homo sapiens
ggacatttacataagccctgcatgtaagccataggtatatgttatgcagggcttatgtacacagaaggcaatgaggagacccactcatctggagcagagctttggggttgagtaagagagacaattctgtgccaaataatgaagaacctaaagagcaagccttgaaattctgaatactattcaatctgtaatgaggactgagagatatattctgtttgtttgttatgcaggaaaataaatgacaagatcaaagactgttttgtcagtaaaaatgatgggccaggtatggtggctcacacctgtgattcaacaatttgggaggctgaagtgagcagatggctagagcctaggagttcgagaccagcccaggcaacatggcaaaatcccatctctacaagagayacaaaaattagctgggcatggtgatgcatgtctctggtcccagctacttgagaggctgaggcatgagaattgcttgaacctgggaggcggaggttacagtgtgctgagatcgtgccactgcactctagcctaagcagcagagtg

SEQ ID NO: 397005 - DNA, 501 bp, Homo sapiens
tgagatcgtgccactgcactctagcctaagcagcagagtgagaatgtgtctcaaaattaaaataacataaacaaaataaaaataatttgtaaaaaagaatgataggagtactaactctatgcaggtttacgagcaaaagtgttgatgytaacaagctatcctgaatcctgaaagggcaggcatgcagcccagatccactactaaaaatgttgtcttagaaggtttctttcatttctgctttctcttctcctaagttttagatctatctgtgtttcccctcctctgcatactcaccctttcatacacactcctcatctcctcccacccttaaatgtatacattaagggcactttcaacttggtttcctagtgttcctttatataatgttgaaaaaattgtatttccttcttttagacacagttagattgagttgcttttgctttttaattttatgtgtcctttgatccaagcttctgctgtaaaatgtcactggctccccca

SEQ ID NO: 397006 - DNA, 602 bp, Homo sapiens
tcagggctgcagtgagctatgattgcactactgcactccatcatgggtgacagaacaagtccctgtcctttaagaaaaatagacctattatataatccagtaatcccatttctgggtatatgtccaaaggaaataaaatcaatatacctatgagatatctgcacacccatgctcactgcagcattactcacaatagccaagatatggaatcaacctaagtgtccagcaacagatgagtggttaaagaaaatggaatactactgagacttaattaagggaaatcctacatttgcaccaacatggacattatgtttagtgacataagccaggcacagaaagacaaatatcatattatctgacttatatgtgtaattcaaacaaatggatgtcatagaattagatagtagaatggtagttacmaaagcctgggcatttttgaggggtggggttagggagatgttagttaaactatacaaaattataattagataggaggaataattataaaacatgatgattgtagttaacaacagtatattttattgaaaatctcaaagagaaaacattttaagtgtttgcaccacaaaaaaaatgaataagaa

SEQ ID NO: 397007 - DNA, 591 bp, Homo sapiens
atttcttggtgtttgttagctgtcgctctcttaatttttctcattcagatctaggtagcagttgggtcaatttgcatactatttcttcaggtttctcggaagggaataaaatccaaatcttttctccaggactcagagtaaggatgactggtcagggaggattagagttgcccaaagcaaggctacatggcagggaagaagaggtacctaaatcaaaggaaataagtctactgacttattcaacggacgggtctaygtgttgatgtcatgatttgtggtgggtgttgaaagctttcctagactcagttaacccagtgcattgtttgagctttgaaaaacagtggcttcattaattaggaatgctacaatttcaaaacccaagactgaggctcccaggtagccaagatactagaggtaagaaagatcttcaataaagagataaccaggaggcttagaaagtttatgcccaaatacttaaattatatcagagcccacattcaattttgtgtctttcatattcaaaaatccaagagttttctaaaaacatcacattgtcatagaacacaagaaggtttgaaggataatgtatag

SEQ ID NO: 397008 - DNA, 580 bp, Homo sapiens
tgctcagttgtatcttcttcacctccttcgtttaccctcttgtcaccttcagtattttaaaggtcagcctttttcaaattagtttctatatcagaatgtaatgaagtcactaacatgaaggtgaatagttgatctatctagagcaatcaggaaactgaaaagccaaaatagcttcccacctacatctgttgaccttgtaatgagaaaggaaattcagcagagaaactaaactttttttctttgtcttttcagtgggctrtaatagaaatggtgatttatttatagatttaaaataaattttgagaggtagttgcattttgtgattctatatatttactaaagtatatgtattcagactgtttctgagggtgtgttataatcctaaaaatttctcaactccttatggggtccttttagtatatgagaaagctaaagaaaataaagcttaatatggaaatattgcaatattcaggtttagtagttgaacataccttgctttgtattcatggagattagtatatagttaagaataaaagactactatcttatgtctataatgatagcattttcctttaaattg

SEQ ID NO: 397009 - DNA, 479 bp, Homo sapiens
ctgtgtgtggtctatgtattatcacaatgcatccacccatattaatccccttaggtgttttcacaagatatctccttataccaaacatttcataaactttactgaataactggaatgagagggtgtcayatgttgatcttctaaggtctcccaggctttattaatacttctcctactttttgctgatgttcagatcctactttttaaattgcgtaaaccaaacatgaagaactcggtagatagtagaaaaattgatattttcatttaaaatcctctgagattacatcaaattacttaatttggactgtttaaataatcatagattcatgtagaaatattttaatctaaaaattttgtctttaaggatacataaatactttttttctgttacctcattttatggaaacagttaaatacatttttgcaaactatcgaaggtatcttaaaaaaggctgggaagagctatgatatatacagca

SEQ ID NO: 397010 - DNA, 448 bp, Homo sapiens
atttgaattaaagtatgactaaaaatggaggtaaccacttagaaatcttgatgwtcaatttttgtgttagccacattttggcttagagtgagaaaacaagaaaaccttatttattatttaagtgactattgatccacagctatacactacttagttgacacaatgtatttcaacagtacaattattttttgttcaataaatattaattaagaagtagtgatcatgatgaattcatcagtcaaccatgtctcctgtgatagcttgttttattcctcctttaaaccctattatgaaaaataaattgtttgtgtgatagagctcactctgatgcaggtgattcataatgtcaaagctgctctcactttgactttattccagaatagaaaatagattatgccacacaaacacacaattgagagcagaggactttttcttaagcttaactttg

SEQ ID NO: 397011 - DNA, 611 bp, Homo sapiens
ctctcctaagtagttttatagtttcaggtcttacatttaagtctttaagccactttgagttaatttttgtatatagtgagagagagtaatctagtttcttctttctgtatatgaatattcaatttttccggtaccatttattaagaagactgttctttctccaataaatgttcttggtgactctgtcgaaaatcagttagctataaatacatgaatttatttctgggctctcaatctaatggtattatgtgcctcatatgtaaagcaattccactgtctrtgtgtctcttttgatggaatactatgctgttttggttgctagagctttatagtatgttttgaaatccagtagtgtgactcctccagctttgttgcttttagtcagaattcctttaactactcagggtcttttgtagttttacacaaattttagacattttttatgtgaagaatgtcatttgtattttgatagggcttgcatttatatctgtagattgcatttgctagtatagtcatttttaaaatagtaattttaaaattcgtaaaaatggaatacctttccattttcctgtaacctcttaaaattattttttcagtgttttacagttttc

SEQ ID NO: 397012 - DNA, 589 bp, Homo sapiens
tgttattttattatttatttatttatttatttatctatttatttatttatttatttatttatttatttatttatttttttagatggagtctcgctctgttgccaggctggagtgcagtggtgtgatctctgctcacttcaaycttcacctcccaggctcaagtgattctcctgcctcagcctcccgagtagctgggactacaggcgcataccaccaagcccagtgaatttttgtatttttagtaaagacggggtttcaccatgttggccaggattgtcttgatctctcgacctcatgatctgcctgccttggcctcccaaaatgctgggattatagatgtgagctactgtgcccatccccagtcatttattctaggactaaaactaccatcctagattctttctcatataaaattatatctctttaggctttcttacaaaaaaaatctttctttacatctctcttatttcctggttcctttgaccttgtttcgtaaataacctttaaataaattttgaatcagacaaaaattatttgcctttttaaaaggaacacttttttttgtaaagaatgttttcgaatgttttcc

SEQ ID NO: 397013 - DNA, 589 bp, Homo sapiens
tgttattttattatttatttatttatttatttatctatttatttatttatttatttatttatttatttatttatttttttagatggagtctcgctctgttgccaggctggagtgcagtggtgtgatctctgctcacttcaaccttcacctcccaggctcaagtgattctcctgcctcagcctcccgagtagctgggactacaggcgcataccaccaagcccagtgaatttttgtatttttagtaaagacggggtttcaccatgttggccaggattgtcttgatctctcgacctcatgatctgcctgccttggcctcccaaaatgctgggattatagatgtgagctactgtgcccatccccagtcatttattctaggactaaaactaccatcctagattctttctcatataaaattatatctctttaggctttcttacaaaaaaaatctttctttacatctctcttatttcctggttcctttgaccttgtttygtaaataacctttaaataaattttgaatcagacaaaaattatttgcctttttaaaaggaacacttttttttgtaaagaatgttttcgaatgttttcc

SEQ ID NO: 397014 - DNA, 507 bp, Homo sapiens
tgtgatccttttcctcttcacatcttaatctmtagtgagaaaaaaagagtcatgaagattcttccttaccgagtatccataggaagacaagtctatgtcagcaggtgtcacacgggggacaaaatacatggcttttcccttgctatttcagggaggcctaatctcattttttcacaagaatcttcttttattgtgattagctcaaccttacaaccccaaatggaaaactctttgtgaactaaaaggagacaggtgtccttggctgggctaaatagaggaggaaggattggatggataggtcatatccatccatagctctgggaggttatgggaatacgtggaatgctggctgttagaacaaatcctcactgaattcatgaggggaggagcactccaaaccatagatttggtaataatgtttgcagggagattatcattttactattggtagtgttatctacactatgggtgggtttaatcacttggtgtgtggcaatccagtgacca

SEQ ID NO: 397015 - DNA, 525 bp, Homo sapiens
atgcacctaatagatcttccttttaagctagcatcatccacacataaatcttgaaacacctgcttttctctccctttagacttcactaattctttctctaaaatgagatgaatggctggtccttattactgaatggctgagaacaatttacatagtctgggaacagcaacttgatcccaaacatgtgatccttttcctcttcacatcttaatctctagtgagaaaaaaagagtcatgaagattcttccttaccgagtatccataggaagacaagtctatgtcagcagstgtcacacgggggacaaaatacatggcttttcccttgctatttcagggaggcctaatctcattttttcacaagaatcttcttttattgtgattagctcaaccttacaaccccaaatggaaaactctttgtgaactaaaaggagacaggtgtccttggctgggctaaatagaggaggaaggattggatggataggtcatatccatccatagctctgggaggttatgggaatacgtgga

SEQ ID NO: 397016 - DNA, 554 bp, Homo sapiens
cctcttcacatcttaatctctagtgagaaaaaaagagtcatgaagattcttccttaccgagtatccataggaagacaagtctatgtcagcaggtgtcacacgggggacaaaatacatggcttttcccttgctatttcagggaggcctaatctcattttttcacaagaatcttcttttattgtgattagctcaaccttacaaccccaaatggaaaactctttgtgaactaaaaggagacaggtgtccttggctgggctaaatagaggaggaaggattggatggataggtcatatccatccatagctctgggaggttatgggaatacgtggaatgctggctgttagaacaaatcctcactgaattcatgaggggaggagcactccaaaccatagatttggtaataatgtttgcagggagawtatcattttactattggtagtgttatctacactatgggtgggtttaatcacttggtgtgtggcaatccagtgaccacaaccaaggaggatttaacaaggggattttattactttcaacaagtaaggaggacacca

SEQ ID NO: 397017 - DNA, 554 bp, Homo sapiens
cctcttcacatcttaatctctagtgagaaaaaaagagtcatgaagattcttccttaccgagtatccataggaagacaagtctatgtcagcaggtgtcacacgggggacaaaatacatggcttttcccttgctatttcagggaggcctaatctcattttttcacaagaatcttcttttattgtgattagctcaaccttacaaccccaaatggaaaactctttgtgaactaaaaggagacaggtgtccttggctgggctaaatagaggaggaaggattggatggataggtcatatccatccatagctctgggaggttatgggaatacgtggaatgctggctgttagaacaaatcctcactgaattcatgaggggaggagcactccaaaccatagatttggtaataatgtttgcagggagattatcattttactattggtagtgttatctacactatgggtgggtttaatcacttggtgtrtggcaatccagtgaccacaaccaaggaggatttaacaaggggattttattactttcaacaagtaaggaggacacca

SEQ ID NO: 397018 - DNA, 419 bp, Homo sapiens
agtcctgtaagccctattcatggtgtgtgccctatgcaggtgyaccatttttaaatcttttataccatattttttcagtaccttttctatgcttagaaacacaaatacttagcattgtattacaattacctggagcattcagtactgtaacatgatgtacaggttcattgcgtaggaggaataacctataccagatagcctaggtatatagtgggctataccatctagatttgtattatataaagtatactctataacgtttgcacaacaaaatcacccaccgatgcatttctcagaatgtatccctgtcattaatcaagtcatgacagtgtatctcagtataaagcacctctactttcttggttatgaatgccatctggaggtcagcctcaacaacctagtccattattcacaaggat

SEQ ID NO: 397019 - DNA, 419 bp, Homo sapiens
agtcctgtaagccctattcatggtgtgtgccctatgcaggtgcaccatttttaaatcttttataccatattttttcagtaccttttctatgcttagaaacacaaatacttagcattgtattacaattacctggagcattcagtactgtaacatgatgtacaggttcattgcgtaggaggaataacctataccagatagcytaggtatatagtgggctataccatctagatttgtattatataaagtatactctataacgtttgcacaacaaaatcacccaccgatgcatttctcagaatgtatccctgtcattaatcaagtcatgacagtgtatctcagtataaagcacctctactttcttggttatgaatgccatctggaggtcagcctcaacaacctagtccattattcacaaggat

SEQ ID NO: 397020 - DNA, 419 bp, Homo sapiens
agtcctgtaagccctattcatggtgtgtgccctatgcaggtgcaccatttttaaatcttttataccatattttttcagtaccttttctatgcttagaaacacaaatacttagcattgtattacaattacctggagcattcagtactgtaacatgatgtacaggttcattgcgtaggaggaataacctataccagatagcctaggtatatagtgggctataccatctagatttgtattatataaagtatactctataaygtttgcacaacaaaatcacccaccgatgcatttctcagaatgtatccctgtcattaatcaagtcatgacagtgtatctcagtataaagcacctctactttcttggttatgaatgccatctggaggtcagcctcaacaacctagtccattattcacaaggat

SEQ ID NO: 397021 - DNA, 419 bp, Homo sapiens
agtcctgtaagccctattcatggtgtgtgccctatgcaggtgcaccatttttaaatcttttataccatattttttcagtaccttttctatgcttagaaacacaaatacttagcattgtattacaattacctggagcattcagtactgtaacatgatgtacaggttcattgcgtaggaggaataacctataccagatagcctaggtatatagtgggctataccatctagatttgtattatataaagtatactctataacgtttgcacaacaaaatcacccaccgatgcatttctcagaatgtatccctgtcattaatcaagtcatgacagtgtatctcagtataaagcacctctactttcttggttatgaatgccatctggaggtcagcctcaacaacytagtccattattcacaaggat

SEQ ID NO: 397022 - DNA, 482 bp, Homo sapiens
gctctaaagccaaggataatacttccccttgtgctacatggaatggaccattggtcagttgagtcaagcctcaaacacatgtatgatcaaaaaaaaaatttgttaactgttactattgggaacccaatccaaaattacattcttggcatgttcaagatgtgacactggcagatcaagattagaatctaggcatgcttcactcagaaatattttttgaaagcatatgttaaccatgtaatgctataaacactcaaggatttctttacatatatatgtgcttgtgatttgttttatcatagaataaagacaaaatacctcttcaactgtaactcaacaaatatttattgaatatacactatatttcaagcaaccaaatagttcctgaatttagggaatgaacaycaagaaacctagtttttaggtactattctattactattttccaaatctatttcaatctactttttcttttcgggattctg

SEQ ID NO: 397023 - DNA, 611 bp, Homo sapiens
gtcagtccatctctaattatgtcctctaaaagagatgaaattgtagcttgccagaattacaaaatcgtgtttaaaacatataggaagaatttcaaaatggatttctctgctacgtctaccaagaaaagcaaataaaaggaaacagtttttttgataatgtatagttataacagtaagtatgcaaacaagtaaaatactcagtgtttcaggtttcatgcaatagatattatatataccaagatgtataagacaatgacaagctatattggtaaaacaaagaaaaaagaagataagatatttggcaaacatcagcataattgccaagcacatgggctaaatatttatataatttggttagaattacttttgttatggccaggagctgtggctcatgcctgtaatcccagcactttgggaggctgaggtgggtggatcacctgaggtcagaagttcgagaccagcctggccaacatggtgaaaccctgcctctactaaaaatacaaaaatttgctgtgtgtggtggcacgtgcctgtaatcccagctactcgggaggcagaagtaggagaattacytgaacctgggaggtggaggttgcagtgagccaagattg

SEQ ID NO: 397024 - DNA, 580 bp, Homo sapiens
gatctttaaataaaatagcaacattattaagacaatatttttagcctcagagtagaaatgcatttggtcctacaggttttcccctttcataatgcactgcttattaacaaagaaagttggttatattcagggttgttgaactattctccactttgtaaattyaaaattgtgaagtcttttctccaaaattatatttctaataaatacaatcattacccaaattattcttatagagcatttaaattaaaatcccaatactttttttctgaactcaatacctatctaaaaagtgaacatttcttctttttatttcacctaaaaataaaagtattcagcaaagtactggaattaagctaccaaaagataattacagctggtattttatatgttttatactgtcagcatttttcaaattattttttttcttaacagaaaccttaatttgcactgattttcaaatatgtgcagagtaaattgaacaagtttaaagaaaaaaagcagtgctggtttaaacaagaagcaaaatgcaaaacctgggaaagcaataactgttacaactacctcagaggtgacagggaga

SEQ ID NO: 397025 - DNA, 580 bp, Homo sapiens
gatctttaaataaaatagcaacattattaagacaatatttttagcctcagagtagaaatgcatttggtcctacaggttttcccctttcataatgcactgcttattaacaaagaaagttggttatattcagggttgttgaactattctccactttgtaaattcaaaattgtgaagtcttttctccaaaattatatttctaataaatacaatcattacccaaattattcttatagagcatttaaattaaaatcccaatactttttttctgaactcaatacctatctaaaaagtgaacatttcttctttttatttcacctaaaaataaaagtattcagcaaagtactggaattaarctaccaaaagataattacagctggtattttatatgttttatactgtcagcatttttcaaattattttttttcttaacagaaaccttaatttgcactgattttcaaatatgtgcagagtaaattgaacaagtttaaagaaaaaaagcagtgctggtttaaacaagaagcaaaatgcaaaacctgggaaagcaataactgttacaactacctcagaggtgacagggaga

SEQ ID NO: 397026 - DNA, 351 bp, Homo sapiens
ctgtgaaactgaagtttctttatctgcctaagatccagaccaaccaaggagaataattgttttttgttcccctccctgtaagaccaagattgtaactaygcctgaagagacactttcaccagatatcatctctgttacctgatccattcattctccctaggaagcccctcaacagaattccttttctccttcctccccccaaaacctgtggtgccaggatgacatataagcttctgacctctgttgggggtgggagaattatcactttgtgattctccccatgtacacattaaataatttgtatgccttttctctgattaatctgccttttgtgtgttgattttttagtga

SEQ ID NO: 397027 - DNA, 351 bp, Homo sapiens
ctgtgaaactgaagtttctttatctgcctaagatccagaccaaccaaggagaataattgttttttgttcccctccctgtaagaccaagattgtaactatgcctgaagagacactttcaccagatatcrtctctgttacctgatccattcattctccctaggaagcccctcaacagaattccttttctccttcctccccccaaaacctgtggtgccaggatgacatataagcttctgacctctgttgggggtgggagaattatcactttgtgattctccccatgtacacattaaataatttgtatgccttttctctgattaatctgccttttgtgtgttgattttttagtga

SEQ ID NO: 397028 - DNA, 351 bp, Homo sapiens
ctgtgaaactgaagtttctttatctgcctaagatccagaccaaccaaggagaataattgttttttgttcccctccctgtaagaccaagattgtaactatgcctgaagagacactttcaccagatatcatctctgttacctgatccattcattctccctaggaagcccctcaacagaattccttttctccttcctccccscaaaacctgtggtgccaggatgacatataagcttctgacctctgttgggggtgggagaattatcactttgtgattctccccatgtacacattaaataatttgtatgccttttctctgattaatctgccttttgtgtgttgattttttagtga

SEQ ID NO: 397029 - DNA, 642 bp, Homo sapiens
cacacaaaatcaaccatcacacagaataatcattgtctcttccacccaaaatctcccagtccaggagtaaaagtagctctacaaatagtaattatggtgtcatgggatagaactgcaacagaaatcctgatcaaagatgaaacatacatggatttgaccattcaggactcagaatatacacagtgcaggaagcaacagcagcattcatggatttagtgaattcatcttatcaagcaccttatagacgccaacacattttcataataaaatagtgcaatagctattgcaagctttcagattcgtggaagttaattaaggctttgcatagacaaagtcatagggcaattaaaaaaaagtagcgtatttaaaaaaacttgagtagaccaacattcttggagtactgagtgaatgcacgggaaargaccaagagtctagaaaatttggttaggacatgatgtaactgagtgctgagctatggtgtttgctggcttaatcctgaaaatgggaagagttttgatgattttaacagacaataatgttgctgtatctctcgtcatttgaaagtgggagcttatcttcatggcttgggcagaagcccctaggtaaccaactataagaaaatccgagcctctggcatttgct

SEQ ID NO: 397030 - DNA, 516 bp, Homo sapiens
aatatattttaattgaagacacacttacccctcaaacttcctatgaaatattctctactccagcctatatatggccaagtccttcgactattcctggtgatataattttgaatcataccttcatacttttcagcaatgtgtttatatatttttatacggtggcactcactttaataaacctcttttggaatggtcagataagcagaatacggttgttggccccatttttgtgaacactatagtctactaacacatttcaagactcagttaatagccacactacccttttgactcatgcatctgactaagatccctctctgcactttgaggaggtgggctgctatgaaaggtgccacctctgctctctgggwctctcatttttgcaaattttgctctgtgggaacaaggtgagtaaaggttaccatgtgcttggagctctaataaagcagatgaactgctcagtgcctaatggattggctctttacccccaaaagcccagttcttattctgtttcag

SEQ ID NO: 397031 - DNA, 537 bp, Homo sapiens
gagctctgcctcccatcagatcagcagctgcattagattctcatagcagcgcaaaccctattgtgaactgtcttcacatgcaaggttgtgcgctccttatgagatgaagcagtttcatcccgacaccatcctctcccactttgcccccgtccatggtgccaaaaagattggggatcactgatctagatcatgtttttctgagagttccctcgattttatctttgcctggaagcagtttcttacttatggtatctttgcaatttatagagtctagaaataagaaaccactttattttttagcccaacaagctcaggcccctttttacttaacagctctttctttagcttctttctctcctctcacattttactattaagcaactagaagaaactggkcagcactttacacactctgcctggaagtctcagttagatcatccaattccttaggtacattttctgtttttcaccttttgatgggaggagttacaaagaagttgaagacatccactaaaacagccacagtatccaagtgca

SEQ ID NO: 397032 - DNA, 547 bp, Homo sapiens
gatgataaaagcctcacatttccgtccattgtgtatatgatcatcccaagtttctgtgctcatcagggtttctggtattcctctgattcactccagcactctctcagttgttgtcattgaaatgtagtttatttgttctggttgtctttgtgatgggracagtgccaagggcttcaagttggctatcttgctgacattctgtgtgtttttacgaaggggctttttgtggcttcatatagtacactctaattaaaatacactgacaacaagcagtctcttagcgtatcagagcagcttattgataggaatgcagtaatttttcaataacagacagctattctgtttaaatattttatccattcaaagagataccatttatctttcctgcaaatttaaacaatcaaattatacttctggaatcttcatagagggaaaaataaattaataaatatatatatttaatatatatacacacaatcaaattagagaaaaagatcaacagatttggaatatgtccacttcccctaggctatatagaagatatcca

SEQ ID NO: 397033 - DNA, 539 bp, Homo sapiens
ctcccaaatatcccttcacagattctcccaaaagagtgtttccaaccagttgaataaaaaggaaggtttaactttgtgagataaatccacacatcacaaatccatttcacagatagagtctttcttgtttttacctgggaatactctgtttttccccacagtcatcaatgagctccaaaatgtccctttgcagattctacaaaaagtgttgcaacctgctgtatcaaaagaaaaatttacttctgtgaggtgaatccacacatcacaaagtaatttcacagatagcttcattctagtttttaactgaaaatacttggtttttctgcatagtccagttggagcacagaaatggcccttcacagattctccaaaaaraatgtttccacctgatgaataaaaagaaaagtataattctgtgagaagaatctacccatcacaaagcattttcacagatagcttccgtctggtttttgtcttgggatattcgttcttttccaataattgtccatgggatcccaaatgtcattttgtagattttt

SEQ ID NO: 397034 - DNA, 601 bp, Homo sapiens
gcctatcaatgtgtcccaggtaaaaggccctgacataaaataatataagaagtcaacttttgtctgatttactgaagcttgactaaagctctgaaactgctgtctacctaatacatcatagctggcaggttgttcgctatgatgccttaccatcagcagggatgtgctctgaggtatttcttggtggaaagatggattrcaggagatttatccacattcttgactgattcctgatggccaacagtgtctggggatggtcagagggaaactaataggcctacatgaatatgaacttaagaggaaagtcatgaaaacaactcaagtgtaactcctaggagtgtatccctttacggtttacaaagcattttcatacccttgatctcaattgacccctcacaaccctatgaagagagagcattggctctattttacatgtaacccaggtctgcactcccagcttcatctacaagagctgactctattttggccaacccccaaacttgatgcaaattcaaccccttcattattttaatgagaaattaatttgtttaattaagcatattgtaatttttctagattttatttaatattcacggaagcc

SEQ ID NO: 397035 - DNA, 601 bp, Homo sapiens
gcctatcaatgtgtcccaggtaaaaggccctgacataaaataatataagaagtcaacttttgtctgatttactgaagcttgactaaagctctgaaactgctgtctacctaatacatcatagctggcaggttgttcgctatgatgccttaccatcagcagggatgtgctctgaggtatttcttggtggaaagatggattgcaggagatttatccacattcttgactgattcctgatggccaacagtgtctggggatggtcagagggaaactaataggcctacatgaatatgaacttaagaggaaagtcatgaaaacaactcaagtgtaactcctaggagtgtatccctttayggtttacaaagcattttcatacccttgatctcaattgacccctcacaaccctatgaagagagagcattggctctattttacatgtaacccaggtctgcactcccagcttcatctacaagagctgactctattttggccaacccccaaacttgatgcaaattcaaccccttcattattttaatgagaaattaatttgtttaattaagcatattgtaatttttctagattttatttaatattcacggaagcc

SEQ ID NO: 397036 - DNA, 514 bp, Homo sapiens
cactttaatttgtagaaaagaaaacaggttcagggaaagggcatgcattgctaaggtgattcagcagctttggcacagaaacacaacacacttaaggtgactcttcaggtttggagtagaaacgcaatataatctctgttcttttgcwtctcagatccagaattttttcacaatactgaactacttatgtttctgattccttattttttctttctaaattttgccagtactgtctaacaaagatctattctttaccataaatatttaaattcgttaccactattgtctctttataagtaaaattactagttgctattataaatgattattcaatcacttttcatttttggggggttcagtacaaagttagtaacaaataaacaatattggccttggcaatgcaagaggagctcaagtcctccagggcacatcaggaaaaggctaaatgacagctgtgctgtgagtggacagaatacagctctcatacagactattgagtatttgatgttcttca

SEQ ID NO: 397037 - DNA, 514 bp, Homo sapiens
cactttaatttgtagaaaagaaaacaggttcagggaaagggcatgcattgctaaggtgattcagcagctttggcacagaaacacaacacacttaaggtgactcttcaggtttggagtagaaacgcaatataatctctgttcttttgcttctcagatccagaattttttcacaatactgaactacttatgtttctgattccttattttttctttctaaattttgccagtactgtctaacaaagatctattctttaccataaatatttaaattcgttaccactattgtctctttataagtaaaattactagttgctattataaatgattattcaatcacttttcatttttggggggttcagtacaaagttagtaacaaataaacamtattggccttggcaatgcaagaggagctcaagtcctccagggcacatcaggaaaaggctaaatgacagctgtgctgtgagtggacagaatacagctctcatacagactattgagtatttgatgttcttca

SEQ ID NO: 397038 - DNA, 514 bp, Homo sapiens
cactttaatttgtagaaaagaaaacaggttcagggaaagggcatgcattgctaaggtgattcagcagctttggcacagaaacacaacacacttaaggtgactcttcaggtttggagtagaaacgcaatataatctctgttcttttgcttctcagatccagaattttttcacaatactgaactacttatgtttctgattccttattttttctttctaaattttgccagtactgtctaacaaagatctattctttaccataaatatttaaattcgttaccactattgtctctttataagtaaaattactagttgctattataaatgattattcaatcacttttcatttttggggggttcagtacaaagttagtaacaaataaacaatattggccttggcaatgcaagaggagctcaagtcctccagggcacrtcaggaaaaggctaaatgacagctgtgctgtgagtggacagaatacagctctcatacagactattgagtatttgatgttcttca

SEQ ID NO: 397039 - DNA, 370 bp, Homo sapiens
gccctctctctcttcctcacagctgggagccccccttccccatgccatycaatgcgtgaccacacagggcctgtggggggagggagaaggggcgggcatggtggtagaggagggcggacgtcactggtctgcacttggggggacagagggccccggcaggccatgcaagggaactcccagccgtgaacctcaaggagcccggaggcacccccggggactattgatccacaagcgacgcttagacaggcatagccctgggaggaatccgggccgcaagtgcgttcgaagtgtcgatgatcaatgtatcctgcaattcacattagttctcacagctagctgtgttcttcatcaacgcagaaggccagtgatc

SEQ ID NO: 397040 - DNA, 503 bp, Homo sapiens
tagattggcctgtgttggaaatcctcaaatattgtgcaagtccttggagttttagcattaaaaaagaaagggcttgcctgcattaactttgaattttgtaacrgttgccagttaatagagatactctatgcatttatatacactctgattttataggaatggaggcatatcagacacatggctctccacccaggttttttcctttgtaacatatcttggacatcatttttgagcatccttttaaaatttatttctttaaatagctgcatagtagtctatcatatgaataaccataatttcaataaacagtaaggtgttaatcattaatgtgactgataaacattaaggtgactcctagacttttgttaattaaaaaggtggtataatactttctcccattcatacataattccagacatcatgagtatgtctgtagggtaaatttctggaagtgaaattgctgaatcagagagtatttccatttataattctggtatatattg

SEQ ID NO: 397041 - DNA, 339 bp, Homo sapiens
tggacacaacacaaagaagtttctgagaatccttctgtggacttttactgtgaagatatttccttttccaccatacgccacgaagggctgaaaatatgcacttgcagattctacaaaaagagtgtttcaaaactcatctatcaaaagatatgttcaggtgtgtgggtggaatgaaygcatcacaaagaactttctcagaatgcttctgtctagattttgtgaagatatttccttttcaacagtaggcctcaaagcgtgctaagtatccacttgcagattctacaaaaagatagattaaaaagtgctcaatccaaagataggttcaattctgcaagatga

SEQ ID NO: 397042 - DNA, 646 bp, Homo sapiens
ggtgagagtgacccgattttccaggtgccatctgtcacccctttctttgactaggaaagggaattccctgaccccttgttcttcccagatgagacgatgcctcaccctgctttggctcatgcacrgtgcactgtacccactgtcctgcacccactgaccggcactcgccagttacattagcctggtaccttagttggaaatgcagaaatcacccatcttctgcatcactcacgctgggagctgtagatgggagctgttcctcttcggccctcttggctccactgaccaagactaaatattttttacaaacatattcaaatggccaacaggtgtgtagaaagatgctaaacattaccattcatgagaaaattgcaaatcaaaggataccagtttacagcagttggaatggctaatatcaaaaaaagaaacatgacaagtgttaacaaggatgttaccaaatatttctgtacattcttaatgagttgcaaactggaagagtcattatgaaaattagtatgcaggttattttaaaaaatagaactatcgtacaatcccgaaattccacttctgtctataaacaaaataaaatcagcatctcaaaaattatctgcacccttgtattcaatgcagtattattcacaactgt

SEQ ID NO: 397043 - DNA, 646 bp, Homo sapiens
ggtgagagtgacccgattttccaggtgccatctgtcacccctttctttgactaggaaagggaattccctgaccccttgttcttcccagatgagacgatgcctcaccctgctttggctcatgcacggtgcactgtacccactgtcctgcacccactgaccggcactcgccagttacattagcctggtaccttagttggaaatgcagaaatcacccatcttctgcatcactcacgctgggagctgtagatgggagctgttcctcttcggccctcttggctccactgaccaagactaaatattttttacaaacatattcaaatggccaacaggtgtgtagaaagatgctaaacattaccattcatgagaaaattgcaaatcaaaggataccagtttacagcagttggaatggctaatatcaaaaaaagaaacatgacaagtgttaacaaggatgttaccaaatatttctgtacattcttaatgagttgcaaactggaagagtcattatgaaaattagtatgcaggttattttaaaaaatagaactatygtacaatcccgaaattccacttctgtctataaacaaaataaaatcagcatctcaaaaattatctgcacccttgtattcaatgcagtattattcacaactgt

SEQ ID NO: 397044 - DNA, 552 bp, Homo sapiens
acatgaatggacctgggtacattatgctatgcaaaataagccaggcacagaaggacaaacactgtacgttctcacttaaatggagaatttaaaaagcctgaactcatagaagcagagagtacaatggtaatgaccaggcctggaggtagaaaaaatgatgaggtgttcagagtacaaactttcagttataagataaataagttttgggggtctaatgtatagctttaagatgtagttaataacagtgttttgtatgcttaaaatttgctgcaacagtaggagacctcaaatgctctcactacaaaaaacataaccatgtaaggtgacataaatattcatcaacttaattgtattaaacattttacaatatatatacctatcaaacttttataatatacacaatacataattatgcaatttttattggtcaaaaaattaatgttatgtacacatgcatatattcacataagtgtgtatatacacatatataaaacatataygtatatatcaattacatatgtatatacttgtgtgtgtgtatatgtgtatata

SEQ ID NO: 397045 - DNA, 557 bp, Homo sapiens
taaatggagaatttaaaaagcctgaactcatagaagcagagagtacaatggtaatgaccaggcctggaggtagaaaaaatgatgaggtgttcagagtacaaactttcagttataagataaataagttttgggggtctaatgtatagctttaagatgtagttaataacagtgttttgtatgcttaaaatttgctgcaacagtaggagacctcaaatgctctcactacaaaaaacataaccatgtaaggtgacataaatattcatcaacttaattgtattaaacattttacaatatatatacctatcaaacttttataatatacacaatacataattatgcaatttttattggtcaaaaaattaatgttatgtacacatgcatatattcacataagtgtgtatatacacatatataaaacatatatgtatatatcaattacatatgtatatacttgtgtgtgtgtatatgtgtatatatatatatatacatatcaatgacaaaatcctagtaagcttcaaactaaacaagrgaaaactataaaatgataactatttaaa

SEQ ID NO: 397046 - DNA, 557 bp, Homo sapiens
taaatggagaatttaaaaagcctgaactcatagaagcagagagtacaatggtaatgaccaggcctggaggtagaaaaaatgatgaggtgttcagagtacaaactttcagttataagataaataagttttgggggtctaatgtatagctttaagatgtagttaataacagtgttttgtatgcttaaaatttgctgcaacagtaggagacctcaaatgctctcactacaaaaaacataaccatgtaaggtgacataaatattcatcaacttaattgtattaaacattttacaatatatatacctatcaaacttttataatatacacaatacataattatgcaatttttattggtcaaaaaattaatgttatgtacacatgcatatattcacataagtgtgtatatacacatatataaaacatatatgtatatatcaattacatatgtatatacttgtgtgtgtgtatatgtgtatatatatatatatacatatcaatgacaaaatcctagtaagcttcaaactaaacaagagaaaaytataaaatgataactatttaaa

SEQ ID NO: 397047 - DNA, 538 bp, Homo sapiens
cctcccaagcaacccatgctcatgagtgagaaatggtggcctatggtcttaggcctctgaggtgtggggttacttgttacagagcaagagttaactaatagagatttctacctcacatccctatgaatcaaagracaaaggaaataaaacaaaatatgaaaagcagatttccaatttttagaagaaaacagaggacagattttatggcactaaacagagaaaaactttttttaatatgacacaaaacacagacatcataaaagaaattactgataaattcgatcgtattaaatgtagaagctttgatctgacaaaagaggtgatgaataaagttaaaagacaaagaaagtgcatgatatggtttggctgcctgtccccacccaaatctcatcctgaattgtcctcccataattctcctgtgttgtgggagggacctggtgggagacaattggaatcatgggggcggttcccccatactgttctcctggtagtgaataaatctcaagagatctgacagttttatcagggggttccactt

SEQ ID NO: 397048 - DNA, 538 bp, Homo sapiens
cctcccaagcaacccatgctcatgagtgagaaatggtggcctatggtcttaggcctctgaggtgtggggttacttgttacagagcaagagttaactaatagagatttctacctcacatccctatgaatcaaagaacaaaggaaataaaacaaaatatgaaaagcagatttccaatttttagaagaaaacagaggacagattttatggcactaaacagagaaaaactttttttaatatgacacaaaacacagacatcataaaagaaattactgataaattcgatcgtattaaatgtagaagctttgatctgacaaaagaggtgatgaataaagttaaaagacaaagaaagtgcatgatatggtttggctgcctgtccccacccaaatctcatcctgaattgtcctcccataattctcctgtgttgtgggagggacctggtgggagacaattggaatcatgggggcggttcccccatactgttctcctggtagtgrataaatctcaagagatctgacagttttatcagggggttccactt

SEQ ID NO: 397049 - DNA, 433 bp, Homo sapiens
tgggtgagtgtggctcccactgagtacctagcaggttttccccaggttatctacaaagagtgacttttgaactgtttcrtgtgagtcacgagtatgatgtccccagcttttttcttattcctcatgattggcttggtcattcagcctacattgtaggcttgcattttctattactataaaaagtgggacagggattttgatacggatttgagttagcttacagattgctttggataatatgacaccttattaaccaaaagccctgccttctcaaaatgacccttttcgatcttgggttttagcaatgtttcataatgccctgtatcccaaagctcactatattgcccaggctgttcttgaactcctggcctggcagtcctcccacctcaggctcctgaatggaggagattactgtcatgagccacagtgcctg

SEQ ID NO: 397050 - DNA, 543 bp, Homo sapiens
acagtgcctggatctctcataaagttactttgcttgatggatggctgactagtttttattgctgcaggggaatacaaaattagggaccccctattccaccactttgataatgtcactctctccgtacacttcttccttattttgttctcttgtatgtttgtgtgttattttaggttcaaatattaagaccaataggctaggatttatacattgtgtaaaaagtaaattagatagctagtgggtaccctatatatattataatgtttacctataagattaagtttagtgcaggcaaaaagggctcattaaaattttcatccacttttttcaacctctatccaaactataatttgtgccccaatttttattttatcaattaytcttaaccgtatttcataaaatttatatttttttctttatttacaaatgtaaggctattatttgcttttaaaggctgtaatacagcttttttaatttgtgaaataatagcaccaatattatagatatttatagtgtaaatacttattcattaaagtctaccca

SEQ ID NO: 397051 - DNA, 543 bp, Homo sapiens
acagtgcctggatctctcataaagttactttgcttgatggatggctgactagtttttattgctgcaggggaatacaaaattagggaccccctattccaccactttgataatgtcactctctccgtacacttcttccttattttgttctcttgtatgtttgtgtgttattttaggttcaaatattaagaccaataggctaggatttatacattgtgtaaaaagtaaattagatagctagtgggtaccctatatatattataatgtttacctataagattaagtttagtgcaggcaaaaagggctcattaaaattttcatccacttttttcaacctctatccaaactataatttgtgccccaatttttattttatcaattattcttaaccgtatttcataaaatttatatttttttctttatttacaaatgtaargctattatttgcttttaaaggctgtaatacagcttttttaatttgtgaaataatagcaccaatattatagatatttatagtgtaaatacttattcattaaagtctaccca

SEQ ID NO: 397052 - DNA, 543 bp, Homo sapiens
acagtgcctggatctctcataaagttactttgcttgatggatggctgactagtttttattgctgcaggggaatacaaaattagggaccccctattccaccactttgataatgtcactctctccgtacacttcttccttattttgttctcttgtatgtttgtgtgttattttaggttcaaatattaagaccaataggctaggatttatacattgtgtaaaaagtaaattagatagctagtgggtaccctatatatattataatgtttacctataagattaagtttagtgcaggcaaaaagggctcattaaaattttcatccacttttttcaacctctatccaaactataatttgtgccccaatttttattttatcaattattcttaaccgtatttcataaaatttatatttttttctttatttacaaatgtaaggctattatttgcttttaaaggctgtaatacagcttttttawtttgtgaaataatagcaccaatattatagatatttatagtgtaaatacttattcattaaagtctaccca

SEQ ID NO: 397053 - DNA, 619 bp, Homo sapiens
tttcttttggcccagaagcaataagtgtgttttagtaacaatgctttgaagtctttctctacaaacacaaacactttttttatttaaatggtattttatatgcatattgcttatagcaagctctttttagttaatagtgtagcttagagatcactccatgataacaattatatatatatggaatattttttttgagacagagttttgctcttgttgaccaggctggagtgcaatagcatgatctcggctcactgcaagctccrccccctaggttcaagtgattgtccttcctcagcctcacaagtagctgggattacaggcatgcaccaccacgcctagctaattttgtatttttagtagagatgaggttttaccttggtggtcaggttagtctcaaactcctgacctcaggtgatccacctgcctcagcttcccaaactgcgggaattacaggtataggccaccatgcctggcctatatagaatatttttaaaatgcgagtttaatattccattagatggggctagacatggtggctcatgcatgcaatcctagaactttgggagggctgaggcaggcggatcacttgaagccaggagtttgagaccagcctggccaa

SEQ ID NO: 397054 - DNA, 619 bp, Homo sapiens
tttcttttggcccagaagcaataagtgtgttttagtaacaatgctttgaagtctttctctacaaacacaaacactttttttatttaaatggtattttatatgcatattgcttatagcaagctctttttagttaatagtgtagcttagagatcactccatgataacaattatatatatatggaatattttttttgagacagagttttgctcttgttgaccaggctggagtgcaatagcatgatctcggctcactgcaagctccgcccsctaggttcaagtgattgtccttcctcagcctcacaagtagctgggattacaggcatgcaccaccacgcctagctaattttgtatttttagtagagatgaggttttaccttggtggtcaggttagtctcaaactcctgacctcaggtgatccacctgcctcagcttcccaaactgcgggaattacaggtataggccaccatgcctggcctatatagaatatttttaaaatgcgagtttaatattccattagatggggctagacatggtggctcatgcatgcaatcctagaactttgggagggctgaggcaggcggatcacttgaagccaggagtttgagaccagcctggccaa

SEQ ID NO: 397055 - DNA, 619 bp, Homo sapiens
tttcttttggcccagaagcaataagtgtgttttagtaacaatgctttgaagtctttctctacaaacacaaacactttttttatttaaatggtattttatatgcatattgcttatagcaagctctttttagttaatagtgtagcttagagatcactccatgataacaattatatatatatggaatattttttttgagacagagttttgctcttgttgaccaggctggagtgcaatagcatgatctcggctcactgcaagctccgccccctaggttcaagtgattgtcctkcctcagcctcacaagtagctgggattacaggcatgcaccaccacgcctagctaattttgtatttttagtagagatgaggttttaccttggtggtcaggttagtctcaaactcctgacctcaggtgatccacctgcctcagcttcccaaactgcgggaattacaggtataggccaccatgcctggcctatatagaatatttttaaaatgcgagtttaatattccattagatggggctagacatggtggctcatgcatgcaatcctagaactttgggagggctgaggcaggcggatcacttgaagccaggagtttgagaccagcctggccaa

SEQ ID NO: 397056 - DNA, 619 bp, Homo sapiens
tttcttttggcccagaagcaataagtgtgttttagtaacaatgctttgaagtctttctctacaaacacaaacactttttttatttaaatggtattttatatgcatattgcttatagcaagctctttttagttaatagtgtagcttagagatcactccatgataacaattatatatatatggaatattttttttgagacagagttttgctcttgttgaccaggctggagtgcaatagcatgatctcggctcactgcaagctccgccccctaggttcaagtgattgtccttcctcagcctcacaagtagctgggattacaggcatgcaccaccacgcctagctaattttgtatttttagtagagatgaggttttaccwtggtggtcaggttagtctcaaactcctgacctcaggtgatccacctgcctcagcttcccaaactgcgggaattacaggtataggccaccatgcctggcctatatagaatatttttaaaatgcgagtttaatattccattagatggggctagacatggtggctcatgcatgcaatcctagaactttgggagggctgaggcaggcggatcacttgaagccaggagtttgagaccagcctggccaa

SEQ ID NO: 397057 - DNA, 571 bp, Homo sapiens
aatatcatacttcttttatttargtcttctttaatatctttctattgagttttataattttgtctataatgatcttaaattcatattgttaggttaattcttaggtacaatatgttttttgttcttcttaagttactttttttttttttttgccttgtcgtccaggctggagtgcaatggtgcgatcttggatcactgcaacctctgcctcccgggttggagtgattctcctgcctcagcctccctagtagctgggattacagatgcatgccaccacacccagctaatttttgtattttagcagagacggggtttcaccatgttggccaggctggtctctatatcctaacctcgtgatccgcctgtctcagcctcccaaagtcctgggattataggcataagccaccatgcccggccctaaattatatttttaatctctttgctactggtatttagaaataaaatttagtatttatatacatcttatataaaacaaccttgataaactcttattaattctgataatttgactgtaacttactacttttcctaatcttattgcacaacctag

SEQ ID NO: 397058 - DNA, 571 bp, Homo sapiens
aatatcatacttcttttatttaggtcttctttaatatctttctattgagttttataattttgtctataatgatcttaaattcatattgttaggttaattcttargtacaatatgttttttgttcttcttaagttactttttttttttttttgccttgtcgtccaggctggagtgcaatggtgcgatcttggatcactgcaacctctgcctcccgggttggagtgattctcctgcctcagcctccctagtagctgggattacagatgcatgccaccacacccagctaatttttgtattttagcagagacggggtttcaccatgttggccaggctggtctctatatcctaacctcgtgatccgcctgtctcagcctcccaaagtcctgggattataggcataagccaccatgcccggccctaaattatatttttaatctctttgctactggtatttagaaataaaatttagtatttatatacatcttatataaaacaaccttgataaactcttattaattctgataatttgactgtaacttactacttttcctaatcttattgcacaacctag

SEQ ID NO: 397059 - DNA, 456 bp, Homo sapiens
ttaaaaccttccatatcattatgatttcttttctcccagtgacttagtggctaaataccaaatgctccttacaaaatgcaaatcacttattcaaaatacaattaaattatagcatacatagtttataagcaattacagtcacataatgtgtgtaatttggattactytgggtaaaaatctataaatgtatggctgctaccttcaaaccaagaaatagttctttttggaaatatgatatactacagcaaaaataccatttttaggtaagatgtaaagtaagtagggtaggtctttctcaaagaataccaattaagccttcctcttcaggaattctgtgggggtcctgtcagttaattaggtcattttacaatgagaacagataccaacctcggagtctggattaattctatgggtacgaataatgattgttaagattactagtgtccatttttttat

SEQ ID NO: 397060 - DNA, 609 bp, Homo sapiens
tccatggcttaatttagtaataacattaaactaacagtatgaagtttaatggtatctttcttccttctcyctttctctcttgtatctacactcataaacaaacaaaaaaaaagttggcataaagaaaaacagcaaggggctgggcacagtggctcacacctataatcccagcactttgggaggaccaggtgggtggatcacttgaggtcaggagttcgagactagcccggccaacatggtgaaaccccgtctctaccaaaaatacaaaaattagctgggcttgttggcagatgtctgtaatcccagctactcaggtggctgaggcaggggaattgcttgaacctgggaggtggagatcgtgccactgcactccagcccgggagagagagcaagactccgtctccaaaaaaaagaaaaatagcaggggaatgatctcttttaaagtttatagtctaaacatgcccattcaagatgaatataaaaatacaatactaatactacaatatttaccccagcaaaaagcttgtttttgagttcaaatccattaagataaaatcagtttgttattggctacaaatggtttatcaagacatattttttattttaacc

SEQ ID NO: 397061 - DNA, 609 bp, Homo sapiens
tccatggcttaatttagtaataacattaaactaacagtatgaagtttaatggtatctttcttccttctccctttctctcttgtatctacactcataaacaaacaaaaaaaaagttggcataaagaaaaacagcaaggggctgggcacagtggctcacacctataatcccagcactttgggaggaccaggtgggtggatcacttgaggtcaggagttcgagactagcccggccaacatggtgaaaccccgtctctaccaaaaatacaaaaattagctgggcttgttggcagatgtctgtaatcccagctactcaggtggctgaggcaggggaattgcttgaacctgggaggtggagatcgtgccactgcactccagccygggagagagagcaagactccgtctccaaaaaaaagaaaaatagcaggggaatgatctcttttaaagtttatagtctaaacatgcccattcaagatgaatataaaaatacaatactaatactacaatatttaccccagcaaaaagcttgtttttgagttcaaatccattaagataaaatcagtttgttattggctacaaatggtttatcaagacatattttttattttaacc

SEQ ID NO: 397062 - DNA, 530 bp, Homo sapiens
cacaccctgctaatttttctattttttgtagagacggggtttcaccatgttgcccaggctggtctctaagtcctgagctcaggtgatctgcctgcctcggcctcccaaagtgctgggattacaggtgtgagccactgcgcctggtccattttagctgttaccacaacacccatcaccattgctggcacatggtaggcaatcaataataattttttttcaaattaatamatgaaaactattaggaaagaagtaaaaaaataacatagctataaagctctttgaatgttaggttattgggaaaagctgtggaaagccaaggattttctttctcaaatttatttttagaatatttttttctacacaaaagaccacagataaggcagagaaagataagaaaaagaccacaagcccaaggacttggaatttgaatcataaaggttcattctagacttgggcaatatctagaacttctagaacaatcagttttctagaacatagaaaagatattaccttggtgttagctttaactc

SEQ ID NO: 397063 - DNA, 584 bp, Homo sapiens
cagcttttaattaagttgacttctgaccatagaactgaaaaaaaaaaaaaaattcaaacctcttatcagatttcagccagcacaaacagagaatagttctccttcaatgtgtctgattctaaaaccagctttttccaattgtacacacatgagttatcttaggcatttcaaaggaccctcatttcagccattgctgyttatgaccatcctgggtcatgtgggttcattttcctagatattataagaggacgccttgtaagtgttgtacataaaaaccagctggtgtttctaaaggaggctgtcccttaaaagagcactccgattttgaagcttgaattcccataatttaggaacttttcaaaagtgaccaaggccagaaatgcgttttgctttgagaagtgtgcttcttctgagtgtcactcctcagggtgtcatccaaaagtcgagactctctctgttatgtgtcccagactgcctctaactgccaggtggcagtagggtgctcaaggtattggggtaaccaattccttaatttttacctttcctgatgagttagattccctaaaatgttcttctggtgaaaa

SEQ ID NO: 397064 - DNA, 554 bp, Homo sapiens
cgtcatgcccagctaatttttgtatttttgcagagacagggtttcaccgtgtgggccaggctggtctcaaactcctgacctcaggtgatccgcctaccttggcctcccaaagtgctgggattacaggtgtgagttactgcacccagcctttatttatttttgtttgagacagagtctaactctgtcacccaggctggagtgcagtggcacgatctcaacttactgcaatctctgcttctgaagttcaaacgattctcctgcctcagcctcccaagtagctgggattagaggtgcatgccaccatgcctggctaatttttgtatttttagtagaaatggagtttcaccatgttgtccaggctggtctggaactcctgacctccagtgacccacccaccttggcatcccaaattccttggattacagacatgagccactgcacctggccacaagtcagtttttaaaggaaaaaaagaagaggcagtttctaagwtgtttaccaagaatttacattaagataacaaaagctgttgattggtctgttccttgcattac

SEQ ID NO: 397065 - DNA, 625 bp, Homo sapiens
ctcaatatgtgaatatgtgtctactagtagttaattggataaactggcagcatccctggcctgttgtcatgcagtcatttcctgttaattctgggagacaatgatttcacaactagmgggaagcagtcctaaaagtttaaaatccgataaggaatatctgggacagggtttagatcatgactctacacagataccatgatgagagtatattaaagaaatttaggaaagcacctggttcctttctccccatgcctgccttctgctccctccccagctggtttgggctcaaattgtccctggagactagggtttatgttagggtattgatagattagagcaggtggttgaagagatcttctctggtcagacttggaagaatttccaaaactgaagttagccccaagacttccctagggttgatgtactttatgatccagatgctaaacttcttagaatgaaaatatgcttcaacacttaagtagcatacactgccctacaaacctcagagagcacttttccccaagttcttgtttttatttttgaaagtactcacacagcacttactatgctccaaacactcctctaagcactttacacatattagctcattcagtccccagacaga

SEQ ID NO: 397066 - DNA, 610 bp, Homo sapiens
cagagatagtcttttttcagtttcttgattatgttaactgaaaagccagactctgtaatgtataatacatattttataatatttactattaatattatatatttatatataatatttactataaatatcatatatttatatataatatttactataaatatyatatatataatatttactataaatattatatatataatatttactataaatatatatataatatttactattaatattatatatttatatataatatttaatattttatatatataaaatttttcgcagtaaagagtttaattaatgcaaagcagccaagcagaaggactggagttatcactcaaatcagtcttcctgagggctcagaggttagggtttttcaatgatagtttggtgggcaggggcaagggaatggatgctgctgattggttgggaatgcaatcataggtgtgtagaaaacaatcctcatgcactgagtccccctctggaggagggccacaggaccaattaagtcatgagtcacaagtccagatggggtcagctcttcactacctgaccaatcttaggttctacaatagtgatgttatctataggagcaactggggaa

SEQ ID NO: 397067 - DNA, 610 bp, Homo sapiens
cagagatagtcttttttcagtttcttgattatgttaactgaaaagccagactctgtaatgtataatacatattttataatatttactattaatattatatatttatatataatatttactataaatatcatatatttatatataatatttactataaatattatatatataatatttactatwaatattatatatataatatttactataaatatatatataatatttactattaatattatatatttatatataatatttaatattttatatatataaaatttttcgcagtaaagagtttaattaatgcaaagcagccaagcagaaggactggagttatcactcaaatcagtcttcctgagggctcagaggttagggtttttcaatgatagtttggtgggcaggggcaagggaatggatgctgctgattggttgggaatgcaatcataggtgtgtagaaaacaatcctcatgcactgagtccccctctggaggagggccacaggaccaattaagtcatgagtcacaagtccagatggggtcagctcttcactacctgaccaatcttaggttctacaatagtgatgttatctataggagcaactggggaa

SEQ ID NO: 397068 - DNA, 610 bp, Homo sapiens
cagagatagtcttttttcagtttcttgattatgttaactgaaaagccagactctgtaatgtataatacatattttataatatttactattaatattatatatttatatataatatttactataaatatcatatatttatatataatatttactataaatattatatatataatatttactataaatattatatatataatatttactatwaatatatatataatatttactattaatattatatatttatatataatatttaatattttatatatataaaatttttcgcagtaaagagtttaattaatgcaaagcagccaagcagaaggactggagttatcactcaaatcagtcttcctgagggctcagaggttagggtttttcaatgatagtttggtgggcaggggcaagggaatggatgctgctgattggttgggaatgcaatcataggtgtgtagaaaacaatcctcatgcactgagtccccctctggaggagggccacaggaccaattaagtcatgagtcacaagtccagatggggtcagctcttcactacctgaccaatcttaggttctacaatagtgatgttatctataggagcaactggggaa

SEQ ID NO: 397069 - DNA, 586 bp, Homo sapiens
tgaaaatccaacacagatgagagaagataggaagtcctagggtcctagactgctttgtaacaggctcaaaaagcaaacaagctggccgggtgtggtggctcatgcctgtaatcccagcactttcagaggctgaggcaggcggatcacttgaagtcagaagttcaagaccagcctggccaacatggcgaaacyctgtctctactaaaaaacacaaaaattagctgggtgtggtggcacacacctgtaaccccagctactcagaaggccaaggcaagagaattgcttgaacccaggaggcagaggttgcagtcagccaagatcacgccattacactccagcctgggcaacaagagcgaaactctgtctcaaaaaaaaaaaaaaaaaaaaaaaaagggcaagggaaaaaaaaggtaaacaagctagagtaggaggacaatgagctctgggaggaaggcctctaggtaaataatggcactgatatgtttaagtatttagaggctattgttgataggtatgtggcagagatattagagaagttggaaaaaattaacaatgggtacataaataaccaggcaaataaaaaaca

SEQ ID NO: 397070 - DNA, 603 bp, Homo sapiens
atatattttaactaaaaaaagctttcatgaagcttttctaaattaaataatggagagagagattgtaataaattgaggtcaaatgtgctcaattaaaatgaaaacaaatgacaggccggccacagtggctcatgcctgtaatcctagcactttgggaagtggaaagattgcttcaggctaggagttcaagactgcagtaagctatgatcactgtactacactacagcctgggcaacagagtgaatgtgtctctattttaaaatatatataatatttatatataaatacacgtattttatacatacatactttatatgtaaatatataaataatattttaaaaatatttgtgtatatatattatgtgtgtrtatatatatgcataaataaaacatacatatacacataaataaagcaaaaaccagacaaaccccaattccaattcaagccaattttgtataaatataaattacactttttttttttttttttttactgagacagggtctcaccatcgcccaggctggaatgcagtagtgtgatcataacttactgcaacctcaaattcctgggctcacgtgatactcctgcctcagcttcctgg

SEQ ID NO: 397071 - DNA, 610 bp, Homo sapiens
caagctaaaaaagtttctgccaggtctcacatcctgtagcaggtgcagaaatggaactcccacacagtgttacccaaaggatacaaaagcctggatagctgaaggctccatgaggttcccttgggttggtyttcctatttctaagacatggtttgcacacgcaggcctacaggaaccaagtaggtagcagaagtcactgcagcaggttgggtggggccagcagcaaagcgaaaggctacagaaggctgggtgtggtggctcacgcctgtaatcccagcattttgggaggccaaggtgagaggactgcctgagcccaggagttcaaaaccagtctgggcaacttggcaagacctcatctctacaaaaaataacaacaaaaaaaattagctggatgcagtggcatgtgcctatagtcccagctacttgggaggccgaggtgggaggatcacttgagcctgggaggttgaggctgcagtgagccataatcatgccagtgcactctagtctgggcaagagagtgagactctgtctcaaaaagaaaaggctaaggagggccaggactcctcagccccagctggcgtcatgtggccccaagattgccagaccaggt

SEQ ID NO: 397072 - DNA, 469 bp, Homo sapiens
tcgttcccagttgagctagtgattgacatcctgaaatagcactcttccatcatcttgggatttgattctgggatacagtatgtgagagcaatgaggtcagatagaggagaaaatacaagctggtaatgggtagatgaggtcttgcacctttacctgcaaaagaggtgaagacagatgacaaaaaagttgcttccagctgcatccacgaattcccttaattgcacaagcagttcgcaccatggcctagtgttcagaatggagtactctaatgtgcagggaacatttggagtgcaaattggtgccatgcttgaaaagcccgatttaagggctttcatacttggaggcaaatgggagtgagatggatagatgttgtttargttttggccttcacatttgcctcttcttttcctgacttccatgttcctcattggcctagggttttctgggtctggctcaacatcttccacat

SEQ ID NO: 397073 - DNA, 511 bp, Homo sapiens
tctgaaacccatggcagctaaataatgtgtggtgagagaccctgccacccagcagcagtctaatgaaagacctcctttacaaagaaaaggcagtgtggacaaaatgaaacaaaagctagattaccagtaaaaagtcagacacggctgcctgcttctcatgctacagatatcacgcagccaccctttctctgatagagtagaactagagcttccttgttgttggctgtaacaggaatttacggttttaaaagtataaaagctgtccagtcattaatatgttacagtggatagaaggaaacactcacacaattgcttttcatgagggtcgttctctgtgaactggaaaatgtttagtgttgaaaacattgatccagacccaggaaatcctaggacratgaggaacatggaagtccagaaaagaagaggcaagtttggaggccacatcccaagaagcatgaatccatttccctcccattggctccaggtataaaagccctcaaatagggttttt

SEQ ID NO: 397074 - DNA, 425 bp, Homo sapiens
agaactaaatgaactggatgctaaaaaataataaaaaggatcaacaaaacaaaaagttggctttttgaaagataaaattgataaaccacttgctagactagccataaaaagagaatacccaaataaaatcagaaatgaaacmgaagatattacaattgttaccatggaaatacaaaagatcattagagactattatgaacaactatacaataacaaactagaaaacctagaagaaatggataaattcctaaacacatacaaactatcaagattaaatcaagaagaaacagaaacctgaacagaacaataacaagttatgagactgaatcagtaataaaaagtctaccaatgaagaaaagtccagtaccagatggcttcactgccaaattccaccaagctttcaaagaacatgaattcttcttgaa

SEQ ID NO: 397075 - DNA, 425 bp, Homo sapiens
agaactaaatgaactggatgctaaaaaataataaaaaggatcaacaaaacaaaaagttggctttttgaaagataaaattgataaaccacttgctagactagccataaaaagagaatacccaaataaaatcagaaatgaaaccgaagataytacaattgttaccatggaaatacaaaagatcattagagactattatgaacaactatacaataacaaactagaaaacctagaagaaatggataaattcctaaacacatacaaactatcaagattaaatcaagaagaaacagaaacctgaacagaacaataacaagttatgagactgaatcagtaataaaaagtctaccaatgaagaaaagtccagtaccagatggcttcactgccaaattccaccaagctttcaaagaacatgaattcttcttgaa

SEQ ID NO: 397076 - DNA, 426 bp, Homo sapiens
ctatgctaggctccatacctagtacataattaaaatcctgagcytaccaaggttttcaacaaaagtaaaagtcactaagagttaacattgtaatgagactaccaaagaaacagctctacatgcaaggtgtgtgaggaaactagaatgtgtttttggcaaacacaattataagaactcatgggaatgtggatttcttgcctaagtttaaagggttaaaggatttttttaagtgagataggaaaaaaatctaaaggtttgaacaaattgtggaaggtttgtgaaaaattaattgtaaaagaaatgctgtgtgtgaacatattggctaaaattaaaggggtaataccatcctggctaacgcagtgaaaccctgtctactaaaaatataaaaaattagctgggtgtggtggcaggcgtctgtagtcacag

SEQ ID NO: 397077 - DNA, 426 bp, Homo sapiens
ctatgctaggctccatacctagtacataattaaaatcctgagcttaccaaggttttcaacaaaagtaaaagtcactaagagttaacattgtaatgagactaccaaagaaacagctctacatgcaaggtgtgtgaggaaactagaatgtgtttttggcaaacacaattataagaactcatgggaatgtggatttcttgcctaagtttaaagggttaaaggatttttttaagtgagataggaaaaaaatctaaaggtttgaacaaattgtggaaggtttgtgaaaaattaattgtaaaagaaatkctgtgtgtgaacatattggctaaaattaaaggggtaataccatcctggctaacgcagtgaaaccctgtctactaaaaatataaaaaattagctgggtgtggtggcaggcgtctgtagtcacag

SEQ ID NO: 397078 - DNA, 556 bp, Homo sapiens
agctttgccggatataatattcttggctaacaggttttttgttttcttttttttttttttttttttttttttttagcactttgaatatatcactctattctgtcctggcctggaaggtttctgctgaraaattctctgtgactgtaatggggatttccttatatgtgacatgatgattttctctcacggtttatagaattctctctttgtctttgactttgacgttttaactatagggagccttggagaatctttttgggttgaatctattgggagatctctgagcttcctctctggatctctatatctcttacaaggcttgggaacttttcatctattattttgttaaataggttttctatgcctttgcccatctcttcttcctctgaaaatcccaaaatttgaatatttggtcactttatagtattgctttatatgtcattaggctttcttcatttttaaaattcttttttttttcttccttccttcctttctttctttgtttctgttgttgttgttgtttgtttgactggattgtttctaagttcttcctgaa

SEQ ID NO: 397079 - DNA, 379 bp, Homo sapiens
tgcggttatatactgattcatgggctgtagccaatggtttggctggatggtcagggacttggaagaagcatgattggaaaattggtgacaaagaaacttggagaaagagtatgtagatggacctctctgagtggtcaaaaactgaagatatttgtaccctgtgtgagtgttgaccaacaagtgacttcaggagaggaggattttgataatcaagtggataagatgacccgttctgtggataccactcagcctctttcctcagacacccctgtcattgtccaatgagmccatgaacatagtggccatggtgtcagggatggaggctatgcatggattcagcaatgtggacttccactcaccaaggctgaactgtctgtgg

SEQ ID NO: 397080 - DNA, 379 bp, Homo sapiens
tgcggttatatactgattcatgggctgtagccaatggtttggctggatggtcagggacttggaagaagcatgattggaaaattggtgacaaagaaacttggagaaagagtatgtagatggacctctctgagtggtcaaaaactgaagatatttgtaccctgtgtgagtgttgaccaacaagtgacttcaggagaggaggattttgataatcaagtggataagatgacccgttctgtggataccactcagcctctttcctcagacacccctgtcattgtccaatgagaccatgaacatagtggccatggtgkcagggatggaggctatgcatggattcagcaatgtggacttccactcaccaaggctgaactgtctgtgg

SEQ ID NO: 397081 - DNA, 322 bp, Homo sapiens
cctcgcctcccagcctacatctttctcccatgytggatgcttcttgccctcgaacatggactccaagttcttcagttttggaactctggctggctctttttgctcctcatccagcagatggcctattgtgagacttggtgattgtgtgagttaatacttaataaacttcctgtattagacagtgacatctagagggacagaactaacaggatatatacatatatatatacacacacacatacatatatatatgcacacacacacacacatatatatatttatttataaaggggagtttattaacttacaggatcataagtta

SEQ ID NO: 397082 - DNA, 322 bp, Homo sapiens
cctcgcctcccagcctacatctttctcccatgctggatgcttcttgccctcgaacatggactccaagttcttcagttttggaactctggctggctctttttgctcctcatccagcagatggcctattgtgagacttggtgattgtgtgagttaatacttaataaacttcctgtattagmcagtgacatctagagggacagaactaacaggatatatacatatatatatacacacacacatacatatatatatgcacacacacacacacatatatatatttatttataaaggggagtttattaacttacaggatcataagtta

SEQ ID NO: 397083 - DNA, 322 bp, Homo sapiens
cctcgcctcccagcctacatctttctcccatgctggatgcttcttgccctcgaacatggactccaagttcttcagttttggaactctggctggctctttttgctcctcatccagcagatggcctattgtgagacttggtgattgtgtgagttaatacttaataaacttcctgtattagacagtgacatctagagggacagaactaacaggatatatacatatatatatacacacacacatacatatatatatgcayacacacacacacatatatatatttatttataaaggggagtttattaacttacaggatcataagtta

SEQ ID NO: 397084 - DNA, 595 bp, Homo sapiens
gaaacctcgcctccactaaaaaaaatacaaaattagcagggtgtggtggtgtgcacctgtgatcccagctactcaggaggctgaggcaagakaattgcttggacctgggaggcggaggttgcagtgagcccagattttgccactacactccagcctgggtgacaagagcgaaactccatctcaaaaaaacaaaacgaaacaaaaacaaacaaaaaaacacctactgcctcactgaattaaaggcgtgttcagcagtttctttgttatttcaaagagtggcatctgcttcagcagggtcagtttttaatgtgtttgttttgtttcttttttctctgtctggtgttcttttctattttattataattttttaaatttgagggatgaggttttcatagtactgaatatcaaacaatgaatccgcatgaatgattcacctaatttccgtggttttagtcctctatacaggttttatatagcaaaagaaccatttaaagacttgggttacaaatgcattttattttacctctggcatgccttgggctgagaaagcattatatggtggcacaatatttgtaacattctcatagccatctgg

SEQ ID NO: 397085 - DNA, 595 bp, Homo sapiens
gaaacctcgcctccactaaaaaaaatacaaaattagcagggtgtggtggtgtgcacctgtgatcccagctactcaggaggctgaggcaagagaattgcttggacctgggaggcggaggttgcagtgagcccagattktgccactacactccagcctgggtgacaagagcgaaactccatctcaaaaaaacaaaacgaaacaaaaacaaacaaaaaaacacctactgcctcactgaattaaaggcgtgttcagcagtttctttgttatttcaaagagtggcatctgcttcagcagggtcagtttttaatgtgtttgttttgtttcttttttctctgtctggtgttcttttctattttattataattttttaaatttgagggatgaggttttcatagtactgaatatcaaacaatgaatccgcatgaatgattcacctaatttccgtggttttagtcctctatacaggttttatatagcaaaagaaccatttaaagacttgggttacaaatgcattttattttacctctggcatgccttgggctgagaaagcattatatggtggcacaatatttgtaacattctcatagccatctgg

SEQ ID NO: 397086 - DNA, 595 bp, Homo sapiens
gaaacctcgcctccactaaaaaaaatacaaaattagcagggtgtggtggtgtgcacctgtgatcccagctactcaggaggctgaggcaagagaattgcttggacctgggaggcggaggttgcagtgagcccagattttgccactacactccagcctgggtgacaagagcgaaactccrtctcaaaaaaacaaaacgaaacaaaaacaaacaaaaaaacacctactgcctcactgaattaaaggcgtgttcagcagtttctttgttatttcaaagagtggcatctgcttcagcagggtcagtttttaatgtgtttgttttgtttcttttttctctgtctggtgttcttttctattttattataattttttaaatttgagggatgaggttttcatagtactgaatatcaaacaatgaatccgcatgaatgattcacctaatttccgtggttttagtcctctatacaggttttatatagcaaaagaaccatttaaagacttgggttacaaatgcattttattttacctctggcatgccttgggctgagaaagcattatatggtggcacaatatttgtaacattctcatagccatctgg

SEQ ID NO: 397087 - DNA, 595 bp, Homo sapiens
gaaacctcgcctccactaaaaaaaatacaaaattagcagggtgtggtggtgtgcacctgtgatcccagctactcaggaggctgaggcaagagaattgcttggacctgggaggcggaggttgcagtgagcccagattttgccactacactccagcctgggtgacaagagcgaaactccatctcaaaaaaacaaaacgaaacaaaaacaaacaaaaaaacacctactgcctcactgaattaaaggcgtgttcagcagtttctttgttatttcaaagagtggcatctgcttcagcagggtcagtttttaatgtgtttgttttgtttcttttttctctgtctggtgttcttttctattttattataattttttaaatttgagggatgaggttttcatagtactgaatatcaaacaatgaatccgcatgaatgattcacctaatttccktggttttagtcctctatacaggttttatatagcaaaagaaccatttaaagacttgggttacaaatgcattttattttacctctggcatgccttgggctgagaaagcattatatggtggcacaatatttgtaacattctcatagccatctgg

SEQ ID NO: 397088 - DNA, 505 bp, Homo sapiens
gttctataattaaatagataaattacactgacaacaatgagaaagggccttatcattattattgtcttcctaataatagaaacttttataaatgcatgcaatcccaggtaaccaaaastttccttataaagtgtaacagcagagcttcaaaggtggcactttggcaatcctctttttttgactatgccttttcagcttcgtttgtgggctccttttctttcatctttatttaaataatatttccctatgttttatccccagcccattgcttgcctctgtactgcctccctgcgagacttcattaagtatcagaattttaccaatagctcatatgcttatgatgcttaccttttcagattcgtatatttaaatgttttgtggttatttcatcctggatgtccaaactcaacatgttaaaattcaaatttatcatctctcaccccgggcctgcttttggtctgcattacctacctctattaatagcttcagtcattagccaccgaca

SEQ ID NO: 397089 - DNA, 505 bp, Homo sapiens
gttctataattaaatagataaattacactgacaacaatgagaaagggccttatcattattattgtcttcctaataatagaaacttttataaatgcatgcaatcccaggtaaccaaaactttccttataaagtgtaacagcagagcttcaaaggtggcactttggcaatcctctttttttgactatgccttttcagcttcstttgtgggctccttttctttcatctttatttaaataatatttccctatgttttatccccagcccattgcttgcctctgtactgcctccctgcgagacttcattaagtatcagaattttaccaatagctcatatgcttatgatgcttaccttttcagattcgtatatttaaatgttttgtggttatttcatcctggatgtccaaactcaacatgttaaaattcaaatttatcatctctcaccccgggcctgcttttggtctgcattacctacctctattaatagcttcagtcattagccaccgaca

SEQ ID NO: 397090 - DNA, 591 bp, Homo sapiens
cttgcctctgtactgcctccctgcgagacttcattaagtatcagaattttaccaatagctcatatgcttatgatgcttaccttttcagattcgtatatttaaatgttttgtggttatttcatcctggatgtccaaactcaacatgttaaaattcaaatttatcatctctcaccccgggcctgcttttggtctgcattacctacctctattaatagcttcagtcattagccaccgacaccagacagtctcggagtcatcctgaactctatcttcccctccttccccaagtcaatcactaatcaagtcctgctaatacatttccttactattkctgaaatccatccgtcttcctcattcctactaacatcctaatttaaaactttattatcttttacctggactattgtcttaagacaacaactttaacccgttgcttagcctaggtgtaatccacagaggatcttgtctgtctaaaatgcccctctagccacatccttcccctgctcagatcttgtcattggctcccatgaactgaagttgaagtttaagctccttaggacagcatacacgcccttctatgatatgttccca

SEQ ID NO: 397091 - DNA, 591 bp, Homo sapiens
cttgcctctgtactgcctccctgcgagacttcattaagtatcagaattttaccaatagctcatatgcttatgatgcttaccttttcagattcgtatatttaaatgttttgtggttatttcatcctggatgtccaaactcaacatgttaaaattcaaatttatcatctctcaccccgggcctgcttttggtctgcattacctacctctattaatagcttcagtcattagccaccgacaccagacagtctcggagtcatcctgaactctatcttcccctccttccccaagtcaatcactaatcaagtcctgctaatacatttccttactatttctgaaatccatccstcttcctcattcctactaacatcctaatttaaaactttattatcttttacctggactattgtcttaagacaacaactttaacccgttgcttagcctaggtgtaatccacagaggatcttgtctgtctaaaatgcccctctagccacatccttcccctgctcagatcttgtcattggctcccatgaactgaagttgaagtttaagctccttaggacagcatacacgcccttctatgatatgttccca

SEQ ID NO: 397092 - DNA, 572 bp, Homo sapiens
atctctcaccccgggcctgcttttggtctgcattacctacctctattaatagcttcagtcattagccaccgacaccagacagtctcggagtcatcctgaactctatcttcccctccttccccaagtcaatcactaatcaagtcctgctaatacatttccttactatttctgaaatccatccgtcttcctcattcctactaacatcctaatttaaaactttattatcttttacctggactattgtcttaagacaacaactttaacccgttgcttagcctaggtgtaatccacagaggatcttgtctgtctaaaatgcccctctagccacatccttcccctgctcagatcttgtcattggctcccatgaactgaagttgaagtttaagctccttaggacagcatacacgcccttctatgatatgttcccagaacatatttactggtttatctcataccwtggcccactttgtattttacacttttgaaatacagaaagtcattacattctaccaataatactaagatagtatatgcctaaaagcctttggcaatattttgtcttttgttgagaa

SEQ ID NO: 397093 - DNA, 572 bp, Homo sapiens
atctctcaccccgggcctgcttttggtctgcattacctacctctattaatagcttcagtcattagccaccgacaccagacagtctcggagtcatcctgaactctatcttcccctccttccccaagtcaatcactaatcaagtcctgctaatacatttccttactatttctgaaatccatccgtcttcctcattcctactaacatcctaatttaaaactttattatcttttacctggactattgtcttaagacaacaactttaacccgttgcttagcctaggtgtaatccacagaggatcttgtctgtctaaaatgcccctctagccacatccttcccctgctcagatcttgtcattggctcccatgaactgaagttgaagtttaagctccttaggacagcatacacgcccttctatgatatgttcccagaacatatttactggtttatctcataccatggcccactttgtattttacacttttgaaatacagaaagtcattacattctmccaataatactaagatagtatatgcctaaaagcctttggcaatattttgtcttttgttgagaa

SEQ ID NO: 397094 - DNA, 398 bp, Homo sapiens
taatcagctggagttcttctccttgataagacaactcactaaaaacataaagagaaaaatacaagtttaaaataattaaccagaagaagacgactcaagagtttttaaattgctgataagattttaatttgctccaagttgaaaataattatattgcttgtgttttaaggcccataatgagcaattatatcacamatggtagtttcagcagtaaaatattatccgttaactgctggaaatcataaaagcatagcacaatgtgaagatggaatttgctaaaataaaccatctgctgaaaaccactattctgcaaatttaaaaataaagtttaaatgttattggtcttatttaataggtctgtcaaaaaaatgcgctatttgaaaagtagctgctacctt

SEQ ID NO: 397095 - DNA, 398 bp, Homo sapiens
taatcagctggagttcttctccttgataagacaactcactaaaaacataaagagaaaaatacaagtttaaaataattaaccagaagaagacgactcaagagtttttaaattgctgataagattttaatttgctccaagttgaaaataattatattgcttgtgttttaaggcccataatgagcaattatatcacaaatgrtagtttcagcagtaaaatattatccgttaactgctggaaatcataaaagcatagcacaatgtgaagatggaatttgctaaaataaaccatctgctgaaaaccactattctgcaaatttaaaaataaagtttaaatgttattggtcttatttaataggtctgtcaaaaaaatgcgctatttgaaaagtagctgctacctt

SEQ ID NO: 397096 - DNA, 591 bp, Homo sapiens
ttgcaacaagcagtttcttaaaggcaaaaaagggtccagaagtgggatgatgcaaagaggtttgtcacaaattctcattggcttatggaaataacatytattagtgattggctatacactgttacactattattgggtgtggattatagtgtctggtgtggctttattggttaatttatagctactgtggtaacagcggccgctagatgaacacacagctcaaagaggagcaggacagaactgctgtctcatttgaatatctctctgggcctgattatttcaaaggacttgcatttctcatatgaaagttattttcttttctcaaggtccataaatgagaataaatagacgtaaaatagatcttttcgaggatgaagtaaatggaatgaaaaacaaaacccaagctgaccagaaatcatagagggaagaaaaggttataaatatacggatttttcaaagtgattttaagctattaggaatcagttaaatgttgggggattttgtctgagaatgggctaaaggagaatgtcccttttgccttctgaagtttccctgaaaatcactaataggaggcagataaatagtagaaaa

SEQ ID NO: 397097 - DNA, 591 bp, Homo sapiens
ttgcaacaagcagtttcttaaaggcaaaaaagggtccagaagtgggatgatgcaaagaggtttgtcacaaattctcattggcttatggaaataacatttattagtgattggctatacactgttacactattattgggtgtggattatagtgtctggtgtggctttattggttaatttatagctactgtggtaacagcggccgctagatgaacacacagctcaaagaggagcaggacagaactgctgtctcatttgaatatctctctgggcctgattatttcaaaggacttgcatttctcatatgaaagttattttcttttctcaaggtccataaatgagaataaatagacgtaaaatagatcttttcgaggatgaagtaaatrgaatgaaaaacaaaacccaagctgaccagaaatcatagagggaagaaaaggttataaatatacggatttttcaaagtgattttaagctattaggaatcagttaaatgttgggggattttgtctgagaatgggctaaaggagaatgtcccttttgccttctgaagtttccctgaaaatcactaataggaggcagataaatagtagaaaa

SEQ ID NO: 397098 - DNA, 591 bp, Homo sapiens
ttgcaacaagcagtttcttaaaggcaaaaaagggtccagaagtgggatgatgcaaagaggtttgtcacaaattctcattggcttatggaaataacatttattagtgattggctatacactgttacactattattgggtgtggattatagtgtctggtgtggctttattggttaatttatagctactgtggtaacagcggccgctagatgaacacacagctcaaagaggagcaggacagaactgctgtctcatttgaatatctctctgggcctgattatttcaaaggacttgcatttctcatatgaaagttattttcttttctcaaggtccataaatgagaataaatagacgtaaaatagatcttttcgaggatgaagtaaatggaatgaaaaacaaaacccaagctgaccagaaatcatagagggaagaaaaggttataaatatayggatttttcaaagtgattttaagctattaggaatcagttaaatgttgggggattttgtctgagaatgggctaaaggagaatgtcccttttgccttctgaagtttccctgaaaatcactaataggaggcagataaatagtagaaaa

SEQ ID NO: 397099 - DNA, 513 bp, Homo sapiens
aattcaaaggtaaaattttaaatatttttaacaggtacattattaatattagataatatttataattgtgaaaatattcaatgctaaaataagatgcaatgtctaaacatcagtattaaaactagtataaatatttgcttgtttatacaaggaaaattcaagctcgacctaaaattatataggaaataaaakaaaaattttaagggagctctttaataacataaacatatatatatatacacacacacatataacatgtatatatgttatatgggatatagatttaacatgttatatctatatttgtatctataactacagctgtatgtatctacatttctatatatttactcagtgacataaatatagacaggaataaatataaagacacatgattcttggataaaaaggatttagtatcataaagacaaattctttccaaattcacttatgaattcacaacaatatacagtttcattagtataatttaaaatttttaaataaattccaaga

SEQ ID NO: 397100 - DNA, 513 bp, Homo sapiens
aattcaaaggtaaaattttaaatatttttaacaggtacattattaatattagataatatttataattgtgaaaatattcaatgctaaaataagatgcaatgtctaaacatcagtattaaaactagtataaatatttgcttgtttatacaaggaaaattcaagctcgacctaaaattatataggaaataaaataaaaattttaagggagctctttaataacataaacatatatatatatacacacacacatataacatgtatatatgttatatgggatatagatttaacatgttatatctatatttgtatctataactacagctgtatgtatctacatttctatatatttactcagtgayataaatatagacaggaataaatataaagacacatgattcttggataaaaaggatttagtatcataaagacaaattctttccaaattcacttatgaattcacaacaatatacagtttcattagtataatttaaaatttttaaataaattccaaga

SEQ ID NO: 397101 - DNA, 513 bp, Homo sapiens
aattcaaaggtaaaattttaaatatttttaacaggtacattattaatattagataatatttataattgtgaaaatattcaatgctaaaataagatgcaatgtctaaacatcagtattaaaactagtataaatatttgcttgtttatacaaggaaaattcaagctcgacctaaaattatataggaaataaaataaaaattttaagggagctctttaataacataaacatatatatatatacacacacacatataacatgtatatatgttatatgggatatagatttaacatgttatatctatatttgtatctataactacagctgtatgtatctacatttctatatatttactcagtgacataaatatagacwggaataaatataaagacacatgattcttggataaaaaggatttagtatcataaagacaaattctttccaaattcacttatgaattcacaacaatatacagtttcattagtataatttaaaatttttaaataaattccaaga

SEQ ID NO: 397102 - DNA, 513 bp, Homo sapiens
aattcaaaggtaaaattttaaatatttttaacaggtacattattaatattagataatatttataattgtgaaaatattcaatgctaaaataagatgcaatgtctaaacatcagtattaaaactagtataaatatttgcttgtttatacaaggaaaattcaagctcgacctaaaattatataggaaataaaataaaaattttaagggagctctttaataacataaacatatatatatatacacacacacatataacatgtatatatgttatatgggatatagatttaacatgttatatctatatttgtatctataactacagctgtatgtatctacatttctatatatttactcagtgacataaatatagacaggaataaatataaagacacatgattcttggataaaaaggatttagtatcataaagacaaattmtttccaaattcacttatgaattcacaacaatatacagtttcattagtataatttaaaatttttaaataaattccaaga

SEQ ID NO: 397103 - DNA, 561 bp, Homo sapiens
tgcttaatagggtttctgttagcattttctttatttattttcccataaaatatcacaggccttcttcatatggaattatgggtgatttccttcaatctgcatcatatcaagttgaggttcatgttgatgaaaagtaaaacatacattgaaaatatcagtagtgatgttttcccctcctttttagcacctatgyttgtgatacaagcacattttaatacaattgtagtctcatgctttgatcattcctaagatgaaaattacatttttagataaaatatctgagttttatgaggccttttgtatatgatgtgatagattattggaagaccatacttttttctagttttccatgcaattctatctttgtttcatctttactcctacaagagtaattttccagaatagatatcttgtcattcttcctgttgttatcaataaataagtgaaacgaaaagctagattacataatttatctagaacaagaaagtagaattgaatcaatattcgttaatgagactgagcagtcaattacacagataggcattttacattttgaagatc

SEQ ID NO: 397104 - DNA, 561 bp, Homo sapiens
tgcttaatagggtttctgttagcattttctttatttattttcccataaaatatcacaggccttcttcatatggaattatgggtgatttccttcaatctgcatcatatcaagttgaggttcatgttgatgaaaagtaaaacatacattgaaaatatcagtagtgatgttttcccctcctttttagcacctatgcttgtgatacaagcacattttaatacaaytgtagtctcatgctttgatcattcctaagatgaaaattacatttttagataaaatatctgagttttatgaggccttttgtatatgatgtgatagattattggaagaccatacttttttctagttttccatgcaattctatctttgtttcatctttactcctacaagagtaattttccagaatagatatcttgtcattcttcctgttgttatcaataaataagtgaaacgaaaagctagattacataatttatctagaacaagaaagtagaattgaatcaatattcgttaatgagactgagcagtcaattacacagataggcattttacattttgaagatc

SEQ ID NO: 397105 - DNA, 496 bp, Homo sapiens
atgggtgatttccttcaatctgcatcatatcaagttgaggttcatgttgatgaaaagtaaaacatacattgaaaatatcagtagtgatgttttcccctcctttttagcacctatgcttgtgatacaagcacattttaatacaattgtagtctcatgctttgatcattcctaagatgaaaatwacatttttagataaaatatctgagttttatgaggccttttgtatatgatgtgatagattattggaagaccatacttttttctagttttccatgcaattctatctttgtttcatctttactcctacaagagtaattttccagaatagatatcttgtcattcttcctgttgttatcaataaataagtgaaacgaaaagctagattacataatttatctagaacaagaaagtagaattgaatcaatattcgttaatgagactgagcagtcaattacacagataggcattttacattttgaagatcatatggacccat

SEQ ID NO: 397106 - DNA, 496 bp, Homo sapiens
atgggtgatttccttcaatctgcatcatatcaagttgaggttcatgttgatgaaaagtaaaacatacattgaaaatatcagtagtgatgttttcccctcctttttagcacctatgcttgtgatacaagcacattttaatacaattgtagtctcatgctttgatcattcctaagatgaaaattacatttttagataaaatatctgagttttatgaggccttttgtatatgatgtgatagattattggaagaccatacttttttctagttttccatgcaattctatctttgtttcatctttactcctacaagagtaattttccagaatagatatcttgtcattcttcctgttgttatcaataaataagtgaaacgaaaagctagattacataatttatctagaacaagaaagtagaattgaatcaatattcgttaatkagactgagcagtcaattacacagataggcattttacattttgaagatcatatggacccat

SEQ ID NO: 397107 - DNA, 496 bp, Homo sapiens
atgggtgatttccttcaatctgcatcatatcaagttgaggttcatgttgatgaaaagtaaaacatacattgaaaatatcagtagtgatgttttcccctcctttttagcacctatgcttgtgatacaagcacattttaatacaattgtagtctcatgctttgatcattcctaagatgaaaattacatttttagataaaatatctgagttttatgaggccttttgtatatgatgtgatagattattggaagaccatacttttttctagttttccatgcaattctatctttgtttcatctttactcctacaagagtaattttccagaatagatatcttgtcattcttcctgttgttatcaataaataagtgaaacgaaaagctagattacataatttatctagaacaagaaagtagaattgaatcaatattcgttaatgagaytgagcagtcaattacacagataggcattttacattttgaagatcatatggacccat

SEQ ID NO: 397108 - DNA, 604 bp, Homo sapiens
gcacatcaccatgcccaccttttttttttaacttttgatagagactgggtcttgctatgttgcccagattgctcttgaactcctgggctcaaggaatcctctcatttcagcctcttcaactgctggtattacaagcatgagccaccatatgggctggaagctgatttttaaaatactgagatcatatagatgacagcacctgaaaaatagacaacaccaagctttatgttaaaaggtgtgagggtatcaatatttttgtggctattggggaggaaaatattagtaaaaccagtgagttaaagctgttgctttaaactttggctttaattcaacaaatgttctctgtggtgatagtacgtatgtaaccatgctatgcccattcacagatgcagtagagggaagaatttctcaaagacaactgytctaagattgaaattaaactgtactgggtttgaaaagagaaagtccaggaattaccaaatatttcagatatcagataaaagagaatgccaggtatgtgatgataatcagcaatggttgttcacacaatatatcaaatcagtatttgaattagcttttgaattacgaggacaaatggatcaag

SEQ ID NO: 397109 - DNA, 604 bp, Homo sapiens
gcacatcaccatgcccaccttttttttttaacttttgatagagactgggtcttgctatgttgcccagattgctcttgaactcctgggctcaaggaatcctctcatttcagcctcttcaactgctggtattacaagcatgagccaccatatgggctggaagctgatttttaaaatactgagatcatatagatgacagcacctgaaaaatagacaacaccaagctttatgttaaaaggtgtgagggtatcaatatttttgtggctattggggaggaaaatattagtaaaaccagtgagttaaagctgttgctttaaactttggctttaattcaacaaatgttctctgtggtgatagtacgtatgtaaccatgctatgcccattcacagatgcagtagagggaagaatttctcaaagacaactgttctaagattgaaattaaactgtactgggtttgaaaagagaaagtccaggaattaccaaatatttyagatatcagataaaagagaatgccaggtatgtgatgataatcagcaatggttgttcacacaatatatcaaatcagtatttgaattagcttttgaattacgaggacaaatggatcaag

SEQ ID NO: 397110 - DNA, 604 bp, Homo sapiens
gcacatcaccatgcccaccttttttttttaacttttgatagagactgggtcttgctatgttgcccagattgctcttgaactcctgggctcaaggaatcctctcatttcagcctcttcaactgctggtattacaagcatgagccaccatatgggctggaagctgatttttaaaatactgagatcatatagatgacagcacctgaaaaatagacaacaccaagctttatgttaaaaggtgtgagggtatcaatatttttgtggctattggggaggaaaatattagtaaaaccagtgagttaaagctgttgctttaaactttggctttaattcaacaaatgttctctgtggtgatagtacgtatgtaaccatgctatgcccattcacagatgcagtagagggaagaatttctcaaagacaactgttctaagattgaaattaaactgtactgggtttgaaaagagaaagtccaggaattaccaaatatttcagatatcagataaaagagaatgccaggtatgygatgataatcagcaatggttgttcacacaatatatcaaatcagtatttgaattagcttttgaattacgaggacaaatggatcaag

SEQ ID NO: 397111 - DNA, 604 bp, Homo sapiens
gcacatcaccatgcccaccttttttttttaacttttgatagagactgggtcttgctatgttgcccagattgctcttgaactcctgggctcaaggaatcctctcatttcagcctcttcaactgctggtattacaagcatgagccaccatatgggctggaagctgatttttaaaatactgagatcatatagatgacagcacctgaaaaatagacaacaccaagctttatgttaaaaggtgtgagggtatcaatatttttgtggctattggggaggaaaatattagtaaaaccagtgagttaaagctgttgctttaaactttggctttaattcaacaaatgttctctgtggtgatagtacgtatgtaaccatgctatgcccattcacagatgcagtagagggaagaatttctcaaagacaactgttctaagattgaaattaaactgtactgggtttgaaaagagaaagtccaggaattaccaaatatttcagatatcagataaaagagaatgccaggtatgtgatgataatcagcaayggttgttcacacaatatatcaaatcagtatttgaattagcttttgaattacgaggacaaatggatcaag

SEQ ID NO: 397112 - DNA, 532 bp, Homo sapiens
ggtatgtgatgataatcagcaatggttgttcacacaatatatcaaatcagtatttgaattagcttttgaattacgaggacaaatggatcaagtcttgactcattagtaggtaaatcttattaggctgaaatgtgttttcgcctgtttttccacaaggagattgcagatttgcaaacctcagctgctctcattttatgctctcaccaatccaaaagctgaagttcatcaatcagtgtgtctaartgttcactagttatataccattttgtagtttaggctatctttccaacttcctaaatcatcaccttcatttgaccttgtttttttcaactatcacttctttactgaccatataaagaatacaagtaagttcttattttcttattgttcattttagtctaatttcatcaaaatatcatagttctttaatttcattttaatttcaaagattaaaagaaacctacatagaaataagtttaagattgtatttgcgttattttggcatcaatttgctatcctccctcatacacat

SEQ ID NO: 397113 - DNA, 642 bp, Homo sapiens
tattaggctgaaatgtgttttcgcctgtttttccacaaggagattgcagatttgcaaacctcagctgctctcattttatgctctcaccaatccaaaagctgaagttcatcaatcagtgtgtctaaatgttcactagttatataccattttgtagtttaggctatctttccaacttcctaaatcatcaccttcatttgaccttgtttttttcmactatcacttctttactgaccatataaagaatacaagtaagttcttattttcttattgttcattttagtctaatttcatcaaaatatcatagttctttaatttcattttaatttcaaagattaaaagaaacctacatagaaataagtttaagattgtatttgcgttattttggcatcaatttgctatcctccctcatacacatagagatcatttccatgtacgtgatttcaaacatccaagtgcagtattaaaagcagttgtcaattatggttctcattttcatgatacaattactatataaaattcctcttgctgctgtaacaaattatcacgaaatacatatcttacaataaagtgactgttaagcctacagttctggagttcagaagccttaaatgagactcacagggctaacatcaagttttgggc

SEQ ID NO: 397114 - DNA, 642 bp, Homo sapiens
tattaggctgaaatgtgttttcgcctgtttttccacaaggagattgcagatttgcaaacctcagctgctctcattttatgctctcaccaatccaaaagctgaagttcatcaatcagtgtgtctaaatgttcactagttatataccattttgtagtttaggctatctttccaacttcctaaatcatcaccttcatttgaccttgtttttttcaactatcacttctttactgaccatataaagaatacaagtaagttcttattttcttattgttcattttagtctaatttcatcaaaatatcatarttctttaatttcattttaatttcaaagattaaaagaaacctacatagaaataagtttaagattgtatttgcgttattttggcatcaatttgctatcctccctcatacacatagagatcatttccatgtacgtgatttcaaacatccaagtgcagtattaaaagcagttgtcaattatggttctcattttcatgatacaattactatataaaattcctcttgctgctgtaacaaattatcacgaaatacatatcttacaataaagtgactgttaagcctacagttctggagttcagaagccttaaatgagactcacagggctaacatcaagttttgggc

SEQ ID NO: 397115 - DNA, 642 bp, Homo sapiens
tattaggctgaaatgtgttttcgcctgtttttccacaaggagattgcagatttgcaaacctcagctgctctcattttatgctctcaccaatccaaaagctgaagttcatcaatcagtgtgtctaaatgttcactagttatataccattttgtagtttaggctatctttccaacttcctaaatcatcaccttcatttgaccttgtttttttcaactatcacttctttactgaccatataaagaatacaagtaagttcttattttcttattgttcattttagtctaatttcatcaaaatatcatagttctttaatttcattttaatttcaaagattaaaagaaacctacatagaaataagtttaagattgtatttgcgttattttggcatcaatttgctatcctccctcatacacatagagatcatttccatgtacgtgatttcaaacatccaagtgcagtattaaaagcagttgtmaattatggttctcattttcatgatacaattactatataaaattcctcttgctgctgtaacaaattatcacgaaatacatatcttacaataaagtgactgttaagcctacagttctggagttcagaagccttaaatgagactcacagggctaacatcaagttttgggc

SEQ ID NO: 397116 - DNA, 642 bp, Homo sapiens
tattaggctgaaatgtgttttcgcctgtttttccacaaggagattgcagatttgcaaacctcagctgctctcattttatgctctcaccaatccaaaagctgaagttcatcaatcagtgtgtctaaatgttcactagttatataccattttgtagtttaggctatctttccaacttcctaaatcatcaccttcatttgaccttgtttttttcaactatcacttctttactgaccatataaagaatacaagtaagttcttattttcttattgttcattttagtctaatttcatcaaaatatcatagttctttaatttcattttaatttcaaagattaaaagaaacctacatagaaataagtttaagattgtatttgcgttattttggcatcaatttgctatcctccctcatacacatagagatcatttccatgtacgtgatttcaaacatccaagtgcagtattaaaagcagttgtcaattatggttctcattttcatgatacaattactatataaamttcctcttgctgctgtaacaaattatcacgaaatacatatcttacaataaagtgactgttaagcctacagttctggagttcagaagccttaaatgagactcacagggctaacatcaagttttgggc

SEQ ID NO: 397117 - DNA, 515 bp, Homo sapiens
tacatgctcctgaagaaagacctgcaaatttttctcagaatttacacacaatttcagagacaatacattcacagaaagatttgacacacttcagaatctctaactgggctgactggtgaaaggatttcccagtgcaaaaccagtctgtaaagacaaggagaagtggttatttttttcaaatcctagaataacaacacaaaattaaaaggcacacaaggaaacagggaaacatggcctaataaaaagaagaaaataagtttccaaatatcaacccttcaaaaatggaggtatataaattatctggcaaagtgacatatcctgacacattctccaggatagatcaaatgttaggtcacaaagcgagtcttaacaaaattaagacaaaggaaatcaagaacctgttttgaccaaaagtaggatgaagcaaaaattcaatagtagaaggaaaacrgaaacatttacaaatatatggaaattaaacaacatactattgaacaaccaatgagtcaaagaag

SEQ ID NO: 397118 - DNA, 406 bp, Homo sapiens
aaacttagccggtgggggaaagacttgtacactgaatactgcaaaatattgctgaaagaaattaaggaagacacaaataaatggaaagcyatctcatttttgtgaattcaaagaatatttttaaattctaatactagccaaagaaatttacagatttgatgtaatcccttggaattgtataaattccaatgataattttagagaaatagaaaggacaattctaaaatccatatggaaccacaacggaccctgaatatccaaaacaatcctaagaaagagaaacagttagaggcctcacattttctgactttgaaatatactacaaagctacagcaatcgcaatagtgtgatattaatgtaaaactaatcatatagatgaatggaacagaatggattattggaacag

SEQ ID NO: 397119 - DNA, 406 bp, Homo sapiens
aaacttagccggtgggggaaagacttgtacactgaatactgcaaaatattgctgaaagaaattaaggaagacacaaataaatggaaagccatctcatttttgtgaattcaaagaatatttttaaattctaatactagccaaagmaatttacagatttgatgtaatcccttggaattgtataaattccaatgataattttagagaaatagaaaggacaattctaaaatccatatggaaccacaacggaccctgaatatccaaaacaatcctaagaaagagaaacagttagaggcctcacattttctgactttgaaatatactacaaagctacagcaatcgcaatagtgtgatattaatgtaaaactaatcatatagatgaatggaacagaatggattattggaacag

SEQ ID NO: 397120 - DNA, 406 bp, Homo sapiens
aaacttagccggtgggggaaagacttgtacactgaatactgcaaaatattgctgaaagaaattaaggaagacacaaataaatggaaagccatctcatttttgtgaattcaaagaatatttttaaattctaatactagccaaagaaatttacagatttgatgtaatcccttggaattgtataaattccaatgataattttagagaaatagaaaggacaattctaaaatccatatggaaccacaayggaccctgaatatccaaaacaatcctaagaaagagaaacagttagaggcctcacattttctgactttgaaatatactacaaagctacagcaatcgcaatagtgtgatattaatgtaaaactaatcatatagatgaatggaacagaatggattattggaacag

SEQ ID NO: 397121 - DNA, 548 bp, Homo sapiens
aaccttatgtactgtcagtaggaatgtaaaatggtagagccactatggaaaacagtatggagggtcctcaaaacattaaaaaatagacctaccatatgatgcagcaatcccacttgtgggcatttttccaaaataattgaataattccaaaataattgaaaacaagatcttgaagtgatatttgcattcccatattcattacagaattattcacaatagccaaaaagtagaaacaawctaaaagtccatcatcaaatgaacagatgaagaaaatatggtatatatgtgtgtgtgtgtatatatatatatatatatatatgtatggtatatatatgtatggtatatatatgtatggtgtatatatatatgtatgataaatatagtatggcatatatatgtatggtgtatatatatggtatatttatgtgtatatatacatacacacacagaatggaatattagtaagccttcaaaaggaaaattctgtcttatttcaacatgtatcaatcttaaggatattgtgctaagtgaaataagccagacacaaa

SEQ ID NO: 397122 - DNA, 548 bp, Homo sapiens
aaccttatgtactgtcagtaggaatgtaaaatggtagagccactatggaaaacagtatggagggtcctcaaaacattaaaaaatagacctaccatatgatgcagcaatcccacttgtgggcatttttccaaaataattgaataattccaaaataattgaaaacaagatcttgaagtgatatttgcattcccatattcattacagaattattcacaatagccaaaaagtagaaacaatctaaaagtccatcatcaaatgaacagatgaagaaaatatggtatatatgtgtgtgtgtgtatatatatatatatwtatatatgtatggtatatatatgtatggtatatatatgtatggtgtatatatatatgtatgataaatatagtatggcatatatatgtatggtgtatatatatggtatatttatgtgtatatatacatacacacacagaatggaatattagtaagccttcaaaaggaaaattctgtcttatttcaacatgtatcaatcttaaggatattgtgctaagtgaaataagccagacacaaa

SEQ ID NO: 397123 - DNA, 441 bp, Homo sapiens
gtgtgtgtgtatatatatatatatatatatatgtatggtatatatatgtatggtatatatatgtatggtgtatatatatatgtatgataaatatagtatggcatatatatgtatggtgtatatatatggtatatttatgtgtatatatayatacacacacagaatggaatattagtaagccttcaaaaggaaaattctgtcttatttcaacatgtatcaatcttaaggatattgtgctaagtgaaataagccagacacaaacacaaatatatcgtgattccatttatatgatgtattgaaagtagccaaacacatggaaacacaagataaaatggtagttgtcagggcctggaggaaacaggaaatctggagttgctgttcaccaggtgtagagtttcagtcaagcaagataaaaacattctagatttctgctgtacaaca

SEQ ID NO: 397124 - DNA, 535 bp, Homo sapiens
agtaaaataatccaccttgtattttaagaggagcattctaccttctctgtggaatagagaggtggaagggaaagcttgaagcagagagagcagtgaagagtgtrctgtaatattcttatgtgagaaatagtggagggaatgagaggtggtcagccttaaactgccatttgctctctgtatcagggctcagggactttcagactctccagggattccttacagtttttacattcgtttctcagttgcaaacataatctcttcactctatgagaactctagatctgaatccttgttatgagtcaggagtcctctctagtttactctcttgtcagtaactagacttgaaatgttttgatattaattgatatagtaataagattggttagagaaatagcaaagagagagcatccccatcctatgaccatatcagcaccagaagagaaaaacacatctacacagtttttcccttggcataggtcctggtattctgttagggaacaggttatgaaggaaatacaaagggtctttgtactta

SEQ ID NO: 397125 - DNA, 577 bp, Homo sapiens
actttcagactctccagggattccttacagtttttacmttcgtttctcagttgcaaacataatctcttcactctatgagaactctagatctgaatccttgttatgagtcaggagtcctctctagtttactctcttgtcagtaactagacttgaaatgttttgatattaattgatatagtaataagattggttagagaaatagcaaagagagagcatccccatcctatgaccatatcagcaccagaagagaaaaacacatctacacagtttttcccttggcataggtcctggtattctgttagggaacaggttatgaaggaaatacaaagggtctttgtacttactttcagaatgtattttctttaacatgaaaagaatccaaggcctttttgcttctaattgctttttgtgtatctactaccatcccttgctaaattattgataggtttcctcaaatctcggcatgatgtcctacattctaaattttcaatagctgaaaatttcaccttttcagtgccttcaagtttatctcagtaaaaagttgagaaagactgtaatagagttatttaatcagatt

SEQ ID NO: 397126 - DNA, 577 bp, Homo sapiens
actttcagactctccagggattccttacagtttttacattygtttctcagttgcaaacataatctcttcactctatgagaactctagatctgaatccttgttatgagtcaggagtcctctctagtttactctcttgtcagtaactagacttgaaatgttttgatattaattgatatagtaataagattggttagagaaatagcaaagagagagcatccccatcctatgaccatatcagcaccagaagagaaaaacacatctacacagtttttcccttggcataggtcctggtattctgttagggaacaggttatgaaggaaatacaaagggtctttgtacttactttcagaatgtattttctttaacatgaaaagaatccaaggcctttttgcttctaattgctttttgtgtatctactaccatcccttgctaaattattgataggtttcctcaaatctcggcatgatgtcctacattctaaattttcaatagctgaaaatttcaccttttcagtgccttcaagtttatctcagtaaaaagttgagaaagactgtaatagagttatttaatcagatt

SEQ ID NO: 397127 - DNA, 546 bp, Homo sapiens
aggcctttttgcttctaattgctttttgtgtatctactaccatcccttgctaaattattgataggtttcctcaaatctcggcatgatgtcctacattctaaattttcaatagctgaaaatttcaccttttcagtgccttcaagtttatctcagtaaaaagttgagaaagactgtaatagagttatttaatcagatttttttcatctaccataatttttgaataaggaaaaacagcaatactttttctccttacttggcaastaattttcatagagaggaaaaaaacaatcaaaacaggtacaaaatgtaacaaaaccaaaggaccatgtgaggtgaaatttaaaatgagaaaaatgtccacagtactttgggcaatgcaactcctgggaaatagtaactcagcacctgagagctaaataattctacaggactaaatatatattctggtactcaaggggaaaatgacatcatatagagtttaggtctattaaaacatatttgtagatgtgtaggtatgaaaaatgcttttagagatgggaagagaaa

SEQ ID NO: 397128 - DNA, 384 bp, Homo sapiens
tacaaaatgtaacaaaaccaaaggaccatgtgaggtgaaatttaaaatgagaaaaatgtccacagtactttgggcaatgcaactcctgggaaatagtaactcagcacctgagagctaaataattctacaggactaaatatatattctggtactcaaggggaaaatgacatcatatagagtttaggtctattaaaacatatttgtagatgtgtaggtatgaaaaatgcttttagagatgggaagagaaaaaaactcatttgtttaacaagttctgatgggtgcttttcactaaaagagaaacatcatawgtttataacactcaggatgtaaattgcggtacatttcaaattacatgagaaactaaagaaaatatctgtttcgggt

SEQ ID NO: 397129 - DNA, 464 bp, Homo sapiens
tatgaaaggggaaactaagatatagcttacagggttctctattgtgataactaaaacatacttagcctcaagtaaaactgacatcttgctaactgttggtggtgaaggagaaagaagacaacactgaaccagactggggaaagatgaattcaaattagttagagatttgtcacccaaagcaaaacaaattcaagcttgaactgagttgacattggtagttattatgractgcaaatccctcaaattcatatgatgaaatcctaactctcaatgtattggtattaggaggtaaacctttgggaggtaattaggtcatgaagatgaaaccctcaccaaaggaaagtagtgcccttctagaaagagatacaagagagatttttctctcctccatgtgaggataaaataagacagccatctgtaaaccaggaagacagccttcaccaagaacccaaccatgctgactc

SEQ ID NO: 397130 - DNA, 473 bp, Homo sapiens
aaaggggaaactaagatatagcttacagggttctctattgtgataactaaaacatacttagcctcaagtaaaactgacatcttgctaactgttggtggtgaaggagaaagaagacaacactgaaccagactggggaaagatgaattcaaattagttagagatttgtcacccaaagcaaaacaaattcaagcttgaactgagttgacattggtagttattatggactgcaaatccctcaaattcatatgatgaaatcctaactctcaatgtattggtattaggaggtaaacctttgggaggtaattaggtcatgaagatgaaaccctcaycaaaggaaagtagtgcccttctagaaagagatacaagagagatttttctctcctccatgtgaggataaaataagacagccatctgtaaaccaggaagacagccttcaccaagaacccaaccatgctgactccctgatttcagat

SEQ ID NO: 397131 - DNA, 286 bp, Homo sapiens
tttgggacagtaatgaagatacagcaaatgaattgttttaatatataatcaaggcaaagttatcctcagaattataggaaaaaatccactaaatttggyttatgagaaatgcatggttcattgtataccttgatactgggcttaaagcagcaatcctaattccagatctaccttcaagtctgggtcagtgttctcaaatgctgccagtttcatgtcaggaccagcttaatattgaaggtaactgagcattgctaatgtctgactggagctgaaagaggccaaaagc

SEQ ID NO: 397132 - DNA, 471 bp, Homo sapiens
catcctgccaaatccagggagcatacaaccccggccacacctctcccctgcagctggcatgatggcagcagccactgccatcacaatcacaacctattgtagcctcaaactcctgggcccaagtgatctttttacctcagtctccccaatggctggggccacaggcatgtgccataatgcccatctaattgtttttttatttttgtagagaaggtggtctggctatattgcccaggttaatctctaattcctggatttaagcastcttcctgcctcatcctcctacatggctgggattacaggcatgagcgactgtgcccagctcctgataaatcctttcttaatcaaagtcttcatcagcagccttacttaccacaatcttcccagatgatctcaagtatccaaggaaactaaaagtagctactgctgacaaaactgttgggttccctgatattgtgcaagaataaaatg

SEQ ID NO: 397133 - DNA, 575 bp, Homo sapiens
aaagtaagaaacactactcgtgttctgtagctaattgataattgttaaaataaacttaacaattgataacaaattatagaaaatgattattttaatgttctttatacttgtaatctttgtaaataatatgagttatcacctctttctgtagctaattgtatagggagcacacccagttagtggcatatttcttaacacatttctgatatcaagaataacaaatacaatgcagtggggagtggagaaaagaaattaagtgtggctacatctgcaagtaacaattgcagccacattttrtcaagggttaaacaatcgtcaatgagctatacacattgtttgtcaccagaataactgaatcaagaggttccaactcattgtttcattcccatatacctgaacatctgggacatgaagaaatagtgtgtatgtgttaataggcaaagctgtagtaatgacttctacatattggaagcagttatctattttcctgttactaatttttacacaaaaatacctcagatgaatattgacagaaactcagaagtatggcataaactaatacgaaggtaacgtag

SEQ ID NO: 397134 - DNA, 531 bp, Homo sapiens
aactcattgtttcattcccatatacctgaacatctgggacatgaagaaatagtgtgtatgtgttaataggcaaagctgtagtaatgacttctacatattggaagcagttatctattttcctgttactaatttttacacaaaaatacctcagatgaatattgacagaaactcagaagtatggcataaactaatacgaaggtaacgtagtaatggcagaaagttacagcttaaaagtttttacagtgggaagactattgtaatagtgagagccatgtataagtttgttttgaaatgataatgtacagctaaagagtataatgctcaaatttttgtatatgaagttttcgtaattcaacaagtagggttaagagacaataagaattacacagaatgttggattttatttcacgtctgttcctcttgtcagacattgccatctttcccmtgtttcgtcaggtcttcagtaagttaacaacattcactctgtgaaaagtaccacatgatttattgtataaatataattggaaatac

SEQ ID NO: 397135 - DNA, 604 bp, Homo sapiens
gttaataggcaaagctgtagtaatgacttctacatattggaagcagttatctattttcctgttactaatttttacacaaaaatacctcagatgaatattgacagaaactcagaagtatggcataaactaatacgaaggtaacgtagtaatggcagaaagttacagcttaaaagtttttacagtgggaagactattgtaatagtgagagccatgtataagtttgttttgaaatgataatgtacagctaaagagtataatgctcaaatttttgtatatgaagttttcgtaattcaacaagtagggttaagagacaataagaattacacagaatgttggattttatttcacgtctgttcctcttgtcagacattgccatctttcccctgtttcgtcaggtcttcagtaagttaacaacattcactctgtgaaaagtaccacatgatttattgtataaatataattggaaatacactgtggttcctcatatcctcaagcttataattcagtttggagactacactatataaatgtagaaatgccataattatgcttataaattgattttttaaaacatgmaaattaatttggtagaaactgaatacat

SEQ ID NO: 397136 - DNA, 556 bp, Homo sapiens
ttaatttattttcctatgcttactttggatttaatttgcttttgttctacttttctaaggtgattaattttttttaaatttaataartttttgggaaacaggtggtgtttggctacatgaataaattctttatttgcgatttctgagattttggtgaaccgatcacccaagcagcgtacactgtacccaatatctatgtagtgttttatccctcaacctcctcccaccctttcccccaaaatccccaaagtctattatatcattcttatgcctttgcatcatcatagcttagctcccacttatgagtaagaacatatgatgtttggttttccattcctgagttgcttcacttagaataatggtatccaattccaaggttgctcaaatgtcattattttgttcctttgtatggctgagtagtatttcattttatatatatatatatatattatatatatatatatattttatatatatacacacatatatctatatcacattttctttatccactgttgattgatggcatttgggctggttccatatgtttgcaatt

SEQ ID NO: 397137 - DNA, 547 bp, Homo sapiens
atgcctttgcatcatcatagcttagctcccacttatgagtragaacatatgatgtttggttttccattcctgagttgcttcacttagaataatggtatccaattccaaggttgctcaaatgtcattattttgttcctttgtatggctgagtagtatttcattttatatatatatatatatattatatatatatatatattttatatatatacacacatatatctatatcacattttctttatccactgttgattgatggcatttgggctggttccatatgtttgcaattgtgaattgtgctgctataaacatgtgtgtacaagtatcttttttgaataatgacttatttacctatgggtagttacccaggagtaggattgctgaatcaaatgatagatctactttcaattctttaaggaatctccacacagtttcccacagtggttgtactagtttacatccccactaacagtgtaaaagtgttcccttttcatcagatccatgccaatatctatttttttgattttttgataacgacaattcttgc

SEQ ID NO: 397138 - DNA, 547 bp, Homo sapiens
atgcctttgcatcatcatagcttagctcccacttatgagtaagaacatatgatgtttggttttccattcctgagttgcttcacttagaataayggtatccaattccaaggttgctcaaatgtcattattttgttcctttgtatggctgagtagtatttcattttatatatatatatatatattatatatatatatatattttatatatatacacacatatatctatatcacattttctttatccactgttgattgatggcatttgggctggttccatatgtttgcaattgtgaattgtgctgctataaacatgtgtgtacaagtatcttttttgaataatgacttatttacctatgggtagttacccaggagtaggattgctgaatcaaatgatagatctactttcaattctttaaggaatctccacacagtttcccacagtggttgtactagtttacatccccactaacagtgtaaaagtgttcccttttcatcagatccatgccaatatctatttttttgattttttgataacgacaattcttgc

SEQ ID NO: 397139 - DNA, 504 bp, Homo sapiens
catgtggcttgccaattatccyggcaaccatttgttgaatagggttcctttccctattttatgtttttgtttgctttgtcaaagatcagttgactgtaagtatttgggtttatttctgggttctctgttctgttccattggtctatatgcctgtttttataccagtaccatgccattttggtgactatggcctgatagtatagtttgaaattaggtaatgtaatgtctccagatttgttctttttccttagtcttgctttggccctgtgggctttttttggttccatatgaattttaggattgttttttctaattctgtgaagaatgatggtggtattttgatgggaattgcattaaatttgtggattgcttttggcagtatggtcattttcacaatattgattctacccatccatgagcgtggtatgtatttccatttgtttgtgttgtctatgatttctgtcagcagtgttttgcagttttccttatagaggtctatcacct

SEQ ID NO: 397140 - DNA, 504 bp, Homo sapiens
catgtggcttgccaattatcccggcaaccatttgttgaatagggttcctttccctattttatgtttttgtttgctttgtcaaagatcagttgactgtaagtatttgggtttatttctgggttctctgttctgttccattggtctatatgcctgtttttataccagtaccatgccattttggtgactatggcctgatagtatagtttgaaattaggtaatgtaatgtctccagatttgttctttttccttagtcttgctttggccctgtgggctttttttggttccatrtgaattttaggattgttttttctaattctgtgaagaatgatggtggtattttgatgggaattgcattaaatttgtggattgcttttggcagtatggtcattttcacaatattgattctacccatccatgagcgtggtatgtatttccatttgtttgtgttgtctatgatttctgtcagcagtgttttgcagttttccttatagaggtctatcacct

SEQ ID NO: 397141 - DNA, 519 bp, Homo sapiens
agtgtgttctttaatcataagacactcagtagatgtcaattatatccagttaattgacggtgctgtgtttactcttttttctgtctgcttgatatgtccatttttgatagaggggtgttgaagtcaccaactatgatagtggactcatgtttttctccttgcagttctattagatgttgcctcatgttttttgatgctccattgttaggcatctatacattaaggattgtcatgtctttataaggaactgacccctttatcattatgtaatacccatctttagccctgataactttctttgctctgaagtctagtctgtttaaarttaatatagctgttcccattttaaaaattagcatcagcatagtatatctttcagtatgtgctcttatagttaatgcatgtttcttgtaggcaacatacaattgggaaggtttttttaaatccatttttacaatctttgccttttaactgatatatttagaacattgatgtttaaagtaactaatgatttagttg

SEQ ID NO: 397142 - DNA, 576 bp, Homo sapiens
gctactattttgagcacacttctatttgtatatcaattaagaataagaaaaatattttttctttgtgaccccaggtgtcatggataaaagatctatggatataattttcaagtcagtgcaagggtattttttctaacaccgaagtgatattagagtggactgaattctcttgggaagtatttaactcctaattctggagctattccagtgcttgataaaccactcagtgaagatactctyaaatgagttcttagtatttttgtgttaaacagaaaattttccagtgttaggataattggcaaggatggaaagactcaaaattgcactaattgtattattcataaagaataatggagtcaccaccaaagaataacacagtgtctgaaaggcatccacggatatcactgtcttcatttgttgagtcttcatcatcaggtgactgttttaatagagctatttacttccttgaatgcactctcagttattcactcagatatgttatcataagttcagataaataaaatattttcagaatcatcttgaaatttcactatacctattatttgcaacaaatgt

SEQ ID NO: 397143 - DNA, 576 bp, Homo sapiens
gctactattttgagcacacttctatttgtatatcaattaagaataagaaaaatattttttctttgtgaccccaggtgtcatggataaaagatctatggatataattttcaagtcagtgcaagggtattttttctaacaccgaagtgatattagagtggactgaattctcttgggaagtatttaactcctaattctggagctattccagtgcttgataaaccactcagtgaagatactcttaaatgagttcttagtatttttgtgttaaacagaaaattttccagtgttaggataattggcaaggatggaaagactcaaaattgcactaattgtattattcataaagaataatggagtcaccaccaaagaataacacagtgtctgaaaggcatccacggatatcactgtcttcatwtgttgagtcttcatcatcaggtgactgttttaatagagctatttacttccttgaatgcactctcagttattcactcagatatgttatcataagttcagataaataaaatattttcagaatcatcttgaaatttcactatacctattatttgcaacaaatgt

SEQ ID NO: 397144 - DNA, 576 bp, Homo sapiens
gctactattttgagcacacttctatttgtatatcaattaagaataagaaaaatattttttctttgtgaccccaggtgtcatggataaaagatctatggatataattttcaagtcagtgcaagggtattttttctaacaccgaagtgatattagagtggactgaattctcttgggaagtatttaactcctaattctggagctattccagtgcttgataaaccactcagtgaagatactcttaaatgagttcttagtatttttgtgttaaacagaaaattttccagtgttaggataattggcaaggatggaaagactcaaaattgcactaattgtattattcataaagaataatggagtcaccaccaaagaataacacagtgtctgaaaggcatccacggatatcactgtcttcatttgttgagtcttcatcatcaggtkactgttttaatagagctatttacttccttgaatgcactctcagttattcactcagatatgttatcataagttcagataaataaaatattttcagaatcatcttgaaatttcactatacctattatttgcaacaaatgt

SEQ ID NO: 397145 - DNA, 587 bp, Homo sapiens
tcagataaataaaatattttcagaatcatcttgaaatttcactatacctattatttgcaacaaatgttattccagtttccatttgactcttagtttaatgttctgtgtaacagccattgctgttaatatacgtatttggggcaaaaaatacaatatcctttgtgatatcccttggattgtaatatctgacctttgaccccacatgttttaattatgcaactaattatcatgtaataaaggaaatacaacttcaagatggtagctttgtattttatatttaaaatcttagaaagttttattattgataaataaaaggattcaaaataatcctgaagtataatgatgttaaacatatagtttagaactagattaacaaaataataccatttgcataggtagggtgtctgatatgcttctaaattaatttgatttgtatattcttgaaaactcccacaagttatttgcatgtactaaatagatgttgctttttattctgaaagaatgagaatgaagataaaacataggttcatasattggtcaacatgcagaaaaaccaatattgattatttttacagttcattacatca

SEQ ID NO: 397146 - DNA, 557 bp, Homo sapiens
agttactaatgattgttttattgtttctgcatttcagtcatagagtctggcagattgcaagtgtactgttaytctgtaggaggtataaaatgttcatgatgttatcttgggcgaggcctccagcctggaagatcagcataactctgagttgctaatctggccagttcagtctttgtttttatagagaaaatcaaagatatatcaattgatgctagttgcaaattacagaaatgttgtgattagtatttttgaaagtcttatattaacaacacttcattagttgaaaattcttctcctaggctccagttactatcttcccagcttaaatccagaaaacaacagcaacgtctttgccagctacctcacatttggagaattgaacactgtagctcagcttgaggaaagatgatagcattggaactgatttcactttctgagccttttgttgagggtatttactaataatacttctgaactgtaaaatctgtgggttagcatccccctctgatgcaagaaacctggaatttactggctagctagcaaatgcaaaattagac

SEQ ID NO: 397147 - DNA, 557 bp, Homo sapiens
agttactaatgattgttttattgtttctgcatttcagtcatagagtctggcagattgcaagtgtactgttattctgtaggaggtataaaatgttcatgatgttatcttgggcgaggcctccagcctggaagatcagcataactctgagttgctaatctggccagttcagtctttgtttttatagagaaaatcaaagatatatcaattgatgctagttgcaaattayagaaatgttgtgattagtatttttgaaagtcttatattaacaacacttcattagttgaaaattcttctcctaggctccagttactatcttcccagcttaaatccagaaaacaacagcaacgtctttgccagctacctcacatttggagaattgaacactgtagctcagcttgaggaaagatgatagcattggaactgatttcactttctgagccttttgttgagggtatttactaataatacttctgaactgtaaaatctgtgggttagcatccccctctgatgcaagaaacctggaatttactggctagctagcaaatgcaaaattagac

SEQ ID NO: 397148 - DNA, 557 bp, Homo sapiens
agttactaatgattgttttattgtttctgcatttcagtcatagagtctggcagattgcaagtgtactgttattctgtaggaggtataaaatgttcatgatgttatcttgggcgaggcctccagcctggaagatcagcataactctgagttgctaatctggccagttcagtctttgtttttatagagaaaatcaaagatatatcaattgatgctagttgcaaattacagaaatgttgtgattagtatttttgaaagtcttatattaacaacacttcattagttgaaaattcttctcctaggctccagttactatcttcccagcttaaatccagaaaacaacagcaaygtctttgccagctacctcacatttggagaattgaacactgtagctcagcttgaggaaagatgatagcattggaactgatttcactttctgagccttttgttgagggtatttactaataatacttctgaactgtaaaatctgtgggttagcatccccctctgatgcaagaaacctggaatttactggctagctagcaaatgcaaaattagac

SEQ ID NO: 397149 - DNA, 604 bp, Homo sapiens
ttatattaacaacacttcattagttgaaaattcttctcctaggctccagttactatcttcccagcttaaatccagaaaacaacagcaacgtctttgccagctacctcacatttggagaattgaacactgtagctcagcttgaggaaagatgatagcattggaactgatttcactttctgagccttttkttgagggtatttactaataatacttctgaactgtaaaatctgtgggttagcatccccctctgatgcaagaaacctggaatttactggctagctagcaaatgcaaaattagacaattttgctgggagctaaatatacatggttaagtgtgtttgactattatatggctgcagaaagttccacatgccaatttatttgcttatggtgttttggaaaatggaatcctttagagaaagagaaagagaacacaccaactttcaactccattgattttaattaagctaactgtagattggcaagcactgcaaaattcacaaacctgatgagacaaaagagattacacaataggtacaggaactaatggcttgtccttaattatctgaaactgacaagacaatgacctgtcaaattaacggaa

SEQ ID NO: 397150 - DNA, 592 bp, Homo sapiens
tgagggtatttactaataatacttctgaactgtaaaatctgtgggttagcatccccctctgatgcaagaaacctggaatttactggctagctagcaaatgcaaaattagacaattttgctgggagctaaatatacayggttaagtgtgtttgactattatatggctgcagaaagttccacatgccaatttatttgcttatggtgttttggaaaatggaatcctttagagaaagagaaagagaacacaccaactttcaactccattgattttaattaagctaactgtagattggcaagcactgcaaaattcacaaacctgatgagacaaaagagattacacaataggtacaggaactaatggcttgtccttaattatctgaaactgacaagacaatgacctgtcaaattaacggaaattatcttccataaagccttggtggaatggcagcgtaatattgaactttagaagaaaaagaagcttggaccaaaaagaagttccttgcccttaaaaatgagcacaccataatagacacagacatgggaagatgctcatgatgtattaagtagaaaaaaaaatagaaaataatatagt

SEQ ID NO: 397151 - DNA, 592 bp, Homo sapiens
tgagggtatttactaataatacttctgaactgtaaaatctgtgggttagcatccccctctgatgcaagaaacctggaatttactggctagctagcaaatgcaaaattagacaattttgctgggagctaaatatacatggttaagtgtgtttgactattatatggctgcagaaagttccacatgccaatttatttgcttatggtgttttggaaaatggaatcctttagagaaagagaaagagaacacaccaactttcaactccattgattttaattaagctaactgtagattggcaagcactgcaaaattcacaaacctgatgagacaaaagagattacacaataggtacaggaactaatggcttrtccttaattatctgaaactgacaagacaatgacctgtcaaattaacggaaattatcttccataaagccttggtggaatggcagcgtaatattgaactttagaagaaaaagaagcttggaccaaaaagaagttccttgcccttaaaaatgagcacaccataatagacacagacatgggaagatgctcatgatgtattaagtagaaaaaaaaatagaaaataatatagt

SEQ ID NO: 397152 - DNA, 592 bp, Homo sapiens
tgagggtatttactaataatacttctgaactgtaaaatctgtgggttagcatccccctctgatgcaagaaacctggaatttactggctagctagcaaatgcaaaattagacaattttgctgggagctaaatatacatggttaagtgtgtttgactattatatggctgcagaaagttccacatgccaatttatttgcttatggtgttttggaaaatggaatcctttagagaaagagaaagagaacacaccaactttcaactccattgattttaattaagctaactgtagattggcaagcactgcaaaattcacaaacctgatgagacaaaagagattacacaataggtacaggaactaatggcttgtccttaattatctgaaactgacaagacaatgacctgtcaaattaacggaaattatcttccataaagccttggtggaatggcagcrtaatattgaactttagaagaaaaagaagcttggaccaaaaagaagttccttgcccttaaaaatgagcacaccataatagacacagacatgggaagatgctcatgatgtattaagtagaaaaaaaaatagaaaataatatagt

SEQ ID NO: 397153 - DNA, 579 bp, Homo sapiens
gtagattggcaagcactgcaaaattcacaaacctgatgagacaaaagagattacacaataggtacaggaactaatggcttgtccttaattatctgaaactgacaagacaatgacctgtcaaattaacggaaattatcttccataaagccttggtggaatggcagcgtaatattgaactttagaagaaaaagaagcttggaccaaaaagaagttccttgcccttaaaaatgagcayaccataatagacacagacatgggaagatgctcatgatgtattaagtagaaaaaaaaatagaaaataatatagtcagcctgttcccattttggtaaaattgaaatacaccaaaccactttcacctgttctgccaacataggatgtgtacctggtcactcctgttttgttttattgtatatatatatatatattttttttcaattaatcattggaaaaccccattttctcttttgggaaaaaaatctaatactgtctctaggtccttctgccaaacccagtgagacagattccagatgccaatgccattgcttatcaatatcacatggtatcactgtcagatgcac

SEQ ID NO: 397154 - DNA, 579 bp, Homo sapiens
gtagattggcaagcactgcaaaattcacaaacctgatgagacaaaagagattacacaataggtacaggaactaatggcttgtccttaattatctgaaactgacaagacaatgacctgtcaaattaacggaaattatcttccataaagccttggtggaatggcagcgtaatattgaactttagaagaaaaagaagcttggaccaaaaagaagttccttgcccttaaaaatgagcacaccataatagacacagacatgggaagatgctcatgatgtattaagtagaaaaaaaaatagaaaataatatagkcagcctgttcccattttggtaaaattgaaatacaccaaaccactttcacctgttctgccaacataggatgtgtacctggtcactcctgttttgttttattgtatatatatatatatattttttttcaattaatcattggaaaaccccattttctcttttgggaaaaaaatctaatactgtctctaggtccttctgccaaacccagtgagacagattccagatgccaatgccattgcttatcaatatcacatggtatcactgtcagatgcac

SEQ ID NO: 397155 - DNA, 461 bp, Homo sapiens
aaaagaagttccttgcccttaaaaatgagcacaccataatagacacagacatgggaagatgctcatgatgtattaagtagaaaaaaaaatagaaaataatatagtcagcctgttcccattttggtaaaattgaaatacaccaaaccactttcacctgttctgccaacataggatgtgtacctggtcactcctgttttgtttyattgtatatatatatatatattttttttcaattaatcattggaaaaccccattttctcttttgggaaaaaaatctaatactgtctctaggtccttctgccaaacccagtgagacagattccagatgccaatgccattgcttatcaatatcacatggtatcactgtcagatgcacatcatgaaaaacttcatgcctgtctgctgctactgggatacccttgctggtagaagcctgtgccagagtggtgctcatgagatat

SEQ ID NO: 397156 - DNA, 461 bp, Homo sapiens
aaaagaagttccttgcccttaaaaatgagcacaccataatagacacagacatgggaagatgctcatgatgtattaagtagaaaaaaaaatagaaaataatatagtcagcctgttcccattttggtaaaattgaaatacaccaaaccactttcacctgttctgccaacataggatgtgtacctggtcactcctgttttgttttattgtatatatatatatatattttttttcaattaatcattggaaaaccccattttctcttttgggaaaaaaatctaatactgtctctaggtccttctgccaaacccagtgagacagattccagatgccaatgccattgctyatcaatatcacatggtatcactgtcagatgcacatcatgaaaaacttcatgcctgtctgctgctactgggatacccttgctggtagaagcctgtgccagagtggtgctcatgagatat

SEQ ID NO: 397157 - DNA, 642 bp, Homo sapiens
taggccaaataatgcatacagtaaactagagaatatttgctcgaaaatattatggtgccttgtccttattttagactcacctcgtaagtagtaactaaaacaataaatgaatgaatgaacgagtaaatgaatgaatgcaagctgtctggaccagcttggtaataaatatcctgaagttcatctttccatttttaaaaagtcacycaacttatgtttgataaatataaacaaacttttttatgtcatcattttaaatgctttaggaaatgctttcatttcctttcgttttgtccgatgttcatatctttcatgctttgcttatcttttggaagtgtctgtccaactagagctcttccaaaaagatatttggcaaggacatcttctgctcccaggtataaaagtgagtcaaacaccattattatttttatccttcaggaaaaaccttctgtgaaaatcctgattgcatttccttttataagattctgtctcatatttattaactgaaagatttgggtcaaatcagccacatgtactctctgtagtttatcagcagaaggattctttgaaagattaaattgcacagggctgacttctaaagtgcagtgaaaaaaataaaaaagccacttggtaaaaatgctaaaa

SEQ ID NO: 397158 - DNA, 642 bp, Homo sapiens
taggccaaataatgcatacagtaaactagagaatatttgctcgaaaatattatggtgccttgtccttattttagactcacctcgtaagtagtaactaaaacaataaatgaatgaatgaacgagtaaatgaatgaatgcaagctgtctggaccagcttggtaataaatatcctgaagttcatctttccatttttaaaaagtcactcaacttatgtttgataaatataaacaaacttttttatgtcatcattttaaatgctttaggaaatgctttcatttcctttcgttttgtccgatgttcatatctttcatgctttgcttatcttttggaagtgtctgtccaactagagctcttccaaaaagatatttggcaaggacatcttctgctcccaggtataaaagtgagtcaaacaccattattatttttatccttcaggaaaaaycttctgtgaaaatcctgattgcatttccttttataagattctgtctcatatttattaactgaaagatttgggtcaaatcagccacatgtactctctgtagtttatcagcagaaggattctttgaaagattaaattgcacagggctgacttctaaagtgcagtgaaaaaaataaaaaagccacttggtaaaaatgctaaaa

SEQ ID NO: 397159 - DNA, 486 bp, Homo sapiens
ccatttgtacttgagactggattgtttatagatgcttgaaagaaccattatttgtgtgtacagataagcaaattgaaaaacataattactcataacygtgttttatgttttccagaatcttaaagaagtcaaaaatatcagtgaaatcaagcatggagaaatattgcattattaatagtatactgaaaagtaaataagatttttgaatttctttataaatcatttttagttatcataatccttcaagcatcaattcactgtgttttaaaatgcacaatttattatctctgtatgtgatttttcacatctttcatttttttctctatatttatgtttgaggaagaacgtggaatatagaatgcagacatgatgtctctgaaatacatgtctcctctcccagagacatagtcacattttatagttaaattttggtttgaagttctaatttctcttccattaacctttctgattccaaatgctaccagt

SEQ ID NO: 397160 - DNA, 486 bp, Homo sapiens
ccatttgtacttgagactggattgtttatagatgcttgaaagaaccattatttgtgtgtacagataagcaaattgaaaaacataattactcataactgtgtttyatgttttccagaatcttaaagaagtcaaaaatatcagtgaaatcaagcatggagaaatattgcattattaatagtatactgaaaagtaaataagatttttgaatttctttataaatcatttttagttatcataatccttcaagcatcaattcactgtgttttaaaatgcacaatttattatctctgtatgtgatttttcacatctttcatttttttctctatatttatgtttgaggaagaacgtggaatatagaatgcagacatgatgtctctgaaatacatgtctcctctcccagagacatagtcacattttatagttaaattttggtttgaagttctaatttctcttccattaacctttctgattccaaatgctaccagt

SEQ ID NO: 397161 - DNA, 486 bp, Homo sapiens
ccatttgtacttgagactggattgtttatagatgcttgaaagaaccattatttgtgtgtacagataagcaaattgaaaaacataattactcataactgtgttttatgttttccagaatcttaaagaagtcaaaaatatcagtgaaatcaagcatggagaaatattgcattattaataktatactgaaaagtaaataagatttttgaatttctttataaatcatttttagttatcataatccttcaagcatcaattcactgtgttttaaaatgcacaatttattatctctgtatgtgatttttcacatctttcatttttttctctatatttatgtttgaggaagaacgtggaatatagaatgcagacatgatgtctctgaaatacatgtctcctctcccagagacatagtcacattttatagttaaattttggtttgaagttctaatttctcttccattaacctttctgattccaaatgctaccagt

SEQ ID NO: 397162 - DNA, 498 bp, Homo sapiens
aaaataaaaaagccacttggtaaaaatgctaaaactgttattttcttgggaaatgtagaattttagcaaattaacatgttacatttaaacccatttgtacttgagactggattgtttatagatgcttgaaagaaccattatttgtgtgtacagataagcaaattgaaaaacataattactcataactgtgttttatgttttccagaatcttaaagaagtcaaaaatatcagtgaaatcaagcatggagaaatattgcattattaatagtatactgaaaagtaaataagatttttgaatttctttataaatcatttttagttatcataatccttcaagcatcaattcactgtgttttaaaatgcacaatttattatctctgtrtgtgatttttcacatctttcatttttttctctatatttatgtttgaggaagaacgtggaatatagaatgcagacatgatgtctctgaaatacatgtctcctctcccagagacatag

SEQ ID NO: 397163 - DNA, 498 bp, Homo sapiens
aaaataaaaaagccacttggtaaaaatgctaaaactgttattttcttgggaaatgtagaattttagcaaattaacatgttacatttaaacccatttgtacttgagactggattgtttatagatgcttgaaagaaccattatttgtgtgtacagataagcaaattgaaaaacataattactcataactgtgttttatgttttccagaatcttaaagaagtcaaaaatatcagtgaaatcaagcatggagaaatattgcattattaatagtatactgaaaagtaaataagatttttgaatttctttataaatcatttttagttatcataatccttcaagcatcaattcactgtgttttaaaatgcacaatttattatctctgtatgtgatttttcacatctttcatttttttctctatrtttatgtttgaggaagaacgtggaatatagaatgcagacatgatgtctctgaaatacatgtctcctctcccagagacatag

SEQ ID NO: 397164 - DNA, 486 bp, Homo sapiens
ccatttgtacttgagactggattgtttatagatgcttgaaagaaccattatttgtgtgtacagataagcaaattgaaaaacataattactcataactgtgttttatgttttccagaatcttaaagaagtcaaaaatatcagtgaaatcaagcatggagaaatattgcattattaatagtatactgaaaagtaaataagatttttgaatttctttataaatcatttttagttatcataatccttcaagcatcaattcactgtgttttaaaatgcacaatttattatctctgtatgtgatttttcacatctttcatttttttctctatatttatgtttgrggaagaacgtggaatatagaatgcagacatgatgtctctgaaatacatgtctcctctcccagagacatagtcacattttatagttaaattttggtttgaagttctaatttctcttccattaacctttctgattccaaatgctaccagt

SEQ ID NO: 397165 - DNA, 598 bp, Homo sapiens
agtcaaagcatttgcactgtttctaacttttctaccttaagaaacatacttttgctcaagcagagcgtttagtgcatgtctcctttaatggattcctgctaagagctaacaactggattattgaatcttctccttcaaaaccactctttgacttattacaagattatttttctcagttacatttgattctttataggtaccattttctgcccctggccttgtttaaaattgaattgtgatggctcttcccctgacttatcttttaaagctattgtcatttacttcattttttttaggcttttactggaaaatttctggcygtaacactttcttataatttctatttctattccaggtttctgcttaagcacagtgttgcattaataagggtcaggcgaagtttcaacagcatttaatcttacactttaaatttttgttcacattttatggtcttgacacatttactgtaataaagggaaatcattaattcactaagaaacgtgtaaaaactatagttttgcttttgattaatttccacattcatcattactttgctactgatttaccatgcattgaagagactgagggtgcaaaacat

SEQ ID NO: 397166 - DNA, 598 bp, Homo sapiens
agtcaaagcatttgcactgtttctaacttttctaccttaagaaacatacttttgctcaagcagagcgtttagtgcatgtctcctttaatggattcctgctaagagctaacaactggattattgaatcttctccttcaaaaccactctttgacttattacaagattatttttctcagttacatttgattctttataggtaccattttctgcccctggccttgtttaaaattgaattgtgatggctcttcccctgacttatcttttaaagctattgtcatttacttcattttttttaggcttttactggaaaatttctggccgtaacaytttcttataatttctatttctattccaggtttctgcttaagcacagtgttgcattaataagggtcaggcgaagtttcaacagcatttaatcttacactttaaatttttgttcacattttatggtcttgacacatttactgtaataaagggaaatcattaattcactaagaaacgtgtaaaaactatagttttgcttttgattaatttccacattcatcattactttgctactgatttaccatgcattgaagagactgagggtgcaaaacat

SEQ ID NO: 397167 - DNA, 598 bp, Homo sapiens
agtcaaagcatttgcactgtttctaacttttctaccttaagaaacatacttttgctcaagcagagcgtttagtgcatgtctcctttaatggattcctgctaagagctaacaactggattattgaatcttctccttcaaaaccactctttgacttattacaagattatttttctcagttacatttgattctttataggtaccattttctgcccctggccttgtttaaaattgaattgtgatggctcttcccctgacttatcttttaaagctattgtcatttacttcattttttttaggcttttactggaaaatttctggccgtaacactttcttataatttctatttctattccaggtttctgcttaagcmcagtgttgcattaataagggtcaggcgaagtttcaacagcatttaatcttacactttaaatttttgttcacattttatggtcttgacacatttactgtaataaagggaaatcattaattcactaagaaacgtgtaaaaactatagttttgcttttgattaatttccacattcatcattactttgctactgatttaccatgcattgaagagactgagggtgcaaaacat

SEQ ID NO: 397168 - DNA, 603 bp, Homo sapiens
gttgcattaataagggtcaggcgaagtttcaacagcatttaatcttacactttaaatttttgttcacattttatggtcttgacacatttactgtaataaagggaaatcattaattcactaagaaacgtgtaaaaactatagttttgcttttgattaatttccacattcatcattactttgctactgatttaccatgcattgaagagactgagggtgcaaaacatgattttttttctttgtttaaaaagaactgtcttagaaaccaaatgaggctaaaaatgtacctgtgttttggctgtcaaaggggagaagattacttcttcttgaacgtgttttctgtctcatcctcatgtttcctttatttataccaaatacaccataccattctctacttttttttcttgaagtaaaagaragctatagccatagccactgtcatattaactctgaaaataggtattttcctttatgaagaggaaagaaatcttaatttacctttggcttatggaagaaaatcatctaaaattttataatgccagctacatcttgaacatttttgaatactgttgttatgaaacaaaatcatacttgagcctagaggtc

SEQ ID NO: 397169 - DNA, 603 bp, Homo sapiens
gttgcattaataagggtcaggcgaagtttcaacagcatttaatcttacactttaaatttttgttcacattttatggtcttgacacatttactgtaataaagggaaatcattaattcactaagaaacgtgtaaaaactatagttttgcttttgattaatttccacattcatcattactttgctactgatttaccatgcattgaagagactgagggtgcaaaacatgattttttttctttgtttaaaaagaactgtcttagaaaccaaatgaggctaaaaatgtacctgtgttttggctgtcaaaggggagaagattacttcttcttgaacgtgttttctgtctcatcctcatgtttcctttatttataccaaatacaccataccattctctacttttttttcttgaagtaaaagaaagctatagccatagccactgtcatattaactctgaaaataggtwttttcctttatgaagaggaaagaaatcttaatttacctttggcttatggaagaaaatcatctaaaattttataatgccagctacatcttgaacatttttgaatactgttgttatgaaacaaaatcatacttgagcctagaggtc

SEQ ID NO: 397170 - DNA, 603 bp, Homo sapiens
gttgcattaataagggtcaggcgaagtttcaacagcatttaatcttacactttaaatttttgttcacattttatggtcttgacacatttactgtaataaagggaaatcattaattcactaagaaacgtgtaaaaactatagttttgcttttgattaatttccacattcatcattactttgctactgatttaccatgcattgaagagactgagggtgcaaaacatgattttttttctttgtttaaaaagaactgtcttagaaaccaaatgaggctaaaaatgtacctgtgttttggctgtcaaaggggagaagattacttcttcttgaacgtgttttctgtctcatcctcatgtttcctttatttataccaaatacaccataccattctctacttttttttcttgaagtaaaagaaagctatagccatagccactgtcatattaactctgaaaataggtattttcctttatgaagaggaaagaaatcttaatttacctttggcttatggaagaaaatcatctaaaattttataatgccagctacatcttgaacawttttgaatactgttgttatgaaacaaaatcatacttgagcctagaggtc

SEQ ID NO: 397171 - DNA, 570 bp, Homo sapiens
tattcttatttttaacaacacaaatatttgtagaaaaatttagagaatgcagaataagcaagagaaaaataaacacaatgtattgctatccccccagttttcttaactgtgtattacacatttttgtgtaacctgcttttttgccttaaaatgtcatgatcttttccaaccataagtatgttatttttcatatgtcagttttaatggctataatattctcctcagtgtttttgagggtctttgagagcactcagtaagtagcacctgtcttttctacccaattcaattgaaaaatagacagcaagtggagaaccagaatatcaccctattcctaattaaggcacaattggcaggcacagcttacaatgagagwaacaattggcttgctcactgcatcccttggaagtttgttgagctgtgagaagaacccacttcagggaaagcttaaagccagggagcaggaaatccctgcactgcactggccatggctagaggaaagaagaaaagaagcaacttctccaagcagagaaactttgatcatgtctacccaatacctgtaacacaccaacc

SEQ ID NO: 397172 - DNA, 563 bp, Homo sapiens
agaaattttctttaaatgaaactataagtaaaatttctgggacaatgtttttaacatgtttaaagcttttgatgcaatttaccacattttactcaggaaaattttgtcaatttacattaccactcagtaatgtataacctcatttatttttaataagtgtatttgaacccagtaaagttggctctggagcccaaattattaatcttaacaaaatcctgctagttactaaatwaaaaaaaaactgtaaaattcatgaaatttctctgactccataaactttcaatggataatttctatatctgtccttactgcctgggagtggagaattataatggtcatgaaagtggcctttgcgttgaactcctcctggctttgaattctgaatttgcccttaactagagctgtggcaagttatcatagatgttcaagcaactctgctcctcacagtgctaataaagacaagcgcaagactgggtgattcataaagaaagaggtttaattaactaactgtttggcatgactggggaggcctcaggaaacttacagtcatggcagaaggtgaa

SEQ ID NO: 397173 - DNA, 522 bp, Homo sapiens
tagatgttcaagcaactctgctcctcacagtgctaataaagacaagcgcaagactgggtgattcataaagaaagaggtttaattaactaactgtttggcatgactggggaggcctcaggaaacttacartcatggcagaaggtgaagtaagcacatccttattcacatggcagcggcaaggagaagtgccgagcaaaaggggaaaaagcaccactcactaacaggagaacaagacatgggaaacctccccccaattcaattatctcccactgggttcctcccatgacatgtgtggattatgggaagtacaattcaacatgagatttgggtggggacacagccaactcataccatcatccaccacatcaaacccactaagtgagctacatttttgctgcgtgggatgaaaatgtccacacagcacagagaagaatatgtgcttcatagagtaatgatagtcagcttaacaaaagatgcttccgtgagaggctgatggtcagccctgagatcagtaaccagaag

SEQ ID NO: 397174 - DNA, 529 bp, Homo sapiens
tctgctcctcacagtgctaataaagacaagcgcaagactgggtgattcataaagaaagaggtttaattaactaactgtttggcatgactggggaggcctcaggaaacttacagtcatggcagaaggkgaagtaagcacatccttattcacatggcagcggcaaggagaagtgccgagcaaaaggggaaaaagcaccactcactaacaggagaacaagacatgggaaacctccccccaattcaattatctcccactgggttcctcccatgacatgtgtggattatgggaagtacaattcaacatgagatttgggtggggacacagccaactcataccatcatccaccacatcaaacccactaagtgagctacatttttgctgcgtgggatgaaaatgtccacacagcacagagaagaatatgtgcttcatagagtaatgatagtcagcttaacaaaagatgcttccgtgagaggctgatggtcagccctgagatcagtaaccagaagccgtggcttccagaaggctgcct

SEQ ID NO: 397175 - DNA, 529 bp, Homo sapiens
tctgctcctcacagtgctaataaagacaagcgcaagactgggtgattcataaagaaagaggtttaattaactaactgtttggcatgactggggaggcctcaggaaacttacagtcatggcagaaggtgaagkaagcacatccttattcacatggcagcggcaaggagaagtgccgagcaaaaggggaaaaagcaccactcactaacaggagaacaagacatgggaaacctccccccaattcaattatctcccactgggttcctcccatgacatgtgtggattatgggaagtacaattcaacatgagatttgggtggggacacagccaactcataccatcatccaccacatcaaacccactaagtgagctacatttttgctgcgtgggatgaaaatgtccacacagcacagagaagaatatgtgcttcatagagtaatgatagtcagcttaacaaaagatgcttccgtgagaggctgatggtcagccctgagatcagtaaccagaagccgtggcttccagaaggctgcct

SEQ ID NO: 397176 - DNA, 529 bp, Homo sapiens
tctgctcctcacagtgctaataaagacaagcgcaagactgggtgattcataaagaaagaggtttaattaactaactgtttggcatgactggggaggcctcaggaaacttacagtcatggcagaaggtgaagtaagcacatccttattcacatggcagcggcaaggagaagtgccgagcaaaaggggaaaaagcaccactcactawcaggagaacaagacatgggaaacctccccccaattcaattatctcccactgggttcctcccatgacatgtgtggattatgggaagtacaattcaacatgagatttgggtggggacacagccaactcataccatcatccaccacatcaaacccactaagtgagctacatttttgctgcgtgggatgaaaatgtccacacagcacagagaagaatatgtgcttcatagagtaatgatagtcagcttaacaaaagatgcttccgtgagaggctgatggtcagccctgagatcagtaaccagaagccgtggcttccagaaggctgcct

SEQ ID NO: 397177 - DNA, 529 bp, Homo sapiens
tctgctcctcacagtgctaataaagacaagcgcaagactgggtgattcataaagaaagaggtttaattaactaactgtttggcatgactggggaggcctcaggaaacttacagtcatggcagaaggtgaagtaagcacatccttattcacatggcagcggcaaggagaagtgccgagcaaaaggggaaaaagcaccactcactaacaggagaacaagacatgggaaacctccccccaattcaattatctcccactgggttcctcccatgacatgtgtggattatgggaagtacaattcaacatgagatttgggtggggacacagccaactcataccatcatccaccacatcaaacccactaagtgagctacatttttgctgygtgggatgaaaatgtccacacagcacagagaagaatatgtgcttcatagagtaatgatagtcagcttaacaaaagatgcttccgtgagaggctgatggtcagccctgagatcagtaaccagaagccgtggcttccagaaggctgcct

SEQ ID NO: 397178 - DNA, 592 bp, Homo sapiens
attaatcactgagttgtcaatatgaacataaagattggtgtgaattcagtgtcctgcacaaaagtcttcagttaaaacagaagagatattatggtgatggattccccaggatgttcaacaaacagagaagaggccaaagcacgttgtctcaatctttcttcttgttttagtccattctcacactgctaaacgatactacccaagactggataatttacaaagaaaagaggtttaattgactcacagttccacatggctggggaggcctcargaaacttacaatcatggcagaaggagaaagcaagcacatcttacatggtggcaggtgagggaacatgagcaaaagcagggaaaactgccttataaagccatcagatctcatgataattcactcactatcacgagaacagcataggggaaaccacctctacgatccaatcgtctcccatcagattcctccatccacacgtgaggattaccggtattacaattcaagaggaggtttgggtggggacacagccaaaaagtaacactttttatttattacaattttatatcatccctagaaaattgttccaaattcttgcccatc

SEQ ID NO: 397179 - DNA, 535 bp, Homo sapiens
agagaagaggccaaagcacgttgtctcaatctttcttcttgttttagtccattctcacactgctaaacgatactacccaagactggataatttacaaagaaaagaggtttaattgactcacagttccacatggctggggaggcctcaggaaacttacaatcatggcagaaggagaaagcaagcacatcttacatggtggcaggtgagggaacatgagcaaaagcagggaaaactgccttataaagccatcagatctcatgayaattcactcactatcacgagaacagcataggggaaaccacctctacgatccaatcgtctcccatcagattcctccatccacacgtgaggattaccggtattacaattcaagaggaggtttgggtggggacacagccaaaaagtaacactttttatttattacaattttatatcatccctagaaaattgttccaaattcttgcccatcctccatcaatatctaaaattgcacttgtaattgagaatacttgctaaggttttacttgtacttgca

SEQ ID NO: 397180 - DNA, 592 bp, Homo sapiens
attaatcactgagttgtcaatatgaacataaagattggtgtgaattcagtgtcctgcacaaaagtcttcagttaaaacagaagagatattatggtgatggattccccaggatgttcaacaaacagagaagaggccaaagcacgttgtctcaatctttcttcttgttttagtccattctcacactgctaaacgatactacccaagactggataatttacaaagaaaagaggtttaattgactcacagttccacatggctggggaggcctcaggaaacttacaatcatggcagaaggagaaagcaagcacatcttacatggtggcaggtgagggaacatgagcaaaagcagggaaaactgccttataaagccatcagatctcatgataattcactcactatcacgagaacagcataggggaaaccacctctacgatccaatcgtctcccatcagattcctccatccacacgtgaggattacyggtattacaattcaagaggaggtttgggtggggacacagccaaaaagtaacactttttatttattacaattttatatcatccctagaaaattgttccaaattcttgcccatc

SEQ ID NO: 397181 - DNA, 535 bp, Homo sapiens
agagaagaggccaaagcacgttgtctcaatctttcttcttgttttagtccattctcacactgctaaacgatactacccaagactggataatttacaaagaaaagaggtttaattgactcacagttccacatggctggggaggcctcaggaaacttacaatcatggcagaaggagaaagcaagcacatcttacatggtggcaggtgagggaacatgagcaaaagcagggaaaactgccttataaagccatcagatctcatgataattcactcactatcacgagaacagcataggggaaaccacctctacgatccaatcgtctcccatcagattcctccatccacacgtgaggattaccggtattacaattcaagaggaggtttgggtggggacacagccaaaaagtaacactttttatttattacaattttatatcatccctagmaaattgttccaaattcttgcccatcctccatcaatatctaaaattgcacttgtaattgagaatacttgctaaggttttacttgtacttgca

SEQ ID NO: 397182 - DNA, 583 bp, Homo sapiens
ctcagtttcatagtaaatgcctgccttggttcatgcatcagtactgtttccacttggcttccttggacatcactttctcttaacttttctcctacctctctggcscttttctcttgaacactcttgataatcctaccttatctccctgccctcttaaaatgtaagtgcctcaagctcttggtatttctcttccccgtttgtgctttagtaactcagtattttctagaggctggcagcatccacatatatctccagataagacctctgctagaaaagctacactcatacatatttacccctttgctttctccatttggatgttgaataaccatgtagaaaataacaagtccaaaactcaggtcctgatttttcaccttcaaatcagcatctctcatatttttccaactcagtaaatgacagctacattcttccacatgctaaaaactcttggagacatcgtcattcaaccctttgtcttgtattctacatctagtttatcaggtaaagcagttacctgtaccttcaaaatacagttaaacaaaatcctaccctttttcttggtcctccctgctatgattctggt

SEQ ID NO: 397183 - DNA, 583 bp, Homo sapiens
ctcagtttcatagtaaatgcctgccttggttcatgcatcagtactgtttccacttggcttccttggacatcactttctcttaacttttctcctacctctctggcgcttttctcttgaacactcttgataatcctaccttatctccctgccctcttaaaatgtaagtgcctcaagctcttggtatttctcytccccgtttgtgctttagtaactcagtattttctagaggctggcagcatccacatatatctccagataagacctctgctagaaaagctacactcatacatatttacccctttgctttctccatttggatgttgaataaccatgtagaaaataacaagtccaaaactcaggtcctgatttttcaccttcaaatcagcatctctcatatttttccaactcagtaaatgacagctacattcttccacatgctaaaaactcttggagacatcgtcattcaaccctttgtcttgtattctacatctagtttatcaggtaaagcagttacctgtaccttcaaaatacagttaaacaaaatcctaccctttttcttggtcctccctgctatgattctggt

SEQ ID NO: 397184 - DNA, 583 bp, Homo sapiens
ctcagtttcatagtaaatgcctgccttggttcatgcatcagtactgtttccacttggcttccttggacatcactttctcttaacttttctcctacctctctggcgcttttctcttgaacactcttgataatcctaccttatctccctgccctcttaaaatgtaagtgcctcaagctcttggtatttctcttccccrtttgtgctttagtaactcagtattttctagaggctggcagcatccacatatatctccagataagacctctgctagaaaagctacactcatacatatttacccctttgctttctccatttggatgttgaataaccatgtagaaaataacaagtccaaaactcaggtcctgatttttcaccttcaaatcagcatctctcatatttttccaactcagtaaatgacagctacattcttccacatgctaaaaactcttggagacatcgtcattcaaccctttgtcttgtattctacatctagtttatcaggtaaagcagttacctgtaccttcaaaatacagttaaacaaaatcctaccctttttcttggtcctccctgctatgattctggt

SEQ ID NO: 397185 - DNA, 541 bp, Homo sapiens
cctttttcttggtcctccctgctatgattctggtccaacccactaaactcttttgtctggattattaaaatagtctccctgattcctttttgccacccacaaagccagagaaatcctgttaaaacacaagattaatgctgcataattccttttctcaaaatactttaaagagtgctgatttcwgtaacctggatatgtgtaagacacaattccaaaacagactggcttaaaaaaatatgtatcactccgctcaaggtcctgggaaccaactagactcagctgggttgttttggtttgggatctgtcatgtgattgtagtcagatggaggttgaggctgaggtcatctttatgccttccacaatcacaggttttcatgacacaactacgtgaaggctggaacagttgggatttatctggcatctcctgtcctacttgtgagatttttcaatgtggtttctccaattcagtggcctcaaggtagccatattacttacatggtagttggttttctctagagggaggatacaaagaaaacggtgg

SEQ ID NO: 397186 - DNA, 586 bp, Homo sapiens
tcttccacatgctaaaaactcttggagacatcgtcattcaaccctttgtcttgtattctacatctagtttatcaggtaaagcagttacctgtaccttcaaaatacagttaaacaaaatcctaccctttttcttggtcctccctgctatgattctggtccaacccactaaactcttttgtctggattattaaaatagtctccctgattcctttttgccacccacaaagccagagaaatcctgttaaaacacaagattaatgctgcataattccttttctcaaaatactttaaagagtgctgatttctgtwacctggatatgtgtaagacacaattccaaaacagactggcttaaaaaaatatgtatcactccgctcaaggtcctgggaaccaactagactcagctgggttgttttggtttgggatctgtcatgtgattgtagtcagatggaggttgaggctgaggtcatctttatgccttccacaatcacaggttttcatgacacaactacgtgaaggctggaacagttgggatttatctggcatctcctgtcctacttgtgagatttttcaatgtggtttctccaa

SEQ ID NO: 397187 - DNA, 269 bp, Homo sapiens
agactcagctgggttgttttggtttgggatctgtcatgtgattgtagtcagatggaggtygaggctgaggtcatctttatgccttccacaatcacaggttttcatgacacaactacgtgaaggctggaacagttgggatttatctggcatctcctgtcctacttgtgagatttttcaatgtggtttctccaattcagtggcctcaaggtagccatattacttacatggtagttggttttctctagagggaggatacaaagaaaacggtg

SEQ ID NO: 397188 - DNA, 269 bp, Homo sapiens
agactcagctgggttgttttggtttgggatctgtcatgtgattgtagtcagatggaggttgaggctgargtcatctttatgccttccacaatcacaggttttcatgacacaactacgtgaaggctggaacagttgggatttatctggcatctcctgtcctacttgtgagatttttcaatgtggtttctccaattcagtggcctcaaggtagccatattacttacatggtagttggttttctctagagggaggatacaaagaaaacggtg

SEQ ID NO: 397189 - DNA, 269 bp, Homo sapiens
agactcagctgggttgttttggtttgggatctgtcatgtgattgtagtcagatggaggttgaggctgaggtcatctttatgccttccacaatcacaggtttkcatgacacaactacgtgaaggctggaacagttgggatttatctggcatctcctgtcctacttgtgagatttttcaatgtggtttctccaattcagtggcctcaaggtagccatattacttacatggtagttggttttctctagagggaggatacaaagaaaacggtg

SEQ ID NO: 397190 - DNA, 657 bp, Homo sapiens
ctcagctgggttgttttggtttgggatctgtcatgtgattgtagtcagatggaggttgaggctgaggtcatctttatgccttccacaatcacaggttttcatgacacaactacgtgaaggctggaacarttgggatttatctggcatctcctgtcctacttgtgagatttttcaatgtggtttctccaattcagtggcctcaaggtagccatattacttacatggtagttggttttctctagagggaggatacaaagaaaacggtggaagttgtatgcttttttattaactagccttagaggtcgcatagcatcatttctaccatagtacatgtgtagaagaagtcataagtccagccaaaatgaagtcaagatgtagagacacctctcaatgggaagaaatctaaagaatatgccacagttttttaaaactaccctacacttcatctcaattaaagcaaaagccaaaattttctcaatggtctgcaatgggaaattgtagcaaatttgaccactgcttgctttttaaatcaagttggattagaacagtcacatgtatttgtttacatacaatgatggcttttgtattataatgccaaagttgagtagttgtgacagagataatgtggcctgcaaagctgaacctgtttataatctg

SEQ ID NO: 397191 - DNA, 269 bp, Homo sapiens
agactcagctgggttgttttggtttgggatctgtcatgtgattgtagtcagatggaggttgaggctgaggtcatctttatgccttccacaatcacaggttttcatgacacaactacgtgaaggctggaacagytgggatttatctggcatctcctgtcctacttgtgagatttttcaatgtggtttctccaattcagtggcctcaaggtagccatattacttacatggtagttggttttctctagagggaggatacaaagaaaacggtg

SEQ ID NO: 397192 - DNA, 657 bp, Homo sapiens
ctcagctgggttgttttggtttgggatctgtcatgtgattgtagtcagatggaggttgaggctgaggtcatctttatgccttccacaatcacaggttttcatgacacaactacgtgaaggctggaacagttgggatttatctggcatctcctgtcctacttgtgagatttttcaatgtggtttctccaattcagtggcctcaaggtagccatattacttacatggtagttggttttctctagagggaggatacaaagaaaacggtggaagttgtatgcttttttattaactagccttagargtcgcatagcatcatttctaccatagtacatgtgtagaagaagtcataagtccagccaaaatgaagtcaagatgtagagacacctctcaatgggaagaaatctaaagaatatgccacagttttttaaaactaccctacacttcatctcaattaaagcaaaagccaaaattttctcaatggtctgcaatgggaaattgtagcaaatttgaccactgcttgctttttaaatcaagttggattagaacagtcacatgtatttgtttacatacaatgatggcttttgtattataatgccaaagttgagtagttgtgacagagataatgtggcctgcaaagctgaacctgtttataatctg

SEQ ID NO: 397193 - DNA, 657 bp, Homo sapiens
ctcagctgggttgttttggtttgggatctgtcatgtgattgtagtcagatggaggttgaggctgaggtcatctttatgccttccacaatcacaggttttcatgacacaactacgtgaaggctggaacagttgggatttatctggcatctcctgtcctacttgtgagatttttcaatgtggtttctccaattcagtggcctcaaggtagccatattacttacatggtagttggttttctctagagggaggatacaaagaaaacggtggaagttgtatgcttttttattaactagccttagaggtygcatagcatcatttctaccatagtacatgtgtagaagaagtcataagtccagccaaaatgaagtcaagatgtagagacacctctcaatgggaagaaatctaaagaatatgccacagttttttaaaactaccctacacttcatctcaattaaagcaaaagccaaaattttctcaatggtctgcaatgggaaattgtagcaaatttgaccactgcttgctttttaaatcaagttggattagaacagtcacatgtatttgtttacatacaatgatggcttttgtattataatgccaaagttgagtagttgtgacagagataatgtggcctgcaaagctgaacctgtttataatctg

SEQ ID NO: 397194 - DNA, 582 bp, Homo sapiens
cctgtcctacttgtgagatttttcaatgtggtttctccaattcagtggcctcaaggtagccatattacttacatggtagttggttttctctagagggaggatacaaagaaaacggtggaagttgtatgcttttttattaactagccttagaggtcgcatagcatcatttctaccatagtacatgtgtagaagaagtcataagtccagccaaaatgaagtcaagatgtagagacacctctcaatgggaagaaatctaaagaatatgccacagttttttaaaactaccctacacttcatctcaattaaagcaaaagccaaaattttctcaatggtctgcaatgggaaattgtagcaaatttgaccactgcttgctttttaaatcaagttggattagaacagtcacatgtattkgtttacatacaatgatggcttttgtattataatgccaaagttgagtagttgtgacagagataatgtggcctgcaaagctgaacctgtttataatctggccccttagaaggcaagtttactaacccctgatctgcagttttgaacacacacaccctgctcccctatttgctc

SEQ ID NO: 397195 - DNA, 499 bp, Homo sapiens
tccccccacttataatattctcatatgctattgatttaacttatttattttatttatagtctattttcctcattaaaatgcaagctccrttacatcagggattgttgtttgttttgttctctgatgcatcccagagcctacaacagtgctgacatgtaatagttcctcaataaacatttgttgaatggacagaggcatgcatgcagtgactaatgaaataacacaaaataaatatgtaaaattcataggcaatattataaaatgaaatgtgttggctgtttggggttatataagtggaacatagaagtgaattaaagctttaagtaagagggaagatcctgatgttagtattgactcccttttccccacgatgaatgatgttctgaagatcttgatgctaacattagtttaagctcattcaatactgtcataggagagagaaaatcatgtgagatctttgatattaatattccaatccctcacctctgtctgtttgaac

SEQ ID NO: 397196 - DNA, 499 bp, Homo sapiens
tccccccacttataatattctcatatgctattgatttaacttatttattttatttatagtctattttcctcattaaaatgcaagctccgttacatcagggattgttgtttgttttgttctctgatgcatcccagagcctacaacagtgctgacatgtaatagktcctcaataaacatttgttgaatggacagaggcatgcatgcagtgactaatgaaataacacaaaataaatatgtaaaattcataggcaatattataaaatgaaatgtgttggctgtttggggttatataagtggaacatagaagtgaattaaagctttaagtaagagggaagatcctgatgttagtattgactcccttttccccacgatgaatgatgttctgaagatcttgatgctaacattagtttaagctcattcaatactgtcataggagagagaaaatcatgtgagatctttgatattaatattccaatccctcacctctgtctgtttgaac

SEQ ID NO: 397197 - DNA, 499 bp, Homo sapiens
tccccccacttataatattctcatatgctattgatttaacttatttattttatttatagtctattttcctcattaaaatgcaagctccgttacatcagggattgttgtttgttttgttctctgatgcatcccagagcctacaacagtgctgacatgtaatagttcctcaataaacatttgttgaatggacagaggcatgcatgcagtgactaatgaaataacacaaaataaatatgtaaaattcataggcaatattataaaatgaaatgtgttggctgyttggggttatataagtggaacatagaagtgaattaaagctttaagtaagagggaagatcctgatgttagtattgactcccttttccccacgatgaatgatgttctgaagatcttgatgctaacattagtttaagctcattcaatactgtcataggagagagaaaatcatgtgagatctttgatattaatattccaatccctcacctctgtctgtttgaac

SEQ ID NO: 397198 - DNA, 499 bp, Homo sapiens
tccccccacttataatattctcatatgctattgatttaacttatttattttatttatagtctattttcctcattaaaatgcaagctccgttacatcagggattgttgtttgttttgttctctgatgcatcccagagcctacaacagtgctgacatgtaatagttcctcaataaacatttgttgaatggacagaggcatgcatgcagtgactaatgaaataacacaaaataaatatgtaaaattcataggcaatattataaaatgaaatgtgttggctgtttggggttatataagtggaacatagaagtsaattaaagctttaagtaagagggaagatcctgatgttagtattgactcccttttccccacgatgaatgatgttctgaagatcttgatgctaacattagtttaagctcattcaatactgtcataggagagagaaaatcatgtgagatctttgatattaatattccaatccctcacctctgtctgtttgaac

SEQ ID NO: 397199 - DNA, 506 bp, Homo sapiens
atccctcacctctgtctgtttgaactcatcaatcactttgggaataaaactggaatagtgtacaaattcatgttgaggtgaggkgttttaatatagaagatattttcttctttcccttgatgtctcagaataaaatgatgaaaccagaaggagagagaaactttgatttttgtatttcaaatttctattatttattatttaagagtatatgatttggagtcagggtaaaattgagtcctcacctcaactctgtaatttcacagctatttgttcttagaaaaattcctcaatgtttcagatcctcaagttctttctcgttgagaaaatgaagacggtaatatccatctcatgcaattttaggaaaattaaataaagttagatattttgaaaaatgtactaaatttagaatagtacctggtacatatcttctcagtaatgataaacagaatattttcccacatctattttcaataataatgaccataatagacagaaatttttcattt

SEQ ID NO: 397200 - DNA, 631 bp, Homo sapiens
caatccctcacctctgtctgtttgaactcatcaatcactttgggaataaaactggaatagtgtacaaattcatgttgaggtgaggggttttaatatagaagatattttcttctttcccttgatgtctcagaataaaatgatgaaaccagaaggagagagaaactttgatttttgtatttcaaatttctattatttattatttaagagtatatgatttggagtcagggtaaaattgagtcctcacctcaactctgtaatttcacagctatttgttcttagaaaaattcctcaatgtttcagatcctcaagttctttctcgttgagaaaatgaagacggtaatatccatctcatgcaattttaggaaaattaaataaagttagatattttgaaaaatgtacyaaatttagaatagtacctggtacatatcttctcagtaatgataaacagaatattttcccacatctattttcaataataatgaccataatagacagaaatttttcatttacttgcaatgaccttaaaaaactaaattcaacataatgccacctctagaaagaagtccattaatagtggacaaatgtctacaaaatataacttacataaaaagaagtaagagataataaaaca

SEQ ID NO: 397201 - DNA, 631 bp, Homo sapiens
caatccctcacctctgtctgtttgaactcatcaatcactttgggaataaaactggaatagtgtacaaattcatgttgaggtgaggggttttaatatagaagatattttcttctttcccttgatgtctcagaataaaatgatgaaaccagaaggagagagaaactttgatttttgtatttcaaatttctattatttattatttaagagtatatgatttggagtcagggtaaaattgagtcctcacctcaactctgtaatttcacagctatttgttcttagaaaaattcctcaatgtttcagatcctcaagttctttctcgttgagaaaatgaagacggtaatatccatctcatgcaattttaggaaaattaaataaagttagatattttgaaaaatgtactaaatttagaatagtacctggtacatatcttctcagtaatgataaacagaatattttcccacatctattttcaatartaatgaccataatagacagaaatttttcatttacttgcaatgaccttaaaaaactaaattcaacataatgccacctctagaaagaagtccattaatagtggacaaatgtctacaaaatataacttacataaaaagaagtaagagataataaaaca

SEQ ID NO: 397202 - DNA, 631 bp, Homo sapiens
caatccctcacctctgtctgtttgaactcatcaatcactttgggaataaaactggaatagtgtacaaattcatgttgaggtgaggggttttaatatagaagatattttcttctttcccttgatgtctcagaataaaatgatgaaaccagaaggagagagaaactttgatttttgtatttcaaatttctattatttattatttaagagtatatgatttggagtcagggtaaaattgagtcctcacctcaactctgtaatttcacagctatttgttcttagaaaaattcctcaatgtttcagatcctcaagttctttctcgttgagaaaatgaagacggtaatatccatctcatgcaattttaggaaaattaaataaagttagatattttgaaaaatgtactaaatttagaatagtacctggtacatatcttctcagtaatgataaacagaatattttcccacatctattttcaataataatgaccataatagacagaaatttttcatttacttgcaatgaccttaaaaaactaaattcaacataatgccacctctagaaagaagtccattaatagtggacaaatgtctacwaaatataacttacataaaaagaagtaagagataataaaaca

SEQ ID NO: 397203 - DNA, 398 bp, Homo sapiens
agtggacaaatgtctacaaaatataacttacataaaaagaagtaagagataataaaacaaatggggtgaaacaccaagacagttaaaagtatttgtctttatgacttgcccatttgagcagaaattcttttctggatgtcagaatgtaaggaaagtttagatgaaaaatttcagtggttcaattagttatagattcagagtttttgtttatttgttttgtgctcagttggttcttgtgtttgtagacatctctcacattacaaaaataataacagagagaaaagactaygttcttcaaaacaaaaagctactcagtagtgactggcacagaaaccaaatctcatggattatttaaattcaatcaaatgttgtttattgatatcacttatgtgtcgata

SEQ ID NO: 397204 - DNA, 398 bp, Homo sapiens
agtggacaaatgtctacaaaatataacttacataaaaagaagtaagagataataaaacaaatggggtgaaacaccaagacagttaaaagtatttgtctttatgacttgcccatttgagcagaaattcttttctggatgtcagaatgtaaggaaagtttagatgaaaaatttcagtggttcaattagttatagattcagagtttttgtttatttgttttgtgctcagttggttcttgtgtttgtagacatctctcacattacaaaaataataacagagagaaaagactatgttcttcaaaacaaaaagctactcagtagtgastggcacagaaaccaaatctcatggattatttaaattcaatcaaatgttgtttattgatatcacttatgtgtcgata

SEQ ID NO: 397205 - DNA, 598 bp, Homo sapiens
atgttcttcaaaacaaaaagctactcagtagtgactggcacagaaaccaaatctcatggattatttaaattcaatcaaatgttgtttattgatatcacttatgtgtcgatattatgggaagcattgaagataaaatagtacataaaatacacttctgtctttcttaaagttcaatgatttgttgcctaactttgagaaatactacccttcaccacagaataacaattcacatcagcataactaggtctyggagaagtactacaataaagaaactgtgtaacttccttatcactgagtgtctcaaacttatttgaggagagtgcttctttgtgtaacatccacaactaatatgctatctaacacattcatgtccaatttcatcatatcctatctccactgattagagatccttcaagtaaccctgaggttatgtgctttacgtatttggcttctgactaagcattgatttagagatcagttttctcagcaaaactgactttgaaaaccacaagcaagaactataacctttgatcttcacaggcatatgttgagggaaacaaatgactggcatgaggttgtgcagctggtgaatttgaaa

SEQ ID NO: 397206 - DNA, 598 bp, Homo sapiens
atgttcttcaaaacaaaaagctactcagtagtgactggcacagaaaccaaatctcatggattatttaaattcaatcaaatgttgtttattgatatcacttatgtgtcgatattatgggaagcattgaagataaaatagtacataaaatacacttctgtctttcttaaagttcaatgatttgttgcctaactttgagaaatactacccttcaccacagaataacaattcacatcagcataactaggtctcggagaagtactrcaataaagaaactgtgtaacttccttatcactgagtgtctcaaacttatttgaggagagtgcttctttgtgtaacatccacaactaatatgctatctaacacattcatgtccaatttcatcatatcctatctccactgattagagatccttcaagtaaccctgaggttatgtgctttacgtatttggcttctgactaagcattgatttagagatcagttttctcagcaaaactgactttgaaaaccacaagcaagaactataacctttgatcttcacaggcatatgttgagggaaacaaatgactggcatgaggttgtgcagctggtgaatttgaaa

SEQ ID NO: 397207 - DNA, 598 bp, Homo sapiens
atgttcttcaaaacaaaaagctactcagtagtgactggcacagaaaccaaatctcatggattatttaaattcaatcaaatgttgtttattgatatcacttatgtgtcgatattatgggaagcattgaagataaaatagtacataaaatacacttctgtctttcttaaagttcaatgatttgttgcctaactttgagaaatactacccttcaccacagaataacaattcacatcagcataactaggtctcggagaagtactacaataaagaaactgtgtaacttccttatcactgagtgtctcaaacttatttgaggagagtgcttctttgtgtaacatccacaactaatatgctatctaacacattcatgtccaatttcatcatatcctatctccactgattagagatccttcaagtaaccctgaggttatgtgytttacgtatttggcttctgactaagcattgatttagagatcagttttctcagcaaaactgactttgaaaaccacaagcaagaactataacctttgatcttcacaggcatatgttgagggaaacaaatgactggcatgaggttgtgcagctggtgaatttgaaa

SEQ ID NO: 397208 - DNA, 440 bp, Homo sapiens
  misc_feature (1)...(440): n = A,T,C or G
cctgctttggcccatccctgccctggccccaccatgggcctgcctgttctgccctctcctggcactgaccttgccctgtcatggcccagtggtgccattgccctgcyttaccctgcgctggttgtgccttggccccgcttggtgctggccgctccctggacctgccctgaccctgccttggcttttgccctgccctcactatggcctggccctggcnctagccctggtcctgccatatccctggccctgcccttatccaggccttgcccctgctgctgccctggccctggcctggaacctggtcctgtcaaggactgccctgactctgccatggccctggccctgctctgccttgttcctggccctgacccagacccagacccattcctggctctgcactggcctttccctggccctgagctggcagtggtctgcccctg

SEQ ID NO: 397209 - DNA, 537 bp, Homo sapiens
aaaaactaaagcattcaaagtatcatcaagtgctttaaaagtcacattttcagtattctcatcatcacacaaacacttaaattgaaatgacaaattattcagtatggctggtcagaaragagatttgactcagagacatttgttactagttgttatctgttattataggaattgccataatgagacaagctcactcatcatggatttctattggtaagaagaaaaataagggatttttgtgagaagacaatgctgtccttttaatgttagcatcaaaaggtccaggatgaaacttaattatttttatcttttcatacaaccatttagagagttatcatgaatgagctgccttttgaggagggatcccattttataatctagttagcttcttttcccaagaaattgattgacctaagtgccatactattttgagatgatcaatttggattggaaatttttagaaacatgttatttctaatttcttgctcctttctcaggtagaagcagaatagtagctcacttgcataatgcttggca

SEQ ID NO: 397210 - DNA, 537 bp, Homo sapiens
aaaaactaaagcattcaaagtatcatcaagtgctttaaaagtcacattttcagtattctcatcatcacacaaacacttaaattgaaatgacaaattattcagtatggctggtcagaagagagatttgactcagagacatttgttactagttgttatctgttattataggaattgccataatgagacaagctcactcatcatggatttctattggtaagaagaaaaataagggatttttgtgagaagacaatgctgtccttttaatgttagcatcaaaaggtccaggatgaaacttaattatttttatmttttcatacaaccatttagagagttatcatgaatgagctgccttttgaggagggatcccattttataatctagttagcttcttttcccaagaaattgattgacctaagtgccatactattttgagatgatcaatttggattggaaatttttagaaacatgttatttctaatttcttgctcctttctcaggtagaagcagaatagtagctcacttgcataatgcttggca

SEQ ID NO: 397211 - DNA, 537 bp, Homo sapiens
aaaaactaaagcattcaaagtatcatcaagtgctttaaaagtcacattttcagtattctcatcatcacacaaacacttaaattgaaatgacaaattattcagtatggctggtcagaagagagatttgactcagagacatttgttactagttgttatctgttattataggaattgccataatgagacaagctcactcatcatggatttctattggtaagaagaaaaataagggatttttgtgagaagacaatgctgtccttttaatgttagcatcaaaaggtccaggatgaaacttaattatttttatcttttcatacaaccatttagagagttatcatgaatgagctgccttttgaggagggatcccattttataatctagttagcttcttttcccaagaaattgattgacctaagtgccatactattttgakatgatcaatttggattggaaatttttagaaacatgttatttctaatttcttgctcctttctcaggtagaagcagaatagtagctcacttgcataatgcttggca

SEQ ID NO: 397212 - DNA, 440 bp, Homo sapiens
  misc_feature (1)...(440): n = A,T,C or G
cctgctttggcccatccctgccctggccccaccatgggcctgcctgttctgccctctcctggcactgaccttgccctgtcatggcccagtggtgccattgccctgccttaccytgcgctggttgtgccttggccccgcttggtgctggccgctccctggacctgccctgaccctgccttggcttttgccctgccctcactatggcctggccctggcnctagccctggtcctgccatatccctggccctgcccttatccaggccttgcccctgctgctgccctggccctggcctggaacctggtcctgtcaaggactgccctgactctgccatggccctggccctgctctgccttgttcctggccctgacccagacccagacccattcctggctctgcactggcctttccctggccctgagctggcagtggtctgcccctg

SEQ ID NO: 397213 - DNA, 669 bp, Homo sapiens
cttagcatccaaacttgtacattgtacctttttttgccttattacctataatactttttaaattttgtgtgtttacttttctgtctcacagaataccataagcattccttgtggataaaaatgttatcttttatctctgtatccttaactatattctacaaatgtttgctgtaagaattaacaaaaacaaataaataaattgttaaactacatttgttttttttaaacatagcatctgtgtgaagaaactactgaattcaatatgcatagtgtttaaatgatgttgcaacatggccagcttggagtcctcatagcgtgtcgagttctgaatattcacacatcttacagggcatctagttttccccagagcaagcactccaagcaataggaaatgggagcagamtctgcttaaaatataaactttcagctgtcaccatgtcatttctaccacattttactgatgaagcagtcacagagctaacccaggttcaaagagagaagcaataaaccccatcttttatgcagaaagtgagaaagacattgcagtcatcattaattacccacagaccatttaatctatatcctcattaatgacattttctcagcttgacatactcttggctttgacaattaacaaaaacagaagaaatggaagaaaaaaaccaatat

SEQ ID NO: 397214 - DNA, 669 bp, Homo sapiens
cttagcatccaaacttgtacattgtacctttttttgccttattacctataatactttttaaattttgtgtgtttacttttctgtctcacagaataccataagcattccttgtggataaaaatgttatcttttatctctgtatccttaactatattctacaaatgtttgctgtaagaattaacaaaaacaaataaataaattgttaaactacatttgttttttttaaacatagcatctgtgtgaagaaactactgaattcaatatgcatagtgtttaaatgatgttgcaacatggccagcttggagtcctcatagcgtgtcgagttctgaatattcacacatcttacagggcatctagttttccccagagcaagcactccaagcaataggaaatgggagcagaatctgcttaaaatataaactttcagctgtcaccatgtcatttctaccacattttactgatgaagcagtcacagagctaacccaggttcaaagagagaagcaataaaccccatcttttatgcagaaagtgagaaagacattgcagtcatcattaattacccacagaccatttaatctatrtcctcattaatgacattttctcagcttgacatactcttggctttgacaattaacaaaaacagaagaaatggaagaaaaaaaccaatat

SEQ ID NO: 397215 - DNA, 618 bp, Homo sapiens
gtcaccatgtcatttctaccacattttactgatgaagcagtcacagagctaacccaggttcaaagagagaagcaataaaccccatcttttatgcagaaagtgagaaagacattgcagtcatcattaattacccacagaccatttaatctatatcctcattaatgacattttctcagcttgacatactcttggctttgacaattaacaaaaacagaagaaatrgaagaaaaaaaccaatatggtatgcagtactcataattacattttcatttgtgttgctatccttgattactatacatataagaaattatctctcaaggaaataaatgatccttgtattgcttctggagatgaaaatcaatgagtttaccttttgctacaaatatagccactctttttttttcttgtagacattaaacaccaatttgtggagacagttttgcatatacaaaggaatctgagcagcatacctgactcaatattaataaatgaagttgaaataggacctgtgattggtctgtgatgacagaaagcaaatagcttttcctcctgatacaactaaaagattattttgctaagcatttatttcaaggattggcaaagaatgtgttataacac

SEQ ID NO: 397216 - DNA, 534 bp, Homo sapiens
ataaaagggagtttataaaacttatagcatcattgtaattgagaaatgtattttgaaaaatggaacagaataataggtttttcatagattaaaataaaccacagtgtttaaatattacatgtatttatgtagttttaaagacatggaaaaagtgcatagcaaaattaaagttgacatagaaactatactttacagatcaaacttagaccaactagaatagaagggcaaggagagtctgcaatgagttgattagctctgctgcaggaaattgaccaactgcaagtgaactacttgggggatcgacgttttatrtggatctttgtgaagcacaaaacaagatcagcaaatcataaagaaacaaataatgaaagctgacttagttggttcaggctgctataacacattactgggtggcttaaacaacagaaatgtatttcttacagttctggaggctgaaagtctgaaagcagggtgtcagcctggttaggttctgatgatcaccttcttccatggcttcctcacatggtggaaaaa

SEQ ID NO: 397217 - DNA, 527 bp, Homo sapiens
acatcccacttgatcatgatgaattatctttttaatgtattactgaatttgattcactggtattttgttgaggatttttgcatcaatattagagatactggcctgtagtttccttctttgatgcttttatctgatttttgtatcacagtaataatggtctcatagaataagtttggaagtattccctcctgtttttcaaaatagtttgagcaggattcgtactaggtctttaaattgtttgctgtgaagccatcagcagtgaagacatcagttcctgggcttttctttactgggagactttttctgatggcttcaatctcattacttgttaccaatctgttctggtcttggatgttttcattgtttaacctaagtaggttgtatrcatctaggaatttgccaatttctactaggctttccaatttattggcatataatagccagttatgatcctttgaatttctgaagtattagttgtaatgtctcctttttttaatctgttgattttatttatttgaatcttgtct

SEQ ID NO: 397218 - DNA, 600 bp, Homo sapiens
ataactaccagtacacagctctgcagggaaaaaggcaataattcatgttaggtatatccagtaactaatgataatcaacatgctttaaggaaaatgaagataatatttctttatggaaaagaggtaaacgaacttctttatataatatgtttaaaattctctttttagtattcagattttaatgaactgcagatcactgcaattcttcatgttaaatcacatctgggattgttccttaatcaagtaaattgggttaaaatattgcatttttattgttagcttaatagcttaaagagatattaaacatttaattattaaccttgacatgaaagaattggagagatttcttagatgatttaaggatttgaaagttctctcttctgagtgaagtttatatgttgggataaagcaaatctaatgagctgtcttgaaatgggcatctgactaattgaaagagactaataatatagcatacatatatatccaatgttacttaaggaaatcattcatagaagaatagatgttttaytttaaaaatcaactaatggatgttaaatattaataaactcattataactgaataacagataggttagccta

SEQ ID NO: 397219 - DNA, 600 bp, Homo sapiens
ataactaccagtacacagctctgcagggaaaaaggcaataattcatgttaggtatatccagtaactaatgataatcaacatgctttaaggaaaatgaagataatatttctttatggaaaagaggtaaacgaacttctttatataatatgtttaaaattctctttttagtattcagattttaatgaactgcagatcactgcaattcttcatgttaaatcacatctgggattgttccttaatcaagtaaattgggttaaaatattgcatttttattgttagcttaatagcttaaagagatattaaacatttaattattaaccttgacatgaaagaattggagagatttcttagatgatttaaggatttgaaagttctctcttctgagtgaagtttatatgttgggataaagcaaatctaatgagctgtcttgaaatgggcatctgactaattgaaagagactaataatatagcatacatatatatccaatgttacttaaggaaatcattcatagaagaatagatgttttactttaaaaatcaactaatggatgttaaatattaataaactcatyataactgaataacagataggttagccta

SEQ ID NO: 397220 - DNA, 535 bp, Homo sapiens
ctataatagcacacaacagcaagtattagattccacaaacataatatttgggaaataaaatgttatggactccaagagaactgtatatatttctaactctattcaaaaatgtcctgtaactctagatagaatttccctgggctatagaaaagcacagatggtattagtgtttattagatccatgaagcttgctttaaaaaatatatttgaaacactgaagttctgctaatatggcaagaatatggagatcagaaacaacaatgcaaagtagacattccttgtgggtggaagaaaataaaaatatttayattaaccaagtctaagtgcaacagctcaattaatacaaaacattaatttattttgggcttggttataaaattagttttagattgagcttataaagtaattaggctaatattgtctcctctgagaggaacctggaacagtgctataccatcagtccagttcattgtctaaagaaagaaactgatgcataaacagaaaaaaaaaacaatggattgtgataatttctcaa

SEQ ID NO: 397221 - DNA, 562 bp, Homo sapiens
ggactccaagagaactgtatatatttctaactctattcaaaaatgtcctgtaactctagatagaatttccctgggctatagaaaagcacagatggtattagtgtttattagatccatgaagcttgctttaaaaaatatatttgaaacactgaagttctgctaatatggcaagaatatggagatcagaaacaacaatgcaaagtagacattccttgtgggtggaagaaaataaaaatatttatattaaccaagtctaagtgcaacagctcaattaatacaaaacattaatttattttgggcttggttrtaaaattagttttagattgagcttataaagtaattaggctaatattgtctcctctgagaggaacctggaacagtgctataccatcagtccagttcattgtctaaagaaagaaactgatgcataaacagaaaaaaaaaacaatggattgtgataatttctcaaaaaatgtatgatgaagtgttacagcagcagagtaggagcagcacttgagatttgagaagatcctcaaagaagagtttagcccatgtattgaaa

SEQ ID NO: 397222 - DNA, 562 bp, Homo sapiens
ggactccaagagaactgtatatatttctaactctattcaaaaatgtcctgtaactctagatagaatttccctgggctatagaaaagcacagatggtattagtgtttattagatccatgaagcttgctttaaaaaatatatttgaaacactgaagttctgctaatatggcaagaatatggagatcagaaacaacaatgcaaagtagacattccttgtgggtggaagaaaataaaaatatttatattaaccaagtctaagtgcaacagctcaattaatacaaaacattaatttattttgggcttggttataaaattagttttagattgagcttataaagtaattaggctaatattgtctcctctgagaggaacctggaacagtgctataccatcwgtccagttcattgtctaaagaaagaaactgatgcataaacagaaaaaaaaaacaatggattgtgataatttctcaaaaaatgtatgatgaagtgttacagcagcagagtaggagcagcacttgagatttgagaagatcctcaaagaagagtttagcccatgtattgaaa

SEQ ID NO: 397223 - DNA, 553 bp, Homo sapiens
aaaaaaaaacaatggattgtgataatttctcaaaaaatgtatgatgaagtgttacagcagcagagtaggagcagcacttgagatttgagaagatcctcaaagaagagtttagcccatgtattgaaagataagtgggaatttgtcaatgagaggtgaaagaaggcattctgtgcatatctgtgatttcccaatggctaagatatgaagtacttgcaagaatgaagaagagtgatgattagagagtttaaaaacaacttggattcatattatatgtcttggtaaaaaattgatttttatctctcttggtcttgggaatcagtagaagcctttatttttttcccttgaataagattttattttgaaatagtttaagataaacaagtttttaaaatagtacagaggttcccaaagaaacttgtaagcaaagaagttcatccaaaccaaaaaattgatayaggtatgctattaactagactacagatcatactgtgatttcatctacttttcagtcatcttttcttcccttagtatatagttctatagattccatgac

SEQ ID NO: 397224 - DNA, 545 bp, Homo sapiens
tatatagttctatagattccatgacatatatagattagtgtatcactacaatcaagatagagtactgttctatcaacataaagaaatttattttttaatagtcacaaccctccacttcctcataccataacccctaataaccactgrtctgttctccatccctacatttcatcatatttaggcttttaaataaatagaatcacacagtaagtaaccttttgagataggcttttttcccacttagcctcaatatatattcaagttattgtgtctattaatagcttattctttttcatttctgagtagtattctgttgtaatgatgtaccacagtttgtttattcattcattcattgaacgacaattgagtttttccagattagggctattacaaataaagttcctatgcattttagtgttctggtttttcgtgaatgtaagtttccatttctctgagataaacactaaagattgtgatttatatgtcatgtgataaagatatggttaactttataaaagactgccaaactgtttttcagaataaat

SEQ ID NO: 397225 - DNA, 545 bp, Homo sapiens
tatatagttctatagattccatgacatatatagattagtgtatcactacaatcaagatagagtactgttctatcaacataaagaaatttattttttaatagtcacaaccctccacttcctcataccataacccctaataaccactgatctgttctccatcmctacatttcatcatatttaggcttttaaataaatagaatcacacagtaagtaaccttttgagataggcttttttcccacttagcctcaatatatattcaagttattgtgtctattaatagcttattctttttcatttctgagtagtattctgttgtaatgatgtaccacagtttgtttattcattcattcattgaacgacaattgagtttttccagattagggctattacaaataaagttcctatgcattttagtgttctggtttttcgtgaatgtaagtttccatttctctgagataaacactaaagattgtgatttatatgtcatgtgataaagatatggttaactttataaaagactgccaaactgtttttcagaataaat

SEQ ID NO: 397226 - DNA, 545 bp, Homo sapiens
tatatagttctatagattccatgacatatatagattagtgtatcactacaatcaagatagagtactgttctatcaacataaagaaatttattttttaatagtcacaaccctccacttcctcataccataacccctaataaccactgatctgttctccatccctacatttcatcatatttaggcttttaaataaatagaatcacacagtaagtaaccttttgagataggcttttttcccacttagcctcaatatatattcaagttattgtgtctattaatagcttattctttttcatttctgagtagtattctgttgtaatgatgtaccacagtttgtttattcattcattcattgaacgacaattgagtttttccagattagggctattacaaataaagttcctatgcattttagtgttctggtttttcgtgaatgtaagtttccatttctctgagataaacactaaagattgtgatttmtatgtcatgtgataaagatatggttaactttataaaagactgccaaactgtttttcagaataaat

SEQ ID NO: 397227 - DNA, 416 bp, Homo sapiens
tctttttcatttctgagtagtattctgttgtaatgatgtaccacagtttgtttattcattcattcattgaacgacaattgagtttttccagattagggctattacaaataaagttcctatgcattttagtgttctggtttttcgtgaatgtaagtttccatttctctgagataaacactaaagattgtgatttatatgtcatgtgataaagatatggttaactttataaaagactgccaaackgtttttcagaataaatgtatcgatttacattctcaccaccaatgcaggagagatccagttgttccacatatttaccagcacttgatattgtcagcatggttttacttttcccattctattaagtgtatagtggcatgttattgtagctttactttgcttttctctaatagcta

SEQ ID NO: 397228 - DNA, 534 bp, Homo sapiens
aaaaaagtatgtagataatggctatagtaatcaaaattaagaataatagagggaaatagtttgaagagaggaaatgatagatatttttggccatattaaaactgaggtatctacaggacwtaccaaaatatctaactcagtaggaaaaatattattcagaaaggacatttggtttatgaagaataaagacctattggattaagtggaatgttttacttaaaagtagtttcctactcttttcaggaatattattggcaattaatctttgacctctaagccagttcacattaaaaataagaccacaccaaaagacattttagattgagaaactaatgtgaacaattcatggggagaaaattgaaatatggcaatagtctattgtacagctgtcttgaaggggaatttgaaggccataactgtcgaaggattttcctaacttacagaagcctgtgtacactaccagaagaattgatgtttgcaattccacccactgtgtactttttcatgatgagagaaatcattcaggacaacgca

SEQ ID NO: 397229 - DNA, 344 bp, Homo sapiens
gtagtttcctactcttttcaggaatattattggcaattaatcwttgacctctaagccagttcacattaaaaataagaccacaccaaaagacattttagattgagaaactaatgtgaacaattcatggggagaaaattgaaatatggcaatagtctattgtacagctgtcttgaaggggaatttgaaggccataactgtcgaaggattttcctaacttacagaagcctgtgtacactaccagaagaattgatgtttgcaattccacccactgtgtactttttcatgatgagagaaatcattcaggacaacgcagttagcaaaccataactcaaaatcgatagacc

SEQ ID NO: 397230 - DNA, 344 bp, Homo sapiens
gtagtttcctactcttttcaggaatattattggcaattaatctttgacctctaagccagttcacattaaaaataagaccacaccaaaagacattttagattgagaaactaatgtgaacaattcatggggagaaaattgaaatatggcaatagtctattgtacagctgtcttgaaggggaatttgaaggccataactgtcgaaggattttcctaacttacagaagcctgtgtacactaccagaagaattgatgtttgcarttccacccactgtgtactttttcatgatgagagaaatcattcaggacaacgcagttagcaaaccataactcaaaatcgatagacc

SEQ ID NO: 397231 - DNA, 585 bp, Homo sapiens
ataaataaaagaaaaaagcaatgactactaaaatagaatataaaacaataaagaaaacctgtagtaaactaagaaattgttgagaaaaatattattggtattttcaaaaggcaaaattgaagtggcagtattaaaaaagggttgttgcacactgtgtatatttaaaaggcaaattagaaaaatggcttaattacctatgtagcttattcctgcagaagaaacatacctcaaaaatagaatgrgtcaactcatggttaataaatacatcaggagaaacaggacattccagcaatgaaagaaacatcattaaggaaacaattgaggacaaacatcctgactaatgaaaagcccaattctttgatatcacacacagctcaattcaggaatgatattccaaaaaataatcaaagtgcctttagaactattacccatgcttttactttcagaaggcattttgtagttacaaaagaaagaacagagatatttgtaattgtatctataaggatgcaaactgccctctgccctaaaatctttaatgacagtaccactgctgtaaatatatgtaaacatactttagacacatgc

SEQ ID NO: 397232 - DNA, 585 bp, Homo sapiens
ataaataaaagaaaaaagcaatgactactaaaatagaatataaaacaataaagaaaacctgtagtaaactaagaaattgttgagaaaaatattattggtattttcaaaaggcaaaattgaagtggcagtattaaaaaagggttgttgcacactgtgtatatttaaaaggcaaattagaaaaatggcttaattacctatgtagcttattcctgcagaagaaacatacctcaaaaatagaatgggtcaactcatggttaataaatacatcaggagaaacaggacattccagcaatgaaagaamcatcattaaggaaacaattgaggacaaacatcctgactaatgaaaagcccaattctttgatatcacacacagctcaattcaggaatgatattccaaaaaataatcaaagtgcctttagaactattacccatgcttttactttcagaaggcattttgtagttacaaaagaaagaacagagatatttgtaattgtatctataaggatgcaaactgccctctgccctaaaatctttaatgacagtaccactgctgtaaatatatgtaaacatactttagacacatgc

SEQ ID NO: 397233 - DNA, 585 bp, Homo sapiens
ataaataaaagaaaaaagcaatgactactaaaatagaatataaaacaataaagaaaacctgtagtaaactaagaaattgttgagaaaaatattattggtattttcaaaaggcaaaattgaagtggcagtattaaaaaagggttgttgcacactgtgtatatttaaaaggcaaattagaaaaatggcttaattacctatgtagcttattcctgcagaagaaacatacctcaaaaatagaatgggtcaactcatggttaataaatacatcaggagaaacaggacattccagcaatgaaagaaacatcattaaggaaacaattgaggacaaacatcctgactaatgaaaagcccaattctttgatatcrcacacagctcaattcaggaatgatattccaaaaaataatcaaagtgcctttagaactattacccatgcttttactttcagaaggcattttgtagttacaaaagaaagaacagagatatttgtaattgtatctataaggatgcaaactgccctctgccctaaaatctttaatgacagtaccactgctgtaaatatatgtaaacatactttagacacatgc

SEQ ID NO: 397234 - DNA, 440 bp, Homo sapiens
  misc_feature (1)...(440): n = A,T,C or G
cctgctttggcccatccctgccctggccccaccatgggcctgcctgttctgccctctcctggcactgaccttgccctgtcatggcccagtggtgccattgccctgccttaccctgcgctggttgtgccttggccccgcttggtgctggccgctccctggacctgccctgaccctgccttggcttttgccctgccctcactatggcctggccctggcnctagccctggycctgccatatccctggccctgcccttatccaggccttgcccctgctgctgccctggccctggcctggaacctggtcctgtcaaggactgccctgactctgccatggccctggccctgctctgccttgttcctggccctgacccagacccagacccattcctggctctgcactggcctttccctggccctgagctggcagtggtctgcccctg

SEQ ID NO: 397235 - DNA, 575 bp, Homo sapiens
cacttaataacttttgttaacgtaacaatacagygtgagcgttcctggggctatgcctgacccaaagcagacacttagtaaaatgtctgtggaacctaaatttattttaagatacaattggaatctaaactaaacgagttttcaaattcagaatcaggcatatttgctgcaaagcattatgggtctcatttccatttccaaatccaccaagtccatcctttcacgcatcatgttactcagggataaagcacatctaagtgaaacagaagttaaatctgctctttcataacccagagacattaattacaatggaatagcatgataaacaccgtgaacgatatggagattaatagaaaaaatatgaaaagaaaatgacagcagctaggaagaaacaaaaaggatgggtggaaatatgggaggttggcctccaaagggcaagtaaagtagaactaaaataaaacctggtgattttgatctgcatgtgtaattaatatagtttctggtggggggtgatgggagaaatggggataaagaaaagccctgagtagcaaccttcttgcctgaattgtgaaggc

SEQ ID NO: 397236 - DNA, 575 bp, Homo sapiens
cacttaataacttttgttaacgtaacaatacagcgtgagcrttcctggggctatgcctgacccaaagcagacacttagtaaaatgtctgtggaacctaaatttattttaagatacaattggaatctaaactaaacgagttttcaaattcagaatcaggcatatttgctgcaaagcattatgggtctcatttccatttccaaatccaccaagtccatcctttcacgcatcatgttactcagggataaagcacatctaagtgaaacagaagttaaatctgctctttcataacccagagacattaattacaatggaatagcatgataaacaccgtgaacgatatggagattaatagaaaaaatatgaaaagaaaatgacagcagctaggaagaaacaaaaaggatgggtggaaatatgggaggttggcctccaaagggcaagtaaagtagaactaaaataaaacctggtgattttgatctgcatgtgtaattaatatagtttctggtggggggtgatgggagaaatggggataaagaaaagccctgagtagcaaccttcttgcctgaattgtgaaggc

SEQ ID NO: 397237 - DNA, 575 bp, Homo sapiens
cacttaataacttttgttaacgtaacaatacagcgtgagcgttcctggggctatgcctgacccaaagcagacacttagtaaaatgtctgtggaacctaaatttattttaagatacaattggaatctaaactaaacgagttttyaaattcagaatcaggcatatttgctgcaaagcattatgggtctcatttccatttccaaatccaccaagtccatcctttcacgcatcatgttactcagggataaagcacatctaagtgaaacagaagttaaatctgctctttcataacccagagacattaattacaatggaatagcatgataaacaccgtgaacgatatggagattaatagaaaaaatatgaaaagaaaatgacagcagctaggaagaaacaaaaaggatgggtggaaatatgggaggttggcctccaaagggcaagtaaagtagaactaaaataaaacctggtgattttgatctgcatgtgtaattaatatagtttctggtggggggtgatgggagaaatggggataaagaaaagccctgagtagcaaccttcttgcctgaattgtgaaggc

SEQ ID NO: 397238 - DNA, 513 bp, Homo sapiens
ttcaggttccgttgtcaacctaccccatatgtataaaccatctgtttgtcatgttttggctttatccaaacatcttcacaaagaggccatcygttcccttcttttagatatctatttatggcactttctctcttatctattttacaacatttttgcatatgtcaaaaattcaattactagtcacatattagtatgtcgtctactcaggaggagtcttagtgatccaaagtgcatggatagtaccgagagactgatagatctatctaaaatgaagggtatggacattgccataaaagcctcacaatgcatgaaatggataatagatgtgagattccctggggagctgtgtgcacgtgacttccaaaacgctgtcatttcactatgtagaaggacaatatgaatttacatggaaatttatttccaccatcagtaatatattcctattgcaaatgtacattttagagaaagtatattttcagttgaagtgaaaaaaaagagatgcacaaatagatg

SEQ ID NO: 397239 - DNA, 549 bp, Homo sapiens
tatgtagaaggacaatatgaatttacatggaaatttatttccaccatcagtaatatattcctattgcaaatgtacattttagagaaagtatattttcagttgaagtgaaaaaaaagagatgcacaaatagatgtttgaatggcatttgtataattcwgggtcaagtttttaggacaagcttaccaaagaaatttttaaggttaaataaaaagcaaacttttagtgtatcagggtgtttgctaaaagcagagcactgtgacaaacataaaaagcagaaacattaaaagcagaaaactctttattttctctgcttccctgggagaaaaacaccaacagaagaattcggtagataaatgatgtttccaactgtgttgggaacttggagttgtgagattacaattgggaccacagattcagacaccatcatcaccaactatttttgttcacatttaaaaataaaaagtcaaaagaaatttactaaaatctgtatatgtctggttacatgtttatatggttaaaatttaatatatatacttttatataactgca

SEQ ID NO: 397240 - DNA, 549 bp, Homo sapiens
tatgtagaaggacaatatgaatttacatggaaatttatttccaccatcagtaatatattcctattgcaaatgtacattttagagaaagtatattttcagttgaagtgaaaaaaaagagatgcacaaatagatgtttgaatggcatttgtataattctgggtcaagtttttaggacaagcttaccaaagaaatttttaaggttaaataaaaagcaaacttttagtgtatcagggtgtttgctaaaagcagagcactgtgacaaacataaaaagcagaaacattaaaagcagaaaactctttattttctctgcttccctgggagaaaaacaccaacagaagaattcggtagataaatgatgtttccaactgtgttgggaacttggagttgtgagattacaattgggaccacagattcagacaccatcatcaccaactatttttgttcacatttaaaaataaaaagtcaaaagaaatttactaaaatctgtatatgtctggttacatrtttatatggttaaaatttaatatatatacttttatataactgca

SEQ ID NO: 397241 - DNA, 461 bp, Homo sapiens
atttctgtgatgtaattcaataactaaaatgtacactcttgtctcaaagtcctcaacatcaccttgwcctaaactcctggtccaagaccaatctaccctccatcctcttgttgcctggatcccttttctttgtgggtatgaccattggagcactgaaaagatgatataagtgtcaggtgagttccatgttatacatttgatttatgagggaatgcaggctgctttgggaatttcctctggcaccttagccctttttctcctttccttttctccatattccaggaccatctgtaaaaggcagggatgagagagagttcaatgcctttctcctcctcttgataagaaggggtaggattatggataactacaactttgagaattctccctcttaccttctgtagtcctctagatgtggtccaggggattggggttttcagaagttgtgtttttgctgtgccctg

SEQ ID NO: 397242 - DNA, 461 bp, Homo sapiens
atttctgtgatgtaattcaataactaaaatgtacactcttgtctcaaagtcctcaacatcaccttgtcctaaactcctggtccaagaccaatctaccctccatcctcttgttgcctggatcccttttctttgtgggtatgaccattggagcactgaaaagatgatataagtgtcaggtgagttccatgttatacatttgatttatgagggaatgcaggctgctttgggaatttcctctggcaccttagccctttttctcctttccttttctccatattccaggaccatctgtaaaaggcagggatgagagagagttcaatgcctttctcctcctcttgataagaaggggtaggattatggataactacaactttgagaattctccctcttaccttctgtagtcctctagatgtggtccaggggattggggtkttcagaagttgtgtttttgctgtgccctg

SEQ ID NO: 397243 - DNA, 609 bp, Homo sapiens
cctgtcatccagggagttagcataggatccaataggtagtttttcaacccttccccacctctctctcccctctcttagtccccggtgtctattgcttccatctacatgtccatgtaaactcaatgtccagctcttattcattagtgagaacatgtggtatttgattttctgtttctgcattaattcacttaggattatggacttcagcttaatccatgttgcttaaaaggacataatttgattctttattatgactgcatagtgttccttggtacctgtatgtaccacattttctttatccaatccaccactaatggatacctaggttgagttcatgtctttgttattgtgaatagcacagcaaagaaaatataagtgcgtgtacttaactgatgtatttgtacagaccacctcttaacaactccattttgactggcctttttgtatgtcgtctgctctgatgaaacagcgtcaagacaatttaagagtatctttgcacaagttcttcccttctgaaacactcttctctctttacttttttgcyctttggatctcaattgagccaagccctcctattgcacatctccttgtcattttttaattatactt

SEQ ID NO: 397244 - DNA, 561 bp, Homo sapiens
caaatgtctgttgacaaatcaggtaaatggcatggcttactgatgtctaactgtggagatagttatcaytcatgggcccactgagagcaaaaagaaagctgacaatggtaaaataaactcagataggactcagaaggacctgtttttactgacttggttttaggatatatctacacatagagaagggttcggacaattatagttagcaaatcaagcaacaacagtgtttcagacactttgataccaaaataattttcctcactttaaatatagcagtttttccataaaaatggcatgcatcagccaggtaaaaaagataccatgtgtatatatcactcatgtgtatatatcatcatgcatcagcaaggtaaaaaagataccatgtgtatatatcatcttttttcctgcagaaaaaagatgacactcaaatttggtaatttgaggaatgtctaaaacaagcactatttgaatagatgtgggcaggttataggaaaattgaaaaggaaggcagtaacctacagactatgcctgaaaggatggagggaaataagagtttgcagg

SEQ ID NO: 397245 - DNA, 595 bp, Homo sapiens
agtcttggtcataaggcagcagcgtgttggcatgtccagaggacagtgaggtggccaggaccactggtaagatcaagggtgaagatataaaagaattttggcggttaacatgmggcagatcatgatggggttgcagaccattgtaagaattgtttttagtgtacatgaagtggggaaacaaatcattatcccattatcaatattttaataaattggatccatgaaccaaatgcaatgagattaaatcaattaataataatatgcaaatttgtattaaaattacaagaattatttgcacatttgagaacaggagagtcatgattgtttatcagcaataataaacattattaattttaattgtgatcagctaattgagattaattgcaatacatcatgctttataatgtgactgtcaaaaggaaagtatgattgtaatcttatactacatctatcaatgcctttgattcataagactatagagtaagcccctagttttcaaagccaacttatgaggcagtgacatcttatgcaaatttgctgctttctgccacagtgatccttggtcagctggcacaaattgttttacaaacgcccc

SEQ ID NO: 397246 - DNA, 595 bp, Homo sapiens
agtcttggtcataaggcagcagcgtgttggcatgtccagaggacagtgaggtggccaggaccactggtaagatcaagggtgaagatataaaagaattttggcggttaacatgaggcagatcatgatggggttgcagaccattgtaagaattgtttttagtgtacatgaartggggaaacaaatcattatcccattatcaatattttaataaattggatccatgaaccaaatgcaatgagattaaatcaattaataataatatgcaaatttgtattaaaattacaagaattatttgcacatttgagaacaggagagtcatgattgtttatcagcaataataaacattattaattttaattgtgatcagctaattgagattaattgcaatacatcatgctttataatgtgactgtcaaaaggaaagtatgattgtaatcttatactacatctatcaatgcctttgattcataagactatagagtaagcccctagttttcaaagccaacttatgaggcagtgacatcttatgcaaatttgctgctttctgccacagtgatccttggtcagctggcacaaattgttttacaaacgcccc

SEQ ID NO: 397247 - DNA, 595 bp, Homo sapiens
agtcttggtcataaggcagcagcgtgttggcatgtccagaggacagtgaggtggccaggaccactggtaagatcaagggtgaagatataaaagaattttggcggttaacatgaggcagatcatgatggggttgcagaccattgtaagaattgtttttagtgtacatgaagtggggaracaaatcattatcccattatcaatattttaataaattggatccatgaaccaaatgcaatgagattaaatcaattaataataatatgcaaatttgtattaaaattacaagaattatttgcacatttgagaacaggagagtcatgattgtttatcagcaataataaacattattaattttaattgtgatcagctaattgagattaattgcaatacatcatgctttataatgtgactgtcaaaaggaaagtatgattgtaatcttatactacatctatcaatgcctttgattcataagactatagagtaagcccctagttttcaaagccaacttatgaggcagtgacatcttatgcaaatttgctgctttctgccacagtgatccttggtcagctggcacaaattgttttacaaacgcccc

SEQ ID NO: 397248 - DNA, 595 bp, Homo sapiens
agtcttggtcataaggcagcagcgtgttggcatgtccagaggacagtgaggtggccaggaccactggtaagatcaagggtgaagatataaaagaattttggcggttaacatgaggcagatcatgatggggttgcagaccattgtaagaattgtttttagtgtacatgaagtggggaaacaaatcattatcccattatcaatattttaataaattggatccatgaaccaaatgcaatgagattaaatcaattartaataatatgcaaatttgtattaaaattacaagaattatttgcacatttgagaacaggagagtcatgattgtttatcagcaataataaacattattaattttaattgtgatcagctaattgagattaattgcaatacatcatgctttataatgtgactgtcaaaaggaaagtatgattgtaatcttatactacatctatcaatgcctttgattcataagactatagagtaagcccctagttttcaaagccaacttatgaggcagtgacatcttatgcaaatttgctgctttctgccacagtgatccttggtcagctggcacaaattgttttacaaacgcccc

SEQ ID NO: 397249 - DNA, 440 bp, Homo sapiens
  misc_feature (1)...(440): n = A,T,C or G
cctgctttggcccatccctgccctggccccaccatgggcctgcctgttctgccctctcctggcactgaccttgccctgtcatggcccagtggtgccattgccctgccttaccctgcgctggttgtgccttggccccgcttggtgctggccgctccctggacctgccctgaccctgccttggcttttgccctgccctcactatggcctggccctggcnctagccctggtcctgccatatccctggccctgcccttatccaggccttgcccctgctgctgccctggccctggcctggaacctggtcctgtcaaggactgccctgactctgccatggccctggccctgctctgccttgttcctggccctgacccagacccagacccwttcctggctctgcactggcctttccctggccctgagctggcagtggtctgcccctg

SEQ ID NO: 397250 - DNA, 522 bp, Homo sapiens
  misc_feature (1)...(522): n = A,T,C or G
ggccccgcttggtgctggccgctccctggacctgccctgaccctgccttggcttttgccctgccctcactatggcctggccctggcnctagccctggtcctgccatatccctggccctgcccttatccaggccttgcccctgctgctgccctggccctggcctggaacctggtcctgtcaaggactgccctgactctgccatggccctggccctgctctgccttgttcctggccctgacccagacccagacccattcctgkctctgcactggcctttccctggccctgagctggcagtggtctgcccctggtcttgccatcaccctgccctgctgtgctctggatgtgtcatcaccctgccctgcccctactctgcctttgaccctgccctggccttaccttggccctcaccctagtcttcgctaggcccagcacagacctggctctgaccctggccgagcacagacctggctctgaccctggccctggtctttgtcctgccatagccttggcctgaagtgg

SEQ ID NO: 397251 - DNA, 621 bp, Homo sapiens
ctaccaattaatctttatgaagtgagctgcatttcctgccagactgagcttatgttttagcaggaagcatttttgggaaatgtttatgttagagtttgcccttcttgacaaggtgagacataaatgtctactttatacacatgaattaagatgggaagatatttgggggaatcatttactcaaacgctaaataataaaggtacacaaagggcaaattatactagatttctttcccacttgttttgtatgtctcatgcarttcaccttgattcccttcagtttctgtttaatgtagaaagtggcattttccttattttaagcttctagcacaatgaaagaatttctctttttcatgaacaggatcataaatgaaagggaggaagagtgtcctatatcatatttattgttcaacaaaacactgctccatggcttaaattcagtttaaaaaagagaatttattggacatctaacacatacataaaagatagtaaagacaaatgagaagagcgcaggatattgaagtatacagatttcaatgctgagttttatatcttaggaagttactccaccttacagaggctcaatttcccctgatttaggaaggcgatgctaatgggtatt

SEQ ID NO: 397252 - DNA, 522 bp, Homo sapiens
  misc_feature (1)...(522): n = A,T,C or G
ggccccgcttggtgctggccgctccctggacctgccctgaccctgccttggcttttgccctgccctcactatggcctggccctggcnctagccctggtcctgccatatccctggccctgcccttatccaggccttgcccctgctgctgccctggccctggcctggaacctggtcctgtcaaggactgccctgactctgccatggccctggccctgctctgccttgttcctggccctgacccagacccagacccattcctggctctgcactggcctttccctggccctgagctggcagtggtctgcccctggtcttgccatcaccctgccctgctgtgctctggatgtgtcatcmccctgccctgcccctactctgcctttgaccctgccctggccttaccttggccctcaccctagtcttcgctaggcccagcacagacctggctctgaccctggccgagcacagacctggctctgaccctggccctggtctttgtcctgccatagccttggcctgaagtgg

SEQ ID NO: 397253 - DNA, 621 bp, Homo sapiens
ctaccaattaatctttatgaagtgagctgcatttcctgccagactgagcttatgttttagcaggaagcatttttgggaaatgtttatgttagagtttgcccttcttgacaaggtgagacataaatgtctactttatacacatgaattaagatgggaagatatttgggggaatcatttactcaaacgctaaataataaaggtacacaaagggcaaattatactagatttctttcccacttgttttgtatgtctcatgcaattcaccttgattcccttcagtttctgtttaatgtagaaagtggcattttcmttattttaagcttctagcacaatgaaagaatttctctttttcatgaacaggatcataaatgaaagggaggaagagtgtcctatatcatatttattgttcaacaaaacactgctccatggcttaaattcagtttaaaaaagagaatttattggacatctaacacatacataaaagatagtaaagacaaatgagaagagcgcaggatattgaagtatacagatttcaatgctgagttttatatcttaggaagttactccaccttacagaggctcaatttcccctgatttaggaaggcgatgctaatgggtatt

SEQ ID NO: 397254 - DNA, 621 bp, Homo sapiens
ctaccaattaatctttatgaagtgagctgcatttcctgccagactgagcttatgttttagcaggaagcatttttgggaaatgtttatgttagagtttgcccttcttgacaaggtgagacataaatgtctactttatacacatgaattaagatgggaagatatttgggggaatcatttactcaaacgctaaataataaaggtacacaaagggcaaattatactagatttctttcccacttgttttgtatgtctcatgcaattcaccttgattcccttcagtttctgtttaatgtagaaagtggcattttccttattttaagcttctagcacaatgaaagaatttytctttttcatgaacaggatcataaatgaaagggaggaagagtgtcctatatcatatttattgttcaacaaaacactgctccatggcttaaattcagtttaaaaaagagaatttattggacatctaacacatacataaaagatagtaaagacaaatgagaagagcgcaggatattgaagtatacagatttcaatgctgagttttatatcttaggaagttactccaccttacagaggctcaatttcccctgatttaggaaggcgatgctaatgggtatt

SEQ ID NO: 397255 - DNA, 522 bp, Homo sapiens
  misc_feature (1)...(522): n = A,T,C or G
ggccccgcttggtgctggccgctccctggacctgccctgaccctgccttggcttttgccctgccctcactatggcctggccctggcnctagccctggtcctgccatatccctggccctgcccttatccaggccttgcccctgctgctgccctggccctggcctggaacctggtcctgtcaaggactgccctgactctgccatggccctggccctgctctgccttgttcctggccctgacccagacccagacccattcctggctctgcactggcctttccctggccctgagctggcagtggtctgcccctggtcttgccatcaccctgccctgctgtgctctggatgtgtcatcaccctgccctgsccctactctgcctttgaccctgccctggccttaccttggccctcaccctagtcttcgctaggcccagcacagacctggctctgaccctggccgagcacagacctggctctgaccctggccctggtctttgtcctgccatagccttggcctgaagtgg

SEQ ID NO: 397256 - DNA, 592 bp, Homo sapiens
ttttaagcttctagcacaatgaaagaatttctctttttcatgaacaggatcataaatgaaagggaggaagagtgtcctatatcatatttattgttcaacaaaacrctgctccatggcttaaattcagtttaaaaaagagaatttattggacatctaacacatacataaaagatagtaaagacaaatgagaagagcgcaggatattgaagtatacagatttcaatgctgagttttatatcttaggaagttactccaccttacagaggctcaatttcccctgatttaggaaggcgatgctaatgggtattgcataggtgtaagtataaaaatgttgtatttaagagaatcccacaagcttggtataaggcagaaaataaatagatgtgacatgaataagtagtttattacatttgtattctacctgcggactagaggaagcaagaaacacagccactatgcttgattagcattacagcgatggtacaatgatggttgccagaagctggggggaggaagaaatggggaagtattttttaatgggtatagagtttcagttttacaagatgaaacgaattatggagatggatggtag

SEQ ID NO: 397257 - DNA, 592 bp, Homo sapiens
ttttaagcttctagcacaatgaaagaatttctctttttcatgaacaggatcataaatgaaagggaggaagagtgtcctatatcatatttattgttcaacaaaacactgctccatggcttaaattcagtttaaaaaagagaatttattggacatctaacacatacataaaagatagtaaagacaaatgagaagagcgcaggatattgaagtatacagatttcaatgctgagttttatatcttaggaagytactccaccttacagaggctcaatttcccctgatttaggaaggcgatgctaatgggtattgcataggtgtaagtataaaaatgttgtatttaagagaatcccacaagcttggtataaggcagaaaataaatagatgtgacatgaataagtagtttattacatttgtattctacctgcggactagaggaagcaagaaacacagccactatgcttgattagcattacagcgatggtacaatgatggttgccagaagctggggggaggaagaaatggggaagtattttttaatgggtatagagtttcagttttacaagatgaaacgaattatggagatggatggtag

SEQ ID NO: 397258 - DNA, 592 bp, Homo sapiens
ttttaagcttctagcacaatgaaagaatttctctttttcatgaacaggatcataaatgaaagggaggaagagtgtcctatatcatatttattgttcaacaaaacactgctccatggcttaaattcagtttaaaaaagagaatttattggacatctaacacatacataaaagatagtaaagacaaatgagaagagcgcaggatattgaagtatacagatttcaatgctgagttttatatcttaggaagttactccaccttacagaggctcaatttcccstgatttaggaaggcgatgctaatgggtattgcataggtgtaagtataaaaatgttgtatttaagagaatcccacaagcttggtataaggcagaaaataaatagatgtgacatgaataagtagtttattacatttgtattctacctgcggactagaggaagcaagaaacacagccactatgcttgattagcattacagcgatggtacaatgatggttgccagaagctggggggaggaagaaatggggaagtattttttaatgggtatagagtttcagttttacaagatgaaacgaattatggagatggatggtag

SEQ ID NO: 397259 - DNA, 607 bp, Homo sapiens
cactgctccatggcttaaattcagtttaaaaaagagaatttattggacatctaacacatacataaaagatagtaaagacaaatgagaagagcgcaggatattgaagtatacagatttcaatgctgagttttatatcttaggaagttactccaccttacagaggctcaatttcccctgatttaggaaggcgatgctaatgggtattgcataggtgtaagtataaaaatgttgtatttaagagaatcccacaagcttggtataaggcagaaaataaatagatgtgacatgaataagtagtttattacatttgtattctacctgcggactagaggaagcaagaaacacagccactatgcttgattagcattacagcgatggtacaatgatggttgccagaarctggggggaggaagaaatggggaagtattttttaatgggtatagagtttcagttttacaagatgaaacgaattatggagatggatggtagggacggctgcacaatgttatgactctatttagtaccactgaactgtacacttaaaatggttaacagagtacattttatgttatgtgtattttaccacaataaaaaaataaaatacctt

SEQ ID NO: 397260 - DNA, 619 bp, Homo sapiens
agtatacagatttcaatgctgagttttatatcttaggaagttactccaccttacagaggctcaatttcccctgatttaggaaggcgatgctaatgggtattgcataggtgtaagtataaaaatgttgtatttaagagaatcccacaagcttggtataaggcagaaaataaatagatgtgacatgaataagtagtttattacatttgtattctacctgcggactagaggaagcaagaaacacagccactatgcttgattagcattacagcgatggtacaatgatggttgccagaagctggggggaggaagaaatggggaagtattttttaatgggtatagagtttcagttttacaagatgaaacgaattatggagatggatggtagggacggctgcacaatgttatgactctatttagtaccactgaactgtacacttaaaatggttaacagagtacattttatgttatgtgtattttaccacaataaaaaaataaaataccttaggaacattttcatgraaaagcccacataaaattcactttaatgcacgtgtttatgcatagctttgtatttttctcttttctctttatcttccaaattctaatcagagaagggaat

SEQ ID NO: 397261 - DNA, 619 bp, Homo sapiens
agtatacagatttcaatgctgagttttatatcttaggaagttactccaccttacagaggctcaatttcccctgatttaggaaggcgatgctaatgggtattgcataggtgtaagtataaaaatgttgtatttaagagaatcccacaagcttggtataaggcagaaaataaatagatgtgacatgaataagtagtttattacatttgtattctacctgcggactagaggaagcaagaaacacagccactatgcttgattagcattacagcgatggtacaatgatggttgccagaagctggggggaggaagaaatggggaagtattttttaatgggtatagagtttcagttttacaagatgaaacgaattatggagatggatggtagggacggctgcacaatgttatgactctatttagtaccactgaactgtacacttaaaatggttaacagagtacattttatgttatgtgtattttaccacaataaaaaaataaaataccttaggaacattttcatgaaaaagcccacataaaattcaytttaatgcacgtgtttatgcatagctttgtatttttctcttttctctttatcttccaaattctaatcagagaagggaat

SEQ ID NO: 397262 - DNA, 619 bp, Homo sapiens
agtatacagatttcaatgctgagttttatatcttaggaagttactccaccttacagaggctcaatttcccctgatttaggaaggcgatgctaatgggtattgcataggtgtaagtataaaaatgttgtatttaagagaatcccacaagcttggtataaggcagaaaataaatagatgtgacatgaataagtagtttattacatttgtattctacctgcggactagaggaagcaagaaacacagccactatgcttgattagcattacagcgatggtacaatgatggttgccagaagctggggggaggaagaaatggggaagtattttttaatgggtatagagtttcagttttacaagatgaaacgaattatggagatggatggtagggacggctgcacaatgttatgactctatttagtaccactgaactgtacacttaaaatggttaacagagtacattttatgttatgtgtattttaccacaataaaaaaataaaataccttaggaacattttcatgaaaaagcccacataaaattcactttaatgcamgtgtttatgcatagctttgtatttttctcttttctctttatcttccaaattctaatcagagaagggaat

SEQ ID NO: 397263 - DNA, 563 bp, Homo sapiens
  misc_feature (1)...(563): n = A,T,C or G
ggcccctccttttggccctgccctgtccctgccttggccctgtgctatcttagtcctgccctggccctgaactcggcctggccctaccctcatcctatattggctttgctttagcctggccgtgccctgncctggccctggctttggcctgctttggctctggttctgccctggccttggccttgccctggactctccctggccatgttttttccatggtccttctctggccttgccttgccctgtcctctttctggtcctgccatgtttctggccctgcctgtccatgtcctggacctgactctggccctggatctccctgtccctgccctgccataccctggcctgttccttgctctacactgaccctgccctgccttggccctgtgctaccctagytctgccctgaccttctgctgaccctgatcctgccatggccctggccctgccatgtccctgtcctggccctggttctgcgctgcttctggccctagccttagtcctctcatgtccctggctgtgaccctgcccctggtttttctctggccatgaccctgccccag

SEQ ID NO: 397264 - DNA, 563 bp, Homo sapiens
  misc_feature (1)...(563): n = A,T,C or G
ggcccctccttttggccctgccctgtccctgccttggccctgtgctatcttagtcctgccctggccctgaactcggcctggccctaccctcatcctatattggctttgctttagcctggccgtgccctgncctggccctggctttggcctgctttggctctggttctgccctggccttggccttgccctggactctccctggccatgttttttccatggtccttctctggccttgccttgccctgtcctctttctggtcctgccatgtttctggccctgcctgtccatgtcctggacctgactctggccctggatctccctgtccctgccctgccataccctggcctgttccttgctctacactgaccctgccctgccttggccctgtgctaccctagcyctgccctgaccttctgctgaccctgatcctgccatggccctggccctgccatgtccctgtcctggccctggttctgcgctgcttctggccctagccttagtcctctcatgtccctggctgtgaccctgcccctggtttttctctggccatgaccctgccccag

SEQ ID NO: 397265 - DNA, 563 bp, Homo sapiens
  misc_feature (1)...(563): n = A,T,C or G
ggcccctccttttggccctgccctgtccctgccttggccctgtgctatcttagtcctgccctggccctgaactcggcctggccctaccctcatcctatattggctttgctttagcctggccgtgccctgncctggccctggctttggcctgctttggctctggttctgccctggccttggccttgccctggactctccctggccatgttttttccatggtccttctctggccttgccttgccctgtcctctttctggtcctgccatgtttctggccctgcctgtccatgtcctggacctgactctggccctggatctccctgtccctgccctgccataccctggcctgttccttgctctacactgaccctgccctgccttggccctgtgctaccctagctctgccctgaccttctgctgaccctgatcctgccatggccctggccctgccatgtccctgtcctggccctggttctgcsctgcttctggccctagccttagtcctctcatgtccctggctgtgaccctgcccctggtttttctctggccatgaccctgccccag

SEQ ID NO: 397266 - DNA, 563 bp, Homo sapiens
  misc_feature (1)...(563): n = A,T,C or G
ggcccctccttttggccctgccctgtccctgccttggccctgtgctatcttagtcctgccctggccctgaactcggcctggccctaccctcatcctatattggctttgctttagcctggccgtgccctgncctggccctggctttggcctgctttggctctggttctgccctggccttggccttgccctggactctccctggccatgttttttccatggtccttctctggccttgccttgccctgtcctctttctggtcctgccatgtttctggccctgcctgtccatgtcctggacctgactctggccctggatctccctgtccctgccctgccataccctggcctgttccttgctctacactgaccctgccctgccttggccctgtgctaccctagctctgccctgaccttctgctgaccctgatcctgccatggccctggccctgccatgtccctgtcctggccctggttctgcgctgcttctggccctrgccttagtcctctcatgtccctggctgtgaccctgcccctggtttttctctggccatgaccctgccccag

SEQ ID NO: 397267 - DNA, 494 bp, Homo sapiens
agaaaaaaacgaaatattttgataagaagttaaagctttgtatataatatgccttgaattgtwagtgcctgttattagttgtattacatataggtcatggttttgtacacataactccaaaccattgatactgttaaaagaatatatgaatatatgaaagaatgtgtaaacgtaagaatgtatcagtatctaatgacctttccaaattaatttttatttttagctctattagatttttctcagtgtaacaaatgtttattcctatgtaattaagggcgtatttcctgtccagaatattcatattacctaattgaaaattatatgatacaaaaatataatactatttttaggccaggcatggtggctcatacctgtaatcccaacattttgagaggccaagtttggagaatcatttgagtccaggagttgaccagcctgggcaacatagtgagaccttgtctttattaaataaataaataaataaataggttggg

SEQ ID NO: 397268 - DNA, 503 bp, Homo sapiens
atcactgagggcatcctatccatttcatttcatgattccatcacatcatttcacttagatgaaatgataagatgacttgagatgagatgaaatgatgagatgaaatgacaaaatgatgagatgagatgagaagatgagatgaaattttgagatgaaatggtgagtagaaatgatgagatgaaatkatgagacgaaatgacaaaattgaaaagaaattgaaaggagatgagatgagttaaaatgagatgaaatgatgagatgatggatgaaatgatgagataaaacgagccatgaaatgatgagatgaaatgaaatgaaataatgaaatgatatgaaataatgaaattgaaatgagatgagatgagatgaaatgagataaaatgatgagatgaaatgagatgaatgatgagatgaaatgatgagatgaaatgagatgaaaaatgatgagacgaaaaatgagattaaatgaaatgaaataatgaaaggaaattatgaaatgtaat

SEQ ID NO: 397269 - DNA, 503 bp, Homo sapiens
atcactgagggcatcctatccatttcatttcatgattccatcacatcatttcacttagatgaaatgataagatgacttgagatgagatgaaatgatgagatgaaatgacaaaatgatgagatgagatgagaagatgagatgaaattttgagatgaaatggtgagtagaaatgatgagatgaaattatgagacgaaatgacaaarttgaaaagaaattgaaaggagatgagatgagttaaaatgagatgaaatgatgagatgatggatgaaatgatgagataaaacgagccatgaaatgatgagatgaaatgaaatgaaataatgaaatgatatgaaataatgaaattgaaatgagatgagatgagatgaaatgagataaaatgatgagatgaaatgagatgaatgatgagatgaaatgatgagatgaaatgagatgaaaaatgatgagacgaaaaatgagattaaatgaaatgaaataatgaaaggaaattatgaaatgtaat

SEQ ID NO: 397270 - DNA, 503 bp, Homo sapiens
atcactgagggcatcctatccatttcatttcatgattccatcacatcatttcacttagatgaaatgataagatgacttgagatgagatgaaatgatgagatgaaatgacaaaatgatgagatgagatgagaagatgagatgaaattttgagatgaaatggtgagtagaaatgatgagatgaaattatgagacgaaatgacaaaattgaaaagaaattgaaaggagatgagatgagwtaaaatgagatgaaatgatgagatgatggatgaaatgatgagataaaacgagccatgaaatgatgagatgaaatgaaatgaaataatgaaatgatatgaaataatgaaattgaaatgagatgagatgagatgaaatgagataaaatgatgagatgaaatgagatgaatgatgagatgaaatgatgagatgaaatgagatgaaaaatgatgagacgaaaaatgagattaaatgaaatgaaataatgaaaggaaattatgaaatgtaat

SEQ ID NO: 397271 - DNA, 503 bp, Homo sapiens
atcactgagggcatcctatccatttcatttcatgattccatcacatcatttcacttagatgaaatgataagatgacttgagatgagatgaaatgatgagatgaaatgacaaaatgatgagatgagatgagaagatgagatgaaattttgagatgaaatggtgagtagaaatgatgagatgaaattatgagacgaaatgacaaaattgaaaagaaattgaaaggagatgagatgagttraaatgagatgaaatgatgagatgatggatgaaatgatgagataaaacgagccatgaaatgatgagatgaaatgaaatgaaataatgaaatgatatgaaataatgaaattgaaatgagatgagatgagatgaaatgagataaaatgatgagatgaaatgagatgaatgatgagatgaaatgatgagatgaaatgagatgaaaaatgatgagacgaaaaatgagattaaatgaaatgaaataatgaaaggaaattatgaaatgtaat

SEQ ID NO: 397272 - DNA, 587 bp, Homo sapiens
tgaaattgaaatgaaattgaaatgagatgagttgaaatgatgagatgtaatgatgaaatgaaatgatgaaatgagatgaaataatgggatgaaatgagataatgagatgagatgaaatcatgagatgaaatgatgaaatgaaatgatgtatgaaatgatgagatgaaatgagatgaaatgtaatgagatgaaatgaaatgacataatgaaatgaaataatgaaatgaaatgaaataatgaaatgatgaartaatgaaatgaaaatgaaatggaaatgatgagatgagaagaaatgatgagatgaaatgatgagatgagataaaatgagatgaaatgatgagatgaaatgaaatgatgagatgagatgaaatatgatgagatgaaatgacataatgaatgaaatgatgaaatggaataatgaaacggaaatgatgagatgagatgcaatgagttgaaatgagatgaaatgatgaaatgatgagatgaaatgatatgagatgtgatgaaatgatgacatgaaatgatgacataaaatgagatgaaatgagatgtaatgatggaatgagatgagatgaaatgagatgaaa

SEQ ID NO: 397273 - DNA, 587 bp, Homo sapiens
tgaaattgaaatgaaattgaaatgagatgagttgaaatgatgagatgtaatgatgaaatgaaatgatgaaatgagatgaaataatgggatgaaatgagataatgagatgagatgaaatcatgagatgaaatgatgaaatgaaatgatgtatgaaatgatgagatgaaatgagatgaaatgtaatgagatgaaatgaaatgacataatgaaatgaaataatgaaatgaaatgaaataatgaaatgatgaagtaatgaaatgaaaatgaaatggaaatgatgagatgagaagaaatgatgagatgaaatgatgagatgagataaaatgagatgaaatkatgagatgaaatgaaatgatgagatgagatgaaatatgatgagatgaaatgacataatgaatgaaatgatgaaatggaataatgaaacggaaatgatgagatgagatgcaatgagttgaaatgagatgaaatgatgaaatgatgagatgaaatgatatgagatgtgatgaaatgatgacatgaaatgatgacataaaatgagatgaaatgagatgtaatgatggaatgagatgagatgaaatgagatgaaa

SEQ ID NO: 397274 - DNA, 581 bp, Homo sapiens
tatgaaatgtaatgatgaaattgaaatgaaattgaaatgagatgagttgaaatgatgagatgtaatgatgaaatgaaatgatgaaatgagatgaaataatgggatgaaatgagataatgagatgagatgaaatcatgagatgaaatgatgaaatgaaatgatgtatgaaatgatgagatgaaatgagatgaaatgtaatgagatgaaatgaaatgacataatgaaatgaaataatgaaatgaaatgaaataatgaaatgatgaagtaatgaaatgaaaatgaaatggaaatgatgagatgagaagaaatgatgagatgaaatgatgagatgagataaaatgagatgaaatgatgagatgaratgaaatgatgagatgagatgaaatatgatgagatgaaatgacataatgaatgaaatgatgaaatggaataatgaaacggaaatgatgagatgagatgcaatgagttgaaatgagatgaaatgatgaaatgatgagatgaaatgatatgagatgtgatgaaatgatgacatgaaatgatgacataaaatgagatgaaatgagatgtaatgatggaatgag

SEQ ID NO: 397275 - DNA, 581 bp, Homo sapiens
tatgaaatgtaatgatgaaattgaaatgaaattgaaatgagatgagttgaaatgatgagatgtaatgatgaaatgaaatgatgaaatgagatgaaataatgggatgaaatgagataatgagatgagatgaaatcatgagatgaaatgatgaaatgaaatgatgtatgaaatgatgagatgaaatgagatgaaatgtaatgagatgaaatgaaatgacataatgaaatgaaataatgaaatgaaatgaaataatgaaatgatgaagtaatgaaatgaaaatgaaatggaaatgatgagatgagaagaaatgatgagatgaaatgatgagatgagataaaatgagatgaaatgatgagatgaaawgaaatgatgagatgagatgaaatatgatgagatgaaatgacataatgaatgaaatgatgaaatggaataatgaaacggaaatgatgagatgagatgcaatgagttgaaatgagatgaaatgatgaaatgatgagatgaaatgatatgagatgtgatgaaatgatgacatgaaatgatgacataaaatgagatgaaatgagatgtaatgatggaatgag

SEQ ID NO: 397276 - DNA, 587 bp, Homo sapiens
tgaaattgaaatgaaattgaaatgagatgagttgaaatgatgagatgtaatgatgaaatgaaatgatgaaatgagatgaaataatgggatgaaatgagataatgagatgagatgaaatcatgagatgaaatgatgaaatgaaatgatgtatgaaatgatgagatgaaatgagatgaaatgtaatgagatgaaatgaaatgacataatgaaatgaaataatgaaatgaaatgaaataatgaaatgatgaagtaatgaaatgaaaatgaaatggaaatgatgagatgagaagaaatgatgagatgaaatgatgagatgagataaaatgagatgaaatgatgagatgaaatgaaatgatgagatgagatgaaatatgatgagatgaaatgacataatgaatgaaatgatgaaatggaatartgaaacggaaatgatgagatgagatgcaatgagttgaaatgagatgaaatgatgaaatgatgagatgaaatgatatgagatgtgatgaaatgatgacatgaaatgatgacataaaatgagatgaaatgagatgtaatgatggaatgagatgagatgaaatgagatgaaa

SEQ ID NO: 397277 - DNA, 581 bp, Homo sapiens
tatgaaatgtaatgatgaaattgaaatgaaattgaaatgagatgagttgaaatgatgagatgtaatgatgaaatgaaatgatgaaatgagatgaaataatgggatgaaatgagataatgagatgagatgaaatcatgagatgaaatgatgaaatgaaatgatgtatgaaatgatgagatgaaatgagatgaaatgtaatgagatgaaatgaaatgacataatgaaatgaaataatgaaatgaaatgaaataatgaaatgatgaagtaatgaaatgaaaatgaaatggaaatgatgagatgagaagaaatgatgagatgaaatgatgagatgagataaaatgagatgaaatgatgagatgaaatgaaatgatgagatgagatgaaatatgatgagatgaaatgacataatgaatgaaatgatgaaatggaataatgaaayggaaatgatgagatgagatgcaatgagttgaaatgagatgaaatgatgaaatgatgagatgaaatgatatgagatgtgatgaaatgatgacatgaaatgatgacataaaatgagatgaaatgagatgtaatgatggaatgag

SEQ ID NO: 397278 - DNA, 581 bp, Homo sapiens
tatgaaatgtaatgatgaaattgaaatgaaattgaaatgagatgagttgaaatgatgagatgtaatgatgaaatgaaatgatgaaatgagatgaaataatgggatgaaatgagataatgagatgagatgaaatcatgagatgaaatgatgaaatgaaatgatgtatgaaatgatgagatgaaatgagatgaaatgtaatgagatgaaatgaaatgacataatgaaatgaaataatgaaatgaaatgaaataatgaaatgatgaagtaatgaaatgaaaatgaaatggaaatgatgagatgagaagaaatgatgagatgaaatgatgagatgagataaaatgagatgaaatgatgagatgaaatgaaatgatgagatgagatgaaatatgatgagatgaaatgacataatgaatgaaatgatgaaatggaataatgaaacggaaatgatgagmtgagatgcaatgagttgaaatgagatgaaatgatgaaatgatgagatgaaatgatatgagatgtgatgaaatgatgacatgaaatgatgacataaaatgagatgaaatgagatgtaatgatggaatgag

SEQ ID NO: 397279 - DNA, 587 bp, Homo sapiens
tgaaattgaaatgaaattgaaatgagatgagttgaaatgatgagatgtaatgatgaaatgaaatgatgaaatgagatgaaataatgggatgaaatgagataatgagatgagatgaaatcatgagatgaaatgatgaaatgaaatgatgtatgaaatgatgagatgaaatgagatgaaatgtaatgagatgaaatgaaatgacataatgaaatgaaataatgaaatgaaatgaaataatgaaatgatgaagtaatgaaatgaaaatgaaatggaaatgatgagatgagaagaaatgatgagatgaaatgatgagatgagataaaatgagatgaaatgatgagatgaaatgaaatgatgagatgagatgaaatatgatgagatgaaatgacataatgaatgaaatgatgaaatggaataatgaaacggaaatgatgagatgagatgcaatgagttgaaatgagatgaaatgatgaaatgatgagatgaaatgatatgagatgtgatgaaatgatgacatgaaatgatgacataaaatgagatgaaatgagatgtaatgatggaawgagatgagatgaaatgagatgaaa

SEQ ID NO: 397280 - DNA, 272 bp, Homo sapiens
attcttaacgaaacaccgcaaatatcttaataattgggcaaaatctaaatatcagagagataattttatcttgaagattgttaaattataatggtgattcactaccttgccacgtctctgastcaaaaattaggtctttgtttaggaatcaatggtactctgcaacttggaaataggaagattttagaagactcaaacattgactttcttgtgtgcaaaaaaaaagacgtattgagataagacaagtctttccttgcaaggatacctctaat

SEQ ID NO: 397281 - DNA, 602 bp, Homo sapiens
ttggggccagtgttaccttgatacaaaaattagtccaaatatcatagaaaaataaaactactataagtataaacgcaaaattccttaaaaaatactaacaaatcagaactagcaacatataaaagaattatacactatgacaaagtgaaatttatacaagtattcccaggttggtttaacagcccaaaatccattaaggtaatacatcttatccatagaataagaaacgagaattgcatgatcatctcgatagattcggaaaasacatttaacaaaatccaaatgctttaatgattaaaaataaaaataaaaactcaatgaaccaggaatagagaactttctacaccagatacatggcacctgtgaaaagccaacagcaagcatgcaacttaatggtaaaggatgctttcccgctatggtcagagataagaataggatatataatttgaactcttctagtcaatactgtactaaagattttatgcagggcaaatcggcaactaaaaaaataagaatcacccatattgaacaggaagaaataaaactttatttgaaaataacattcttgtatatagaaaatgttaaggaatccactgaacgat

SEQ ID NO: 397282 - DNA, 171 bp, Homo sapiens
atagaaaatgttaaggaatccactgaacgatagaastagtaaattatttcagcaatattacagcatacaagataaatgtacaaaaatcaattgcacacatctacaatgaaaaccccaaaatgaaattaagaaaacacttcaatttaaaatagcatcataaaaagaaataat

SEQ ID NO: 397283 - DNA, 538 bp, Homo sapiens
gtattactttacaatttgaactactgatttgatgaaatccctgcaagtattccaacagacttctgtctagaaactgacaagctgattctaaaatacacatggaattgtaagggactcaaaatagccaaaataatcttgaaaaaagaaaacatattaggataattcacacccccatgctccaaaccttactgcaaagtatcagtaatcaagacaacaaaatactgatgaaggaaaaatatatagattgatggaagagaattgagagtccatatataaaactatgtgtctatggtcaatggattcttacagtggtgycatgtgcaattcaatgaggaagagacagtctttgaacaaactggttcaacaacgtacacgtggatcaccacttgcaaaataataaattggaacccttaccccaaagcatacaaaaatattaactcaaatgaattaaagacacacatgcaagagctagaataaaacatatgggaaaatcttcacgattttggatctagcaaagaaatagctgtaacatcaaaaa

SEQ ID NO: 397284 - DNA, 538 bp, Homo sapiens
gtattactttacaatttgaactactgatttgatgaaatccctgcaagtattccaacagacttctgtctagaaactgacaagctgattctaaaatacacatggaattgtaagggactcaaaatagccaaaataatcttgaaaaaagaaaacatattaggataattcacacccccatgctccaaaccttactgcaaagtatcagtaatcaagacaacaaaatactgatgaaggaaaaatatatagattgatggaagagaattgagagtccatatataaaactatgtgtctatggtcaatggattcttacagtggtgccatgtgcaattcaatgaggaagagacagyctttgaacaaactggttcaacaacgtacacgtggatcaccacttgcaaaataataaattggaacccttaccccaaagcatacaaaaatattaactcaaatgaattaaagacacacatgcaagagctagaataaaacatatgggaaaatcttcacgattttggatctagcaaagaaatagctgtaacatcaaaaa

SEQ ID NO: 397285 - DNA, 538 bp, Homo sapiens
gtattactttacaatttgaactactgatttgatgaaatccctgcaagtattccaacagacttctgtctagaaactgacaagctgattctaaaatacacatggaattgtaagggactcaaaatagccaaaataatcttgaaaaaagaaaacatattaggataattcacacccccatgctccaaaccttactgcaaagtatcagtaatcaagacaacaaaatactgatgaaggaaaaatatatagattgatggaagagaattgagagtccatatataaaactatgtgtctatggtcaatggattcttacagtggtgccatgtgcaattcaatgaggaagagacagtctttgaacaaactggttcaacaacgtacacgtggatcaccacttgcaaaataataaattggaacccttaccccaaagcatacaaaaatattaactcaaatgaattaaagacacacatgcmagagctagaataaaacatatgggaaaatcttcacgattttggatctagcaaagaaatagctgtaacatcaaaaa

SEQ ID NO: 397286 - DNA, 538 bp, Homo sapiens
gtattactttacaatttgaactactgatttgatgaaatccctgcaagtattccaacagacttctgtctagaaactgacaagctgattctaaaatacacatggaattgtaagggactcaaaatagccaaaataatcttgaaaaaagaaaacatattaggataattcacacccccatgctccaaaccttactgcaaagtatcagtaatcaagacaacaaaatactgatgaaggaaaaatatatagattgatggaagagaattgagagtccatatataaaactatgtgtctatggtcaatggattcttacagtggtgccatgtgcaattcaatgaggaagagacagtctttgaacaaactggttcaacaacgtacacgtggatcaccacttgcaaaataataaattggaacccttaccccaaagcatacaaaaatattaactcaaatgaattaaagacacacatgcaagagctagaataaaacatatgggaaaatcttcacsattttggatctagcaaagaaatagctgtaacatcaaaaa

SEQ ID NO: 397287 - DNA, 522 bp, Homo sapiens
ttccattgtttctcttaagtcagctgttactcttacaaaacataggtgctcaaaaaataaacatgtgcatgaatatttacagcagtaatatttatacagtcaaaaagtggaaacaatccatgtgcttgttgactcataaatggacacccaatttccagctataacaaagaatgaagtacttatacatggtataatatgggtgaaatttgaaagcattatgttaaattcacagaaggacaaacattacttgattttattcacatgaaacatcaggaatcggcaaatcaattgggatataaatcagattagtggtcattagggctcagggaagcagaatagggtgtaacaacttaatgcataatgggcttttagaagggacatgatgaaattatcctggaacattgtgaatattctgaaagcaattgcattgtatgttttaaaatggttaagttattaatttyatattatgtgatttttgccttagaaaacaaaaaagagaaaatagccttactgtatatacaa

SEQ ID NO: 397288 - DNA, 519 bp, Homo sapiens
tctatgatcattacttatgaatatgtcaaaaataacttggcagacatggttgagaatttgggggtcaggagagtatcctgaattatctgggtgagaccatcataatcacaagggtccttacaatagggagggaggaaggtaacagccagagaggacctgggacaacggacagggaaactggagtgatggaggwaggggccatgctgctaggaatgtgggaacatcagaaagatggaatgctcgatattggattctctctcttgaagcctagactgaatagagccctattactccttgattttacttcattgagacttctgacctccagaaatgtaaggtaatacagttgtattatgtgtagctgtaaggttgtggtaatttgttacagcagcaacaggaaaccaatgcaaggggaaggggtgtgttttacttccctagtgtatcactgtcctctgttctcccaaatagttctgtgtttttgtgtttgctgtcaatttcaagaagagacagaaaacattt

SEQ ID NO: 397289 - DNA, 519 bp, Homo sapiens
tctatgatcattacttatgaatatgtcaaaaataacttggcagacatggttgagaatttgggggtcaggagagtatcctgaattatctgggtgagaccatcataatcacaagggtccttacaatagggagggaggaaggtaacagccagagaggacctgggacaacggacagggaaactggagtgatggaggtaggggccatgctgctaggaatgtgggaacatcagaaagatggaatgctcgatattggattctctctcttgaagcctagactgaatagagccctattactccttgattttacttcattgagacttctgacctccagaaatgtaaggtaatacasttgtattatgtgtagctgtaaggttgtggtaatttgttacagcagcaacaggaaaccaatgcaaggggaaggggtgtgttttacttccctagtgtatcactgtcctctgttctcccaaatagttctgtgtttttgtgtttgctgtcaatttcaagaagagacagaaaacattt

SEQ ID NO: 397290 - DNA, 519 bp, Homo sapiens
tctatgatcattacttatgaatatgtcaaaaataacttggcagacatggttgagaatttgggggtcaggagagtatcctgaattatctgggtgagaccatcataatcacaagggtccttacaatagggagggaggaaggtaacagccagagaggacctgggacaacggacagggaaactggagtgatggaggtaggggccatgctgctaggaatgtgggaacatcagaaagatggaatgctcgatattggattctctctcttgaagcctagactgaatagagccctattactccttgattttacttcattgagacttctgacctccagaaatgtaaggtaatacagttgtrttatgtgtagctgtaaggttgtggtaatttgttacagcagcaacaggaaaccaatgcaaggggaaggggtgtgttttacttccctagtgtatcactgtcctctgttctcccaaatagttctgtgtttttgtgtttgctgtcaatttcaagaagagacagaaaacattt

SEQ ID NO: 397291 - DNA, 380 bp, Homo sapiens
tgttctcattgttcaattcccacctgtgagtgagaacatgcagtgattggtttttttgtccttgcgatagtttgctgaraatgatggtttccagcttcatccatgtccctacaaaggacatgaactcatccttttttatggctgcaagcgaggactgagtcagagagatggggatggcagaggagacaaaatgtggtcagggccgtgtaagatgtgaccctgctgccatatctgaaagaaaggctgttggtgtttgtaaaggctttgggcaaattgtgctttgtagacaaaactgtagaagggtctgggtttaagcttagtgtcagcgtgatgaggactagaggtcgcagtgagcttgtgttaagaaatccaccctgcac

SEQ ID NO: 397292 - DNA, 266 bp, Homo sapiens
tttagctcttccagcttctggtggcttctctctcccggaatgtggacacatcactgcaatctctgtctctgtgttcacaytgccttctccacttcagtctatgctaaatgtctctctacctcttggtttttttaggacacttgagtttgcatttaagtcccagttgattaatctaagaatatctccctgtttcaagctccttaatttacacctgcaaaagctgttttcccaaatgagatacatgcataatcttcttggaatgaaac

SEQ ID NO: 397293 - DNA, 266 bp, Homo sapiens
tttagctcttccagcttctggtggcttctctctcccggaatgtggacacatcactgcaatctctgtctctgtgttcacattgccttctccacttcagtctatgctaaatgtctctctacctcttgktttttttaggacacttgagtttgcatttaagtcccagttgattaatctaagaatatctccctgtttcaagctccttaatttacacctgcaaaagctgttttcccaaatgagatacatgcataatcttcttggaatgaaac

SEQ ID NO: 397294 - DNA, 266 bp, Homo sapiens
tttagctcttccagcttctggtggcttctctctcccggaatgtggacacatcactgcaatctctgtctctgtgttcacattgccttctccacttcagtctatgctaaatgtctctctacctcttggtttttttaggacacttgagtttgcatttaagtcccagttgattaatctaagamtatctccctgtttcaagctccttaatttacacctgcaaaagctgttttcccaaatgagatacatgcataatcttcttggaatgaaac

SEQ ID NO: 397295 - DNA, 266 bp, Homo sapiens
tttagctcttccagcttctggtggcttctctctcccggaatgtggacacatcactgcaatctctgtctctgtgttcacattgccttctccacttcagtctatgctaaatgtctctctacctcttggtttttttaggacacttgagtttgcatttaagtcccagttgattaatctaagaayatctccctgtttcaagctccttaatttacacctgcaaaagctgttttcccaaatgagatacatgcataatcttcttggaatgaaac

SEQ ID NO: 397296 - DNA, 454 bp, Homo sapiens
ctacaccattacataaccaggtctcagtgttagtccwgtacatacatcacaatctctctctctctctctctccatacaccctggcttcctccttttctcaatgtcataaatctcttcaattccttaagtgtatccagtgatacctataaacaaataagtatctgagaaaagtctcaatcagtttagaaatttatttggtcaaagttaaagaaatatcagtgaaacagcctcaggaggtcttgagaacgtgtgtcaaaggtcgtcgggctacaggttggtttcacacgttttagggagacacaagatatcaatcaatacgtgtaagctgtacattgctttgatatggaaaggcaggacagcccgaaggaggggggatgttggggacttccaggtcataggtggattcagagatttcataggtggttgaaagcgtttatctaatgacctgtaatca

SEQ ID NO: 397297 - DNA, 454 bp, Homo sapiens
ctacaccattacataaccaggtctcagtgttagtccagtacatacatcacaatctctctctctctctctctccatacaccctggcttcctccttttctcaatgtcataaatctcttcaattccttaagtgtatccagtgatacctataaacaaataagtatctgagaaaagtctcaatcagtttagaaatttatttggtcaaagttaaagaaatatcagtgaaacagcctcaggaggtcttgagaacgtgtgtcaaaggtcgtcgggctacaggttggtttyacacgttttagggagacacaagatatcaatcaatacgtgtaagctgtacattgctttgatatggaaaggcaggacagcccgaaggaggggggatgttggggacttccaggtcataggtggattcagagatttcataggtggttgaaagcgtttatctaatgacctgtaatca

SEQ ID NO: 397298 - DNA, 454 bp, Homo sapiens
ctacaccattacataaccaggtctcagtgttagtccagtacatacatcacaatctctctctctctctctctccatacaccctggcttcctccttttctcaatgtcataaatctcttcaattccttaagtgtatccagtgatacctataaacaaataagtatctgagaaaagtctcaatcagtttagaaatttatttggtcaaagttaaagaaatatcagtgaaacagcctcaggaggtcttgagaacgtgtgtcaaaggtcgtcgggctacaggttggtttcacacgttttagggagacayaagatatcaatcaatacgtgtaagctgtacattgctttgatatggaaaggcaggacagcccgaaggaggggggatgttggggacttccaggtcataggtggattcagagatttcataggtggttgaaagcgtttatctaatgacctgtaatca

SEQ ID NO: 397299 - DNA, 197 bp, Homo sapiens
atatccaatcatccgttccgatcatggactgcattgtatttcaggttgattttggtgtgtccttggttgagaggaggagttcattcagttggttagggagcttagagtttcatttttggtttacwcacctatgtccaggtaagagggccccacacaggaggtcttgctcagaacctggcttgcagggctgcttacag

SEQ ID NO: 397300 - DNA, 579 bp, Homo sapiens
catggtgcagcctcgaactcctcggtctcaagctatcttcccacctcagcctcatgttgtagtgaactttgttatgcagtgtctcctattctacatgtgcaggagtatttttacwgtatgtacctggagtggaattgcttggtcattgggcatgtgtgtgttcagctctattgagtggcatcataccgttctccaaagcagttgtaccaatctacaccctcaccagcagtgaatagtcttcccattgttcttcctcaatgaaactagatattcacagccttttaggtttttcctagagtatgaagtggtatctctttggggttttaatgtttatttccctgattagaattgtagttgagcatcttttattatgtttatggaccatttatgttctctcttctgtgaaattcctattcgggttttttgctcattttaaatgttgttgtttgtgtttttcttatataggaactcttcacgcattcaagatgcacatatgttgttcagaatagtacctgagacatagaaacaactttgtaagaatagctatcattatattaccattgtatttaatcctttgtt

SEQ ID NO: 397301 - DNA, 579 bp, Homo sapiens
catggtgcagcctcgaactcctcggtctcaagctatcttcccacctcagcctcatgttgtagtgaactttgttatgcagtgtctcctattctacatgtgcaggagtatttttacagtatgtacctggagtggaattgcttggtcattgggcatgtgtgtgttcagctctattgagtggcatcataccgttctccaaagcagttgtaccaatctacaccctcaccagcagtgaatagtcttcccattgttcttcctcaatgaaactagatattcacagccttttaggtttttcctagagtatgaagtggyatctctttggggttttaatgtttatttccctgattagaattgtagttgagcatcttttattatgtttatggaccatttatgttctctcttctgtgaaattcctattcgggttttttgctcattttaaatgttgttgtttgtgtttttcttatataggaactcttcacgcattcaagatgcacatatgttgttcagaatagtacctgagacatagaaacaactttgtaagaatagctatcattatattaccattgtatttaatcctttgtt

SEQ ID NO: 397302 - DNA, 579 bp, Homo sapiens
catggtgcagcctcgaactcctcggtctcaagctatcttcccacctcagcctcatgttgtagtgaactttgttatgcagtgtctcctattctacatgtgcaggagtatttttacagtatgtacctggagtggaattgcttggtcattgggcatgtgtgtgttcagctctattgagtggcatcataccgttctccaaagcagttgtaccaatctacaccctcaccagcagtgaatagtcttcccattgttcttcctcaatgaaactagatattcacagccttttaggtttttcctagagtatgaagtggtatctctttggggttttaatgtttatttccctgattagaattgtagttgagcatcttttattatgtttatggaccatttatgttytctcttctgtgaaattcctattcgggttttttgctcattttaaatgttgttgtttgtgtttttcttatataggaactcttcacgcattcaagatgcacatatgttgttcagaatagtacctgagacatagaaacaactttgtaagaatagctatcattatattaccattgtatttaatcctttgtt

SEQ ID NO: 397303 - DNA, 457 bp, Homo sapiens
ttctgcagttgcagtcagctttaccttccaaatctcccattaagttatatatttctgcaataaatttcttaatttttaagaattctatttttttgaatatccattttatatcacaccttgttcttrttgtattatcttatcttccctctctgaggaaattaataattacttttttcccacactgcatagactctgtttactttcagttgttttgtttattttttgtttctgtgtttgttattggctgtacctagaatctcatgattgtttgttatctgtttgcgttcaagagcaatacaataaatgtttacggtaagcttcaggttcttaggtaataattgtcaactgtggcttccagacagggcaatcaggtcgagaagttttcccagaaaagctcctcatgacatatccactggtctattcctttgggctgatcatgatcttccaactagagtct

SEQ ID NO: 397304 - DNA, 457 bp, Homo sapiens
ttctgcagttgcagtcagctttaccttccaaatctcccattaagttatatatttctgcaataaatttcttaatttttaagaattctatttttttgaatatccattttatatcacaccttgttcttgttgtattatcttatcttccctctctgaggaaattaataattacttttttcccacactgcatagactctgtttactttcagttgttttgtttattttttgtttctgtgtttgttattggctgtacctagaatctcatgattgtttgttatctgtttgcgttcaagagcaatacaataaatgtttayggtaagcttcaggttcttaggtaataattgtcaactgtggcttccagacagggcaatcaggtcgagaagttttcccagaaaagctcctcatgacatatccactggtctattcctttgggctgatcatgatcttccaactagagtct

SEQ ID NO: 397305 - DNA, 457 bp, Homo sapiens
ttctgcagttgcagtcagctttaccttccaaatctcccattaagttatatatttctgcaataaatttcttaatttttaagaattctatttttttgaatatccattttatatcacaccttgttcttgttgtattatcttatcttccctctctgaggaaattaataattacttttttcccacactgcatagactctgtttactttcagttgttttgtttattttttgtttctgtgtttgttattggctgtacctagaatctcatgattgtttgttatctgtttgcgttcaagagcaatacaataaatgtttacggtaagcttcagkttcttaggtaataattgtcaactgtggcttccagacagggcaatcaggtcgagaagttttcccagaaaagctcctcatgacatatccactggtctattcctttgggctgatcatgatcttccaactagagtct

SEQ ID NO: 397306 - DNA, 590 bp, Homo sapiens
catgacatatccactggtctattcctttgggctgatcatgatcttccaactagagtcttccagtcttctctgaggatataagactaatagactgttatgttttgaatctagatagaggtgaaaattggggagatctagctttcagtagttactgttcrttttgcacccctaatttatgtatgaccattgaagatgatattgccagtactaagattccttgttacctctctagacagcaaatgtctacttttccaccagcagaacctagaggcattcatgcggcttgatggagtggacattggaaacagtctttcaaccaatcttcctggggttttagccctacctttacttctactttcagaggtatcccgtgcaaccaatttatgaacattttgtagaatcagatttccccgctacttacaattttacactttttggtaagctaagtcagttaccagccatttatggacttcctgttttcaaaaatgttgctgttttctttttatatcacttgaataagccatttgtcatcatgttatagtttcaggtgggaaaataagtctctctatgtgtttaatatgccatatttg

SEQ ID NO: 397307 - DNA, 590 bp, Homo sapiens
catgacatatccactggtctattcctttgggctgatcatgatcttccaactagagtcttccagtcttctctgaggatataagactaatagactgttatgttttgaatctagatagaggtgaaaattggggagatctagctttcagtagttactgttcgttttgcacccctaatttatgtatgaccattgaagatgatattgccagtactaagattccttgttacctctctagacagcaaatgtctacttttccaccagcagaacctagaggcattcatgcrgcttgatggagtggacattggaaacagtctttcaaccaatcttcctggggttttagccctacctttacttctactttcagaggtatcccgtgcaaccaatttatgaacattttgtagaatcagatttccccgctacttacaattttacactttttggtaagctaagtcagttaccagccatttatggacttcctgttttcaaaaatgttgctgttttctttttatatcacttgaataagccatttgtcatcatgttatagtttcaggtgggaaaataagtctctctatgtgtttaatatgccatatttg

SEQ ID NO: 397308 - DNA, 590 bp, Homo sapiens
catgacatatccactggtctattcctttgggctgatcatgatcttccaactagagtcttccagtcttctctgaggatataagactaatagactgttatgttttgaatctagatagaggtgaaaattggggagatctagctttcagtagttactgttcgttttgcacccctaatttatgtatgaccattgaagatgatattgccagtactaagattccttgttacctctctagacagcaaatgtctacttttccaccagcagaacctagaggcattcatgcggcttgatggagtggacattggaaacagtctttcaaccaatcttcctggggttttagccctacctttacttctactttcagaggtatcccstgcaaccaatttatgaacattttgtagaatcagatttccccgctacttacaattttacactttttggtaagctaagtcagttaccagccatttatggacttcctgttttcaaaaatgttgctgttttctttttatatcacttgaataagccatttgtcatcatgttatagtttcaggtgggaaaataagtctctctatgtgtttaatatgccatatttg

SEQ ID NO: 397309 - DNA, 524 bp, Homo sapiens
aattttacactttttggtaagctaagtcagttaccagccatttatggacttcctgttttcaaaaatgttgctgttttctttttatatcacttgaataagccatttgtcatcatgttatagtttcaggtgggaaaataagtctctctatgtgtttaatatgccatatttgctcaggtgcctgcawctactctcatcattttttgaagaaaggctaaattgtaatgacactaacaactagtcttcaaagtttggtttataatttttaatggtgtttatttttaacaaaattggtggagtttttttttctttgtatattgatttttcttttggttttcagttgttttaagaaataaatggagggagagatatgcttcctttgctcccattaaccaaaagaatagtttgaagaatgcaggaattaacttttccattaagtttaagagggcctgcttgagacacagctgggccttgagcttttaaaggtgctataactttacaccggtttcatttttttctattgttgg

SEQ ID NO: 397310 - DNA, 474 bp, Homo sapiens
gatatgcttcctttgctcccattaaccaaaagaatagtttgaagaatgcaggaattaacttttccattaagtttaagaggrcctgcttgagacacagctgggccttgagcttttaaaggtgctataactttacaccggtttcatttttttctattgttggtatcttcaaatgatctcatttctctagatttatttttatagttaaattttccctaaaaaattaacctcttcatatatatttccaaatataatgaccaaaaggtacatattacattcttttgaaattttcagttatccagttttccatttttcttgttatattttaataggctctctcttttttgtcatctaatttgtttgtcctttcaaagaaataattttttggatttattgaaaaattccattgctgttgggatgggagaagattaaatccttagaataataggccaggcatggtggctcacacctgtaatc

SEQ ID NO: 397311 - DNA, 474 bp, Homo sapiens
gatatgcttcctttgctcccattaaccaaaagaatagtttgaagaatgcaggaattaacttttccattaagtttaagagggcctgcttgagacacagctgggccttgagcttttaaaggtgctataactttacaccggtttcatttttttctattgttggtatcttcaaatgatctcatttctctagatttatttttatagttaaattttccctaaaaaattaacctcttcatatatatttycaaatataatgaccaaaaggtacatattacattcttttgaaattttcagttatccagttttccatttttcttgttatattttaataggctctctcttttttgtcatctaatttgtttgtcctttcaaagaaataattttttggatttattgaaaaattccattgctgttgggatgggagaagattaaatccttagaataataggccaggcatggtggctcacacctgtaatc

SEQ ID NO: 397312 - DNA, 560 bp, Homo sapiens
ttttccatttttcttgttatattttaataggctctctcttttttgtcatctaatttgtttgtcctttcaaagaaataattttttgkatttattgaaaaattccattgctgttgggatgggagaagattaaatccttagaataataggccaggcatggtggctcacacctgtaatcccagcactttgggaggccgaggtgggtggatcacttgaggacaggggttcaaggccagcctggccgatatggtgaaaccccttctctactaaaaacacaaaaatacaaaaattagcagggcatggtggcatgtgcctgtagtctcagctacttgtgaaactgaggcacaagaaatcactcaaacccgggagatggaggttgtattgagccaagattgtgtcactgcactccagcctgggtgacagagcaacactctgtctcaaaaaaaacaaacaaagaaacaaaaacaaaacaaaacaaaaaagaactttaaataatagtatattataattttgcagattataagatcaatagatatttattgtaaaatgcacaaatagtgcaa

SEQ ID NO: 397313 - DNA, 627 bp, Homo sapiens
tcttgttatattttaataggctctctcttttttgtcatctaatttgtttgtcctttcaaagaaataattttttggatttattgaaaaattccattgctgttgggatgggagaagattaaatccttagaataataggccaggcatggtggctcacacctgtaatcccagcactttgggaggccgaggtgggtggatcacttgaggacaggggttcaaggccagcctggccgatatggtgaaaccccttctctactaaaaacacaaaaatacaaaaattagcagggcatggtggcatgtgcctgtagtctcagctacttgygaaactgaggcacaagaaatcactcaaacccgggagatggaggttgtattgagccaagattgtgtcactgcactccagcctgggtgacagagcaacactctgtctcaaaaaaaacaaacaaagaaacaaaaacaaaacaaaacaaaaaagaactttaaataatagtatattataattttgcagattataagatcaatagatatttattgtaaaatgcacaaatagtgcaacatttcttaaagtagaccgtgaaatacttcatgttgccatgtttctccaagaggtactattgggccttcataagaagc

SEQ ID NO: 397314 - DNA, 560 bp, Homo sapiens
ttttccatttttcttgttatattttaataggctctctcttttttgtcatctaatttgtttgtcctttcaaagaaataattttttggatttattgaaaaattccattgctgttgggatgggagaagattaaatccttagaataataggccaggcatggtggctcacacctgtaatcccagcactttgggaggccgaggtgggtggatcacttgaggacaggggttcaaggccagcctggccgatatggtgaaaccccttctctactaaaaacacaaaaatacaaaaattagcagggcatggtggcatgtgcctgtagtctcagctacttgtgaaactgaggcacaagaaatcactcaaacccgggagatggaggttgtattgagccaagattgtgtcactgcactccagcctgggtgacagagcaacactctgtctcaaaamaaacaaacaaagaaacaaaaacaaaacaaaacaaaaaagaactttaaataatagtatattataattttgcagattataagatcaatagatatttattgtaaaatgcacaaatagtgcaa

SEQ ID NO: 397315 - DNA, 560 bp, Homo sapiens
ttttccatttttcttgttatattttaataggctctctcttttttgtcatctaatttgtttgtcctttcaaagaaataattttttggatttattgaaaaattccattgctgttgggatgggagaagattaaatccttagaataataggccaggcatggtggctcacacctgtaatcccagcactttgggaggccgaggtgggtggatcacttgaggacaggggttcaaggccagcctggccgatatggtgaaaccccttctctactaaaaacacaaaaatacaaaaattagcagggcatggtggcatgtgcctgtagtctcagctacttgtgaaactgaggcacaagaaatcactcaaacccgggagatggaggttgtattgagccaagattgtgtcactgcactccagcctgggtgacagagcaacactctgtctcaaaaaaaacaaacaaasaaacaaaaacaaaacaaaacaaaaaagaactttaaataatagtatattataattttgcagattataagatcaatagatatttattgtaaaatgcacaaatagtgcaa

SEQ ID NO: 397316 - DNA, 627 bp, Homo sapiens
tcttgttatattttaataggctctctcttttttgtcatctaatttgtttgtcctttcaaagaaataattttttggatttattgaaaaattccattgctgttgggatgggagaagattaaatccttagaataataggccaggcatggtggctcacacctgtaatcccagcactttgggaggccgaggtgggtggatcacttgaggacaggggttcaaggccagcctggccgatatggtgaaaccccttctctactaaaaacacaaaaatacaaaaattagcagggcatggtggcatgtgcctgtagtctcagctacttgtgaaactgaggcacaagaaatcactcaaacccgggagatggaggttgtattgagccaagattgtgtcactgcactccagcctgggtgacagagcaacactctgtctcaaaaaaaacaaacaaagaaacaaaaacaaaacaaaacaaaaaagaactttaaataatagtatattataattttgcagattataagatcaatagatatttattgtaaaatrcacaaatagtgcaacatttcttaaagtagaccgtgaaatacttcatgttgccatgtttctccaagaggtactattgggccttcataagaagc

SEQ ID NO: 397317 - DNA, 627 bp, Homo sapiens
tcttgttatattttaataggctctctcttttttgtcatctaatttgtttgtcctttcaaagaaataattttttggatttattgaaaaattccattgctgttgggatgggagaagattaaatccttagaataataggccaggcatggtggctcacacctgtaatcccagcactttgggaggccgaggtgggtggatcacttgaggacaggggttcaaggccagcctggccgatatggtgaaaccccttctctactaaaaacacaaaaatacaaaaattagcagggcatggtggcatgtgcctgtagtctcagctacttgtgaaactgaggcacaagaaatcactcaaacccgggagatggaggttgtattgagccaagattgtgtcactgcactccagcctgggtgacagagcaacactctgtctcaaaaaaaacaaacaaagaaacaaaaacaaaacaaaacaaaaaagaactttaaataatagtatattataattttgcagattataagatcaatagatatttattgtaaaatgcacaaatagtgcaacatttcttaaagtagaccgtgaaatacttcatgttgccatgttyctccaagaggtactattgggccttcataagaagc

SEQ ID NO: 397318 - DNA, 547 bp, Homo sapiens
actcaaacccgggagatggaggttgtattgagccaagattgtgtcactgcactccagcctgggtgacagagcaacactctgtctcaaaaaaaacaaacaaagaaacaaaaacaaaacaaaacaaaaaagaactttaaataatagtatattataattttgcagattataagatcaatagatatttattgtaaaatgcacaaatagtgcaacatttcttaaagtagaccgtgaaatacttcatgttgccatgtttctccaagaggtactattgggccttcataagaagcaattcttccttatataggactgtttgtctcaatgcactgtttggcccaatgcatgctgcatgtgatctctaccctttacttgtaagtgcttgccatgtctccatcattgatacaaccaaaaataacctacatttccagaatcactccaaaggaatggtcctgagaaagagttgaaaattctgaactcctcagattagatctctattaaataattgaagcagtgtgctaactaatatttgcaargctgttcattatacaag

SEQ ID NO: 397319 - DNA, 425 bp, Homo sapiens
agtgatagagatttttaattctttttgagatcatgtaattatacccatgacaaggtaagtttgattcagaataatttctgccaaaataaaggatgctgttgatggcctgcttgtcccctgcctattgacyattattctcaaactcaagcaaaattaatttttaaataacaggataagaaatattagtaagctctgccttttgtgggtcaggttgaaagtatggaagaaattcagaaaggacatagtcaggaatagatgagaaaagaaaaatatatattattttggccattgatatggtttggctctgtgtccccacccaaatctcatcttgaattgtaatccccacatataaaggaaggaacctggtgggaggtgattggatcatgacagcagcttcccccatgctgttctcatgataatgagtt

SEQ ID NO: 397320 - DNA, 425 bp, Homo sapiens
agtgatagagatttttaattctttttgagatcatgtaattatacccatgacaaggtaagtttgattcagaataatttctgccaaaataaaggatgctgttgatggcctgcttgtcccctgcctattgactattattctcaaactcaagcaaaattaatttttaaataacaggataagaaatatkagtaagctctgccttttgtgggtcaggttgaaagtatggaagaaattcagaaaggacatagtcaggaatagatgagaaaagaaaaatatatattattttggccattgatatggtttggctctgtgtccccacccaaatctcatcttgaattgtaatccccacatataaaggaaggaacctggtgggaggtgattggatcatgacagcagcttcccccatgctgttctcatgataatgagtt

SEQ ID NO: 397321 - DNA, 425 bp, Homo sapiens
agtgatagagatttttaattctttttgagatcatgtaattatacccatgacaaggtaagtttgattcagaataatttctgccaaaataaaggatgctgttgatggcctgcttgtcccctgcctattgactattattctcaaactcaagcaaaattaatttttaaataacaggataagaaatattagtaagctctgccttttgtgggtcaggttgaaagtatggaagaaattcagaaaggacatagtcaggaatagatgagaaaagaaaaatatatattattttggccattgatatggtttggctctgtgtccccacccaaatctcatcttsaattgtaatccccacatataaaggaaggaacctggtgggaggtgattggatcatgacagcagcttcccccatgctgttctcatgataatgagtt

SEQ ID NO: 397322 - DNA, 601 bp, Homo sapiens
tagtcaggaatagatgagaaaagaaaaatatatattattttggccattgatatggtttggctctgtgtccccacccaaatctcatcttgaattgtaatccccacatataaaggaaggaacctggtgggaggtgattggatcatgrcagcagcttcccccatgctgttctcatgataatgagttaagttctcaagagatctgatgggtttataagtgtttgacagttcctccttcacatgcttactttctcccttgcctgccaccatagaagatgtgtctgcttctcctcccactatcatggtaagtttcctgaggcctctccagcatgcagaactgtgagtcaattaaaccttttttcctttataaattacccagtctcaggaaagtcttttatgacagtgtgaaagcggactaatacagccatgagaaatgaataacggttaaatggtaggaagaagaaagaacattcttggcctagagagtacaaaaggaaagccatggggttggacctaaaaagaatacaaaggaagaggagagaagagtactaattgtgctcaggagctgaattgggaaattttttacaaaaccaagaaataccaaa

SEQ ID NO: 397323 - DNA, 601 bp, Homo sapiens
tagtcaggaatagatgagaaaagaaaaatatatattattttggccattgatatggtttggctctgtgtccccacccaaatctcatcttgaattgtaatccccacatataaaggaaggaacctggtgggaggtgattggatcatgacagcagcttcccccatgctgttctcatgataatgagttaagttctcaagagatctgatgggtttataagtgtttgacagttcctccttcacatgcttactttctcccttgcctgccaccatagaagatgtgtctgcttctcctcccactatcatggtaagtttcctgaggcctctccagcatgcagaactgtgagtcaattaaascttttttcctttataaattacccagtctcaggaaagtcttttatgacagtgtgaaagcggactaatacagccatgagaaatgaataacggttaaatggtaggaagaagaaagaacattcttggcctagagagtacaaaaggaaagccatggggttggacctaaaaagaatacaaaggaagaggagagaagagtactaattgtgctcaggagctgaattgggaaattttttacaaaaccaagaaataccaaa

SEQ ID NO: 397324 - DNA, 523 bp, Homo sapiens
aggcctctccagcatgcagaactgtgagtcaattaaaccttttttcctttataaattacccagtctcaggaaagtcttttatgacagtgtgaaagcrgactaatacagccatgagaaatgaataacggttaaatggtaggaagaagaaagaacattcttggcctagagagtacaaaaggaaagccatggggttggacctaaaaagaatacaaaggaagaggagagaagagtactaattgtgctcaggagctgaattgggaaattttttacaaaaccaagaaataccaaacttagtgaactattgtgggaccagtgaataaagaaatattaaagcgatgaaaaataatttaagtaaatatgagaagaaaaattaagaatatctgtatatttttgatcaaaggttgtaatgattaaagttacattataaattattctatctatggaattaattatgggtcaaaaagaatacaagtcagacaaactataaacttctctaattctttattttggaacttaaataact

SEQ ID NO: 397325 - DNA, 523 bp, Homo sapiens
aggcctctccagcatgcagaactgtgagtcaattaaaccttttttcctttataaattacccagtctcaggaaagtcttttatgacagtgtgaaagcggactaatacagccatgagaaatgaataacggttaaatggtaggaagaagaaagaacattcttggcctagagagtacaaaaggaaagccatggggttggacctaaaaagaatacaaaggaagaggagagaagagtactaattgtgctcaggagctgaattgggaaattttttacaaaaccaagaaataccaaacttagtgaactattgtgggacmagtgaataaagaaatattaaagcgatgaaaaataatttaagtaaatatgagaagaaaaattaagaatatctgtatatttttgatcaaaggttgtaatgattaaagttacattataaattattctatctatggaattaattatgggtcaaaaagaatacaagtcagacaaactataaacttctctaattctttattttggaacttaaataact

SEQ ID NO: 397326 - DNA, 523 bp, Homo sapiens
aggcctctccagcatgcagaactgtgagtcaattaaaccttttttcctttataaattacccagtctcaggaaagtcttttatgacagtgtgaaagcggactaatacagccatgagaaatgaataacggttaaatggtaggaagaagaaagaacattcttggcctagagagtacaaaaggaaagccatggggttggacctaaaaagaatacaaaggaagaggagagaagagtactaattgtgctcaggagctgaattgggaaattttttacaaaaccaagaaataccaaacttagtgaactattgtgggaccagtgaataaagaaatattaaagcratgaaaaataatttaagtaaatatgagaagaaaaattaagaatatctgtatatttttgatcaaaggttgtaatgattaaagttacattataaattattctatctatggaattaattatgggtcaaaaagaatacaagtcagacaaactataaacttctctaattctttattttggaacttaaataact

SEQ ID NO: 397327 - DNA, 530 bp, Homo sapiens
taattatgggtcaaaaagaatacaagtcagacaaactataaacttctctmattctttattttggaacttaaataacttatgtatctaagttaatcagacatttttacgttatttttacaaaagtacctatgcattaatttagaaagatttttattgtctgttttctataaaaataaagtgtaagattttattacttcagataacatttgctacaagtcaatctatgtcttccaagaaaatctcttggtcaggactcatacttctccaccatgtttcagatttgatttcttttcagagaggtaagatttgttgctgtgtctccttaaattgaaatagatgtaattattgtggctatagtgagagtcgtcttcaatatagtaattgtgttctgaaacagtcatctgaaaatgaaatattttctcctctaactggagtctttcatttacaattaacttaaacttttagtctttacactggaaactcttctctaaagaagatatgactattttgttctcataaaagctagactc

SEQ ID NO: 397328 - DNA, 530 bp, Homo sapiens
taattatgggtcaaaaagaatacaagtcagacaaactataaacttctctaattctttattttggaacttaaataacttatgtatctaagttaatcagacatttttacgttatttttacaaaagtacctatgcattaatttagaaagatttttattgtctgttttctataaaaataaagtgtaagattttattacttcagataacatttgctacaagtcaatctatgtcttccaagaaaatctcttggtcaggactcatacttctccaccatgtttcagatttgatttcttttcagagaggtaagatttgttgctgtgtctccttaaattgaaatagatgtaattawtgtggctatagtgagagtcgtcttcaatatagtaattgtgttctgaaacagtcatctgaaaatgaaatattttctcctctaactggagtctttcatttacaattaacttaaacttttagtctttacactggaaactcttctctaaagaagatatgactattttgttctcataaaagctagactc

SEQ ID NO: 397329 - DNA, 225 bp, Homo sapiens
tctcagctaatcaggaggctgaggcagaagaattgcttgaacgtggaaggcagagtttacagtgtgccaagatcacaccaccctactccaacttgggtgacagagcaagackcagtctcaaggaaaaaaaaaaagctcgaaaaatgtttgcttattttggtaaaattattcattgactatgctcagaaatcaagcaaactgtccatatttcattttttgaaatta

SEQ ID NO: 397330 - DNA, 558 bp, Homo sapiens
gtttgcttattttggtaaaattattcattgactatgctcagaaatcaagcaaactgtccatatttcattttttgaaattacatattaaggatctaaaacaaaggataaaatatctgcaaaaatatttgcatttctggataaattagtttcctgatttaactccttgttgacactgaatmtattttaaattaaacaaggtgctgataagacaaaagacaaagaaagaaattcaaaataaaattgaaagatgaaatcagagcttaccagagataaaatttcctctgacagtgtaaaagagatcttcatacaaaaatcagaatttatatagtctctttccaaaagaccataaaaccaatcagttaatagttgatttttatgtgaaaaaagagactgtaaaagaaaaaataatgacaccaaaatcccttttaaattcaaagagtcataaagtttcaaaaaatgtaattcagataagaaattaatgtcagctacattcttccacagtaaaggtttgcatcaacttttcaactaatagctttagcattcattagaaaacttgtt

SEQ ID NO: 397331 - DNA, 558 bp, Homo sapiens
gtttgcttattttggtaaaattattcattgactatgctcagaaatcaagcaaactgtccatatttcattttttgaaattacatattaaggatctaaaacaaaggataaaatatctgcaaaaatatttgcatttctggataaattagtttcctgatttaactccttgttgacactgaatctattttaaattaaacaaggtgctgataagacaaaagacaaagaaagaaattcaaaataaaattgaaagatgaaatcagagcttaccagagataaaatttcctctgacagtgtaaaagagatcttcatacaaaaatcagaatttatatagtctctttccaaaagaccataaaaccaatcagttaatagttgatttttatgtgaaaaaagaractgtaaaagaaaaaataatgacaccaaaatcccttttaaattcaaagagtcataaagtttcaaaaaatgtaattcagataagaaattaatgtcagctacattcttccacagtaaaggtttgcatcaacttttcaactaatagctttagcattcattagaaaacttgtt

SEQ ID NO: 397332 - DNA, 518 bp, Homo sapiens
aaaatatttgttactgatattatgctatgtttttcatgctatcttaaagactttttatagatattattctatgctcacaactagattttgcaattccagtatgcccatgaatggaggaaacctccagttagcttggtaattaattagcttcttttgtgaaatgtccaagctgctaatttctgtctttttattttaaaatagaacaccttttgtttatttctctgagacacagatttctcctacaactccaagtaggagaaataaaaggagaaaaactccagaaagaactgttcggagttggttagaagattgtccagatgatctttattttaatgttgggaaaatatagatgcctatcttggaatcagcaaataaaktatagtcatattaaatttcattctaaatttctgactttacggtttattttatatatataatatattatatataaataaaattttatatatgtatatctgtaaacatatgaaaccatgcatagtacataaaaactaggttca

SEQ ID NO: 397333 - DNA, 499 bp, Homo sapiens
gaagtaaacactacttttgcagaatcttacatgatttcagtagaagggcaaggacatttcagttgggaacagattgctccatggtaatgtgatcactatgtacccaacaatggctctttcttcctarcgtcaatgcagatgttattttcaccttaactattatcattgctgtttctaaccacataaaagtgtatcctttatatatctgaagtaaattcatactagtggtgtaacatctccagccatttaaatgtaaaaacagaaaacgtatgatgtgttgatttactgttttatactcctaacgcatgaagagaagatccttttattcattgcctatacttttatttctaaactttctgtaacactttatcttatatccagcatagaactgagatttgctttttgatttaatctgacaatatttttcctctaataagagtcaagccacttacttttaatgataaattgtgtttgtttatattttgattgccgtatatta

SEQ ID NO: 397334 - DNA, 499 bp, Homo sapiens
gaagtaaacactacttttgcagaatcttacatgatttcagtagaagggcaaggacatttcagttgggaacagattgctccatggtaatgtgatcactatgtacccaacaatggctctttcttcctaacgtcaatgcagatgttattttcaccttaactattatcattgytgtttctaaccacataaaagtgtatcctttatatatctgaagtaaattcatactagtggtgtaacatctccagccatttaaatgtaaaaacagaaaacgtatgatgtgttgatttactgttttatactcctaacgcatgaagagaagatccttttattcattgcctatacttttatttctaaactttctgtaacactttatcttatatccagcatagaactgagatttgctttttgatttaatctgacaatatttttcctctaataagagtcaagccacttacttttaatgataaattgtgtttgtttatattttgattgccgtatatta

SEQ ID NO: 397335 - DNA, 499 bp, Homo sapiens
gaagtaaacactacttttgcagaatcttacatgatttcagtagaagggcaaggacatttcagttgggaacagattgctccatggtaatgtgatcactatgtacccaacaatggctctttcttcctaacgtcaatgcagatgttattttcaccttaactattatcattgctgtttctaaccacatraaagtgtatcctttatatatctgaagtaaattcatactagtggtgtaacatctccagccatttaaatgtaaaaacagaaaacgtatgatgtgttgatttactgttttatactcctaacgcatgaagagaagatccttttattcattgcctatacttttatttctaaactttctgtaacactttatcttatatccagcatagaactgagatttgctttttgatttaatctgacaatatttttcctctaataagagtcaagccacttacttttaatgataaattgtgtttgtttatattttgattgccgtatatta

SEQ ID NO: 397336 - DNA, 499 bp, Homo sapiens
gaagtaaacactacttttgcagaatcttacatgatttcagtagaagggcaaggacatttcagttgggaacagattgctccatggtaatgtgatcactatgtacccaacaatggctctttcttcctaacgtcaatgcagatgttattttcaccttaactattatcattgctgtttctaaccacataaaagtgtatcctttatatatctgaagtaaattcatactagtggtgtaacatctccagccatttaartgtaaaaacagaaaacgtatgatgtgttgatttactgttttatactcctaacgcatgaagagaagatccttttattcattgcctatacttttatttctaaactttctgtaacactttatcttatatccagcatagaactgagatttgctttttgatttaatctgacaatatttttcctctaataagagtcaagccacttacttttaatgataaattgtgtttgtttatattttgattgccgtatatta

SEQ ID NO: 397337 - DNA, 518 bp, Homo sapiens
aaaatatttgttactgatattatgctatgtttttcatgctatcttaaagactttttatagatattattctatgctcacaactagattttgcaattccagtatgcccatgaatggaggaaacctccagttagcttggtaattaattagcttcttttgtgaaatgtccaagctgctaatttctgtctttttattttaaaatagaacaccttttgtttatttctctgagacacagatttctcctacaactccaagtaggagaaataaaaggagaaaaactccagaaagaactgttcggagttggttagaagattgtccagatgatctttattttaatgttgggaaaatatagatgcctatcttggaatcagcaaataaattatagtcatattaaatttcattctaaatttctgactttayggtttattttatatatataatatattatatataaataaaattttatatatgtatatctgtaaacatatgaaaccatgcatagtacataaaaactaggttca

SEQ ID NO: 397338 - DNA, 464 bp, Homo sapiens
ctaaactttctgtaacactttatcttatatccagcatagaactgagatttgctttttgatttaatctgacaatatttttcctctaataagagtcaagccacttacttttaatgataaattgtgtttgtttatattttgattgccgtatattatgctatgatttagatgcacatatctgtcttttgctgtcttgtttgtttttattgcttttgttttgatgttgtgatatttggaagagttaaacttttattctgatggctaccttatgtaatttcataaaatcatctctttctttagacagtagcgaatgtctctaaactaagaacaatggtattagctgtattctctttcttgtcctccctaygtgatttttcatcccacaatttgatttaatcatattaactttgtttcccctggtgccattaagtatgcttacatttctataaacaatatcctttgactcc

SEQ ID NO: 397339 - DNA, 518 bp, Homo sapiens
aaaatatttgttactgatattatgctatgtttttcatgctatcttaaagactttttatagatattattctatgctcacaactagattttgcaattccagtatgcccatgaatggaggaaacctccagttagcttggtaattaattagcttcttttgtgaaatgtccaagctgctaatttctgtctttttattttaaaatagaacaccttttgtttatttctctgagacacagatttctcctacaactccaagtaggagaaataaaaggagaaaaactccagaaagaactgttcggagttggttagaagattgtccagatgatctttattttaatgttgggaaaatatagatgcctatcttggaatcagcaaataaattatagtcatattaaatttcattctaaatttctgactttacggtttattttatatatataatatattatatataaataaaattttatatatgtatatcwgtaaacatatgaaaccatgcatagtacataaaaactaggttca

SEQ ID NO: 397340 - DNA, 639 bp, Homo sapiens
tttcataaaaacagttgtagatattttccttatggaatttatttgtggtgaaatattttaatagacartttaatttgttaaataatttgtctcagataataataattgattaatattaaaactacaaaacaagtagggtcttctttttctatgaaaaatgaaagttgattctgacatttatgtaaacattttaaatattcaaagtatataaatgtgaagtcctatcaagagtaattagacaagagaaagaaataaagggcattcagatcggaaaggaggacatcaaattgttcctatttgcagatgacatgatcttatatataggaaaacctgaagactctaccagaaaacttttagaacaaacaaattcaatgaagttgcaagacacaaaactaatacacaaagattggttgcatttatatttatgaacaacaaactcgctgaaaaagaaattaagaaggcaaacccatttacaatacttaccaaaaataacccagacataaatgtaaccaaggaggtaaaatgaaaactacaaaacactaatgaaagaaattgaagaggatacaaacaaatgaaaagacattcacactcatggatcagaaatatgaatgttgttaaagtgacagtactactcaaaag

SEQ ID NO: 397341 - DNA, 562 bp, Homo sapiens
ctctaccagaaaacttttagaacaaacaaattcaatgaagttgcaagacacaaaactaatacacaaagattggttgcatttatatttatgaacaacaaactcgctgaaaaagaaattaagaaggcaaacccatttacaatacttaccaaaaataacccagacataaatgtaaccaaggaggtaaaatgaaaactacaaaacactaatgaaagwaattgaagaggatacaaacaaatgaaaagacattcacactcatggatcagaaatatgaatgttgttaaagtgacagtactactcaaaagtaacctacagattcaatgcaatctctatcaaaatacctatgaacattcttcacaaaataaaaaaaaatccaaagagagtttatggaatcaaaaaatatcctgaatagccaaagccatcctaagcaaaaagaacaaagctggatgtatcatgctaccagacctcagaatatactacaaaactgtagtaaccaaaacatcatggtattggcataaaaacagacacatagacctatggaatagaataaagaacccagaaaatc

SEQ ID NO: 397342 - DNA, 562 bp, Homo sapiens
ctctaccagaaaacttttagaacaaacaaattcaatgaagttgcaagacacaaaactaatacacaaagattggttgcatttatatttatgaacaacaaactcgctgaaaaagaaattaagaaggcaaacccatttacaatacttaccaaaaataacccagacataaatgtaaccaaggaggtaaaatgaaaactacaaaacactaatgaaagaaattgaagaggatacaaacaaatgaaaagacattcacactcatggatcagaaatatgaatgttgttaaagtgacagtactactcaaaagtaacctacagattcaatgcaatctctatcaaaatacctatgaacattcttcacaaaataaaaaaaaatccaaagagaktttatggaatcaaaaaatatcctgaatagccaaagccatcctaagcaaaaagaacaaagctggatgtatcatgctaccagacctcagaatatactacaaaactgtagtaaccaaaacatcatggtattggcataaaaacagacacatagacctatggaatagaataaagaacccagaaaatc

SEQ ID NO: 397343 - DNA, 562 bp, Homo sapiens
ctctaccagaaaacttttagaacaaacaaattcaatgaagttgcaagacacaaaactaatacacaaagattggttgcatttatatttatgaacaacaaactcgctgaaaaagaaattaagaaggcaaacccatttacaatacttaccaaaaataacccagacataaatgtaaccaaggaggtaaaatgaaaactacaaaacactaatgaaagaaattgaagaggatacaaacaaatgaaaagacattcacactcatggatcagaaatatgaatgttgttaaagtgacagtactactcaaaagtaacctacagattcaatgcaatctctatcaaaatacctatgaacattcttcacaaaataaaaaaaaatccaaagagagtttatggaatcaaaaaatatcctgaatagccaaagccatcctaagcaaaaagaacaaagctggatgtatcatgctaccagayctcagaatatactacaaaactgtagtaaccaaaacatcatggtattggcataaaaacagacacatagacctatggaatagaataaagaacccagaaaatc

SEQ ID NO: 397344 - DNA, 529 bp, Homo sapiens
ccttcaggacattgctctgggaaaatattttatgaataaggcatcaaaagcacaggcaacaaaagaaaaaataaacaaatgggatcacatcaagctaaaaatcttctgcacagcaaaggaaataataaagtgagtgaaaagacaacctacagaatgggagaaaatataaactcatctggcaggaaattaatatcaagaatatacaaggaattcaaacatatcaacagcaaagaagcacaacaatctaattaaatataaacaaatgctctgaacagacatttctcaaaagaagacatacaaatgaccaacaaatawatgaaaaaatgttcaacaccactaatcagcaaggaaatgctaatcaaagccacagtgaggcatcatcttactccagttaggatggctattatagaagagacaaaaataacaaatgctgacaaagacgtgaagaaaagggacctttttttgacagaatctcactctctgtccaggctggagtgcagtggtggtgtaatctggctccctctgcttc

SEQ ID NO: 397345 - DNA, 529 bp, Homo sapiens
ccttcaggacattgctctgggaaaatattttatgaataaggcatcaaaagcacaggcaacaaaagaaaaaataaacaaatgggatcacatcaagctaaaaatcttctgcacagcaaaggaaataataaagtgagtgaaaagacaacctacagaatgggagaaaatataaactcatctggcaggaaattaatatcaagaatatacaaggaattcaaacatatcaacagcaaagaagcacaacaatctaattaaatataaacaaatgctctgaacagacatttctcaaaagaagacatacaaatgaccaacaaatatatgaaaaaatgtkcaacaccactaatcagcaaggaaatgctaatcaaagccacagtgaggcatcatcttactccagttaggatggctattatagaagagacaaaaataacaaatgctgacaaagacgtgaagaaaagggacctttttttgacagaatctcactctctgtccaggctggagtgcagtggtggtgtaatctggctccctctgcttc

SEQ ID NO: 397346 - DNA, 529 bp, Homo sapiens
ccttcaggacattgctctgggaaaatattttatgaataaggcatcaaaagcacaggcaacaaaagaaaaaataaacaaatgggatcacatcaagctaaaaatcttctgcacagcaaaggaaataataaagtgagtgaaaagacaacctacagaatgggagaaaatataaactcatctggcaggaaattaatatcaagaatatacaaggaattcaaacatatcaacagcaaagaagcacaacaatctaattaaatataaacaaatgctctgaacagacatttctcaaaagaagacatacaaatgaccaacaaatatatgaaaaaatgttcaacaycactaatcagcaaggaaatgctaatcaaagccacagtgaggcatcatcttactccagttaggatggctattatagaagagacaaaaataacaaatgctgacaaagacgtgaagaaaagggacctttttttgacagaatctcactctctgtccaggctggagtgcagtggtggtgtaatctggctccctctgcttc

SEQ ID NO: 397347 - DNA, 295 bp, Homo sapiens
ggacagggccaatgctcaggccagggacagggcatgacaggacgtgccagagcagggctgggccaacgtcggggcagggcaaatcagaccaggacacctccaaktccagctctggccctgccttggccctggcccttcctggcctgaccttgtccctggccctgccctatccatgccctgtgtgtttgaccagtgttttataaccagaatcctacaagaaacttaaattagttctttttgtgcatttttagtagagatggggtttcacaatgttgcccaggctggttccaaactc

SEQ ID NO: 397348 - DNA, 595 bp, Homo sapiens
aagcacaacaatctaattaaatataaacaaatgctctgaacagacatttctcaaaagaagacatacaaatgaccaacaaatatatgaaaaaatgttcaacaccactaatcagcaaggaaatgctaatcaaagccacagtgaggcatcatcttactccagttaggatggctattatagaagagacaaaaataacaaatgctgacaaagacgtgaagaaaagggacctttttttgacagartctcactctctgtccaggctggagtgcagtggtggtgtaatctggctccctctgcttctagggttcaaatagttctcctccctcagcctcctgagtagctgaagaaaaaggaactcttatgcactgttggtaggaatgtaaattagtgcagccagtatggagaacagtattgaaacacctcaagcaatcccactactgggaatttatccaaaggaaagaaaagcattatattgcagagacatctacatcccccatgtttattgcaacagtgttcacaatagccaagatatggaatcaacctaggtttccaacaacagaggaatggatttttaaaatatggtatatatacaccacgg

SEQ ID NO: 397349 - DNA, 595 bp, Homo sapiens
aagcacaacaatctaattaaatataaacaaatgctctgaacagacatttctcaaaagaagacatacaaatgaccaacaaatatatgaaaaaatgttcaacaccactaatcagcaaggaaatgctaatcaaagccacagtgaggcatcatcttactccagttaggatggctattatagaagagacaaaaataacaaatgctgacaaagacgtgaagaaaagggacctttttttgacagaatctcactctcygtccaggctggagtgcagtggtggtgtaatctggctccctctgcttctagggttcaaatagttctcctccctcagcctcctgagtagctgaagaaaaaggaactcttatgcactgttggtaggaatgtaaattagtgcagccagtatggagaacagtattgaaacacctcaagcaatcccactactgggaatttatccaaaggaaagaaaagcattatattgcagagacatctacatcccccatgtttattgcaacagtgttcacaatagccaagatatggaatcaacctaggtttccaacaacagaggaatggatttttaaaatatggtatatatacaccacgg

SEQ ID NO: 397350 - DNA, 595 bp, Homo sapiens
aagcacaacaatctaattaaatataaacaaatgctctgaacagacatttctcaaaagaagacatacaaatgaccaacaaatatatgaaaaaatgttcaacaccactaatcagcaaggaaatgctaatcaaagccacagtgaggcatcatcttactccagttaggatggctattatagaagagacaaaaataacaaatgctgacaaagacgtgaagaaaagggacctttttttgacagaatctcactctctgtccaggctggagtgcagtggtggtgtaatctggctccctctgcttctagggttcaaatagttctcctccctcagcctcctgagtagctgragaaaaaggaactcttatgcactgttggtaggaatgtaaattagtgcagccagtatggagaacagtattgaaacacctcaagcaatcccactactgggaatttatccaaaggaaagaaaagcattatattgcagagacatctacatcccccatgtttattgcaacagtgttcacaatagccaagatatggaatcaacctaggtttccaacaacagaggaatggatttttaaaatatggtatatatacaccacgg

SEQ ID NO: 397351 - DNA, 595 bp, Homo sapiens
aagcacaacaatctaattaaatataaacaaatgctctgaacagacatttctcaaaagaagacatacaaatgaccaacaaatatatgaaaaaatgttcaacaccactaatcagcaaggaaatgctaatcaaagccacagtgaggcatcatcttactccagttaggatggctattatagaagagacaaaaataacaaatgctgacaaagacgtgaagaaaagggacctttttttgacagaatctcactctctgtccaggctggagtgcagtggtggtgtaatctggctccctctgcttctagggttcaaatagttctcctccctcagcctcctgagtagctgaagaaaaaggaactcttatgcactgttggtaggaatgtaaattagtgcagccrgtatggagaacagtattgaaacacctcaagcaatcccactactgggaatttatccaaaggaaagaaaagcattatattgcagagacatctacatcccccatgtttattgcaacagtgttcacaatagccaagatatggaatcaacctaggtttccaacaacagaggaatggatttttaaaatatggtatatatacaccacgg

SEQ ID NO: 397352 - DNA, 593 bp, Homo sapiens
tgtgggaacatatttggtcaataaaacacccctaccaaatgctgacaagaaaaaaagttaggtaccacctttcttctctgcagatggcctgagatgggttaatttgaaagaatgcttccaaacctgaggtgacccctgagaacagcataatccactgctgtctcctacattcagtttctcagtctgtgctcktttaattttggggggagggaagccagtcctttaaagcgatcttcagcatgatggcagagccaaggagtgtggacaggtggcacggtgtctgactttgttccatcagccacttgggctttctctgggtcttctctgccctagggatagcactactattgaaaacatgtctttgtgacattgtctatgccaggaactcccaacatattttccttgaaactgatgaaatgaataaaaataaaccaagaggtgtgctgtttgtttctgtttcctcctttctgcagcccttcttgatcatctaatatttttaaatacattgtcgatcaccaaaaggagcataagggctttattggtttgtagcagatgtattaatagcccagcccctattccttacctgtagctgc

SEQ ID NO: 397353 - DNA, 593 bp, Homo sapiens
tgtgggaacatatttggtcaataaaacacccctaccaaatgctgacaagaaaaaaagttaggtaccacctttcttctctgcagatggcctgagatgggttaatttgaaagaatgcttccaaacctgaggtgacccctgagaacagcataatccactgctgtctcctacattcagtttctcagtctgtgctcttttaattttggggggagggaagccagtcctttaaagcgatcttcagyatgatggcagagccaaggagtgtggacaggtggcacggtgtctgactttgttccatcagccacttgggctttctctgggtcttctctgccctagggatagcactactattgaaaacatgtctttgtgacattgtctatgccaggaactcccaacatattttccttgaaactgatgaaatgaataaaaataaaccaagaggtgtgctgtttgtttctgtttcctcctttctgcagcccttcttgatcatctaatatttttaaatacattgtcgatcaccaaaaggagcataagggctttattggtttgtagcagatgtattaatagcccagcccctattccttacctgtagctgc

SEQ ID NO: 397354 - DNA, 593 bp, Homo sapiens
tgtgggaacatatttggtcaataaaacacccctaccaaatgctgacaagaaaaaaagttaggtaccacctttcttctctgcagatggcctgagatgggttaatttgaaagaatgcttccaaacctgaggtgacccctgagaacagcataatccactgctgtctcctacattcagtttctcagtctgtgctcttttaattttggggggagggaagccagtcctttaaagcgatcttcagcatgatggcagagccaaggagtgtggacaggtggcacggtgtctgactttgttccatcagccacttgggctttctctgggtcttctctgccctagggatagcactactattgaaaayatgtctttgtgacattgtctatgccaggaactcccaacatattttccttgaaactgatgaaatgaataaaaataaaccaagaggtgtgctgtttgtttctgtttcctcctttctgcagcccttcttgatcatctaatatttttaaatacattgtcgatcaccaaaaggagcataagggctttattggtttgtagcagatgtattaatagcccagcccctattccttacctgtagctgc

SEQ ID NO: 397355 - DNA, 593 bp, Homo sapiens
tgtgggaacatatttggtcaataaaacacccctaccaaatgctgacaagaaaaaaagttaggtaccacctttcttctctgcagatggcctgagatgggttaatttgaaagaatgcttccaaacctgaggtgacccctgagaacagcataatccactgctgtctcctacattcagtttctcagtctgtgctcttttaattttggggggagggaagccagtcctttaaagcgatcttcagcatgatggcagagccaaggagtgtggacaggtggcacggtgtctgactttgttccatcagccacttgggctttctctgggtcttctctgccctagggatagcactactattgaaaacatgtctttgtgacattgtctatgccaggaactcccaacayattttccttgaaactgatgaaatgaataaaaataaaccaagaggtgtgctgtttgtttctgtttcctcctttctgcagcccttcttgatcatctaatatttttaaatacattgtcgatcaccaaaaggagcataagggctttattggtttgtagcagatgtattaatagcccagcccctattccttacctgtagctgc

SEQ ID NO: 397356 - DNA, 509 bp, Homo sapiens
cagtgatgtaattctgaggcatgttccacgtagcttcccataaaattaagcccagatatctaacacaggaacttacctcttaacacgtgtggtattggcttgtctctctttcctgttttattttgttctcttttccttgtctcactttcactgtgtcctcactcctgctttaagaatacccaaacaaatacgttcatttatttttttagactctcagaacagagttgatagttgaacttctaatctatgwtaatcagcttggatgcaatactgacaggaagatggtgaactcacaatgtctaattaagatacaatttaaaaaatatattgaatcatgtccaaagatttaaaaaacctaagtggcagtgtcacaatttcttctttttagtttacatggtttcttaaatgcctacaattattttaaaggaagccttgagtctaggaaaaattgagacatatggaataaattactaacccatttctccttgaaatccattagatgattgatg

SEQ ID NO: 397357 - DNA, 509 bp, Homo sapiens
cagtgatgtaattctgaggcatgttccacgtagcttcccataaaattaagcccagatatctaacacaggaacttacctcttaacacgtgtggtattggcttgtctctctttcctgttttattttgttctcttttccttgtctcactttcactgtgtcctcactcctgctttaagaatacccaaacaaatacgttcatttatttttttagactctcagaacagagttgatagttgaacttctaatctatgttaatcagcttggatgcaatactgacaggaagatggtgaactcacaatgtctaattaagatamaatttaaaaaatatattgaatcatgtccaaagatttaaaaaacctaagtggcagtgtcacaatttcttctttttagtttacatggtttcttaaatgcctacaattattttaaaggaagccttgagtctaggaaaaattgagacatatggaataaattactaacccatttctccttgaaatccattagatgattgatg

SEQ ID NO: 397358 - DNA, 521 bp, Homo sapiens
attgaatcatgtccaaagatttaaaaaacctaagyggcagtgtcacaatttcttctttttagtttacatggtttcttaaatgcctacaattattttaaaggaagccttgagtctaggaaaaattgagacatatggaataaattactaacccatttctccttgaaatccattagatgattgatgattttttcacatatatttctgaactgaaaagctagttgggaattatttttataaggatatccttatgtaatattttgtttctaacagagaattgaatgtttaaagattaaattattctatccagagaataaaaagcaattatttcacaaggaaaccatgtgtatgttgacacgacattttaaaatctagattttaaaataggtcccatataattttgagtcaattagaatatgtttgtatcagtctgtctacagttttacacctgtcaaaaggtacttgaactaaaagaagtaccttgaacaattttgaaatttattattcctctgaaactgattaaa

SEQ ID NO: 397359 - DNA, 521 bp, Homo sapiens
attgaatcatgtccaaagatttaaaaaacctaagtggcagtgtcacaatttcttctttttagtttacatggtttcttaaaygcctacaattattttaaaggaagccttgagtctaggaaaaattgagacatatggaataaattactaacccatttctccttgaaatccattagatgattgatgattttttcacatatatttctgaactgaaaagctagttgggaattatttttataaggatatccttatgtaatattttgtttctaacagagaattgaatgtttaaagattaaattattctatccagagaataaaaagcaattatttcacaaggaaaccatgtgtatgttgacacgacattttaaaatctagattttaaaataggtcccatataattttgagtcaattagaatatgtttgtatcagtctgtctacagttttacacctgtcaaaaggtacttgaactaaaagaagtaccttgaacaattttgaaatttattattcctctgaaactgattaaa

SEQ ID NO: 397360 - DNA, 521 bp, Homo sapiens
attgaatcatgtccaaagatttaaaaaacctaagtggcagtgtcacaatttcttctttttagtttacatggtttcttaaatgcctacaattattttaaaggaagccttgagtctaggaaaaattgagacatatggaataaattactaacccatttctccttgaaatccattagatgattgatgattttttcacatatatttctgaactgaaaagctagttgggaattatttttataagsatatccttatgtaatattttgtttctaacagagaattgaatgtttaaagattaaattattctatccagagaataaaaagcaattatttcacaaggaaaccatgtgtatgttgacacgacattttaaaatctagattttaaaataggtcccatataattttgagtcaattagaatatgtttgtatcagtctgtctacagttttacacctgtcaaaaggtacttgaactaaaagaagtaccttgaacaattttgaaatttattattcctctgaaactgattaaa

SEQ ID NO: 397361 - DNA, 175 bp, Homo sapiens
gaatcgaatataccatgcttctgtgatgacagttatttcatgctggttgtcacaattttacatgaaaaactaatgaaaaaatgtttttaactgtttctaaaaataacwgtttccaaaacagttttacattcaaaatatgaaaaagatgtatttgtgttccttaatctgatgagat

SEQ ID NO: 397362 - DNA, 605 bp, Homo sapiens
ttttcttgttccagtataatctttttcttgttcacagtaaaatctttcaccttttccacactcagtatgatcttagctgtagatttgtcctttatgtcctttgtgtyaaggcatatattttctatactaaattgatgagaggttttttgtcatgtaagaatatttaattttgccaaacgcttttattgtgtttgttaatttaaccatatggttttcactatatatccaaaggaaagaaaatcagtatatcaaagagttacctgcacccccatgtttattacagcactatgcacagtagccaagatatggaatcaacaaaagtgtccatcaacagatgaatggataaagaaatgtgacatacatatataatggaatattatttagtcataataaagaacaaaatcctgttatttgtggcaacaagaatgcaagtggagggcattatgttaggtgaaataagcctggcatagaaacataaacaccacataactacgtgttctcacttatgtatggaagctaaaatttttaatctcgtagaaatagatagtagagttttggttaccatatcctggaaagagtaggagacagaagagtataagaaaaat

SEQ ID NO: 397363 - DNA, 605 bp, Homo sapiens
ttttcttgttccagtataatctttttcttgttcacagtaaaatctttcaccttttccacactcagtatgatcttagctgtagatttgtcctttatgtcctttgtgtcaaggcatatattttctatactaaattgatgagaggttttttgtcatgtaagaatatttaattttgccaaacgcttttattgtgtttrttaatttaaccatatggttttcactatatatccaaaggaaagaaaatcagtatatcaaagagttacctgcacccccatgtttattacagcactatgcacagtagccaagatatggaatcaacaaaagtgtccatcaacagatgaatggataaagaaatgtgacatacatatataatggaatattatttagtcataataaagaacaaaatcctgttatttgtggcaacaagaatgcaagtggagggcattatgttaggtgaaataagcctggcatagaaacataaacaccacataactacgtgttctcacttatgtatggaagctaaaatttttaatctcgtagaaatagatagtagagttttggttaccatatcctggaaagagtaggagacagaagagtataagaaaaat

SEQ ID NO: 397364 - DNA, 605 bp, Homo sapiens
ttttcttgttccagtataatctttttcttgttcacagtaaaatctttcaccttttccacactcagtatgatcttagctgtagatttgtcctttatgtcctttgtgtcaaggcatatattttctatactaaattgatgagaggttttttgtcatgtaagaatatttaattttgccaaacgcttttattgtgtttgttaatttaaccatatggttttcastatatatccaaaggaaagaaaatcagtatatcaaagagttacctgcacccccatgtttattacagcactatgcacagtagccaagatatggaatcaacaaaagtgtccatcaacagatgaatggataaagaaatgtgacatacatatataatggaatattatttagtcataataaagaacaaaatcctgttatttgtggcaacaagaatgcaagtggagggcattatgttaggtgaaataagcctggcatagaaacataaacaccacataactacgtgttctcacttatgtatggaagctaaaatttttaatctcgtagaaatagatagtagagttttggttaccatatcctggaaagagtaggagacagaagagtataagaaaaat

SEQ ID NO: 397365 - DNA, 605 bp, Homo sapiens
ttttcttgttccagtataatctttttcttgttcacagtaaaatctttcaccttttccacactcagtatgatcttagctgtagatttgtcctttatgtcctttgtgtcaaggcatatattttctatactaaattgatgagaggttttttgtcatgtaagaatatttaattttgccaaacgcttttattgtgtttgttaatttaaccatatggttttcactatatatccaaaggaaagaaaatcagtatatcaaagagttacctgcacccccatgtttattacagcactatgcacartagccaagatatggaatcaacaaaagtgtccatcaacagatgaatggataaagaaatgtgacatacatatataatggaatattatttagtcataataaagaacaaaatcctgttatttgtggcaacaagaatgcaagtggagggcattatgttaggtgaaataagcctggcatagaaacataaacaccacataactacgtgttctcacttatgtatggaagctaaaatttttaatctcgtagaaatagatagtagagttttggttaccatatcctggaaagagtaggagacagaagagtataagaaaaat

SEQ ID NO: 397366 - DNA, 602 bp, Homo sapiens
ataatgtttagatggtggcccttataacattctttctatacttcctacagagttgsagatatgcaatcatagaatatttctgggagctaatcctttagcttgatgaatgaaacaagacttttaaataaaattaaactttcaaattatccaggtaatgggcctgtcttttaattcaatggatatggagcataatgaattatccctgttcattgggtaataagttttcattcttctaatactcaaaatgtcctttaatttttaatagtcatatcattatccctaggtattttagcttctatcttaaattctaaaataattttgaaacaggagaaagtattctttattactatatgtattaaacatcatggttttcaaatttaactgcaaatgtatcttttcattgcttcttggtgacgcccttcaccctatccatattgtcactaccaagtggtgattacttttcaggttcacatacttattctttagaaaaatctctgtgccttataaagaatatgattgttggcattcaaaagccagcgaagtatacattattagcctgttgcctaactcatttctttaagaaactacactaattacccaca

SEQ ID NO: 397367 - DNA, 602 bp, Homo sapiens
ataatgtttagatggtggcccttataacattctttctatacttcctacagagttgcrgatatgcaatcatagaatatttctgggagctaatcctttagcttgatgaatgaaacaagacttttaaataaaattaaactttcaaattatccaggtaatgggcctgtcttttaattcaatggatatggagcataatgaattatccctgttcattgggtaataagttttcattcttctaatactcaaaatgtcctttaatttttaatagtcatatcattatccctaggtattttagcttctatcttaaattctaaaataattttgaaacaggagaaagtattctttattactatatgtattaaacatcatggttttcaaatttaactgcaaatgtatcttttcattgcttcttggtgacgcccttcaccctatccatattgtcactaccaagtggtgattacttttcaggttcacatacttattctttagaaaaatctctgtgccttataaagaatatgattgttggcattcaaaagccagcgaagtatacattattagcctgttgcctaactcatttctttaagaaactacactaattacccaca

SEQ ID NO: 397368 - DNA, 602 bp, Homo sapiens
ataatgtttagatggtggcccttataacattctttctatacttcctacagagttgcagatatgcaatcatagaatatttctgggagctaatcctttagcttgatgaatgaaacaagacttttaaataaaattaaactttcaaattatccaggtratgggcctgtcttttaattcaatggatatggagcataatgaattatccctgttcattgggtaataagttttcattcttctaatactcaaaatgtcctttaatttttaatagtcatatcattatccctaggtattttagcttctatcttaaattctaaaataattttgaaacaggagaaagtattctttattactatatgtattaaacatcatggttttcaaatttaactgcaaatgtatcttttcattgcttcttggtgacgcccttcaccctatccatattgtcactaccaagtggtgattacttttcaggttcacatacttattctttagaaaaatctctgtgccttataaagaatatgattgttggcattcaaaagccagcgaagtatacattattagcctgttgcctaactcatttctttaagaaactacactaattacccaca

SEQ ID NO: 397369 - DNA, 484 bp, Homo sapiens
aatgaaacaagacttttaaataaaattaaactttcaaattatccaggtaatgggcctgtcttttaattcaatggatatggagcataatgaattatccctgttcattgggtaataagttttcattcttctaatactcaaaatgtcctttaatttttratagtcatatcattatccctaggtattttagcttctatcttaaattctaaaataattttgaaacaggagaaagtattctttattactatatgtattaaacatcatggttttcaaatttaactgcaaatgtatcttttcattgcttcttggtgacgcccttcaccctatccatattgtcactaccaagtggtgattacttttcaggttcacatacttattctttagaaaaatctctgtgccttataaagaatatgattgttggcattcaaaagccagcgaagtatacattattagcctgttgcctaactcatttctttaagaaactaca

SEQ ID NO: 397370 - DNA, 602 bp, Homo sapiens
ataatgtttagatggtggcccttataacattctttctatacttcctacagagttgcagatatgcaatcatagaatatttctgggagctaatcctttagcttgatgaatgaaacaagacttttaaataaaattaaactttcaaattatccaggtaatgggcctgtcttttaattcaatggatatggagcataatgaattatccctgttcattgggtaataagttttcattcttctaatactcaaaatgtcctttaatttttaatagtcatatcattatccctaggtattttagcttctatcttaaattctaaaataattttgaaacaggagaaagtattctttattactatatgtattaaacatcatggttttcaaatttaactgcaaatgtatcttttcattgcttcttgrtgacgcccttcaccctatccatattgtcactaccaagtggtgattacttttcaggttcacatacttattctttagaaaaatctctgtgccttataaagaatatgattgttggcattcaaaagccagcgaagtatacattattagcctgttgcctaactcatttctttaagaaactacactaattacccaca

SEQ ID NO: 397371 - DNA, 484 bp, Homo sapiens
aatgaaacaagacttttaaataaaattaaactttcaaattatccaggtaatgggcctgtcttttaattcaatggatatggagcataatgaattatccctgttcattgggtaataagttttcattcttctaatactcaaaatgtcctttaatttttaatagtcatatcattatccctaggtattttagcttctatcttaaattctaaaataattttgaaacaggagaaagtattctttattactatatgtattaaacatcatggttttcaaatttaactgcaaatgtatcttttcattgcttcttggtgacgcccttcaccctatccatattgtcactaccaagtggygattacttttcaggttcacatacttattctttagaaaaatctctgtgccttataaagaatatgattgttggcattcaaaagccagcgaagtatacattattagcctgttgcctaactcatttctttaagaaactaca

SEQ ID NO: 397372 - DNA, 638 bp, Homo sapiens
catctttaaaaagtcttattaaaagattttcagctgttccaaatgggacttattagtggaatgtgttttaaaggatcatatgagatgaatgaaaggtatttgatcctttctttccataataataaaatgatggtttggaaaaagaggctacagtctaaccacagtgctattattaggctttcttgttaaacataggtctaagcctaagtatgtcaatacaacaaatacttactgtttcatttctagtaatgaaaaaaaaaaaacaagtctttctggcataaggatgattttcatctggttattttgaaacatttttgtaaaataagtttacatctataaagaatatttttatttgtaaggaggsgtatgtctctgtgcactggaagagagggaggactaaatcactgggaagtcttatgataaagaagccattggcttaaatcagcaaagcaagccatcccttggtttaaggtgtttttcctggccatcctgtcttgactagaactttacctacacattcctttttggtttaggcaaattatagtatctaaacctgaagtctcagctctgtgtctttgagatataaattttctaccatgtcttctctggaacctgataactatctatctctttaaaat

SEQ ID NO: 397373 - DNA, 606 bp, Homo sapiens
aatacaacaaatacttactgtttcatttctagtaatgaaaaaaaaaaaacaagtctttctggcataaggatgattttcatctggttattttgaaacatttttgtaaaataagtttacatctataaagaatatttttatttgtaaggaggggtatgtctctgtgcactggaagagagggaggactaaatcactgggaagtcttatgataaagaagccattggcttaaatcagcaaagcaagccatyccttggtttaaggtgtttttcctggccatcctgtcttgactagaactttacctacacattcctttttggtttaggcaaattatagtatctaaacctgaagtctcagctctgtgtctttgagatataaattttctaccatgtcttctctggaacctgataactatctatctctttaaaatgcaagtctagggagatgactcatcagaaaaagaagaaaaaggtatttggaaattgtgcaaattaaagcagcccatgatgccaaagtctacacattcctgagtgagtcagttctggccagttctagctggatcaagagagctctgctgggcaggcctgaagagcagctggatggcagacacct

SEQ ID NO: 397374 - DNA, 638 bp, Homo sapiens
catctttaaaaagtcttattaaaagattttcagctgttccaaatgggacttattagtggaatgtgttttaaaggatcatatgagatgaatgaaaggtatttgatcctttctttccataataataaaatgatggtttggaaaaagaggctacagtctaaccacagtgctattattaggctttcttgttaaacataggtctaagcctaagtatgtcaatacaacaaatacttactgtttcatttctagtaatgaaaaaaaaaaaacaagtctttctggcataaggatgattttcatctggttattttgaaacatttttgtaaaataagtttacatctataaagaatatttttatttgtaaggaggggtatgtctctgtgcactggaagagagggaggactaaatcactgggaagtcttatgataaagaagccattggcttaaatcagcaaagcaagccatcccttggtttaaggtgtttttcctggccatcctktcttgactagaactttacctacacattcctttttggtttaggcaaattatagtatctaaacctgaagtctcagctctgtgtctttgagatataaattttctaccatgtcttctctggaacctgataactatctatctctttaaaat

SEQ ID NO: 397375 - DNA, 606 bp, Homo sapiens
aatacaacaaatacttactgtttcatttctagtaatgaaaaaaaaaaaacaagtctttctggcataaggatgattttcatctggttattttgaaacatttttgtaaaataagtttacatctataaagaatatttttatttgtaaggaggggtatgtctctgtgcactggaagagagggaggactaaatcactgggaagtcttatgataaagaagccattggcttaaatcagcaaagcaagccatcccttggtttaaggtgtttttcctggccatcctgtcttgactagaactttacctacacattcctttttggtttaggmaaattatagtatctaaacctgaagtctcagctctgtgtctttgagatataaattttctaccatgtcttctctggaacctgataactatctatctctttaaaatgcaagtctagggagatgactcatcagaaaaagaagaaaaaggtatttggaaattgtgcaaattaaagcagcccatgatgccaaagtctacacattcctgagtgagtcagttctggccagttctagctggatcaagagagctctgctgggcaggcctgaagagcagctggatggcagacacct

SEQ ID NO: 397376 - DNA, 606 bp, Homo sapiens
aatacaacaaatacttactgtttcatttctagtaatgaaaaaaaaaaaacaagtctttctggcataaggatgattttcatctggttattttgaaacatttttgtaaaataagtttacatctataaagaatatttttatttgtaaggaggggtatgtctctgtgcactggaagagagggaggactaaatcactgggaagtcttatgataaagaagccattggcttaaatcagcaaagcaagccatcccttggtttaaggtgtttttcctggccatcctgtcttgactagaactttacctacacattcctttttggtttaggcaaattatagtatctaaacctgaagtctcagctctgtgtctttgagatataaatkttctaccatgtcttctctggaacctgataactatctatctctttaaaatgcaagtctagggagatgactcatcagaaaaagaagaaaaaggtatttggaaattgtgcaaattaaagcagcccatgatgccaaagtctacacattcctgagtgagtcagttctggccagttctagctggatcaagagagctctgctgggcaggcctgaagagcagctggatggcagacacct

SEQ ID NO: 397377 - DNA, 616 bp, Homo sapiens
ttaaacttctgccacatattcagttagccagagaaatggtgctggaactactgacaattttaggcaacaaaatgttttatccaaagagaagagaatgttatatcttaaaaatgaagtgataccatttgtttcttgtggaaacaatgccaattttcttagaactcttagtttgatggttgtaattctgactaaacaaagagttcatactaatgaagaacttccttttaaaatttatttcaaaagtactgtgactcaaagrgtatgggaacaaataaaaccagaactctatctgaatactatttactgaatgtaaaaagacagtggataacataatttttaatgccactttgggatagggaaacatataaagcccacatatctggagatgcatctttgtattaaatagtcaataaagataatacagaaggaatcataatgtataaaaatatttaatgaaaggataaatggattgataaaaaagcactgggctatgcaaccaacaagaatatataatatatgccaagaatcttttggtggtgggtttggttggcctacttgatttattttcatagttggccaaatgacttttagtaaaccgatttatgtttgaccctaa

SEQ ID NO: 397378 - DNA, 560 bp, Homo sapiens
agcacaatctcggctcactgtaacctccgcctcccaggttcaggcaattctcctgcctcagcctcttcagtagctgggattacaggtgcgtgccaccatgccccgctaatttttgtatttttagtagagacagggkttcaccatgttggtcaggctggtctctaattcctgacctcatgatcagcccatctctgcctaccaaagtgctgggattacagacatcagccaccacacccagcctattttacatcttttttatggctgaataatattcccttgcatggatataccacatgaatatttatccactcatcagttgatggacatttggcttgttttcaccttttagctattattaataattgtgatataaactttggtgtacaagcttttgtgtaaacgtatgttttcatttatttaagagtggaatatttgggtcatatggtcactctatgattaactatttggggaaatgccaaactgtttttcaaagtggctacaacattttacattccttctagcagtgtatgagagagtttcagtttcttcacttcctcacc

SEQ ID NO: 397379 - DNA, 560 bp, Homo sapiens
agcacaatctcggctcactgtaacctccgcctcccaggttcaggcaattctcctgcctcagcctcttcagtagctgggattacaggtgcgtgccaccatgccccgctaatttttgtatttttagtagagacaggggttcaccatgttggtcaggctggtctctaattcctgacctcatgatcagcccatctctgcctaccaaagtgctgggattacagacatcagccaccacacccagcctattttacatcttttttatggctgaataatattcccttgcatggatataccacatgaatatttatccactcatcagttgatggacatttggcttgttttcaccttttagctattattaataattgtgatataaactttggtgtacaagcttttgtgtaaacgtatgttttcatttatwtaagagtggaatatttgggtcatatggtcactctatgattaactatttggggaaatgccaaactgtttttcaaagtggctacaacattttacattccttctagcagtgtatgagagagtttcagtttcttcacttcctcacc

SEQ ID NO: 397380 - DNA, 558 bp, Homo sapiens
cttgcaaagaaagatttcttattctaatagatcatgtccctaagaaaaattcattcatatttttcatatacttctgttatctacccctcacaggcagcaagggtagtcaatggcaatgttataaaagttagactaaaatttgacaaactaataatgctggaaccccactataactgcatttctacagaatggagttttctataatgtggatctattcaagatttaaatctaaggatatttgtcttctgaaatatgaatgtgtacataagacagttgtaccacaccctgagtccattctgagtcacaggcctgaggcctcaaaaaaaaaaattatagggcattactagaattaarcacttaaaaatgcataacattattttagttgattcagataagtcactatcattttgttgctgtttaacttttctcttattctcaaacagatgctaattagtagggtaaattagtctaaatgtgcttttgagtttaagccagatgtccacaaatgttagtgtacatcagaattatctgagatgactgataaaagtggaaattctt

SEQ ID NO: 397381 - DNA, 595 bp, Homo sapiens
ataaggttgaatttaggtctaattccaagtattaaaaataaatgtaagataaaatataataactattataaaatataacattaaaaagtatagaaagatcaggtttggaaatttgactatctcttttccccactctccatatcattgtattattgttagcatcataaaatttcatagtgtttatgtctgtctgtgtaaacatacaaacacaagatttctccattgttatacatgtatgatatttttatatacatatatatttataaaaaagaaaaaatatacagatgccaaatgtgagtgtatatataactacctcctrgttaacctgtgtaaccacacctgtgtaaaagaaaatatctatatcctcaatacacacatatgaagcttttacatatatataagtatatacatatataagcatatatataaatatgtatttatatacatgtaaatttgtactcaggtatttttgtgtacatagcagtaaggttttcattagaagatgctgattagctcactggaaactttctggtttgcagaataatatgttgtctttttatacacaaattaatttcctatgaacatgtgtagcata

SEQ ID NO: 397382 - DNA, 528 bp, Homo sapiens
cctgggttcatattccttttctgctactcaccagcactgggtccctgaacacattactgaacatctccaggactaaatgtctgtgctaatgaaataatccacataaagcacttagcacagtgtctggtatagagtgaacacaaatgttctttggttaattcagatattttggcctctttaaagatttcttctcttttggctaacaaaatgggaaacagaataagctgtgtttttaaggcaggagtctccatattcttgtgtgaagaaattatacttctttgcttctttataaatgactcaacataaaggtgggaggtagaggtgactatcaataaaatccttcagtgaaacagagatcaagtgtcactgttgttagrataacggtgttaggagtctccttccctatttccaggtgtgaaaaactacagagaatgctgcagaaagatgtgtggtagttttaactagtttagagttttatgagataaaacattaatatctaccaggagatcccaagacctggggtcacaa

SEQ ID NO: 397383 - DNA, 385 bp, Homo sapiens
ctttcattcattccaactcctgtcttttctcaacacatgagaattctgaacagtctattgctggtctgataatctgttgcttttaactgcataawtctgtttattcacattttctgtgaattacatttaacattgcattttattcttttgatttattctactttttctcttttcctattttctactctcttgcttttgcagggaggagtttagtgcattttgtttatggttcacattgtattctccccccactgctagattgtgttttttgcatttaatttttacccttttaattattatcctaggtattttaacacacatattaaaattaacagcctaaaaataatatctttaatctcttaccagctaaaacaggagcttaaaa

SEQ ID NO: 397384 - DNA, 561 bp, Homo sapiens
gtagagggacagttattactcctcagaagaattggtttgatgtagctctttaaattttaaaattcattaactttgggtagaagcaatagtgttgtttcaggttattacacagtcttctctttctcaaagaccataggcagctctcctcagtccagagggctgagtcttatggcttcaaacacttcttcaggctgtgtcttcaaccaccagttttccccactaagatgttttgctgtatctggctcattgtgccaaacgtattccccatttatgctgatttttttctcaagggaaccctgctctctgtatgcccattatttggctccaattacattttaccacrttctcacactgcagtctgtcacatctgtatataactaaaacccaaatatgaacagagttcaatttcttttctatgaggtttctcagcctcttatagtcaaggtatgtagctaagtgctactgggatatcacctatttccatttgctaaaattctcagcgttacctctagcatggttaatttattggaatgtcacatgtgccactgggatagtttttat

SEQ ID NO: 397385 - DNA, 613 bp, Homo sapiens
cagctgtaaacttcaccagatgttctctaagacttccagttctgatattctcgtctatattctgacatttccaaccttaatcttgtacttcttcttcccaagacagcagacgggaagatcagagaagtatgtcatatctgagtaggaaagaagtcaatcgtgactttcagtaccttttggacactctagtccagaaatgcttctggtggcagaacagtggctactgaaagaaaaaaatgcactaggagacaattatgcaagcaaaaaatgcttatttctttccttctccaaatgygaaaaacaaaaatgtgactgagtactgtatgctattgtaagattttccatttatagagtcttatagtaatattcattcaagtcctaattttccaaggttatttttaacctcagtaacagtatgattgttctacttcactatggtaaccatataacatcaattttccaagacagcctcaattttaattgacttgtccctaatttagaccaaattttagacttatcccttttgtaagtttagggaatatgattacccatgtatttaattatcccctgtcagtgtctctctttcttgattacaataacaaattcgacatga

SEQ ID NO: 397386 - DNA, 562 bp, Homo sapiens
tataaacatgactccgttcagcaaacagaatgcaccatgcttgctatttcacttaaactaaacaggggatgataaaaaagtcaytgaggaaaaattcaataaaattcaacattataaaatgcaatttaaagaaaactatcaacttctgctttttaaattacattacattcatgttttcattttctttcatttttctgaagtctgaactagtattttaaaaagttcttaactgtgttttcttttttttttttttaatttaatctttgctatagatttgaaaatggaatcttcctaccaggaccaacttataacttcaatttttttcctgtttagtaacggtcaggttagtcacaatagattcaactggcaataaggattagaaataaaagcaaataatgaaataaatgtaattgctcactttgttttatagcaataaaagcatatgatctaataaaaaattctaagtatgatccatttgcatactgatttaatggcagataactgagtgaatctggatattcttatagtgttaatggaatagcaatgactaaaaattatttaa

SEQ ID NO: 397387 - DNA, 592 bp, Homo sapiens
caataatgtgttgaataaataaaaataaatatattaagcatttgtgatgtgacttgggctttataaactaaatttttcacaggcacttgtgtaaaaggtaggtttgtagactggtttatactctaatatttcatttgtaaaatggaatggaaacttatctgtgtagaagagatactagatgctagctagatctgtttgaaatcttttcagagccaaggtggctatttaaatatggtggcaatactctgattttatttcctcatttcccttttagttcatgtggctacagtgaagacccactatgtcctaratcccttgctaggtgtaaggggtacagctatgaacaacacatagataccctgcttcagtggagagtagcctagctattaaagcaaaaattaggaataaatatgatgagtgtctttacaagtaaatgcccttttaaattgagcacatattaggtgctcaaaaatcattgttaaataaatcagtaaataaatttgtaaagaggctgtatatcaaaactcaaatcctgacacttacttctagaagtctatttcatagactcacctcttaaaatatctcagtgact

SEQ ID NO: 397388 - DNA, 503 bp, Homo sapiens
gccccagcccatttgatgggcctttttcattcatttgctattgtatttgacaaaatgcctcctagttccagtaagctcggtagcatctcaakgtatagaggtggcagtggaagcaatttgccttaggtacaggcaggaaggaggccacgttgtctatgtagaggtaaaatacagatgaactactgaaggttgatctgctttgtattatcagcctgcaatggttattctaaacaacgtaagtgactaaaataatcccctcactcgtgccacctcctcctctaagcctttgatctcaaagtgggctatgggatttttaagtgaatacttgctggcagctattttcggggttgtcctgtcatttctcaagtccatcaaatgcactttccttgctttcttttgcacagcttctcaaatcacagaggctcgaggctattggtggtttgtacccacacatttatatattgccatcaagttttgttaaaaatgttgtccatgagtttttg

SEQ ID NO: 397389 - DNA, 503 bp, Homo sapiens
gccccagcccatttgatgggcctttttcattcatttgctattgtatttgacaaaatgcctcctagttccagtaagctcggtagcatctcaaggtatagaggtggcagtggaagcaatttgccttaggtacaggcaggaaggaggccacgttgtctatgtagaggtaaaatacagatgaactactgaaggttgatctgctttgtattatcagcctgcaatggtkattctaaacaacgtaagtgactaaaataatcccctcactcgtgccacctcctcctctaagcctttgatctcaaagtgggctatgggatttttaagtgaatacttgctggcagctattttcggggttgtcctgtcatttctcaagtccatcaaatgcactttccttgctttcttttgcacagcttctcaaatcacagaggctcgaggctattggtggtttgtacccacacatttatatattgccatcaagttttgttaaaaatgttgtccatgagtttttg

SEQ ID NO: 397390 - DNA, 634 bp, Homo sapiens
catatcttaagcatatttccacttttctcaaacaactctaccaaaggcaaatgtgcaaacaattgccaaaaactttatattagaaagaaagaattaaattaaatgtgtatatgtaccacttaatttgccaaatgcattctaataccaaaggataatttttgggggttttgctggtttgcttttcctgaaatgctttgtaaataatcaagagctaagcacaaacctgcccaaagggaaaaacatgagataagtaaaaataattataaatataaatacatagtaaatgaaaatttactattgtcatttcaaatctcccagttatagtttttcctcttccactccctccccaattttgtcccaggtgcctaggattcactgctcccttatccttcctcctatcaaacctagtaactgggaataatctgataaaaattgttttagttattggaggaaaagtctgtaatgagccaatcagggaatccattctaaaagtactaataacatccacatttcttcagtgcccattaaggccatgcattttaatttaactcctcaatatgcagaygaggagaggaaactgaatcttaaagaagatcaggaacttgttcaaggtcacaaggttagcaaacggcaa

SEQ ID NO: 397391 - DNA, 546 bp, Homo sapiens
agcacctgcatttaaaattatgaggttctaatttcccaggtgggtaagggactcagactcatattttttttctttaattgtgaaaataacgtaataggccatttcttccatacctcacatcgggtartaacatctataatcacaacacacaggaagctattcatgacataattattttataagtgagaaagataggttataaaacactgtatgatataaaagtcaatttttgtaaaataaaataatatactgagttcctacaataggccaggcaatgagctggttgaggcagattacagaggagtgagtttcagggaaaaggtttttctggaatatgtttctccagaacaatatattattcattgctgctatagactgaatgtttatgtcccccgcaaattcacagtgcaatctaattttgaatgcaattatatttggaggtgtttcctttgggaagtgactgggtgatgaggaggaagccttgtgaatgggattagtccccctacaaaagagaagccagagacttcccttgccctttctcccatg

SEQ ID NO: 397392 - DNA, 546 bp, Homo sapiens
agcacctgcatttaaaattatgaggttctaatttcccaggtgggtaagggactcagactcatattttttttctttaattgtgaaaataacgtaataggccatttcttccatacctcacatcgggtaataacatctataatcacaacacayaggaagctattcatgacataattattttataagtgagaaagataggttataaaacactgtatgatataaaagtcaatttttgtaaaataaaataatatactgagttcctacaataggccaggcaatgagctggttgaggcagattacagaggagtgagtttcagggaaaaggtttttctggaatatgtttctccagaacaatatattattcattgctgctatagactgaatgtttatgtcccccgcaaattcacagtgcaatctaattttgaatgcaattatatttggaggtgtttcctttgggaagtgactgggtgatgaggaggaagccttgtgaatgggattagtccccctacaaaagagaagccagagacttcccttgccctttctcccatg

SEQ ID NO: 397393 - DNA, 575 bp, Homo sapiens
aatatctgacacagggccattacaaacaatgttgctatgaatattcttgcacatgcctgttggacaatatatgtgaaatatatatcgcagagtagaataattgggcaatatggtatgaatatgttcatcactactaaatattgacaaatagttttccaaagtggttatattgatttacaactcctatcaataattgatragagttctagttgctaaacatcctctccaacacttgacattgtcattttagccagtctggtgggtgtagagtggcatcacattttggttttaatttgcaatttacttgatgaccaaataaagttgagatcctttttataggtctatgggctaccaagatatcccctattgtgaagtgtctattcaagtcatttgccaatgtttccactgggctatctgacattttcttactgatgtgcaagcattctttaagtattatggatatgtaagacctttatatatataagtattcatatgtgtgtcaaatacatgacaaataaactcccactcactcttttaatgataacttatgataataagttcttaactttaatgta

SEQ ID NO: 397394 - DNA, 590 bp, Homo sapiens
gaattctactgagcaataaaaaggaataarttattaatacatgcagcaacatggatgaatctcaaaaacattatgcaaagtgaaaggagccaagcacaagaactacatgtgttaagattccatttatatgaaatttctacagaaagcaaaactattgcccagaaaagcagatcaatagttatgtaggtatgggtattgtagttgggactgatggcagatgggcacagagaaactttctgtggtgacagaagtgttgtaaaactgaactgtggtggtagatgcacaagtgtacacatttattaaaattcattgaactgtatacagaaaatggatacattttataatatgtaaatggtacccaaataaaactgttaaaatatatttgaacaggggatacaatggtcactggttgacttttagcttcctagtatgcctttcactgttattttggtaatagcagtgtaatcttttcctcattgacgaaagccaagggaagggcggttagtactctctgtttggaagaagggaaaatcttacttcaaactttcttaagaaataaagaagaggattaagttgttggcagtatttca

SEQ ID NO: 397395 - DNA, 522 bp, Homo sapiens
acaacatatttcatcatgagaaatgcattcttgttgacttggtttgactactttttcctgggctgcggagacagagataaagttaaccacctgggctgagtgtttgtgtggtcccttctttctttccctcctcaattatggtttttaatgagtggattctaaaaacttttttgatgttcttaatccatccatcctcttttcctagtactattaaatacattaagtatttttttttttaaacagaacttatcttatatctggatgatattttagtgcatcttggaatctatcccaggtatgtgcctgggcagaaagacatcaaggcttgagcatcagtaaaagtaayaatatattttcagaatacaaagattttagattacagaaacttaatagtatcatgtagtttattttattctaacaaggccctctggcacagtatttggggggcgttaattttgaggacagatcaccccagaagctgttatttacaaacagtgaggacttggacaaaggacttaattt

SEQ ID NO: 397396 - DNA, 562 bp, Homo sapiens
ggttcagcagctactggacatttgttcatgtcactaaaagccacgccctccttcttgaatgctctgtctggcttaccctggaaaattctgggaattcctttagcatgccccacaggaagaaataaaaaacactgaaatactccatggaggatttaggaagaccatgagcattcttgattttgtcagtactttattcacagttcaatcaagttgtttggtatattggaaatagttcgaatattcaggtgtaattgggttaatgaataacaagatggggctccagtttcaatggtgtcagaacccctgcgttgaaccagagcttctcaaactttgatgtgcagacaatcacatgaggaactcgcttagaatgcagtttgcttccatgggttatggatgaggcttgagattcctcatgtttcctttctttctttcttttctctctcttcattctcactgcctacatgctcccctacatgtgtacccaatccctaatcycatcacatgtacgtgtccaattttctttcagtcattttgcatacatttgaccctgtgtatccatggt

SEQ ID NO: 397397 - DNA, 506 bp, Homo sapiens
tttatccactttcccttccttaccagctaccttcgttttcattttctgaaatgacaaagcagtctgccttttatctgtttatcctgccaaagcyccataggtactagcaggctggcctttgaagcgggggtgggtgggctggaggcagctccattcattttccagttaagctggaagctttgtgggcacattctcaggagggaaggacgggttcccagaggaaacctgcagaatgggcctgagttggaaagggattttcataaagggaaagaccagtcaggatgcaaagtgaaattggtctttagaagttgggagggagcttgttgcccagggagcggttgctgggtgggacccctggggaaggtccagaaatttggaggaggtgggcaggaccggagttagttgacaaggggtggaaactgtgtctgggcatctgcgtggtacagatccccaagcacacgaccacctgggcatatttcctgcgtatttttatgccttaagtgtgt

SEQ ID NO: 397398 - DNA, 593 bp, Homo sapiens
ggcctgagacaggaaacggttaactgggggctctgggtctgggggtgacctattccctgggtgtgctgggggccttaagtgcccaaagcagagagggagggtagagacgataayggctaagatcatggactctggggccaggctgcctgggttcaaatcccagccctgccacttacagagagttagcctctctgtgcctcagtttctctatgtaaaagggagactgatacaaatcaccctcatatatggttacaacaaaaatcagagtcaagtgttggctcacacctgtagtctcaacactttgggaggcccaggcagtaagatggctggaagccaggggtttgagactagcctgggcaacataggaatacaaaataaacaatatacaaaattagccagatgtggaggcatgcacctatagtcctagctacttggggaggctaaggtgggaggattgcctgaatccaggagttcgaggttgcagtgagctgtgatcacactgctgcactccagcctgagtgacagagtaggaccctatcgtgaaaaaaagaaaaagaaaaagaaacaaacaaaaaaacccaaaaaacaccaga

SEQ ID NO: 397399 - DNA, 218 bp, Homo sapiens
tggggagtgggaggagggagaagatcaggaaaaataactaatggatactayacttaatgcctgggttataaaataatctgtataacaaacccccatgacacacattctcctctgtaacaaacctgcacatcctgtacatgtgcccctgaacttaaaagttaaaaaataaaaaggaaaaaaaaaagaaaagggaaagaaatacattacattagtactta

SEQ ID NO: 397400 - DNA, 593 bp, Homo sapiens
tttcccacactcttgttcaacttcttcccactcattcttcaagactcctcctccagcattctttctgtggcagacacttgaaattacctacccaatattcatttcttccttccaatattaattttgtaatttttgatttttaaatttaaatttaatttttattttattttaaattaatttttttgagacagtgtcttgctctgttgcccaggctggagtgcrctggcatgatcacgggtcactgcagccttgatctcctgggtttcagtgagtctctagctttagtctccccaaatactgtgatgatgggcatgagccacagcacttgactaatttttttattttttgtagagataaggtctctctatgttgcccacactggtcttgaattcctgggctcaagagatcctcctgccttggcctcccaaagtgctgggattagaggtgtgagccactgtgcccagccccttatgatatacccagttcacagggtgaacacccctaatccaaaaagtcaagatccaaaatactccaaaacctaaaactttttgagcgctgacatgatggcacatgtggaaaattccagacctgac

SEQ ID NO: 397401 - DNA, 593 bp, Homo sapiens
tttcccacactcttgttcaacttcttcccactcattcttcaagactcctcctccagcattctttctgtggcagacacttgaaattacctacccaatattcatttcttccttccaatattaattttgtaatttttgatttttaaatttaaatttaatttttattttattttaaattaatttttttgagacagtgtcttgctctgttgcccaggctggagtgcgctggcatgatcacgggtcactgcagccttgatctcctgggtttcagtgagtctctagctttagtctccccaaatactgtgatgaygggcatgagccacagcacttgactaatttttttattttttgtagagataaggtctctctatgttgcccacactggtcttgaattcctgggctcaagagatcctcctgccttggcctcccaaagtgctgggattagaggtgtgagccactgtgcccagccccttatgatatacccagttcacagggtgaacacccctaatccaaaaagtcaagatccaaaatactccaaaacctaaaactttttgagcgctgacatgatggcacatgtggaaaattccagacctgac

SEQ ID NO: 397402 - DNA, 613 bp, Homo sapiens
gtgatccaaatgcctcccaccaggccccacctccagcatcggggattacaattcaacatgagatttggacagggacaaatttccaaactatatcactggctctcccacttctggagaattaggaaggatggttgggtaggatcatatgactagctctgaccaatgaggatggagcagaagtgagctccttcagaggtctctttcctactctggtaatgaccgaataactgctccagacagagctgctccatcagcctggagcctggagtggcagcgttgtgggggctccttgggaaraacactctagacggagactaacgtgtgaagtttaccaggctgtgttctcagtacctgcactcacgtgggaggaagaaagcccaactgggcagacagaggagtgggctccacaaagagctctgagacttgtggtccttcagtcatgtcccaagttgcagcaataatctgggcttttataccctcatgtcaacagctcactggatgtgagctacccctatggaaggggagaggtaattccagcactttgggaggctgaggtgggtgaatcgcttgagcccaggagtttgagaccagcctgggcaacagggcgaaaccc

SEQ ID NO: 397403 - DNA, 570 bp, Homo sapiens
tagttcattttcatactgctatgaagaaatacctgagactgggtaatttataaagaaaaagtggtttaatgaactcacatttccacatggctggggaagcctcacaatcgtggtggaaggggaaggaggagcaaagrcacatcttacatggcagcaggcatgagggtgtgtgcaggagaactagctgccctttataaaaccatcagatcttgtgagacttattcactaccatgagaacagcatgggaaaaccagccctcatcattcaatttcctcccactgggtccctcccactacacatgggattatggaagctacaactcaatatgcgatttgggttgggacacagccaaaccatatcacagacttataatcaaatgaacaattgtaaaattgttcatttacatgcttgagagtctggactttatttttttgatgtttagtacagagatggataccaattaggaactgagtatatttaacaaataacttcaatttttccttttataccaaagttgtatatgtttacacccctaattctatgggaaaattgggccagtttcactcttgg

SEQ ID NO: 397404 - DNA, 542 bp, Homo sapiens
ttcatttaggaggtgattccagaagcatagtgaaggaacagggaaaatgagagaaggaatacagacgtcaacgaaacgtgctttaatgagctgcttacctatgtggcctactgaggcttagcaccacccgggaacctctaaccactgcaggttgctttagtgggtccccaggggaaagagaggcattgctgggcagaggtcccaatcccagcacctttcccttgcttctgttctccctcctttctttctttctttttcttctttttttgagacagggtctcgctctgtcccccaggctggagtgcagtggtgtgatctcagctcactgcaacctccgcctcctgggttcaagtgactctcctgcctcagcctcccgagtagctgaaactactactgatggctgattccctgctgaaactcactggaggaattgcagtrcttcacctgatgagatgaggtgagactcagttttcctgggggcctgccaccacgcccggctaatttttttatttttagtagagacggggttttacgatgttggc

SEQ ID NO: 397405 - DNA, 588 bp, Homo sapiens
acgaagtgaaattctgcataggttttcagagccacatggatatcttgcattccattctcccattaggccgttatagaaattcaaattctaattggttccataatcaggtcctggaatctttccacaatctttagctcaccactgtcagaaatactcagctgcccccaaattatggagccaaataaaagctcagtctggggtttcagcttccttcagatacaaggggaattgatcatccattggggaatagtctctactttgggggcccagaaattgacataacaggacagcaggcattctacaaatccttattgaatgtcacttgatactatgtgrtctaggcagggctgggactaggatgagacaggttaggcatttgcctggggagagcaaaatttcagagggtaccaaactactgtaattacggtaatcaatattttaatacagtaatattaaaataaaaattaatgcggaggccggacacagtggctcatgcctgtaatcccagcactttgggaggccgaggctggcggatcaccagaggtcaggagttcgagaccagcctacccgaaatggtgaaaccccatc

SEQ ID NO: 397406 - DNA, 588 bp, Homo sapiens
acgaagtgaaattctgcataggttttcagagccacatggatatcttgcattccattctcccattaggccgttatagaaattcaaattctaattggttccataatcaggtcctggaatctttccacaatctttagctcaccactgtcagaaatactcagctgcccccaaattatggagccaaataaaagctcagtctggggtttcagcttccttcagatacaaggggaattgatcatccattggggaatagtctctactttgggggcccagaaattgacataacaggacagcaggcattctacaaatccttattgaatgtcacttgatactatgtgatctaggcagggctgggactaggatgagacaggttaggcatttgcctggggagagmaaaatttcagagggtaccaaactactgtaattacggtaatcaatattttaatacagtaatattaaaataaaaattaatgcggaggccggacacagtggctcatgcctgtaatcccagcactttgggaggccgaggctggcggatcaccagaggtcaggagttcgagaccagcctacccgaaatggtgaaaccccatc

SEQ ID NO: 397407 - DNA, 588 bp, Homo sapiens
acgaagtgaaattctgcataggttttcagagccacatggatatcttgcattccattctcccattaggccgttatagaaattcaaattctaattggttccataatcaggtcctggaatctttccacaatctttagctcaccactgtcagaaatactcagctgcccccaaattatggagccaaataaaagctcagtctggggtttcagcttccttcagatacaaggggaattgatcatccattggggaatagtctctactttgggggcccagaaattgacataacaggacagcaggcattctacaaatccttattgaatgtcacttgatactatgtgatctaggcagggctgggactaggatgagacaggttaggcatttgcctggggagagcaaaatttcagagggtaccaaactactgtaattacggtaatcaatattttaatacagtaatattaaaataaaaattaatgcggaggcyggacacagtggctcatgcctgtaatcccagcactttgggaggccgaggctggcggatcaccagaggtcaggagttcgagaccagcctacccgaaatggtgaaaccccatc

SEQ ID NO: 397408 - DNA, 497 bp, Homo sapiens
ggtgatagcagaggaggtcaaatatggaattcatcccccccagggtgggaaacagcccccatcacctacagcatcaatagaaactacatggaggccaggtgcagtggctcacggctgtaatcccagcacttagagaggctaaggcaggtggatcacttgaggccaggagttcgagaccagtctagccaacatggtgaaactccatctctacaaaaaaaaataattagctargcatggtggcacacgcctgtaatcccaactacttgggaggctgaggcaagagaatcacttgaacctggggggcccagaggttgcagtgagctgagatcatgtcactgcactccagcctgggtgatagagtgagaccctgcctcaaaaaaagagaaactacatggagagcctggacttcatcagacagtcatgaggcacctcccactatctcagagttagaaatttcaccactgtcctgtgataatgaggccaccaagcccatggtg

SEQ ID NO: 397409 - DNA, 639 bp, Homo sapiens
ggtccaaattcaattctttctctgatttttaagagtctgatagttttagctgttaaaatttaaacctttgattcattctgagtaatttttgtatatggtgtgaggtagggattcaacattattcattcttttacatgtagatatccagttgtcccagcaccwtttattgaaaaaactatccctttcccattgaataggcccttgccccaaattaatcaaccatagttatacggatttatttctggaatctaattttttccactgatacatatgccaatactgcactgtcttgattactgtagttttgtagtaagttttgaaactgagaagtgtgaattcttgaacttttactttttttaagattcaagatggaattcttggatttctataagaattttgggataagcttgtcaattcctgaaaggagacaagctaggataagaatgctacaagaaaagaaaatcacaggtcaatatccctgatgagtaaaggtaagaaaactggataggcacatgcaaaagaataaaattggacacttggtttacaccatatacaaaagttaattcaaaatgtatttaaatcttaaatgtaagatctgaaaccataaaactcatggaagaaaacataggggaaaagctc

SEQ ID NO: 397410 - DNA, 639 bp, Homo sapiens
ggtccaaattcaattctttctctgatttttaagagtctgatagttttagctgttaaaatttaaacctttgattcattctgagtaatttttgtatatggtgtgaggtagggattcaacattattcattcttttacatgtagatatccagttgtcccagcaccttttattgaaaaaactatccctttcccattgaataggcccttgccccaaattaatcaaccatagttatacggatttatttctggaatctaattttttccactgatacatatgccaatactgcactgtcttgatwactgtagttttgtagtaagttttgaaactgagaagtgtgaattcttgaacttttactttttttaagattcaagatggaattcttggatttctataagaattttgggataagcttgtcaattcctgaaaggagacaagctaggataagaatgctacaagaaaagaaaatcacaggtcaatatccctgatgagtaaaggtaagaaaactggataggcacatgcaaaagaataaaattggacacttggtttacaccatatacaaaagttaattcaaaatgtatttaaatcttaaatgtaagatctgaaaccataaaactcatggaagaaaacataggggaaaagctc

SEQ ID NO: 397411 - DNA, 581 bp, Homo sapiens
tgatgtaaatttctagaagttagtaaatttcaaataaatatttcttcaccgagagtaacagctctttaaagataattttacattgtgaaaaaatagagaatattattttaacaatatttcaagtgtagtggttatcaattgactgtgctctgaaatattttaaaaattagtactttaatttgtcctcaaactgtttttgtaacccttaaattttttggttctaattcttatatttcgggatataatgtttacattctcttccaaaacatagttatttaaccttaattctaaggatwgatatacactcacaaatactcgtttgtatcacagcttcttcatgctaagtcctttttaacttgctcagatttagtgaatttcatcattaattattttttagaaagcctcatagaaaactgtttttaattcttacatgcttgagaatatctgtaccttgaaatacaaaaataatttgtctggtttaaatatatgttgggtcacactttcctttaaaatcatgtggatattgctcctaccatattctgtaatttagcgctattatgagaaggagaaatttgcttttt

SEQ ID NO: 397412 - DNA, 588 bp, Homo sapiens
tcagtttagcaaggggatttaacaattgtaaacatatatgcacccacccatgaagcacacagatatagaaaggaaatattattaaagagagatataaatcacaatacaataatacctggagacatcaacatccactttcagcattggacagatcatccagacagaaaatcracaaagaaacataacacctaatttacactatagataaaatggacctaatagatatttacaggttatccaatggccataaaatacaccttcttcttctcagcaggtagctcattatcaaggagagaccatatgttaggccacaaaacaagtcttaacaaattcaaagaaaatgaaataatttcaaatatttctcagaccacagtggaataacattaaaaatcaataagaagagaaactttggaaactatacacacacacatcagaattaagtaataagctcctgaatgaccaatgggtcaatgaagaaattaagaaggaagttgaagaatttcttgaaacaaatgaaaatagaaacacaacataccaaaacctgtgggatacagcaaaaacagtactaagaggaaagttgatagcaat

SEQ ID NO: 397413 - DNA, 589 bp, Homo sapiens
ttttctctacttcttagtaatgtgttcttcccttagtcctatgtgtttggtttaatgtaattaagactaatacaaacmaatttgctaataggattactagtagcaagcacactataaatatgcttagcctaaatgaatcacaatcattccctggtgcacgcaacattccttattcaacattccttattcaaattcatttactctatcttaataaaatcccaataggaactagaaactctaggccttttaaacagagtcagataacctcaaatgctagagaggaagaataaatagaaatttggaccttcttttatctagacagccaggtcaaactggccctgtgcaggaccaccatttatttcttggttttgtaaactgaatcctgtgattacagtggaaatccagctctgttcaagaatttttttcaaaggcatgtccagctggagccagacaattctgaaatagatcccagctgtttggatcatctgaacccgagaataactaaatgctgccactgaaagcactatcagtagtaaattctcatttgaagttgtaggtagctagaatgccaaatccttaaagaccaccc

SEQ ID NO: 397414 - DNA, 589 bp, Homo sapiens
ttttctctacttcttagtaatgtgttcttcccttagtcctatgtgtttggtttaatgtaattaagactaatacaaaccaatttgctaataggattactagtagcaagcacactataaatatgcttagcctaaatgaatcacaatcattccctggtgcacgcaacattccttattcaacattccttattcaaattcatttactctatcttaataaaatcccaataggaactagaaactctaggccttttaaacagagtcagataacctcaaatgctagagaggaagaataaatagaaatttggaccttcttttatctagacagccaggtcaaactggccctgtgcaggaccaccatttatttcttggttttgtaaactgaatcctgtgattacagtggaaatccagctctgttcaagaatttttttcaaaggcatgtccagctggagccagacaattctgaaatagatcccagctgtttggatcatctgaacccgagaataactaaatgctgccactgaaagcactatcagtagyaaattctcatttgaagttgtaggtagctagaatgccaaatccttaaagaccaccc

SEQ ID NO: 397415 - DNA, 569 bp, Homo sapiens
aatttctttatgaccatgtttcagtggagaaaggcaggagaaagwcagagtgaccttgcttctgtggatttctgattcgttaaggtgccatcttttggggtattgtattctgagtccgtacacggctttccaatgcccttagaaatagatcaaatttcttagcttagctaatcaggccctacatgatctggtggctccgactcccgtgacctcccctcgcaaatctacacctggctttaaatgcgctcctattttctatcttcagtggtcctttttcttgttcttaaataggccaagcagcttttagcctttatattttcagtttactttactgggattcccttcctccagatgattaacatggctggttcctttgttatctcccaacagtgagagtgaaggccatagttctctttccgcaaaaccctgattcctgtcctaattttgccacccacacacacatttgttatcaagtagctccttctgtcaaaatcatgcaagttgttctgaaatttcaatacaactcagccttctgtcctttcaagttcttctaacttccatgaaaagct

SEQ ID NO: 397416 - DNA, 569 bp, Homo sapiens
aatttctttatgaccatgtttcagtggagaaaggcaggagaaagacagagtgaccttgcttctgtggatttctgattcgttaaggtgccatcttttggggtattgtattctgagtccgtacacggctttccaatgcccttagaaatagatcaaatttcttagcttagctaatcaggccctacatgatctggtggctccgactcccgtgacctccyctcgcaaatctacacctggctttaaatgcgctcctattttctatcttcagtggtcctttttcttgttcttaaataggccaagcagcttttagcctttatattttcagtttactttactgggattcccttcctccagatgattaacatggctggttcctttgttatctcccaacagtgagagtgaaggccatagttctctttccgcaaaaccctgattcctgtcctaattttgccacccacacacacatttgttatcaagtagctccttctgtcaaaatcatgcaagttgttctgaaatttcaatacaactcagccttctgtcctttcaagttcttctaacttccatgaaaagct

SEQ ID NO: 397417 - DNA, 621 bp, Homo sapiens
ctgaagcccatacatttccactggcactggctttgaaaatatcagtttgcactacatggtgaaggctttataatgtgactagtcattcaggccctataaacaagcaaatccaaacaaagtaaatccattttctggaccacttatcttagtagattaaggaattgtacttaaatatccctgggaataagattcagtttttctctagaaacctttttttttgtcagatctcccaattactagatggcattgtcccttttctctaattgacctcatacttctctttgttttttaagcaccactggagacaaattagatgcaaatagcatctcacagagaactactttattttagtacatcacctgcctgcatcttcmtccccctttatggaaactagaatagtctacaaagaattaatcagcttttggctgtgtataggacttggataagtgtgcatggcaactagagattttggactagtgatggatttttgtagtaaaacccttaaaagcttatagttttcccagtaaaaatgatctagcaccaagcttactggggaaataactctaaagataaaacaacaacaacaacaaagaaacaaacagcaaaaaaagaacactaaac

SEQ ID NO: 397418 - DNA, 562 bp, Homo sapiens
ttgtcttcctgtgcttggcttatttcacttaattaacataatgrcttccagttccatccatgctgttgcaaatgacaagatttcattctttttcattgctgaatagtgctccaaagaaaatatgtaccacagtttctttatccattggtttgttgatggacacttaggttgcttctaaatcttgactattatgaatagtgctacaataaacatgagggagcatatatctgttcaatttactgatttcctttcttttgggtatacactaagcagtggaattactggatcatatggtagctctattttttagttttttaaggaacctccatactattctccatagtggctatactaatttacattcccaccaatggggtacagagtttcctgttttgctacatcttcaataggatttgttattatctgtcttttggaaaaaaagccgttttaacttgggtgagatgacatctcactgtagtttattttatttatttatttatttatttattgaaacagagtctcaccctgttacccaggctgaagtgcagtggtgcaatctcag

SEQ ID NO: 397419 - DNA, 503 bp, Homo sapiens
aaatctgctcacagattcttattataattctaatgtatcacttagttcaaatattgcttttggcatccctcaattctattacaacaagaactattgaaacccctaggaacaaaagggtgtgcgtgccatttctgtaacttataaacaacaaaacaatcagaatattgtgaatcttctttcagaacctaaacataccaaagtgattatggaacttctctcttcaaaattcttcaataacttcccccacaacctatacagtgggaaaaacattggcatacatttgcctgctatacaaggctcttataatctgggctctctaccatttctcaccagcctttcctgctttcagggtaatttacacttaacaacactaacctacttttcccccgggcyactccaggctccctcaggctttcatacttttcttgttctgttctcattgccagacatcttcatcctacacacacacatgataatctcccactcacccttctcgtgtcagc

SEQ ID NO: 397420 - DNA, 642 bp, Homo sapiens
aactcaagagtaataaatctgtgtttgagataatgttctttaaataagaggtaataatctaatgtccttattgatttgtctaaatgaggggattcaatataaaggaaaaaatcagtaattaagatgtttaactcattaatccattaatcacccactttccacacttgagaataggtctgcttgtttaccctgaacaacatttaatttattttataataataatagtcacaaagttataygaaaaagccaaacctttttcaaagtaaaatcactcgcttggacaaatgttagaaggtcttccttagccctatacaattgtggcattactatttccaggtgaaacattttgatgaggcaggagcaggtgacatgttaccacagagctgttcagcagaatatctaccacgaattctttgattcccaaagcagtttactctaataccatctttcaattggataatgaacaattggttgatgtgtgccttgaagcagccttcaaggcaatctctctcttttcctgtcatcaatattcatctgattatagatgcaataatgctgagattaaagtgagaagcctgctgaggactatgtaataatttctttctccctacacctctcctgcatcccaaaacacacgtataa

SEQ ID NO: 397421 - DNA, 484 bp, Homo sapiens
cattcatttataataaagaactatacattaacatcctgaaggtcacagacaacaagggacatattgattttatttcaaaattaaaagcatattatttcctgaactyaccataaatgtatccctttctattttatttgacgtaaattatatgtagacagcacagttaatctctgttctaatataatgactagccaattaatataagctgcaaatcaacacatgatcctttaactccccattacttaagccatcatttctttgcagaagaataaacgtgcaatatgattttctcttcatcatccatggaaatagggacaacatgtttatgtgctattcataagtatgttttgtatatttttacctatattttaccaaaactgttacccaatagcaaagctgagataaaaggtttagcagtaaatactaagaaggtagggaagaaggtactattacatattaatattagaaatatgaattcaaacaa

SEQ ID NO: 397422 - DNA, 537 bp, Homo sapiens
ttaggttcaacaccaaagacataatccatgaaagaaaagaaacaggtaagctgttcttcattaaaattaaaacatctgctctgtgaaaaacaatgtaaaggatgcraatacaagccatagactgagagaaaatgtttgcaaaagacacacctgataaaagggctactatccaaaacatacaaaggactcttaaaactcaacagtaaggaaacaaacaatccaattaagaatggaaaaaaaaggtctgaacagccaaggagatacatagatggcaagtaagcatatgaaaagatgttcaacatcatctttcattaagaactgcaaattaaaacaatgagatactactgcacacctatgagagtggctgaaatccaaaacactgacaacacctgacaaaacactgagaaatgctagcgaagacagggagcaacagaaatgagaaatagtacagcaactttgagagagagtttggcaatttcctacaaaagtaaacatactatacaatccagaaatcactgctttgtatttacccaaatg

SEQ ID NO: 397423 - DNA, 583 bp, Homo sapiens
gcaggctatgaaaaggaacagatgtggtaggcgagaagacctcatggtgggagtccaaaagttctcttctcatggctttggttttctcaaagtagaaagcaagctcattagataagactgagaaagaggaggatgtgctggaggtttgcagagaaaggatacactgtaatagacatctcagagagtggaagagagaatgaactaaggaaaggtagtgtgcctgtcagaaagtactaagtgcccatcagaggttctgtagtcatgagttcaaaataagaccatcagtaaagctgtgtccagttgcataagagaaggtgaggagtaggccaacactaggtctcaccacttgtaaaaccttgttaatttgtttttcgttccgtctctacaatgtttttgtatttttaaaagtgtttttataaacatttttctcatatccatgacatctccaggaaaataaggcaggaatgactctcagacaagaatgcttgaattttaaacaatggcaaggatggggacaaygtttaatctgaaagaactgatgaattttaagcattctaatacctagattagaagaattctgggc

SEQ ID NO: 397424 - DNA, 578 bp, Homo sapiens
aataaaactgataaaagcagatatcttgccttgttcccaatgttaacggaaaagcatttagtcttttactactaagcacgacattagctgtagcatttttgtagatgctcttaattagttttaagacattcctttattcctggtgtgttgagatttttatcactaatgggtttgaatagagtcatctgtttttcagagggcgtctactggcatgatcatttatatttatcctttattctgttaatatggtgaatgtactgatcaattttccaatgttaaaccaacctagaaattctggaataaatgacagtagtcaagatggattaatttgtattaattaatatatatgaaaaaatatatatacwtatacatgtgttttaattaaacacatattaagtatatttatatgcacatatgtttaatttgataatatttagataaggattacctattttttaagaaataatattttttcatgtagggttattgtctaattttagaataaatgtaattctagcttcataaaatatgttggcggcgttccctcctctaagactttttcgaggctttcatgtagg

SEQ ID NO: 397425 - DNA, 516 bp, Homo sapiens
tgactctatgtcttggtgtcgatcttcttgtggaatatcttaatgttgttctctgtatttcttgaatttgcatattggcctgtctttctagatcggggaagttctcatggataatattctgaagtgtgttttacagcttgtttccattgtccccatctccttctggtactccagttataggtttggttttgttatgaactcccatatttcttggaggctttgttcattccttttcattctttttyctttattctagtctgcatgtcttatttcagtaaggtggtcagagattgggcataagacaatatggaggcagaagctgggcataagacactatgagaggtggtctcctcccttattccaatgacagtgaaagaagagaccaagggcagaatgctggaaaacaccaatatataagacagtggaagagaagagaagcgtaaatacatactaaaaggattgtttagagagagagaatgagatagtcaatgcaggacttaagaaaaggaataaaat

SEQ ID NO: 397426 - DNA, 579 bp, Homo sapiens
gttttgatgatatactgattaactttctttccagcctacaaatttgtttcttctatcctaaaggagaactgaaggattgggtgaggaaaattacatttttttttcttcagctcatcattaaattgaacaatgtgagaggttttgaagtttaacaacgtgtggtttccaccatagtggatgggtgtacctttagtagagtatttgactagctttaacctgaatgtataatttctctgcattctccaaatcatcatgagcttaatgcaatttagtaaccccaattctcctgcacagcagtacattcctgtcaggttcacacttcaagggagttctctctgagaatgaargaagtgagcaaaacaagcacattcccaggttgtatatatattttgcacatcatagtttcaagggcaataggaaaggcataaattacctaaaaacatctatgacttactatacttgagagccaaaaccttatccattcagtcttattttagtgctgaaatgtatttatttgtgcagttccaagaacacaatttatcacttttcttctgctgcagagaaagaaaaaaggccaat

SEQ ID NO: 397427 - DNA, 546 bp, Homo sapiens
taaagataatgtattcacagacacatctctttatatattttccataattttcatacaatcagagtaaatatttgaggaaaaaattacccagagcttatctacattttattatttgtcatttctttgcattgaaaggaaaatgctgcctatagtttgttttcagttctccttatattcattcatagactcattaattcactcattcaaaatcatttactaaattcttaccacgtggtaggcatctggattgcttccaagtgcaacaaaatgaataaagtatagatgtggtgaaataatttatcgatataattaacttrtatgctaaaggattgttctatttttttccctttcccactttgtaggcagtagccagactcagagtatttccttgcctggaggatttttattggccagaggtaaaatagtagctgcttccttctcaaattaaaatggcaccattctatgggatgtaatctatcagattacagtatatattgcatttatcaatgaggtctaaccaggagacagaaacaacatagtaatttg

SEQ ID NO: 397428 - DNA, 617 bp, Homo sapiens
taggcatggtggctcatgcctgtaatcccatcactttgggaggctgaggcaggaagattgtttgaacttaggagctataaccagcctgggcaacataytgagatcccaactctacaaataataatatattagccaggcatggtggcatccagttgtggtcccagctacttgggaggctgagatgggaggattgcttgagccagggaggttgaggctgcagtgagccatgatcacaccactgtactccatcctgggagacagagtaaaactctgtctaaaaaaaaattacatgaatgataggttactagataatttttttaatgacaatattccatagagagagagtgcaattgcattacaagaaagtttcttatcattgcctttatttatattctttttctactaacattccctgagtgacctcttctaccctgtagcttcaaaggccatttacgctgatgattctcaaatctgtgtctgtagcccttatgcaatggtgtgctagcctatatagtaactttgtgtgaattaaaagttacccccatttacatgtaagaaaaagaataaccttacatattattgcatgaaggggtgggttgcccctccacacctgtggg

SEQ ID NO: 397429 - DNA, 451 bp, Homo sapiens
ccacaccaactacaatgtttctctaccacagaatcacactctgatttaacactccatggaaccctattctgaatcatgaatcaaaaaaagagaatgttaattctctgtctcctggaatttatattctcttacttctcttctgtctcctatcttttctcttttccctaaacacttggagagaacaattcagaagctcctcaaagatagagaaaatacaaacacatttgaatctgttgatgagatagattatcttaattcttggccaagtctggaaggcgagccaaagtgataggaacaatatattactatagttttgggaaagcacttttaagacagtgttggcagaagagatgtaagaacattaaacacctctgtgtactctgccttgctgtytaaaatgtcatccttaatatgccaatgtattgtgcacaaataagaagctgttacatca

SEQ ID NO: 397430 - DNA, 502 bp, Homo sapiens
atatatgcaaaatattattcctctgaactaaaaagagacaggttttatattgaatagtgcctaaaaatttcaagccaattttggaaggaaaaaaaaaaggaatttcagctagtcaaatgtaatgtaagaaaatgagttgtgcttttcctttaatacatgataaattatggctttccaaattctagctcttcracatttgacaatactgattcgtataagccatgaattatttaaggatacttttattaaccaagaaggcttagtaacctctccatctaactcatttcttccttccaatttaatgttaactaataaaattccattgtatgatatgtaagagtcacagagttatggttaaataaaaaacctattaagattctgttaaaatctaaaaattggtcaaaaaaaaacatgccaatatactcaactggcagcctttactcaagccaagacttctaaagatggaagactgggtattaaacatctttcaattcccatcact

SEQ ID NO: 397431 - DNA, 502 bp, Homo sapiens
atatatgcaaaatattattcctctgaactaaaaagagacaggttttatattgaatagtgcctaaaaatttcaagccaattttggaaggaaaaaaaaaaggaatttcagctagtcaaatgtaatgtaagaaaatgagttgtgcttttcctttaatacatgataaattatggctttccaaattctagctcttcgacatttgacaatactgattcgtataagccatgaattatttaaggatacttttattaaccaagaaggcttagtaacctctcyatctaactcatttcttccttccaatttaatgttaactaataaaattccattgtatgatatgtaagagtcacagagttatggttaaataaaaaacctattaagattctgttaaaatctaaaaattggtcaaaaaaaaacatgccaatatactcaactggcagcctttactcaagccaagacttctaaagatggaagactgggtattaaacatctttcaattcccatcact

SEQ ID NO: 397432 - DNA, 588 bp, Homo sapiens
cagttttttagttccttagaagttgtgtcagtcttgtcactgaaagtcccatgtcccagaaaaccctttcatctcagctgggctggttggtaaccctatccactaagcataaatgaaagattcaggaaaaaaaaaaaaaacctgtgactaactgtggaaacattaaataattataatgttttcaatatttttatatttaaatggaaaaactaaaggtcatcatcaagtgaattaaaatatgacagagaaacctaatcagtatgtactatttacagagatctattacacatgaaatatataaacaagaggaagacaaaggcatggttaatataaaccatcgaagaagatggagtactggtttatactaatctcagaattctgtcctctcctctatttattctacttctctactagccaatgcgaacagtgagaatgaagagatgattatmctccaggctcccctggccagaataagaataactaaattacctatactcttgggtcatgcacacattatcctgcatctcaacaatttgccttttgatttttcttctactgccttaatcttagtgttgtattgctgtgagc

SEQ ID NO: 397433 - DNA, 547 bp, Homo sapiens
tcagaactaaacaagtgtcaatctttcatttgcataaacagatctcactggaaacctgggtagaaacttttgctataagatctgaactctctggctgggcatrgtggctcatgcctgtaatcccagcactttgggaggccaaggcaggtggatcacgaggtcaggagatcgagaccaccctggctaacatggtgaaacacagtctgtactaaaaaaatacaaaaaaattagcggggcatgctggcgggcacctgtagtcccagctactcgggaggttgaggcaggagaatggcatgaacccgggaggcggagcttacagtgagcccagattgcaccactgcactccagcctgggggacagagcgagactccgtctcaaaaaaaaaaaaaaaaaaaaaaaaatctgaaccctctctttgttccctagaaacatcttccttttacacagaagactgtggtcttcctaatttgcaaactgttcaccagaataaagtctttcctccaagttctttttcagataacttttgtccacacctttatttaaccta

SEQ ID NO: 397434 - DNA, 565 bp, Homo sapiens
ttgtgcctcagtcccctgagtagctgggattacaggcactggccaccacatcctactaatttttgtatttttagtagagacagggtttcaccatgttggtcaggctggtctcaaactcccaacctcaggagatccgcccaccttggcctcccaaagtgttgggattacaggtgtgagccactacttctggccaatgtttttctttaactctaaatcagacctacaaaatgaggataagaatatctacccttggttaccatgtgtctcagtctgtttgggctgctgtaacaaaaatacttagaatgggcagctcaaccaaacatttatttctcacagttctggaggctggagaggtctaagattaaggccctggcagattcagtgtctagtggaggccacttcccagttcataaatggccgtcttctctctatgttctcacatgacagaagaggtgagggggctctctggagtcttttataagggcactaataccatttttgakggctctgctcttatgacctaattacctcccaaaagtaccatctccaaataagatttcaacat

SEQ ID NO: 397435 - DNA, 590 bp, Homo sapiens
actaggcaaaggacataaatagacaattatcaaaagaggatatacagtcaacaaaaaaataaaaaaatgctcagcatcattaattatcatgtaaatgcaaatgaaaaccacaatgagatgccaccttactcctgcaacaggrgccataaaaaaagttgttgtggatctggtgagaagggaacatttctacactgctggtggcaatgtaaactaatacaaccactatgaaaaacagtgtagagattccttaaagaactaaaagcagaattactatttgatccagcaatcccactactgggtagctacccaaaggaaaagaaggtattgtaggaaaaagacacatgcacatgcatgtttatagcagcacaattcacaattgcaaagatatggaagtaacctaagtgcccatcaaccaatgattggataaagaaaatgtggtatatatgcaccatggaatattactcagccataaaatggaatgaaataatgtcttttgcaacaacttggatggaggccattattctaagtgaggtaactcaggaatggaaaatcaatactgtatgttctcacttataagtgggagctaagct

SEQ ID NO: 397436 - DNA, 590 bp, Homo sapiens
actaggcaaaggacataaatagacaattatcaaaagaggatatacagtcaacaaaaaaataaaaaaatgctcagcatcattaattatcatgtaaatgcaaatgaaaaccacaatgagatgccaccttactcctgcaacaggggccataaaaaaagttgttgtggatctggtgagaagggaacatttctacactgctggtggcaatgtaaactaatacaaccactatgaaaaacagtgtagagattccttaaagaactaaaagcagaattactatttgatccagcaatcccactactgggtagctacccaaaggaaaagaaggtattgtaggaaaaagacacatgcacatgcatgtttatagcagcacaattcacaattgcaaagatatgraagtaacctaagtgcccatcaaccaatgattggataaagaaaatgtggtatatatgcaccatggaatattactcagccataaaatggaatgaaataatgtcttttgcaacaacttggatggaggccattattctaagtgaggtaactcaggaatggaaaatcaatactgtatgttctcacttataagtgggagctaagct

SEQ ID NO: 397437 - DNA, 588 bp, Homo sapiens
tagagattccttaaagaactaaaagcagaattactatttgatccagcaatcccactactgggtagctacccaaaggaaaagaaggtattgtaggaaaaagacacatgcacatgcatgtttatagcagcacaattcacaattgcaaagatatggaagtaacctaagtgcccatcaaccaatgattggataaagaaaatgtggtatatatgcaccatggaatattactcagccataaaatggaatgaaataatgtcttttgcaacaacttggatggaggccattattctaagtgaggtaactcaggaatggaaaatcaatactgtatgttctcacttataagtgggagctaagctatgaggatacaaaggcataagaatgatatagtgggctttggggactcagtcagggaaggatgagaggaaggtgaaggataaaagactacatattgggttcagtgtacactacctaartgacaggtgcaccaaagtcccagaagtcaccactaaagaacttatccatgtaaccaaaaaccacttgtaccccaaaaactattgaaatggaaaataaaataaaattaaaaaaatatag

SEQ ID NO: 397438 - DNA, 554 bp, Homo sapiens
tagttttttttattattattgttcactagaccataacactgaggtccctctggtgagagatatgttttactcattgttattctacccacaaggtccagcataagacttctatatggtaggcattcatgcaacatttatttaatgattgagcaaattaatgaatattaaatcaaattttactttcctttgggtttatgccatgtaaagtttctaaattttttcccataatatgtaggaactcatttcygtacttcaacagctaacattcctaatactgaatatttctgttaatgttaactccaaattttttctgataacagtaatgccctaagctcttaactttttctatagacacccctttaactgattaaaaaaaaaaaacttcatgaagcaagtaaatacatgtttcatgtcaattttactacatcttaagccactctttgctcacaaactggttccacatggttgccgggagaagaaaagagagcagataaggtagtcaaggattaaatatcccaatagccaagtaccacagggcatgctacaatgtcaga

SEQ ID NO: 397439 - DNA, 545 bp, Homo sapiens
aaatggccaacaagcatatgaaaaaatgctcaacatcactaagtatcagggaaatgcaaataaaaaccataatgtgataccacctcactcctgcaaaaatggccataattttaaaaatcagaaaataatagatattgacatggatgcagtgaaaagggaacacttttactctgttgatgggaatgtaaattagtacaaccactatggaaaacagtatgaaaattatttaaaggactaaaagtagatcttccatttgagccagcaatcccattactaggtatctacctagaggaaaagaagtaattatatgaaaaagatgcacatgcatgtttatagcagcacaatttgcaattgcaaaaatatggarccagcccaaatgtccatcgatcaatgagtggataaagaaaatgtgatacacatacacatgtggtacacacaccacggaatactattcagccataaaaaggaatgaaataatggcatttgcagcaacctggatggaaatggagactgttattgtaagtgaagtagttcaggaatggaaa

SEQ ID NO: 397440 - DNA, 601 bp, Homo sapiens
ctcccaggtcttaaatctgctgatacaaaagcagattgggggtgggggagagctgaaataaacaagtgagatgtgtattttacttagaagtctataatttgcatttctttctttttccaaaatacagacaactgtgaagagataagcaaataaatccctgagggagtatgaatacaagcaatgaaaaagaaggctgggatcaggtgtctgtgaagcaaattacacctgaactccataaacttgccatctgtccaarttgaacaacttgtccggaactactgagaaaatttctgaagcacaggttgattgataataaatcacaaatgtaactcagactttgcttgtcttaaggtaactaaatttacccttcaaaatctgccagactctgcaaacagatgcctgccccagagcaatgcatgactctagttggttaggaagttttgttgatcttctagataatgttttattttgatgtaattgaagagcatcctgatatattcatctagaaaagaggaatcagttcaatctatggaaacagtaatggaaatgtaataaaagagtagtgggttttgctttagtgtgtatcaccctaaatgaaagt

SEQ ID NO: 397441 - DNA, 477 bp, Homo sapiens
agctgtggtccaggttcttgggttctacccatcaaacagaccagcaagtagagtgccagattgcttttctggcacaagccacttctcttaagcaatttattgagccttttgacataaagaaaacaaacactgccagattgtcatayggaggcctagattagaggctacttctcaactcctgcttgccgttctcctgatgaagtcctgctccagtcaccactgctgcataaaaaaccaccccaaaccttagtaccttaaaacaacaataatcagtcattttgatcatgaatctttttggtcagagattgacagggaagccttgaacctgctccccacagcatctgctggtgatgctcaactgaggcttaaggatccacttccaaaatggctcacgcacatcactggccaactgatgctggctatcagctggaagctcaatgggagtaaagaccaaaggccttggttcctctcaatgtg

SEQ ID NO: 397442 - DNA, 622 bp, Homo sapiens
gagacaatccaaaagaaattacttctaatgaaacaatatgaggtcaactgattcacttctaatgcaytttttatttccttacagtgcaatgtgcaaatatttgcttagcattttctctcctacacagggccgtaacaaatcaaaagtatagcaaacattcactagcagcctagctcaagtacggtttcctgatagtttttctgggccaaggagagtgttccaaagcttggtggaattcaaaaatatggcgaattgaatacttaactccttgtctaaaagactatcatttctttctcattcttcaaacctgcctttatttcttctctctttttactccttgagtttatcagaattctgttgagccatacaagctgtactctcatgtttctgtaagttgcaaagaacatttctgacaatagatcattataacatcctgtgtagcagacatgaaagtccttcagatgaaaggtgacctgtaaacatacagttgacccttgaataacatgggtttgaactgcgtaggtctgcttaatatatcagtttacaagcttataatatcagcttctaaactgatattttttcaaccaaacacatattggaaatacaatatttgcaggaatgg

SEQ ID NO: 397443 - DNA, 535 bp, Homo sapiens
tgaaataacgaacaattataataactttcattattgaaaatctactaggagaaaagctctgatagtcactttttcaacattcattatttcaaatccctataaaaacaaaatatatgttatactctcttaagaaaaacgggtcagagaaatgaaataatttgctgaaggaaatggacaaagatttgaatagragatgccaaagtctacacacttcccactatttaaaaccttatctagtcttccattgagagaaaataatcatatcatcacattaaaatttgcatttgtgtacaaatagtttatgtgaatatgtatatgtattatagaaatagagatggataaagacactgaaaataattgagaataagccaagaaaaggagcatctatcccaatacccctggtcctagttctgccctggatttaacagtcagaaaatcactccactttctggggtcctgtttcttcatctgtaaaatggaattaataagcaagaatttacttctcctcaaaaaaggataggggcatgttaaaaag

SEQ ID NO: 397444 - DNA, 581 bp, Homo sapiens
ccaaacccaaattccaaaaccaagtgaatctttagttcactttgcaccaagcccacccagctccagcatcttgccatacagaggttagtttcctaaggatggtgagtcttaccttcatccctatcgccagtccacttggcctcctgatctggactgggccttttatatatcatcttaaattgctcagccatggtgtytattgaactataactcatgtttagctgatcactttcccaaaaaattagcaccctcaatggagaaaatcttgaagtcacaaggttcaatgccctctccccatcaatattctgcttctgattctctcagagcactttgacggtcctcatgctgcaaacaatgaaaaagcccaaggcatgcctactgatttgcatcaaattattttcataaacagcaatgctaagtccttccactagaaaattaattttggcctatttaatgagtagggagaaatagatgtgttgtacatttgcattgtagtactatttatttaaaaaaaaaaacctcaaaccatttttcctctgctgtcccaccaagaaaacaatcaatacagaagacacctgtga

SEQ ID NO: 397445 - DNA, 575 bp, Homo sapiens
attattatttactgggccaggccttttcaaaactatcaagcagatagtcagggcctgtgaagtgtcccaaagaaataatcccctgcacttcaggccatacatttcaatccctgtatctttaacctccttgttaagtttgtctcttccaraattgaagctctaaaactacaaattgttcttcaaatggagccccagacgcagtccatgactaagatctaccgcagacccctggaccggcctgctagcccatgctccgatgttaatgacatcgaaggcacccctccagaggaaatctcaactgcataacccccactacgccccaattcagcaggaagcagttagagcagtcatcggccatcctccccaacagcacttgggttttcctgttgagagggggtactcagagacaggactagctggatttcctaggctgactaagaatccctaagcctagctgggaaggtgactgcttctacctttaaacccggggcttgcaacttagctcacacctgaccaatcaggtaggaaagagagctcactaaaatggtaactaggctaaaacaggaggtaaagaa

SEQ ID NO: 397446 - DNA, 609 bp, Homo sapiens
ttaaaattgtttaatagtgcagaacaaatggagaaattattcatgatatcctgtaatatttaatgctagctcttgcagtgtcattttatgcctagaatagaagttctcaaacagtggtccaggaacccctggaagtctctgagactcaggaagtccaaactctaayaataccaatatgttatttgcctttttcactcttgtcctatcattaatagacagttttccaaaggctatatggcatgtaatatcacaatagactaaatacaaagcagatatgagactaccactgccttctcttaggctagtcgctaaaaaaaaggtaaaaatgtaaactaacaccatttctttaaacaaattttttattttggaaaacatggttaactttcatgataagtatgcaatttatgttaatatgtatagatttattactgttatttttaagtgactatttttaaattctgttttactttctaatacggtatatatctatagatataaccatgtaaacaaaagctcttcagtgtcccaagcaatttttaagcgtgttaaggtgtcctggtgccaaaaagtttgaaagctgctaacctagagtttattcagtagctgggg

SEQ ID NO: 397447 - DNA, 609 bp, Homo sapiens
ttaaaattgtttaatagtgcagaacaaatggagaaattattcatgatatcctgtaatatttaatgctagctcttgcagtgtcattttatgcctagaatagaagttctcaaacagtggtccaggaacccctggaagtctctgagactcaggaagtccaaactctaataataycaatatgttatttgcctttttcactcttgtcctatcattaatagacagttttccaaaggctatatggcatgtaatatcacaatagactaaatacaaagcagatatgagactaccactgccttctcttaggctagtcgctaaaaaaaaggtaaaaatgtaaactaacaccatttctttaaacaaattttttattttggaaaacatggttaactttcatgataagtatgcaatttatgttaatatgtatagatttattactgttatttttaagtgactatttttaaattctgttttactttctaatacggtatatatctatagatataaccatgtaaacaaaagctcttcagtgtcccaagcaatttttaagcgtgttaaggtgtcctggtgccaaaaagtttgaaagctgctaacctagagtttattcagtagctgggg

SEQ ID NO: 397448 - DNA, 518 bp, Homo sapiens
actgcacagggaatatctgccctgagagattctttcccacataggactttataggaatgagctataaatcccttgttacctaggtcaataggtgtatttgttacagcagcaagtgtagcctagcctgaccaatacaattgagaaatataatattgtactttacagaatcaaagacaccatcaattttgaaatgaatcattatattatatatcattaataaaactactgtccatgaaattatgatatgccrtctattttaagatgcatctccatttcagaggtgttcaaatgtgcaaaactgtgtattttagactggatgaaatatggtatatgtctaattgtaaggaaacctagaaaattttaagacttgactcattttccaataagaatatcaaacttgaatgttgaactattaggagtataagtcaaacagataaatttctatttataatacattgttaatttagtaacaaatttaaacttatgttcccatattatataaaatatttagagctact

SEQ ID NO: 397449 - DNA, 561 bp, Homo sapiens
gtttctggaaaattttaggcagccagtgctcagctcccagctcctgggctgtgtgctctaactctgggagacttgtactgggccccaattttgctctctggctcctcaaggtcgtcaactcattgcgctgggggggccaatgtgctcctggacagctggtcactacactctgatggatggtgccagccataccattttgtaggatggtggcagcagatccatccttgcttgcatgtgccagcagcggcagtggtggtggagtggcagtgtggaggggtgcagacttgtcagctgtggaagggtgctagcaggtgtcagggtgcctgtctccytgtgggcattcacagcagcagcagagacagaatggctcagggagccggggccctccactggcaactgtgcatgtggtcctgctggtggtggtgttagcacagggtgcagcacttgtgggcataggtctgtgtgcaacctctgtgcatgctgacacaggtaggggtggccactcagggcagggaagggtccgctgttctctgcacctagtttcactctagcagcagtgtt

SEQ ID NO: 397450 - DNA, 545 bp, Homo sapiens
ggactaggtggagttcttgctgatacctgagtagcaggtttcaattttctgccagtggtggaatttttcaaataagccaaccacatcctcccatgggaatcaggtgtcaccctgctctcttgacactatgaagcctctctcccacagcctctacttgttccttctgcttttgagtgcaacttcatgtggcccacggtggtgtgctgtatcctctttccctgtgctaggagtgtgtatatgtgataatctgctatcaatttcatctgtacaatctagtgtgaatattgtgtattagtctatccccataatcctaaaacaagaatccctccctcaccaaattggtgaatagattattaaatccctttgcatatgtatctaaagtctatgggtkcttcctgtgatagccctctcatctagtcttccatgtactttacccttcgtttgtcatcttattgaaaaataaaccaaaacatcaaacttaaagtctttatttttctaaaataattcccttatcaaattcattttaaaaatttaaagtatcatgc

SEQ ID NO: 397451 - DNA, 627 bp, Homo sapiens
ttatagccctggggccttggaaggaaaagctaaaaactataagtagggtagtagtgaattacaatgataaaaactaaatgtcttccttttgcacattaagttatgttaaaacactgactggtaagttacagagctgcggtttgaacctacatttgtctgaaccaagtttccacacttttgaccacaataccttgatgcagtgattaagaaggtattttgttgaagcagataataggaattcatacacttcctctrtacttgctgaatgcatgatcttggacaagatacttaaggcctttgtctcaggtttttgttttttttgagatggagtcttgatctgttgcccaggctggagtgcaatggcgtgatctcagctcactgcaacctctgcctcccaagttcaagcgattctactgcctcagcctctcaagtagctgggattacaggcacctgccaccatgcccagctaatttttgtatttttagtagaggcggggtttcaccatgttggccagtctggtctcaaactcctgacccctcaggtcatctgcttacctcggcctcccaaagtgctggaatttcaggcttgagccaccacacccggcctcagttttttaattctaaatgg

SEQ ID NO: 397452 - DNA, 629 bp, Homo sapiens
ttattttgcaagtgtagacatgacaatgtattaacttaaattaacctgataactttagccaaatgtttattgtgttgtgttatttaacgttagataatattagtttgttttgtgtaaatagctgcaattacacattaaacaagaatgcaggaccagcctataactgtagctaatagcatatatatattatgttatagggtttacaaaatgattgttactttttgcagtatcacaataatcctatgaaattagtccattttgggggtgggggcaaggggagggatagcattaggacaaatacctaatgtatgcgaggcttaaaacatagatgatgggttgatgggtacagcaaaccaccatggcacatgtatacctacgtaacaaacctgcatgttctgcacatgtatcccagaacttaaartatgataataataacaaaagaaattaatccattttaccgattaggaaactggagatcaacttggttaacaaatgctcaaagccatgtaccattaagtggaagagggggattcaaacccaagccctctgtgccatttttctagctcttttcaagataacaatggaagatgtgaactcactttctgatgttctatgattgaaaagaaaca

SEQ ID NO: 397453 - DNA, 559 bp, Homo sapiens
tgaggcttgcaaatactatcttataacccattattttaacctgataaaatcactgtttgcataaacaaacaaacaaaatgaacactaataaaaactatatgcattaactttgtctccctcactttttaactttttattgtttctatttatatcttattgtactgattatgtcttgacaagttgtggtagttactattttttattggttcattgtttaatctttctacttaggattaaagragttcacatgccacagttacagtgttataatactgtgtgttttcctgtgtacttactattaccagtgagtttcatacattcatgtgattatttattgcttgttggtgtccctttcttactgcttgaagcactccctttagcattactttttatttatttgtttattatttcgatagttttaggggaacaggtattatttggttacatggataagttctttagtggtgatttttgaaattttggtgcacctataacccgagcagtgtacactgtacccaagatgtagacttttatctgtcatccctctcccaaccttcct

SEQ ID NO: 397454 - DNA, 627 bp, Homo sapiens
tctcagcctatacaaaaatcaactcaaaatggattaaacacttaaatataggatctgaaactgtggaactactagaggaaagcataggggaaatggttcaggacagtcaacaaaaccaaaaatagacaatgaggttacataaaactgaaaagcttctgcacagcaaaggaaacaataagcaaggtgaatagacagcctgtagaataagagagaatatttgcaaattattcatctgaaaaggggctaatatccagactatataaggaattcaaacaagtcaacagcaaaacaacccccaaattattcaactaaaaaacgggcaaagcrtatgaatagacattcctcaaaagaagatattcagataaccaataatataaaatgatcaacatcactaatcatccagaaaatgcaaatcagaaccacagtgagatatcatctcactccagttagaatagctaatataaaataagacaaaaaataataaatactagaaaagatgtggagaagaggcaactcttgtacaaggttgatgaaaatgtaaattagtgcagttattatggaagtcagtatggaacttcctcaaaaaactaacaataaaactcccatatgatccagcaatcctaccac

SEQ ID NO: 397455 - DNA, 600 bp, Homo sapiens
gaacataaagtgtactaaatctcagaatctcaaaaagagatagaaaatacaacaaaaatttaagagaaattgagaacccacttagaagggtcaatatgtatatgaatatgtgtgtgtatatatgtatatatatgcatgcatacagacacacacatatatgaagtttcagaaagaggaaagagaaaaaatatttgaggtgaaaaagtcagagtaataatagaaatttcttagtgtttctcttgagtctgagaatccaagaatccttgagtataatgagcttccttgagtatagtgagttaaaagatccacgactaggcacataatggtgacattccagaactacaaagaaaaaggaaaaaactagtttttcaagataacaaaaacatgacactttcaaagaaaggaaatctgtttaaactcagagagcttgtcatttcttatcactctagccgtgtacttargttactatctggattttctaagaagagctcctctttacctctgttatcctgaaataattattaataacgccctctttaattttcaacagtgtccttgtttaaataacaaatatagttattccatgtgtggtagaaaaaa

SEQ ID NO: 397456 - DNA, 499 bp, Homo sapiens
aacaccttctgtgaactggcagatgtttcctacacagctcaacagatctgatcatacagtcacaytaaagttaattttttgggcaaatatattagctcctgtacagaaattaacctgaaaattctcagatttcagattgatgtccatctaagcccaaattaccatcatgacctattattggtgccctaattacataattcaagaaatatgtcttatacattcttgaacctatctacattacaggttattacaacctcttggaatattgaatcgtatttttttgtccttcatttacaaacatttgtcaaatgcaaagtatttgtcaaatacaaatactttaatacaatctgatctctttagagatctcagcaactcataatctgtcataattttttgacactataatatttattatattttgttaactattagtaagtaaattatttctgtattgctttcccaactaaataataagcttcttgaaaagagaaaaaattat

SEQ ID NO: 397457 - DNA, 613 bp, Homo sapiens
atactgatgtattcaatgaagtgcttttgcatacctaagctcattttgacagcaaaacttgtgcttttacatacataagtttattttgatagcaaaacttacatcatctctgtgtgcttgctgggaaaaaaggaagagggccaacacttcctggcctgtgctagtctttgcatatgttatcttattatggtgggatttaaacaggtggctgagacttgattaaygtattgctttactcagggtattagatgcatagtgatcagaggcaattcagagacagggttgtttgaagctctgtcttctattgaatgtaagcctaaaaggagatctgctattagacttcctgtttgggaagttaactgcctctaaagtagaagcataggcattcgttgggtggatctttttaaaaaaaatttgtcatttatttttttttttgaaataaaatgtttatttctacaattatttatttatttattttagggatttggtctcactatattgcccatccaggctggagtgcaatgggcattcataggtgtaatcgtagcacactgaagcctcaaactcctgggttaaagtgatcctcctgcctcagcctctcaagtagctgtga

SEQ ID NO: 397458 - DNA, 581 bp, Homo sapiens
agacctttaagaatactgtatcagggctgggtgcgatggctcatgcctgtaatctcacctctttgggaggctgaggtgggtggatcacctgaggttaagagtttgagaccagcctggacaatacggtaaaaccctgtctcttctaaaaatacaaaaattagctgagcatggtagcaggtgcctgtaatcccagccactcaggaggtcactgaagaggagaattgcttgaactggggaggtggaggttgcagtgagctgagatcgcaccattgcactccagcctgggtgaygagagcaaaattccatttcaaagaaaaaaaaagaatactatatccatctattctcaatcaataaaaatgctttacgtaagttacataaagcataaaatattcatcaaaatatttatatcttgctctgtcatgaggaatgtaaatgtggataattggtcatacttctgttaaaaaggagaggaagtcctcatttcaggtcccatgtaagaaataagagataggattggatataatcattgacacaaaagagagatatgggttatctgatccctaaggaactgagaccagagg

SEQ ID NO: 397459 - DNA, 581 bp, Homo sapiens
agacctttaagaatactgtatcagggctgggtgcgatggctcatgcctgtaatctcacctctttgggaggctgaggtgggtggatcacctgaggttaagagtttgagaccagcctggacaatacggtaaaaccctgtctcttctaaaaatacaaaaattagctgagcatggtagcaggtgcctgtaatcccagccactcaggaggtcactgaagaggagaattgcttgaactggggaggtggaggttgcagtgagctgagatcgcaccattgcactccagcctgggtgatgagagcaaaattccatttcaaaraaaaaaaaagaatactatatccatctattctcaatcaataaaaatgctttacgtaagttacataaagcataaaatattcatcaaaatatttatatcttgctctgtcatgaggaatgtaaatgtggataattggtcatacttctgttaaaaaggagaggaagtcctcatttcaggtcccatgtaagaaataagagataggattggatataatcattgacacaaaagagagatatgggttatctgatccctaaggaactgagaccagagg

SEQ ID NO: 397460 - DNA, 577 bp, Homo sapiens
tttttaaaacgctatgatttatatctttatcggataatttaaatttctagtaaatacacaaacagaaagagagagatggagagggagaaaaactgtggcttaaaacagttaagcaactgtttatgattacgagaagtaaaaactgggatgtgcactctatcatcaaaactctgcatttcagtaatgtcatacttggcacattatttgctggaggaattaattactagattaggattaaatgaatttgatccatttgtgtcgtgtgatattaaagtagyaattaattctgaggaatcaacaaattttacaaaaggaacatctagattttgttttttctttctagcctcctagtggaaatacagagactgtctttccagtgaactatgttcactgaccacctactctgtgcccaaatccgtactaagtgttctgattaacagaatgagataaggtaattagcaaaacctgaagagtaaaacataaaccaactgttttacaacagtgaacataaaccataatcacaagaaaggctacataaaagtgcaagagtgaaaaataaacaagtaatcaagcaaaa

SEQ ID NO: 397461 - DNA, 324 bp, Homo sapiens
aataagtggtagttaggatttcagtctcgttcttgacatccatgcttatacccacagcacatattttcatcaacttgtagaagcttatccttcttgacatcatgtgtggttttatgggcaggctctttagatttatatatgggtaaagtattttagaaatatttataaatatgttgcatgtccacatgaatttgctgtcatttctctccctttttgatgttcccttatattttatttttctatagttrttactttgcatgctgttattgcctaccttgactctattttcctgataaataaatgtttattgagcaacaggatgag

SEQ ID NO: 397462 - DNA, 391 bp, Homo sapiens
gaatgtgccctatcctgtacagccatgggaagtcagctctctcccccttgtatttctgtaaatcctaaggaatgctgacatgttagacaaatccatcctgtagcgatttgtcagctcttgttctgatctgccgctctgaacatctttgttggatacctctttccacatcataacactgctctgggttgctgccmttctgccttatatggctaggcaccaaacattgaaccagtatccacttcgaaatgcccaaagtacagcaaacaccaggttatggtatttaacattttactatggcttgagatgatctgaagtgaactgcaatggaaaaaaacaaaattaaaaattcactactcacatagaatacaaccttatattcttgccccaaaag

SEQ ID NO: 397463 - DNA, 587 bp, Homo sapiens
ccccttgtatttctgtaaatcctaaggaatgctgacatgttagacaaatccatcctgtagcgatttgtcagctcttgttctgatctgccgctctgaacatctttgttggatacctctttccacatcataacactgctctgggttgctgccattctgccttatatggctaggcaccaaacattgaacsagtatccacttcgaaatgcccaaagtacagcaaacaccaggttatggtatttaacattttactatggcttgagatgatctgaagtgaactgcaatggaaaaaaacaaaattaaaaattcactactcacatagaatacaaccttatattcttgccccaaaagatttcctaccatctctcttttaagcctcctcactccaccccatcccctgctttcagcttgcaccatgttccaggaatcaggtcatctgccaagtctataggaattacagaaacaaaccagtgagttgtctgcaaacatcttgccccaggtggtgccccaacccaatggaatgagatggactgcggtgatgaatggacacatgagttaaccatgagagaaactgacttataactgctgaa

SEQ ID NO: 397464 - DNA, 621 bp, Homo sapiens
ttgctttcttataacttttccagacaactcgcattatgtatttgtagctgattccctgtggaaagaagtatgaaaataacctcattcttttcaagtctgagaaaagatgccaaatgaaggaggtcagtaacacacaggacatgggacagctgggaaacaggggacaggtgctttgtgagtcagtagtagctggattccgctcaagggttgcattcttcaagatgtctaaatatttgcatcaagatgagtgtatttaatttggaaaccatataaattaatrcagatcacacatacaaattaatgcaaattcagtgctcattttgaacacttttaacaaacctcttaataaagtcaactaaaattctggataatttaaaaaacaaaacaaaaaaaccttatgaagcagcatgaaagcaagaaaactatgggtatcaaaaacaaagagaagtcagggatcctgggagttgttcaaacaccaaagttgtcttttctcctaagagcagaaactgggagattggagactttcattgtaatggctgcagagagcacagagatcaagagataagacttagggttgagattgttactctctactcccagactattactacagacacagag

SEQ ID NO: 397465 - DNA, 535 bp, Homo sapiens
gctgaatcactttaccaaagatgatgtgtagtttcagagtcagaacaaatacattyaaaacatccagtcactactgctaaggtgctgttcatctgctgaatcatctgaatggcttccttgaccattctggggatctattctttctatgagcaactctggcttctgtgttgctcccagaagcaggcatggatgaagtccgcagtgaccctggccttcctgcagcctgcaacagtcatcaatggaggaaggagaagggaaaatatggagaactggttgtggttaagtttatgtgtcaagttgactgggccacgggatgcccagacatcttattaaacattatttctggctgtgtctgtgtgagagtgttttcagaagagattgacatttgaattggtaggcccccaatgtgggtggacatcatctaattccttcaggatgcaaatagaatagaaaggtagaaggtggaagaagagtgaatttgttctttctgcttgagatgggacttcaatcttctccttcccttagactgctggtt

SEQ ID NO: 397466 - DNA, 558 bp, Homo sapiens
gagggactagccatcagcaataaaatctacttaaagattcttcgtgatcatgttttgttgattagagyttgcttagaaatatttactagtcatgtgtgtgtgtgtcattgcttcttacattactcttgaagagtttcttatgacagtaaaagtctcagaattatttatgttgtctttgagaagtagcccaatgcattcattccttttctttcatttatgtttagatcttgtatgcagcaaactgaatatgaaactcctgtcactgcagaaataatagaaacatctttccatggctttgactttcttccaagggatgactgggacatcacaacagaggaacacggtcatgacctttaatattcctctttaatggggtggatggtaggaggaatttcagggaatgatatgccaagtaacccccactgagtgctctgaactcatgagttttgtagtctttcaagttagatgactctattttgtagactacaaaataatatatttatttattgcaaaaaaaaaagtcccttatgagaaatgtgactggggacttaatctgca

SEQ ID NO: 397467 - DNA, 586 bp, Homo sapiens
cattctagagttttttgtttttgaaatgttttttgaaattcttttgtaaggaaggtttgtcactttctccccatttgtgtatttatttattcaatgacttattaatatcagtatagatgcatatatataaatacgtatattttatactttgggttgtaatctaatactaacttagtttgttattcaaattgttctagctttggccttggraaaaatagtgttgatgtgtacaattgcaacaactctaagagtgtcttttgtagcatggctccaataattgtagtagtgaagcggagtgaaagtaaattttgagcaaacatctttttttttttgagacagagtctcgctctgttgcccaggctggagtgcagtggtgccatcttggctcactgcaaactccgcctcccgggttcatgccattctcctgcctcagcctccagtccctgtagctgggactacaggcgcctgccaccacaccccctaattttttgtatttttttctttagtacagacggggtttcactgtgttggccaggatggtctcgatctcatgacctcgtgatccacccaccttggcctcccaaag

SEQ ID NO: 397468 - DNA, 617 bp, Homo sapiens
atgggaactgctgtaagaaattattactctagtgaattcactccaaataaatattcatgtaagagcattcagtacctagagtagatggtttggcttaaatgattcatcactgttgattctaggtcattgccatttctccatttcattttggctctgttgacagtattcttcattatatattaagactttgttaccttgcctttagttgctcctggtgtgagaaatgtgaattcaaaagcctcttttaaagataaggtaataccctaaaaggtgagcacaaggtagctaagatgattctactttaataggatatacggagctttagatacagagagcattttttttttttatccagctaaagctataatgcacaaagcatgacattttaagtccattaagtaattccaacaagattagtcttcaggttagctgcatttctctgtagactattatcacaatgtcatggagatrtttatgaaaatggatcttatgggcacatactgttacaaactgttgtctatattacactaatcagaacctcaagaaaaaccatacatgttgtcacacttacaaacaaacaatattgatgcatgttttctctttcctaattataaaat

SEQ ID NO: 397469 - DNA, 571 bp, Homo sapiens
cactaatcagaacctcaagaaaaaccatacatgttgtcacacttacaaacaaacaatattgatgcatgttttctctttcctaattataaaataaatacatgcaccaagattaaataaatgacaggtaactaacacacagtaaactcagattgcaacattgttatctatgatggctttgcaaaatgcaaaaatgttgaatgacaaaaacaatagaagagaaagtgaggaaaagcagcaaaagaaaatatacaaaacgggagaaggaaagttgaggggaagaggaaacagcagcacaacaacaaaaacatcaaagaatttctgttcggtatttttgcttcattatattatgctgtcatgagcattagtttgattatgtgaacaactcagatatttgggaaccaatataatttctaactgtgtgttactcattattttgttttctatktgctagtagccatactggttttatttttagtaggtttggattctaaacatattgtataacagaaaaaaaaatcttttttttctgatggtgtggaaagcaaagcctggtatcacatgaaccagatgt

SEQ ID NO: 397470 - DNA, 586 bp, Homo sapiens
cattctagagttttttgtttttgaaatgttttttgaaattcttttgtaaggaaggtttgtcactttctccccatttgtgtatttatttattcaatgacttattaatatcagtatagatgcatatatataaatacgtatattttatactttgggttgtaatctaatactaacttagtttgttattcaaattgttctagctttggccttgggaaaaatagtgttgatgtgtacaattgcaacaactctaagagtgtcttttgwagcatggctccaataattgtagtagtgaagcggagtgaaagtaaattttgagcaaacatctttttttttttgagacagagtctcgctctgttgcccaggctggagtgcagtggtgccatcttggctcactgcaaactccgcctcccgggttcatgccattctcctgcctcagcctccagtccctgtagctgggactacaggcgcctgccaccacaccccctaattttttgtatttttttctttagtacagacggggtttcactgtgttggccaggatggtctcgatctcatgacctcgtgatccacccaccttggcctcccaaag

SEQ ID NO: 397471 - DNA, 604 bp, Homo sapiens
atgtccactttagttgcatgtttgtgttaggatagtagttccttttacttgtcattaaaaaaataatcattcaatttgtctgttagcttttatgattgtgtagctgaggttcatgagtggcccattttatcatattgaaagcagaatagaggttaaagacagtaggtatttgtcttagttcactttctgtagctataactgaataccacagactgggtgatttatttagctcatggttctagaggctgggaagtctaagatcatggtgctggcatccggtgaggaccttcttgctgcatcctaacaaggcagagggcrtcagattgtgagacagagcaagtgtgctcactcaggccaatctctcttcttttaaagccaccaggtccatcatgggggccccaccctgatgaccttatctaattttcatcaccttccaaaggctccaactccaatcaacatatgaatttgggatttatgcttccaacacaggctgggtgaggtggcttaggcctgcaatgccagcatttgggaggccagggtggttggatcacttgagcccagcactttgagaccagcctggaaacatgttgaaaccccatctcta

SEQ ID NO: 397472 - DNA, 604 bp, Homo sapiens
atgtccactttagttgcatgtttgtgttaggatagtagttccttttacttgtcattaaaaaaataatcattcaatttgtctgttagcttttatgattgtgtagctgaggttcatgagtggcccattttatcatattgaaagcagaatagaggttaaagacagtaggtatttgtcttagttcactttctgtagctataactgaataccacagactgggtgatttatttagctcatggttctagaggctgggaagtctaagatcatggtgctggcatccggtgaggaccttcttgctgcatcctaacaaggcagagggcatcagattgtgagacagagcaagtgtgctcactcaggccaatctctcttcttttaaagccaccaggtccatcatgggggccccaccctgatgacctyatctaattttcatcaccttccaaaggctccaactccaatcaacatatgaatttgggatttatgcttccaacacaggctgggtgaggtggcttaggcctgcaatgccagcatttgggaggccagggtggttggatcacttgagcccagcactttgagaccagcctggaaacatgttgaaaccccatctcta

SEQ ID NO: 397473 - DNA, 314 bp, Homo sapiens
aggtgtgggtttttgatgcgccatgtgcactgttgctggaaatttatagttgagctaaaggtgagaagggaagaaaaaataggcatattggatcttcttggtyatgaaatattaaactagtagaaagtgatatcgttgatcaagggaatctcacaattttgtttatttatttgataatatctctttttttccatactatttctagccctaaacccatgggagtatgttttaacctgggtcttctctcatttactgtccttaattttaaaaaattccaattgacattttaaaaagtaggaatggttaattatgtc

SEQ ID NO: 397474 - DNA, 532 bp, Homo sapiens
taacaaatgacttgctgctaatggagcgaatcagtatttcattctaaagtggagggaggcaaatcctcaaaaaatgtcttcccagaaattaggaagcaatctttaaaagtgatttaaaaataattttatagaaaagagtcaaagaagtgccacagtctatttccattctctttctgatatggtttaactcttatggaggtgcctggagcatcctctactcagatccttttgaattactcatcaactgatctgtggaaaccatttcaaaattaatagtctctgaagcactcctcagaaagaaacagttctgcgtgtttcttgttttttggaatgctctggttttccttacccaaggcctagactgkttgggccatttgcttacctgatccagcccacagctctctgctgagttctgagaatagggcaggcgtcaatgttatggtggaaggagcagcggggaggctgctcggtacctatgtgtttctggctatgccaaatatagtggccattactttctaaataattcagtgat

SEQ ID NO: 397475 - DNA, 563 bp, Homo sapiens
cttctctgcttgggcatgcattatattctggtccaaccactcattcctccacatcacttaggctgtcctaggtgcaggctctcctaaggggtggttgccctttgatttcctccttgccttttgcactttygcagcttatagatatagaagataaccaataaaatctggtaccaaacagtcacacatctaggctttatgctacctacctatgctgtccaataccagagtcacatgccacatgtagctattcctatttctattaattaaaactatttaattttaaataaattaaaaattcaatttttcagttgcaccagccacatttcaagtgctcaaatgaatgtgtggcttgtggctacaacactggtcagagcagatacaaacatttccatcttctcagaaatttctgaggaataatgccacaataaaccttgtcaatcatagaaggaattctgttaaccttctcatcatgtccatatccgcatgagaatgtgagatcgctgaaagcaagaatgagattttctcatctctgaaccccagctcctagtccagggccctgcagg

SEQ ID NO: 397476 - DNA, 537 bp, Homo sapiens
agacctgctcaaccaggacagctttctaacactttctagcctctgtcaaaagaaaaaaacttttcggtttgtcttcagaagtaagaaaggtacctaggaaagatgagctgagccttcctgctgatgtccaaacccacgcgagctctcagtgctaggagatgcttgcagctgcctgacsggcactcctggctgggtcttcccatatggggctcattctcccaggactggagatcctgtccacttcaccctccctcccatgaccatgtcgctgccacacaacacagattaggagctgtccccaggggatgacaccattttgggggaattgatatcaaatatgttattgttgtcattgtttgctctggtttattgtggcaaaatatatatatatataacataacatttaccctttagctttttttttaattgaatgattcagtgctgtgcaactgtcacccccatccatttccagtacattttcatcattccaaacaaaaactccatgcccattaaacaataactcctccttcttccttc

SEQ ID NO: 397477 - DNA, 531 bp, Homo sapiens
aggcattgtcatcctcctccacgggtttaccatgggccagccctgcagatggctcatggaagcctttggaggaagagacacaacctcttgatgcctcgcaacctagtcagagcctgggagggaatggataatgtttcatggttgaaacggtggcacatactttcgaatattatgttagtttccaaaaaaacaagactaaagcggcctcttctctggcagctctccacctaacgcttctctgaggcctctactctataaagaggacacggctatccacacttgaggttccacagcctcctggagtcttctgaggagaataagatcctacttgagttttctaatccatccaattcactggccaaatcattttttgcataacattaagtctgtgaccagccttcctttgggggtctgccatactgttaaygtgccagaaaacagctgagattaaagcataatggagctacgggaaataatttgtaatgagcatcaataagcaccaagtgtgacactatgagtaaaattgttact

SEQ ID NO: 397478 - DNA, 482 bp, Homo sapiens
tttcaaaataagcacatttataactttttaacctttttattttatttatatatgtatttayttttaatcaacaataattgtacatattcatggggtacatcgtgatgtttcaatatgtgtaatgtacagtgatctcatcagggtacttagcatatccaccatcgcaaacatgtatccaacattgtttcaatgttggcaacattcaatatcctccttctagctacttgcaattatgtattatcattaactatagtaattctacagtggtatgaaacactggaaattattattcctcctatctagccgtaattttgtatcctgtaaaaaaaataagcacacttttatcaaggaagatgcccactggtcagccaccccttcaccccactgcattaactacatcctggtcccatgccaacttgaaggcagaacattgactgtcacaagaagctcattactcctagcatttggatttcatttttctg

SEQ ID NO: 397479 - DNA, 482 bp, Homo sapiens
tttcaaaataagcacatttataactttttaacctttttattttatttatatatgtatttacttttaatcaacaataattgtacatattcatggggtacatcgtgatgtttcaatatgtgtaatgtacagtgatctcatcagggtacttagcatatccaccrtcgcaaacatgtatccaacattgtttcaatgttggcaacattcaatatcctccttctagctacttgcaattatgtattatcattaactatagtaattctacagtggtatgaaacactggaaattattattcctcctatctagccgtaattttgtatcctgtaaaaaaaataagcacacttttatcaaggaagatgcccactggtcagccaccccttcaccccactgcattaactacatcctggtcccatgccaacttgaaggcagaacattgactgtcacaagaagctcattactcctagcatttggatttcatttttctg

SEQ ID NO: 397480 - DNA, 616 bp, Homo sapiens
aattttgaactgatcataaaaattataatcgtaatgctgtttctgctaaaagaaaggctaaactcatttttaaagcaagacaaactacagatcttatataagatcacaagcctaatatgacggaattggaaaaaaaaatctgtgttcagcatagcagatatscatgaataaaccagacattcaccttatgagacttcagccagcttgtagagcaccttggtgcaaattaggaaaaaacaaaaacaaaaacaaaaaagcaaaacaaaaaccttttgggtggttgaaacctcatgggatgtgtcatgcattgtggtagaaggctcagggggcatggcttggagaggggcctagttggagtttagccttcactgcccctgagccagctgcctgggctcatgccatggcctgagtcacagatcagtttctttacgggcttttttcctggtccttcactaaaagcagagtgaaagcaatgggactgttatggattggattgtgttcccccaaaagatattgaagtcctaacctctagtacctatgaacatgactttatttggaaatagggtttgttgattgatgattattcctgtcttttcttcttcttcttttttttttt

SEQ ID NO: 397481 - DNA, 614 bp, Homo sapiens
ttaccctctaatacccctgtcctctgaacaaaacttaatcagtagttttaaaacctgaacatttctgggaattcttcatgttgccttatttttgtgactttttagctctgcagatagtatgaagaaatcaagaccactaaaatataaaatagtttttctaaaaaaataccaagagtaataaagtatactgaggagtcttaaaaggaatctgattcttactgaaagttctatttatatagggtttaaaccaatattgtttaaaaccaacaatcatctttccatttaatcccatggtcagagtaatgagaggaaaactacataaaaacattaaagtaagaaatacgaaaatttagaagaaagacatgaatttgcatcatcagaattgggaaaatctaattagaagaaggaaaatagtaatagaatcttcaaataattttttggagagctttatataaaggtaaagatgaaataagaaacaatttagcacaacagggaaaagaaatattgattaaaatcctgatrgagttcttacaaaataaatattatattataaaaagaaggaaaggagaaaagttgttcaagtttagaaatgagaggaactcctagaaaataca

SEQ ID NO: 397482 - DNA, 633 bp, Homo sapiens
catagcaaatgctttatgagcacaacctatatgatagacattgttcatatgccaagaatagaatggccaaaaagaaaactaaaacgaaatgcaaagtccctgctatcaaggcacttttactgaaattggggaatgatgcaaacaaaaagcaaattacttgccctgaaataatgatgagtactatgaagaacaataaagcagaatgagataaatagtgagagtctcattggttcgcatgtagcagtcagtagtccttcacaattttaaatcctattggtctctaacattgccagccccccacccccacccccaccccccaggatagaggctatgccttgattaggtcccagatcccctggggagcacctatgcatttcattatatgcagtagctgctgaatccactcttsctgtaaggtcatcctcctttgcgatttcagaagaaggctttgaaggatatgcctttcttagccactgagcaacttactcattcactttcagaatgtagaaaattgggtgcccagaggtgtttttgaccctctcaaacagattcaaactctttttgtccagtccatgctggtaatgtggttgccaagagttctctcaaaaacctcattgattttccttatgttcg

SEQ ID NO: 397483 - DNA, 605 bp, Homo sapiens
aaggtcatatatttaatatttttatgttttctctttttgctattcaaacaaagctgaattatattagaatcaatcttgttggctcacagctgtaatcccagctactggaaaggttaaagcaggaggactgcttgaggccaggagttcaaggctgcctgagctacaatagtgccacaccagcctgagaaacagagcgagaccctgtctaaataaaaaatggatctttttgattaatacatttgtttagcgtgtggatatttttggttattagtgaggttacatgtaaagtcttttcttagtcttgataataataataacataacaaggtatttcttttacacttagtccccaggctatamatgcatcaactcatacaatactctaagcatcctaagggaagaaatattagtattcctatctcataaatgagagaacaggtttgagatgttgactattttgttatgatcacagagctagagtctaggtttaaactaagatactttgattccaaagccaatgctcttaaccagtcagttataagttttaatcataattgttaactttgcttaggtgcctcataaattgactcagttatttaagtaagt

SEQ ID NO: 397484 - DNA, 528 bp, Homo sapiens
atcataattgttaactttgcttaggtgcctcataaattgactcagttatttaagtaagttcctgctatctaaatgtaaaatggggtactacaggctgaagaaactatttgtgaagtcaattatttaacctttataggtttttgattatcgttctgatatgccttcatttaaagcacgtaaataatacataacatttctatgtcaagaaattgttctgataatccttaaatatataacctttacaccataatctataatctagcttgtcagggactggatctacttttgttgatacctgaattttcttatttatagcatagtacctgctccaataaagatttatttaagaatgcagtgagaggtaatcccagcactttgagaggctgaggmgggcagatcgcctgaggtcaatagttcaagacagcctggccaacttggtgaaaccccgtctctactaaaaatacaaaaattagccacgagtggtggcaggtgcctgtaatcccagctactcaggaggctgaggcagga

SEQ ID NO: 397485 - DNA, 462 bp, Homo sapiens
taaagttatgagatgggatttttcttgtggtttgtggaatcagttttagaagctgaggaaacaacggaggtgatttaggctgcccagatggataagttgtaagagaatttatgtgatgctgagatatgtgatagagttgagatgatgtaaatgaagagattttggaaagtagaaagcactacataaagatattccaactcagagtggttaataatcactatgttattcagcacattgactaggaattamattattttatataagccttgtatttcaggttaaatgttatccaagagagcattttaggaagtgatttctatttcatctggagtagtcttctggttttcattatgattttaatattattgacaatgcatatttgttttagctgaggaggatgtacacagtgtaacttgtacctttttccagagctgttgcaatgttctacaggcaagcattaat

SEQ ID NO: 397486 - DNA, 560 bp, Homo sapiens
ctaatagtaatatgagaagccctattcaacttttcaatatgtctaatactaagatggatattatgcattacctctcaatgaaattacacaaatttactggaatgttaagttggctgaaatggttacaaatggcaagagcatgmtgattgctgttatatatttatttgcccaataacaaatggaaattaaaaagagtcaaccattatagaataaatgcagtttttttggtagacatttggtttctaaaagtcgtatgtaaaattctccgcaaaactaaaagagagttgcttggttataacaaggttgatgccccttggtacagtagaaatttctttttccaggtctgatattctgaaaaatagactatgggaagtcataagtagaggtcattatttcactacaactcattcctaaagtagtgaagagtgttaggaactgagcagcatcctgaattgagcctcttaagaatcattgaggtccgataacttgtgtcaacatcattatcacaggatttgaaggagttgggtagggactcatgagtgagaaaactgatagaaagt

SEQ ID NO: 397487 - DNA, 619 bp, Homo sapiens
gcaatttcccattaaagatgttatataggaaaacagtactagaattggagttataactggtatctaattttgttccatttgctgaattgctgtatgaccttggataagtcacttcatctttctaaatcttattccttatctataacattaatggaggtgttgttaaatgcgttcttggaagccttatgccttctttaaagttgccttaggacaargatgaggataattctgctataattagggctgattatgatctcttaagggaagcagttatgatatcttatttatatacttttctggcaaattgttcagttgcatttgcccttaaatgctctcaacttagtggacagtctgaatttccaaatcttatggaaataagtgatttccctaaaccttagagatattttctgctaggctgaattgttaaggatttttaaaagttctaactccagttattttccttccttcagtgattgattggtgatggttggaaataaaattagaaggtgtcccccaactgtgaaatgactcataagaaaggttcaaagtgttctcttttgaaaagttcttagactaagaaagtgctttgttcccttaaaatctcttggatgaaatgtcc

SEQ ID NO: 397488 - DNA, 571 bp, Homo sapiens
tttcccttcttgcctccctgaacctaaagaataaaaacaatggcagcaacatttttctgtggagctggcttataggataggactcggaagcagcacaagtcactccccctcactcccctttctggagtaaacgtgggcaggtggggagggaagcctgcattctgatttagcctcccaccttggcggacaataactcacctcttggcaccagaagacaagtcacagctgctattgtcttgataattatgtttactcaagcagcggagtgggagtcctgtggtcaagggagtgtgacttgccaggtgctccctgtctagggcctctttccccctgaggtggatgaagctgttctcaggagcccttacaaccagttataaattactttcagtgagctaaggtcaaaggcatggggagaatagtaagtgacaacattgaggatttatatgaccccttccctactaggagaccaarcacttcaaatatatgatctcatttgccctcctctgatccctggaaaatggagggcttgagggaggcagtggttagaggcaggtgtgaaagctctggtaaa

SEQ ID NO: 397489 - DNA, 655 bp, Homo sapiens
cgatggaggtcagagtgaaggtactgtggtcagagtgaaggccttggcaggtaggacctttcacattcccagagctacattaatagagctccctggtctctgaacggtggggagctattttgtaagccaatcaggaacaattccacattcaagtaagagtataccatcaaacaattgctcggaatcctagcagtttcagagacagtcttgacataacaggccgatgcattttatttaataaacctaatctattctaaattgtcattatgttattaagtcacaacttaataccaaatgtggcgataatacacctagctatagatacttatgtgactaagaaacttcctcctcagcagatctaaagcagaggtctgaaatgaacccaattctgctctttatttaagagtaaactaatagttgtaaaaagtcattaggaaagaacctggaacatcatctgggccaggctygtgaggatacatatgaggatatgcatggggcccagagggattctttccttacaccagcacccacagcaaagaggcaaaactgcgtttgagttgggtagcacacatctcatcaaatcacagtgcttttttcttcttctcttttctcaagcatgatccttcattgtttggcacagccaggggaattatta

SEQ ID NO: 397490 - DNA, 655 bp, Homo sapiens
cgatggaggtcagagtgaaggtactgtggtcagagtgaaggccttggcaggtaggacctttcacattcccagagctacattaatagagctccctggtctctgaacggtggggagctattttgtaagccaatcaggaacaattccacattcaagtaagagtataccatcaaacaattgctcggaatcctagcagtttcagagacagtcttgacataacaggccgatgcattttatttaataaacctaatctattctaaattgtcattatgttattaagtcacaacttaataccaaatgtggcgataatacacctagctatagatacttatgtgactaagaaacttcctcctcagcagatctaaagcagaggtctgaaatgaacccaattctgctctttatttaagagtaaactaatagttgtaaaaagtcattaggaaagaacctggaacatcatctgggccaggcttrtgaggatacatatgaggatatgcatggggcccagagggattctttccttacaccagcacccacagcaaagaggcaaaactgcgtttgagttgggtagcacacatctcatcaaatcacagtgcttttttcttcttctcttttctcaagcatgatccttcattgtttggcacagccaggggaattatta

SEQ ID NO: 397491 - DNA, 655 bp, Homo sapiens
cgatggaggtcagagtgaaggtactgtggtcagagtgaaggccttggcaggtaggacctttcacattcccagagctacattaatagagctccctggtctctgaacggtggggagctattttgtaagccaatcaggaacaattccacattcaagtaagagtataccatcaaacaattgctcggaatcctagcagtttcagagacagtcttgacataacaggccgatgcattttatttaataaacctaatctattctaaattgtcattatgttattaagtcacaacttaataccaaatgtggcgataatacacctagctatagatacttatgtgactaagaaacttcctcctcagcagatctaaagcagaggtctgaaatgaacccaattctgctctttatttaagagtaaactaatagttgtaaaaagtcattaggaaagaacctggaacatcatctgggccaggcttgtgaggatacatatgaggatatgcatggggcccagagggattctttccttacaccagcacccacagcaaagaggcaaaactgcgtttgagytgggtagcacacatctcatcaaatcacagtgcttttttcttcttctcttttctcaagcatgatccttcattgtttggcacagccaggggaattatta

SEQ ID NO: 397492 - DNA, 406 bp, Homo sapiens
gttatctctctctcgttccctgaacattgctgttttcctgttcttttttcaaggtgcctagatttcatattgttcaaacacacatgctctacaaacaattgtgcagttaacgcaatcatcacagggtcctgaggcgacatatatcctcctcagyttacaaagatgacaggattaagagattaaagacaggcataggaaatcacaagggtattgaatggggaagtgataagtgtccatgaaatcttcacaaattatatttagagattgcagtaaagacaggcgtaagaaattataaaagtattaatttggggaactaataaatgtccatgaaatcttcacaacatatgttcttctgccatggcttcagctggtccctctgtttggggtccctgacttcccgcaatac

SEQ ID NO: 397493 - DNA, 626 bp, Homo sapiens
gcaaataaaatgccagtttcttagatgtaaataacacaatggctttgcccatggtgtgaaaataaagggttaaatgaatgaacattttaattgatagagtgttgtattgacctgacccatagtgtcactaaagcaggattatcacagagtacagcaaaggacaccaaaatgagagttaggattgtgttctggtttcagtttgtgggatactgaccaataaaatcctcaagagctatttccttcactgtaaaatgagctcaatagaaccattttgaaggcatcttgagattgaataagattacacacatcagtgctccactgagtcataattggaacctgaggaaaatagaaaaatcagtaatactgatcttatttttatttaaaattatattttgtttaccacacaycttttcattaatttagatttgattttttttttttttttttgagatggagttttgctcttgttgcccatgctggagtgcaatggtgcaatctcggctcactgcaacctccgcctcccaggttcaagtgattctcctgcctcagcctcccgagtagctgggattacaggcaccggccaccatgcctggctaatttttgtatttttagtagagatggggttt

SEQ ID NO: 397494 - DNA, 585 bp, Homo sapiens
tttcactttcagaacatgtcagtttggaggcagatagtttttttcaactttttaagtgaaataaaataacaactgttcttaaatacaagtgactatgaaggcatatgtgtgaattgtcagctgtatggccttttactcaggtrcctttcacatatgtaggatttcgttccaagggtgtatttggcccattatacaattttatctgtaggcaacacttacaattatgtaattgcagtggctactataattacaatacagcagccattaaataaactgatgtgaaaatggggctttctaaaaattgtgggcatatttcttcacaccattcaataaagtaacaagaacatacaaattctctattgatttaaatatctgagtgtcatttatactgattttagtataattttcatcaaatgtgacatatgttttctgaatactaagaagtgtttctggtgactgaaggtaaaaagagttaaatttcagaaatcttaaaatctacttgcgacaataaggcaatgactctgtttaagactacttctacttttagactgggttcctctggaatgttgatttaccttggttctg

SEQ ID NO: 397495 - DNA, 585 bp, Homo sapiens
tttcactttcagaacatgtcagtttggaggcagatagtttttttcaactttttaagtgaaataaaataacaactgttcttaaatacaagtgactatgaaggcatatgtgtgaattgtcagctgtatggccttttactcaggtgcctttcacatatgtaggmtttcgttccaagggtgtatttggcccattatacaattttatctgtaggcaacacttacaattatgtaattgcagtggctactataattacaatacagcagccattaaataaactgatgtgaaaatggggctttctaaaaattgtgggcatatttcttcacaccattcaataaagtaacaagaacatacaaattctctattgatttaaatatctgagtgtcatttatactgattttagtataattttcatcaaatgtgacatatgttttctgaatactaagaagtgtttctggtgactgaaggtaaaaagagttaaatttcagaaatcttaaaatctacttgcgacaataaggcaatgactctgtttaagactacttctacttttagactgggttcctctggaatgttgatttaccttggttctg

SEQ ID NO: 397496 - DNA, 470 bp, Homo sapiens
tgtatgtgtaattgtgtaatatatagttgtatatgttaacttgtttgtaaatcatatacatttctaaaaattaagtatttttttttctctttttcctcttattgtgttttattatggtttcttggtgatagtttattctataatttagtcttaagaggataggatattggtgggattctgaatttgtgaaataaatgattttacccagatttggttgctcaaataagaatttgatgactgttggtatatagtcttcaatttatgggggagaggctgagctacatttgcctgcatatttgtttctatgaattatagtttcataggtgaaaatttatagaaatatgaatatggcatagcacttcaaatatttgtatgagggtatgcatgcacactaagkgaatgcttagtttccatcttgttctaaccatctcccaccaatggttttccattgtccttcaataaattcagat

SEQ ID NO: 397497 - DNA, 407 bp, Homo sapiens
gtttttgtgtgattcaatttctaaaaattttagttctcccatttatttgagagaatagaaccattagctgtacagattagtgggtcatatattttgctttcctcaggggacaaaaagggtaatgtgtaaatgtatgaattgtaagctatggaatggcgtggtctgtctgctctatttcccaaaagtatctgggacagggctaagcatatactactcaatacattaggaataaaaaataaataactataacatattttcattttagtaagtaaaatttggataaaatgattccttaaaggcaatatttgacaacagagtaatgtacagaaattcaaaatttgctyacatatatatatatattaagtacagaacacttctattaaagatgacaaatatgtaacacacag

SEQ ID NO: 397498 - DNA, 544 bp, Homo sapiens
aacactgccttagctttgtccaagattctggtatgttgtatatttgttctcattggtttcaaagaacatcttggtttctgccttaatttcattatttacccaaaagtcattcaggagcatgttgtttaatttccatgaaattgcatggttttgagcaattttcttagtttttacttctatttttattccactgttgtccaagaatgtgtttggtatggtttcagttcttttgcatttgctgaggattatttcatgtccaattatgtggtcaattttagactatgtgtcttgtggcaatgakaataatctatattctgttgttttggagtggagagttgtatagaggtctatcagatccatttggtccaatgtagagttcaggtcctgaatatccttgttaattttctgcctcaatgatctgtctaatactgtcagtggattgttgaagtcccctactattaattattgtgtgggactctatgtctctttgtaggtctgtaatatcttgctttatgaatatgggtgcttctgtgttgggtgtata

SEQ ID NO: 397499 - DNA, 592 bp, Homo sapiens
ccagcagtcaatatgtggtgctaattctcccacagctataaattacagaataggtaaataagagatggaattgaaaatggtacctgtcataattccatctaattaatcacttgcatactttttgctttccatccctgttactcttggctctactggtttacagattttaatgccaaaggaagaatgcatttatcaggggacacaataacagttccattgaactagactcctagattttcacttgatcaagtcaggctcctcttatcactaagaaaacaagccaaaacagggattatagtgttggctagtgtgattgagtctacctctccagggaaaacacagtcgttgctacctaatgggmgtaataaagattatgaacgacatacagagaattcccctgaaacatggaacatctccttgtactactgctgttaaaaggtaatggtaaaccacttcagtcctatataatcagaacctcccattctcaggtctatcaggaataaaagtttgagacacttacctgcagattgcctttaatgaacttaaaagtacttgctggacttgaaaaatataagaagtacatatatgcaaa

SEQ ID NO: 397500 - DNA, 574 bp, Homo sapiens
ctccagcaattaaaatacatttaaaacagattgtacttttaatgtaaatttagggtacagaacaagaatatgaagtcatcaagaaacaaaagaaaggagaagggcacaccccagctaactcagagctgccactagaagaaaaaggaaatttcctatatttctactcctaattcgctcctcccttgtattccactctctaccgaagcttcaacaggatacagccccctaaatctcaccatcaaaagctgaaggatagagcaattaataatggagaagtcatcaagtactttaaaaggcaggcactccaccggcctcctacattaggcatggttagattgtcacaastccttatttgctgtaggcaacatataaggaaaagaggcgtgtggttacccccagattctgtaatcactccaaatcttagaggagactctctggccagaagaaaacaatagagtgtcttcactacagaagatagagtctatattatcattgaaactggtctttccagatatttataaatataaaccaattacaacaataacacaatattcaagaaatatagaaagcagca

SEQ ID NO: 397501 - DNA, 483 bp, Homo sapiens
  misc_feature (1)...(483): n = A,T,C or G
cacagaatctcatcagactcaccttgtctactaatctggggtctatgtctcctacttcagctaccatcaccctggctctcttcccctattgctctgtacatgtccttcatcagatacaatttccactctnttctctcaaactatttcactagctcttcaaaatttccagactgtcaattttcttatgctctaaactttaaaaaaaattatttcactrcttcattttaagtaaaataaggctgccctacaaggactctacatttcttgctgttctttcaaaattaagctaattaagttttgtttgttggtttatttgtttctctttctttttactctctctcatcttatgatcaggaatttgtctaggtgttcatttattcttcattgccactttcagatatgtatatccttgcttcttttggagggttttggacagttctcctgctttcttggagctcatattttctggctagacctcttttc

SEQ ID NO: 397502 - DNA, 559 bp, Homo sapiens
tgtgtgtgatttgaggctcagagagggtgagtcacttgtctcgaatcaccagcttgctgcaggctgacttagggcaccagtactatggccctgttttcatgcctcacaattcacaggccgtgtgtccaccatgggtttggaaagtgggagggggacagctaaggtgggtggagggcgaggattgtgcttccttagtggtgaatgggaagacttgcacctctctgtcccagcacttgtcaccattcttgcctgtgtttcaggcaaaaaaaggtttttgtgggatagagctttgtgctgcagaaagaacatccctgcccscaagtagctgtccgtgttagggtaagccctttaaaccaggtacacgtgcttaagctcaggctctcatctgtgattttctctaaggctgaaatgcaataattcttataacacatgcagcataatgtctcataatggcagattctattatttgttttctggttgaaggttttcaactttctctaagtcttctctaaaggaattactcttaaaataagggagattttgttttccatctttgttt

SEQ ID NO: 397503 - DNA, 572 bp, Homo sapiens
ctcttctcaaaaaggggaaaaaaaatatttttcatttctcaggtcctgctctcatggtctcttcaggctagtgctgactatccagtgatgttctcggtgcagcagatgtctacatgcttattctttccagataaagcatctgggttttccagaatccttgtgataacctcacattgcacagattcctgacattgacacctggacctttagtcaattcctctcacctccatttctgcccctgggaacacatttcacagattctgctggcttccctttgccccaaagcacaccctattgggcaactaaaagatggcttgattctagctactttccacagtatccatttgggccactctcaaacatcctgctgtaccaaacagcaaagggtagtcttcccttgactgcctctttccttgctctcccaacagagttgctcccaacagtgttgctccagccacctactgctgctgagctagaagcatgcaccatattctatggttaccagaccacctgtaataagttctcctaagaattgcttcatagtactrtactctgatgtgctgcactgcact

SEQ ID NO: 397504 - DNA, 453 bp, Homo sapiens
ttagcactttgaggaactgaaaaactggttttgaaaatgactgcacaattttacattttcattaacagtggatgagggtttcaagtttgcgacatctctatcagcatatatcattatatctttttttattttagacattctattatgtacaaagcagtatctcattgtggactatcagtttttaaaagtttaccaaaaatctgaacactacaggatactaacaatattaattatcactaatgtttataggcttagtgatgatctcagaagttttcttktaataattgggagaaagggaagaggctgggaagaggagttgaaatgaagcaagatggatcatgagttatgaatcattgaagccaggtaacagtcatttaagcacgcattatactattgtctctgctttattcaaggtttaaagttttctgctcacaaaagtatttttctaagttg

SEQ ID NO: 397505 - DNA, 474 bp, Homo sapiens
tccttttcatgctaaattcattggaaattagtaactacacccaatccatacttaagaagtggacagaatatttacataaattacatggaatttttctacatgggagatttgtctttttcccttcattcatttattaatttattcaatattttatttatactagtacaaacccatgtgtatttattttatactttgtgtgataatacaatayggctttatttggttgctcaaattgttctaaccttggtgcttgggagttcattcagttgactcctgtgtccttttgacatactgccgtcaatatgggttttcctttctctctctctctctctctctctctctctcctccttttagtacttattttctggcatgtatcccaggctcattgtgtatgttttctgtcccaatcttagaattaaccatttttccatgtagtcctggctccttttattggagaatatgttagaaaccaa

SEQ ID NO: 397506 - DNA, 474 bp, Homo sapiens
tccttttcatgctaaattcattggaaattagtaactacacccaatccatacttaagaagtggacagaatatttacataaattacatggaatttttctacatgggagatttgtctttttcccttcattcatttattaatttattcaatattttatttatactagtacaaacccatgtgtatttattttatactttgtgtgataatacaatacggctttatttggttgctcaaattgttctaacyttggtgcttgggagttcattcagttgactcctgtgtccttttgacatactgccgtcaatatgggttttcctttctctctctctctctctctctctctctctcctccttttagtacttattttctggcatgtatcccaggctcattgtgtatgttttctgtcccaatcttagaattaaccatttttccatgtagtcctggctccttttattggagaatatgttagaaaccaa

SEQ ID NO: 397507 - DNA, 593 bp, Homo sapiens
ataagctccaacctaaggaaccaaggaaaagaggagcaaaataagctggaaaacaagcagaagaaataaaacaaaatgagaacaaaaaaaaaatgaatttggaatttattataataaacakctatttcttatattatcagaaaagcctgtatgtcaacagtattgttgaacaaataaaattcaaaatagtcatataataagaccagcatggaccaaatctcaaatttcagaaggaatttttggtagaaattttttcacttcatgtccattcctgacttatatttctctcactcttttttttttgttttggtacgtgcttggcaaacaaagctccactactttaaagatttgctttaaacctttgaagctctttattccttgccaaaccaagcaaataattaccctccaattggtaggaaatccattattgctaatgtggactttttctccattcacaatgagagtacttcttcaacatgtgaaacttttttctctattcacaagtccaaatatttattaaagaaactcacaactgaattaatgaaatacaatttataagaagtgagtattctctaatttcagattactttgaa

SEQ ID NO: 397508 - DNA, 527 bp, Homo sapiens
caggggaaatcatagatgcagtaatggaaagattattattttagtagaacctaaaaggaaactaccagattctgctyatctctttcttatatcctgaatgcatttataaattattaatcttagagaatttattatttccataaaaacatgaatgggctatataaataactaatgagaacagtttatagatgaagagaacatgtatgactagctgttttgggaatcctgaaaatctccacatgttactcgtatttaaataatttgagaaaaatttccatcaaaagacgtatgattctataacaggaggtattttaagttcaaaattttagttaatcttcctaaagactttaggatcttacatatttaacctatgcaacatgtcctggttaaataataatttaacattacagtgaatttggtggtgtcctgaaaattaaaatgcagagcttctgattaatcacattattgcttattaaattgagtgttcttgggatcaaatgcccttgctatcaaaaatcactggtgag

SEQ ID NO: 397509 - DNA, 555 bp, Homo sapiens
ttcatcaaatcatagtttccttctgctgttctcttcattttttaaaatcttactcttgttccaaggccaagctttcccaccttcagagatccttctcgcttctagcctctgacagctgatgcctcttaggggaaatacaggggctaccagagaaacaggtgactggctacggctgtggtaaaagtggaaagtattttccggtgctctttttccccttgctcttcacygcatggattcctcccacagccacgagctcagagctctcctgctttaaggtataaagaaaaactaggagaatgctggttttcaagtctggctctgtctccactgtgttgagtcatatggtaagttattttctggcttccatattacttatatgatggaggagggagaatgaaacatctctcacattgatttgaaggcaaaatggtagcacatatgtgaacaagtctgacaggaagctggctctcagtagtgtatgctaagtgaattaataattgataaatgccacatgtttattggccatgcaagaatggttatgcaagacgcaaagcc

SEQ ID NO: 397510 - DNA, 574 bp, Homo sapiens
tatgaaagtgagtgtgttctcatgagatctggttgtttaaaagtatgtagcacttcacacttccgtccttttctctcctgccaccatgtgaagatgtgcgtgcttcctcttcaccttctgccatgatagtaagtttcctgaggcctcgccagccatgtgtcctatacctcctgtggaactgagagtccattaaatctcttttctttatacattacccagtctcaagtagttatttatagaagtgtgagaacgaactaatacatagcttatagagttactgtgatcatttaaataattgataattaaaagataataaagcagttccttgtacacagatagcactcagtaagtgttaactatcatctttcttctttttccttatacttatcacctccaccctcttttgcagctcaaaaattagcytcttaaatgaaaacttctggagtgtccccaggtaaattagctgcttgccttttccatattcccacaggcctaggttcttaactctattatactgcttattagaatatattgttattatctctgcacctcccacactcgctggagagtaaaa

SEQ ID NO: 397511 - DNA, 576 bp, Homo sapiens
aaaaccaaacaaacacaaagagaagaaagtctcacctcccttgacagatgtgttagtagaaaacctggaattagacccagccaagtctctgattcctaatcctatgttctttccaatgcaactagggaaggtaccccatggaaggcagcagagagcagtgcttaagaacatagacccttgtgcyagcttccctgagttcaaatcatgtgtctaccacatactagttatgccattttatttgttttttagttattcttattatttttatttttcttaagttattggggtacaggtggtatttggttacatgagtaagttctttagtggtgatttttgagattttgaagcacccatcacctgagcagtatacatcgcaccatatttgtagtcttttatccctcatccccttcccacccttccccccaagtcctcaaagtccattgtatccttatgcttttgcatcctcctagcttagctcccacatatcagtgagaatatacgatgttcggttttccattcctgagttacttcacttagaataatagtctccaatcacccaggtcactgcaaatgcca

SEQ ID NO: 397512 - DNA, 576 bp, Homo sapiens
aaaaccaaacaaacacaaagagaagaaagtctcacctcccttgacagatgtgttagtagaaaacctggaattagacccagccaagtctctgattcctaatcctatgttctttccaatgcaactagggaaggtaccccatggaaggcagcagagagcagtgcttaagaacatagacccttgtgccagcttccctgagttcaaatcatgtgtctaccacataytagttatgccattttatttgttttttagttattcttattatttttatttttcttaagttattggggtacaggtggtatttggttacatgagtaagttctttagtggtgatttttgagattttgaagcacccatcacctgagcagtatacatcgcaccatatttgtagtcttttatccctcatccccttcccacccttccccccaagtcctcaaagtccattgtatccttatgcttttgcatcctcctagcttagctcccacatatcagtgagaatatacgatgttcggttttccattcctgagttacttcacttagaataatagtctccaatcacccaggtcactgcaaatgcca

SEQ ID NO: 397513 - DNA, 611 bp, Homo sapiens
aatgtaatggctctcaatatccccggttagctacaagttttcaaatttaaattgtactaaacactacactatttrtctctcgctcaaatcattcattaccaccatcactactgcccttaaaatttaaaacatgcagctgagtatagtggaccacgcctataatatcagcactttggcaggctgaggcaggaggatcacttgagcccaggagtttgagaccagcctgagcaacatagggagaccctctctctacaaaaaaaaattttttaattagctgggaatggtggcgcacacctgcactcccagctactcaggaggctgaggcaggaggatcacttgaggggttggctgagttgccatgagccgccatcgtggcagtgcactccagcttgggcgacagagcaagatcctgtctcaaaaaaagaaaaagtaaaacatgtgaaactgttaactaaatactagaatgctttttataactagcatatttaaataagatcaacagggaggcagtccagtgtagtgaatgcacattcaagatcaggtgaatcgcagctccatcacctttctctggtgtccttagttactggagccagtgtatatatttaagttca

SEQ ID NO: 397514 - DNA, 595 bp, Homo sapiens
  misc_feature (1)...(595): n = A,T,C or G
ctaatcttacctgaaacttcctatcactgttgccgcatatggtgattttctaattctgtcaatcttggtatatatatatattttttgttggaattttactgtgaggaattctcccccactcgttgatttgttcatttattcttagcatgacctcatggattcttattctttgggttatttctgctrtagtcatttattgctttagggtaagtagcaatttaattcctccaagaacagcatttagagaagtctttagcatgggtttctctttttttgagatgagctctcactcagtcgcccaggctggagtacagtggcatgatctcggcttactgcaacctctacctcccaggttcaagcagttctcctgcctcagcctcccgagtagctgggattacaggtgcccgccaccatgcccagctaagttttttgtatttttagtagagacggggtttcgccattttggccaggctgatctcgatctcctgacatcaagtgatccacctgtcttggcctcccaaagtgctggaattacaggcgtgagcnntgcgtggcccagcatggatttttaaacaggatttgaggtatagtaagt

SEQ ID NO: 397515 - DNA, 523 bp, Homo sapiens
gggctgccaccccactggctgacacttttctgagctgcagggctagaaggcccccaagctgatttccgtgagactaagatggaactagtctattttaaagcagtacacccccaaatctggccatcatcacactcaggggcctgattctcaagatccaaataggtggaggttgactctggccccctcartgcttccaccactgggcaagtgcagtttcgtgtctagccatcttccttaccaccctgttgattgtagcctttggccagcagggccatttgacactcctgatacagtgctggtggtgctgagcaaaatggcaaactaccatctacagcaagaattgatgtgttggtggcctgtctggacttgattgcttccttgtctccctcattcatgtgagttgagggacagcactgtgtctacacagcgagggaccctcataccatgcacacacacacacacatgcatacatcgataggccagttataaccatcattgtaaaggtgttttcttccccaactcc

SEQ ID NO: 397516 - DNA, 542 bp, Homo sapiens
actactggaactagagtttaaggtcgcaaagaggatttagtggacagcaggactaagatcttgttagatcagcagaatcttgaatgctttcctatgaggtttatagtttagtttcttagtaatggagagccactacagaactctaaacacaagacggacataataaaatcttcatggaaggcttcagagtttgttctgcaacactaaagtgcaagaaatgttacattcctttgtgttccaaaatcaaatcaaatttgcttcagcccccatttgccagagttggcaaaaaatcccagtctcattggacatggcagtggtgaggaggcattcttcccaacccctcaactctgttagaatcatatgagttctgagagcttacgggtttcmtaaagaggaatctttcagcctgtggtctgaactttgctctctcttcccaccctaggatcaggaccagctacataatttgcagggctcagtatgcaatgaaaacacagccccttgttcaaaaattactaagaatttcaaaatggtaacaagtgagc

SEQ ID NO: 397517 - DNA, 611 bp, Homo sapiens
ccactgcatccagctcatttttgcatttttagtagagatagggtctcaccatgttggccaggctggtcttgaactcctggcctcaggtgatccacccaccttggcctcccaaagtgctgggattacaggcgtgagccaccatgcccagccaaaagagtgatacatttttwaaagtaatttttagacaccagaatgtttagcagtaatgactctgggatttcaagcattatttatcaactgctataccatgggccatgactaatcggaacaaggcaccaactcttagatcagcaccaggggtctgaaaccaccaggaagacacaccaatcaataccatattacagtgatttctgtaacagtctatgctgtcctatattttccaggttttctgtaatgaacatgtattaattttatactttaaaaggcagtaactttttaagctaatgtaaaagtaaaatttcttaacttcctttttttaaatgaacaggcctatagagtaattataaattacttttcctgaaagttatgaattatcaatttaagctttataagctataaacacctgtacgccacttaacctggagaggcatttatttagacaaatataattt

SEQ ID NO: 397518 - DNA, 521 bp, Homo sapiens
atttttggaggctgggaggtcctagatgagggtgccagcatggtcaggttctggtaacggctctcttctttagttagtgaatggccttcttgctgtatcctcacgtgatagatggagcaggttcgtctctggtttcttcttaggagagcatgtattccaccatgagggctctacccttatgacctcatctaaagctaattacctcccaaaggccctgtctctaaagaccatcacattgcaggtaagagtttcaacatatgactctgggtgggatacagttcaacccatagtgtatctcttttctcttacactaaaaatctcacttcctaaccatatcagcataataattatttaagctacaacatacaaaaataatattcaaatatccatatcaatattgttgctaaaagtagaatgactcagtattgttkaagaattctttgtagtttttttatttttaggctaaatcacaagatggaaatagtttgaaaaaaactgtgttttaaagtcatttaaagcgg

SEQ ID NO: 397519 - DNA, 579 bp, Homo sapiens
gctggtaggctgggaaacaggaggaagcattgcaaactgcttcttcttgcacaaagcatcttaattataattattgtcagcattatatcgctgccttgcaagatgaagagggaaggaaggaacactgcaatttcacagcatacacasgttccctaaaatgaggagggggttgcaaagagtaaaagagcaaggaacagagccctcagcagattaaaaggggcctttgtagtggctgcatctgtacattaaaataaatctctcccagcactaaaataacatctacgttcatttgggccagtgccacattcagcatttaagaaatttgacaaaacattgcttgagcatgttgaagtttgccagctcagaacaaaacaagaaagctacctcggctgtatggaaatagttctcccagttccctacttttcacttatgactcccattttccagctgcacttgaaagaaaaagacttcgcccttttttcaggtgccaaccacttagcatggccctgaaatgcacagcaaattgccactggaggtggtagacttcaagacgaatctttttcttttcccctaaaggaa

SEQ ID NO: 397520 - DNA, 579 bp, Homo sapiens
gctggtaggctgggaaacaggaggaagcattgcaaactgcttcttcttgcacaaagcatcttaattataattattgtcagcattatatcgctgccttgcaagatgaagagggaaggaaggaacactgcaatttcacagcatacacaggttccctaaaatgaggagggggttgcaaagagtaaaagagcaaggaacagagccctcagyagattaaaaggggcctttgtagtggctgcatctgtacattaaaataaatctctcccagcactaaaataacatctacgttcatttgggccagtgccacattcagcatttaagaaatttgacaaaacattgcttgagcatgttgaagtttgccagctcagaacaaaacaagaaagctacctcggctgtatggaaatagttctcccagttccctacttttcacttatgactcccattttccagctgcacttgaaagaaaaagacttcgcccttttttcaggtgccaaccacttagcatggccctgaaatgcacagcaaattgccactggaggtggtagacttcaagacgaatctttttcttttcccctaaaggaa

SEQ ID NO: 397521 - DNA, 579 bp, Homo sapiens
gctggtaggctgggaaacaggaggaagcattgcaaactgcttcttcttgcacaaagcatcttaattataattattgtcagcattatatcgctgccttgcaagatgaagagggaaggaaggaacactgcaatttcacagcatacacaggttccctaaaatgaggagggggttgcaaagagtaaaagagcaaggaacagagccctcagcagattaaaaggggcctttgtagtggctgcatctgtacattaaaataaatctctcccagcactaaaataacatctacgttcatttgggccagtgccacattcagcatttaagaaatttgacaaaacattgcttgagcatgttgaagtttgccagctcagaacaaaacaagaaagctacctcggctgtayggaaatagttctcccagttccctacttttcacttatgactcccattttccagctgcacttgaaagaaaaagacttcgcccttttttcaggtgccaaccacttagcatggccctgaaatgcacagcaaattgccactggaggtggtagacttcaagacgaatctttttcttttcccctaaaggaa

SEQ ID NO: 397522 - DNA, 572 bp, Homo sapiens
gaaaggattggattctttgcatccagtggagaagtgagcaaagcaamatgcttttctgaggttggccaaaatgctagctccccccaggtttgcacccagcttccatgaaaggacggctctcctgtcattatttggcattttgcaacaaggccttggtgaaagtaacctgctcttcttcgttaagtcaaactttccactggaagggctgtttctaagaggctttctcttctttcctgctgctaacggccctcacatcccccctcctttcattttcttcccctctctatattctcttcatccaacaaatactgactgaggatctctgtgctggggacacagtgaaggatgtgacagctcaggtgttccctgggctaaaatctctgaaggcatacagatattatgcaaccaataaccattgtggtggtctgaagacatgtacaggatgggtacaggagtataagagggggcactcaaccaagtcctggggactgggggagaaatggtttttaacctgcagcctgaagctaggggtggaggtaagcattaacaggcaaagtgagaggcagggaaag

SEQ ID NO: 397523 - DNA, 572 bp, Homo sapiens
gaaaggattggattctttgcatccagtggagaagtgagcaaagcaacatgcttttctgaggttggccaaaatgctagctccccccaggtttgcacccagcttccatgaaaggacggctctcctgtcattatttggcattttgcaacaagrccttggtgaaagtaacctgctcttcttcgttaagtcaaactttccactggaagggctgtttctaagaggctttctcttctttcctgctgctaacggccctcacatcccccctcctttcattttcttcccctctctatattctcttcatccaacaaatactgactgaggatctctgtgctggggacacagtgaaggatgtgacagctcaggtgttccctgggctaaaatctctgaaggcatacagatattatgcaaccaataaccattgtggtggtctgaagacatgtacaggatgggtacaggagtataagagggggcactcaaccaagtcctggggactgggggagaaatggtttttaacctgcagcctgaagctaggggtggaggtaagcattaacaggcaaagtgagaggcagggaaag

SEQ ID NO: 397524 - DNA, 572 bp, Homo sapiens
gaaaggattggattctttgcatccagtggagaagtgagcaaagcaacatgcttttctgaggttggccaaaatgctagctccccccaggtttgcacccagcttccatgaaaggacggctctcctgtcattatttggcattttgcaacaaggccttrgtgaaagtaacctgctcttcttcgttaagtcaaactttccactggaagggctgtttctaagaggctttctcttctttcctgctgctaacggccctcacatcccccctcctttcattttcttcccctctctatattctcttcatccaacaaatactgactgaggatctctgtgctggggacacagtgaaggatgtgacagctcaggtgttccctgggctaaaatctctgaaggcatacagatattatgcaaccaataaccattgtggtggtctgaagacatgtacaggatgggtacaggagtataagagggggcactcaaccaagtcctggggactgggggagaaatggtttttaacctgcagcctgaagctaggggtggaggtaagcattaacaggcaaagtgagaggcagggaaag

SEQ ID NO: 397525 - DNA, 570 bp, Homo sapiens
taaggctctccaggtaattctaatcatcttaaatgcactatggtcacaggcagattaatttttcacaatgcttaactatttttattgacacagtgttacaattacagataaagatcattcacactacagctccatgccttaagagtactctcagtcagggactaaatggtcccatcattttttttttttttaataaaccacatctacttccaaagttgtatgtcttacctttcatttcttccatgatttcgggtgtttaagaaaggattggattctttgcatccagtggagaagtgagcaaagcaacatgcttttctgaggttggccaaaatgctagctccccccaggtttgcacccagcttccatgaaaggacggctctcctgtcattatttggcattttgcaacaaggccttggtgaaagtaacctgctcttcttcgttaagtcaaactttccactggaagggctgtttctaagaggctttctcttctttcctgctgctaacggccctcacatcccccctyctttcattttcttcccctctctatattctcttcatccaacaaatact

SEQ ID NO: 397526 - DNA, 474 bp, Homo sapiens
aaggatatgcatttctaaagcaaaagagttcgcaggtcctcagcacaatgaatgaagtgaactcacagcatcctggcataatgaacatgcagaaagcttctagggtggaggctgggcaatcctgttcctaccaaaggatatggaaatggtatgatatcagacttcctaaacaacacaggaagtcaaaagaaaatggagcaatgccttcaaaattcaaaatgattttcagccaggtattctatggccagtcaaatggttaggaaaygaaggcatggaatgaagaccttttcagagctacaaggtcggaggaaattttaccaccctttcttagtaaactactggaaaatgttcatcacctaaatgagaaattaagtcaaaaaaagaaggcatgagggtttaggagaaagggggagatgacagagaaaaatagggaagagaagtcttaggtgcctgcatgcccagcaaacctagaga

SEQ ID NO: 397527 - DNA, 547 bp, Homo sapiens
tatctttgctgattcaatatcctaacaaatctttctggtgctaggcatgaccattagggtcactatagtcatgrctttgtaacttacacataggctcgttttgccggaatccaggaactctctgatttctgcttagaacatgagatggagcagaatctgctgagttctgcccctgctgatgcccgcatagtttgctctctgataactgggagcctaatccatgcctgtccaggcttggctctgccctgggaggctgacagcccagtggagcagggcccctgtgtgctgctttcatccacacacatgcacattggtctggtgacccccaggactgggacccaattttgctcctccctgctgggttgagttctgagtgacagtgagtgccccaaatcccacttatagaaattcagcctgaggacataaacctggatgggaacaaaggtttctatgataggatgatcatcaccagggaatttataatcgcaaatactggtaactctttaaatgtctaacactaaagaccattttacaataaattacaacc

SEQ ID NO: 397528 - DNA, 547 bp, Homo sapiens
tatctttgctgattcaatatcctaacaaatctttctggtgctaggcatgaccattagggtcactatagtcatggctttgtaacttacacataggctcgttttgccggaatccaggaactctctgatttctgcttagaacatgagatggagcagaatctgctgagttctgcccctgctgatgcccgcatagtttgctctctgataactgggagcctaatccatgcctgtccaggcttggctctgccctgggaggctgacagcccagtggagcagggcccctgtgtgctgctttcatccacacacatgcacattggtctggtgacccccaggactgggacccaattttgctcctccctgctgggttgagttctgagtgacagtgagtgccccaaatcccacttatagaaattcagcctgaggacataaacctggatgggaacaaaggtttctatgataggatgatcatcaccagggaatttataatygcaaatactggtaactctttaaatgtctaacactaaagaccattttacaataaattacaacc

SEQ ID NO: 397529 - DNA, 619 bp, Homo sapiens
cgtaatgcctgaatcagattaagtactcagtaaacagtcacatgtaacatgtgcataaggctatggtctgaatgttggtgtccccccaaaatctacttgttggaacctaatccccaatgtgatagtattaagaagagaggcctttaggagatgattagatcatgaggtctctgcccttatgaaaggtattagtgcccttataaaataagtttgagggaatcygtttgaccttccatcatgtaaagacacagctaaaaggtgttatcattgaggcagaaaacaagccctgactaaacactaagtctgctggtgtcttgatcttgggattcccagcctccaaaactgtgagcaataaatttccgttgtttataaattacccactctgagatattttgttatagcagcctgaatagatggaaacacataacaccaaatatataaaaagtttttaacacctgtaaaccattctgctgaaatgtgaatatttctttccacagtctaatgttatttcactactgtagaattccctgtataaaaagctatagcatatatgtctcagatatgatcacaggccgtgtgtgatggaagggttgttgacaattcatgactctatggtttt

SEQ ID NO: 397530 - DNA, 619 bp, Homo sapiens
cgtaatgcctgaatcagattaagtactcagtaaacagtcacatgtaacatgtgcataaggctatggtctgaatgttggtgtccccccaaaatctacttgttggaacctaatccccaatgtgatagtattaagaagagaggcctttaggagatgattagatcatgaggtctctgcccttatgaaaggtattagtgcccttataaaataagtttgagggaatctgtttgaccttccatcatgtaaagacacagctaaaaggtgttatcattgaggcagaaaacaagccctsactaaacactaagtctgctggtgtcttgatcttgggattcccagcctccaaaactgtgagcaataaatttccgttgtttataaattacccactctgagatattttgttatagcagcctgaatagatggaaacacataacaccaaatatataaaaagtttttaacacctgtaaaccattctgctgaaatgtgaatatttctttccacagtctaatgttatttcactactgtagaattccctgtataaaaagctatagcatatatgtctcagatatgatcacaggccgtgtgtgatggaagggttgttgacaattcatgactctatggtttt

SEQ ID NO: 397531 - DNA, 619 bp, Homo sapiens
cgtaatgcctgaatcagattaagtactcagtaaacagtcacatgtaacatgtgcataaggctatggtctgaatgttggtgtccccccaaaatctacttgttggaacctaatccccaatgtgatagtattaagaagagaggcctttaggagatgattagatcatgaggtctctgcccttatgaaaggtattagtgcccttataaaataagtttgagggaatctgtttgaccttccatcatgtaaagacacagctaaaaggtgttatcattgaggcagaaaacaagccctgactaaacactaagtctgctggtgtcttgatcttggrattcccagcctccaaaactgtgagcaataaatttccgttgtttataaattacccactctgagatattttgttatagcagcctgaatagatggaaacacataacaccaaatatataaaaagtttttaacacctgtaaaccattctgctgaaatgtgaatatttctttccacagtctaatgttatttcactactgtagaattccctgtataaaaagctatagcatatatgtctcagatatgatcacaggccgtgtgtgatggaagggttgttgacaattcatgactctatggtttt

SEQ ID NO: 397532 - DNA, 573 bp, Homo sapiens
cattgactttcagtaaatttatagagttgtgcaatcatcataaaaatccaattttagaacatttctgtcacctcctatacttccatcatggccattagctgtcaatccccacttccaccccctaccccaggcaaacactgatctgtattctgtctctgctgatttgccttttctgaacatttcatgtaaaagaatcatacaatatataatcttttgtgtttgggttctttaacttagcaggatgattttgagtttcatccattttgtatcataatgtaagtctgttatactgagttccttttattgccaaatagtatttcattstgtggatatatattttgtttacacttgatcttagccaaaaggccgagaagcgattatattttgtttaaatatcttcagtctgcagacatttgaattgtttctagttttttaaactatgtaaataatgctgctgttaacactctcatacaagtttttgcgtggcctatcatcattatctttgtaccataaagagcttgcatacagtatactcaatccatgtttgctgaatgaataaataggtaaaagttc

SEQ ID NO: 397533 - DNA, 569 bp, Homo sapiens
aacctccacctcctggttcaagygattctcctgcctcagcttcctgagtagctgggactgcaggcatgcgccaccacgcccggctaattttgtatttttagtagagacagggtttctccatgttggccaggctggtctcaaactcccaacctcaggtgatctgcctgcctcggcctatcaaagtgctgggattacaggtgtgagccaccacacccggccactatattgtttttataataaaaatagtacataggaattcctttactaattcaagaactgtttactactgagtatatactataacctgcattatttattgtataactagaatactaaagactaactccaaaaaaacatctgcttgcttgtatattcagcaaacaaatactgaatgtctactgggtaacctaactaggtacattctagggaatgagaatatactgaagaactactaagggccaagtctaaaagaggagagagaatttagtcaaaaacacaatgtataggtacagttctggaactgtgcatagaaaaggaatcaataagccaggaggggaaatagccaggaa

SEQ ID NO: 397534 - DNA, 624 bp, Homo sapiens
agaatacacttgtacttttatatgactatattatgaagtatcaaaataatgcaccaaattattttgtgggtaatcttagaaacaatggataccctcttgackagtgcaagtatccacttcttcatttgtcaaacggaagtgagaagcacggtggaactataataaagttacccttccacttgtgtcaacttcacttaaagtcaactcacagtttaagtacttctccccttcaggaaatgtatacactgtatttaagatcctaaaataatgtaatataaattgtcatataacgcatgtcctctacaaggaagattttaggatgggggcaaaagtctcctcatcttttagagaaagccatttgctcaggaaggcccttacacttgtatcaccttgaagaaaatgttttattccagaaacatataaatataaaaaatagcctccagcttaccagaaagacaagcaaaacacatataaaatattttctcagttataactagcactgacaccggtcctgctaatgatactaaaactttagggtgggacatactacaacgatcaggttctaaagctttccaacttggaaaaattttaatcttctataaagtggttcccatacatgaataa

SEQ ID NO: 397535 - DNA, 513 bp, Homo sapiens
actagcctcggcaacatagtaaggccttgagtctacaaaaaatcagaagaaattagccgagcctggtggtgtacacctgtagtcccagctatttgggaggctgaggagggaggatcacctgagcccacaagttcaagccttcagtgagccgcgatgaygacactgtactccagcctgggtgacagagtgagacccggtcttaaaaataaataaataaaagaaaagaaaaatacagttagaaataaaaaataaggtagaaaaaatatgagaatgtaggtttgctttgtaagagatagtagttttgtggctcataggaataccccatggagaaacattttaagggctttagtttgtacacagaacaactctgagacaacaaccacaaaaacaagagttcacagacaaataacagaaataagggaatagaaaaggcaagagaataaccatccttagaaaaaaacgataggccatttttctagcttgtttagacctgccttttgtttacagttcgac

SEQ ID NO: 397536 - DNA, 579 bp, Homo sapiens
taatcagtttctgaagatggacaagactttgtctgtaccctcaaggtattaaacaaaaagaaaaaagtattactctacagcaggagactataggaacacttgtctgttaaaaagagatcctggtatctttcttggtgatatgtaagagtgaagtttcttttttttgtttttgtttttgttttttgttttttgttttgagatggagtctcactctattgcccaggctggcatgcaatggtgtgatttcagctcactgcaacctctgcctcccagattcaagtgattctcctgcctcagcctcccaagtagctgggattacaagtgtgtaccaccacaccyggctcttttttttttttttttttttttttttttttgtatttttagtagagacggggtttcaccatgttggccaggctggtctcgaactcctgatctcaggtgattcaccggcctcggcctcccaaagtgctgagattacagacgtgagcctggctcaaggacagacttttgaagaaatacaattacttagagaaggatgagcatgcacagtggtctaaggagaggacagaaggaaaaagc

SEQ ID NO: 397537 - DNA, 597 bp, Homo sapiens
gcaagtcagatggtaactctgtaacatcgttctcttcactgcttggccagaaattagaccatctctacatgaatatttattctgatctatcagtgattcaaacagctacttttaatgtgccaaagcacaagtgattcaagtaacttctttttgccatctgattaagatgcaattaaagacagaatattatttcttgccaacaaaactgaagtagaaaaggcaaatgactcacaggcggcagatcaccaaatctgtaacagaaataggagcacagactaactggtaagttccacctggtctcctcagagtttgactcakcagggaaagatccacatgggctaagagtctcctagtcagaccctcagcctttttaacagccgggtcatatggtgatgttccaagcctcactacagtaagagttgaagaatacatatccctgctgcaacgactctgaagagttgatttattgaggcatcatttctaaagaaacaacacacatgactgctgacttcaaaatgccacactatgtctttaaggcgagtacatgggagtgaggtggggaaggaaagagaaggctttgtggtggtatggttttac

SEQ ID NO: 397538 - DNA, 499 bp, Homo sapiens
aaagaaaaaaaaaaaaaagttgcagtacttccactacctgatccccagacttattataatgcctcagtaatcaagacactgcagtactggtataaggatagacatacagatcaatggaacagaacagagactataattaggcccttctttttgaggtcctagcaatggtcaattgattttcaacaaaattaccaaaatgtgtgggccttttcccacaaatgatgctggaacagtttgatgtccatatggaaaaataaatgaatctttacccttacttcacaaaatatacaaaattaacttgaaatggaacatagacatactarttttatattgctgaataacaaacttagcagccataaacagcacacatttatcatctcacagtttctgtgggtcaggtgtccaggcacagcttagctgggtcctctgctcagggtctcacaaagttgcaatcaaggtaatggccaggctgcattctcatctggaggctcaactgggg

SEQ ID NO: 397539 - DNA, 493 bp, Homo sapiens
ggaacacaggggaaaatttttgtgaacttaggttaagtaaagattcttaaaacacaaaaactcaaaccataacaggggaaaagtaaataggacttcatcaaaatcaaaactccttgctcttgcacaggcacagttaagaaaatgaaagacaaaccacagtttgagagaacatgcttgcaaatcacatatctgatgaagtacttgtatccagaatataaaaagaaccctcacaacttcagacagacaatccaatttaataagaaatgggcaaaagatttcagcaartccttcaccaaagaagataaacttaatggccaacaagcacataaagacatgctcactattactagtcactaggaatttgtaagttaaaaatacaatgagataccattatacacccagtcaaatggctaacattttaaaggcagacaattaaagccagtaggaatgcaaaatggcacaatggcatggccactttggaaaacagtttgac

SEQ ID NO: 397540 - DNA, 587 bp, Homo sapiens
ggagattattagagttgatatagtgaaggaaggacatgtccagcagagttagactcagcttcaactttgaaaaaatcagttctctctccaagcaagggattcaaagaggtgggggccagcaccaacggtcagtcctccctttgttagggcagtagggacctgtgctttctctcccagatccagaaccactgacatgggcaaggaacacctcagaaccaggaaactcaaaatgraatactggctggggtttctcatatcctcctagtcacataacccgtgttaaccgcagcgccctcctggggtctcactgaaaccaagtgcaaactttccttcttactgttatccacaaacagtactgacacgcaggtatatttcatgtcatggccaagggtcactgctgtgcaggcaggtacatttcttatttcagtaaaagagcttgggccaattccaggcctgctggattccagcatagtacctattctcctaaatccccacctaagttgtctcagggccataaagcaatttaaaagtcatataagggaatttaaagcaccaccacctgatgctaagaatctaccttataaccc

SEQ ID NO: 397541 - DNA, 600 bp, Homo sapiens
gggcaattaaggattggccaaggaacataacagttgttggcagtgtaatatttcacttaagccacaagttcatacaaactcatgtttgaaatggtacgacaaggccttggctgatcaggatggtccaggcagggtggttctgggcagcaaatttaagtgtatatactgttatgtagttaactgcagggttaacttgtacccctttgaaacgatttgcactgaaaataatttgagtaatgctatcttcccttatagacttttccatgaacatttcaaattaaggtacagccgtcccagtacagggggctgggattggtcagttgaatctgtggaggcagatacaaaaacctctttcacygcgccctttttccagactaaggaactgtttttccttttctgttgaatatgaaaaacaacaatacacaaacctgaagcacacattaactaaaaacattaaaaaatgcatgccattttaacgcttatgttaagaatctaaaagcagcagaactagaaaataattttgatctctgcctcatagggccttgcaagcaaactgtaaacaccacggagagctctatttcccatcgtcacctgagttga

SEQ ID NO: 397542 - DNA, 628 bp, Homo sapiens
caatatttcaccaaatgctgttaacatgtttgaacttgctttagaggagccaattcaaggattcattatcacaaacaaatggaaacaaattagagggctggcagtgtctgatgggaaaaagtcagttttgacaagcagtcctcagaatccaaggtctgaagggcactccratccttgcatggagcccatgcaaagtctgcagaggaaaatcacaccattttagcactgtcttagctgtgagtaaagttactaaagcttaatctacaagttcagactttgaggattgtcagtatcctcccagagcaacctggtaagtaatactcatcatattaacaagttacttacttttaagtgaatttattgttttttctggttcatgaaacctagtaagaaagccatgtgaaaagcaaatatttagggaagattatgagagaccagaaaacaaagcactatggtttctatttaaacaactacaatttagctgttactaaataatcccttcagaccttagcagatgctttaggaagtattttagataaatttatttcattttattatcataagaactttaagaagtatatgtcagcttcatttctaaaaggatgggcacagtcctttgtctgaaatt

SEQ ID NO: 397543 - DNA, 522 bp, Homo sapiens
gactttttagtaatgaagtatttttaagagcattttttagtaataaaatatttttaattatgtactttgaggccrggagcagtggcttatgcctgtaattccagcactttgggaggccaaggtgggcagatcacctgaggtcaggagttagagaccagcctggaaaacatagcaaaaccccatctctactaaaaatacaaaaattagctggccgtggtggcacgtgcctgtaatcccagctgctcaggaggctgaggcaggagaattgcttgaacccgggatgcagaggttacagtgagccaagatcacaccactgcactccagcctgggcaagagtgaaactccatcgcaaaaaaaaaaaaggatattgttcttttagacataatgctacacatttaataatcaacggtatagtgtaaacataagttttaaatgctcttgaaaccaaaaaaaaacttgtgtgatacactttattgtgatattctcttaatcgtatagtctagaaacccacaataactccaa

SEQ ID NO: 397544 - DNA, 522 bp, Homo sapiens
gactttttagtaatgaagtatttttaagagcattttttagtaataaaatatttttaattatgtactttgaggccaggwgcagtggcttatgcctgtaattccagcactttgggaggccaaggtgggcagatcacctgaggtcaggagttagagaccagcctggaaaacatagcaaaaccccatctctactaaaaatacaaaaattagctggccgtggtggcacgtgcctgtaatcccagctgctcaggaggctgaggcaggagaattgcttgaacccgggatgcagaggttacagtgagccaagatcacaccactgcactccagcctgggcaagagtgaaactccatcgcaaaaaaaaaaaaggatattgttcttttagacataatgctacacatttaataatcaacggtatagtgtaaacataagttttaaatgctcttgaaaccaaaaaaaaacttgtgtgatacactttattgtgatattctcttaatcgtatagtctagaaacccacaataactccaa

SEQ ID NO: 397545 - DNA, 522 bp, Homo sapiens
gactttttagtaatgaagtatttttaagagcattttttagtaataaaatatttttaattatgtactttgaggccaggagcagtggctyatgcctgtaattccagcactttgggaggccaaggtgggcagatcacctgaggtcaggagttagagaccagcctggaaaacatagcaaaaccccatctctactaaaaatacaaaaattagctggccgtggtggcacgtgcctgtaatcccagctgctcaggaggctgaggcaggagaattgcttgaacccgggatgcagaggttacagtgagccaagatcacaccactgcactccagcctgggcaagagtgaaactccatcgcaaaaaaaaaaaaggatattgttcttttagacataatgctacacatttaataatcaacggtatagtgtaaacataagttttaaatgctcttgaaaccaaaaaaaaacttgtgtgatacactttattgtgatattctcttaatcgtatagtctagaaacccacaataactccaa

SEQ ID NO: 397546 - DNA, 616 bp, Homo sapiens
ggaggagccttcatgcttcacctgaacagaaggaaaggaggaggagatggagatgcaagcacaattgcagagtttgggaggaaaaatgatggcatttgtactacctaaaactttgcaatacacatggctgctttacatttaagtatctcctctttagcctcaccacaaccgtgtgagaaaggagagtagttattattacatttaaatcataaatgaaaaaactgaggtcagatacarcaaatgactttctctagatgaaaagctagtaagtggtgatacggggcttgatttccaatttaggtttcttttgtcaaggtcaggaaaacagtcaaactcaatgtcactagacatgtcaaaccttaattcttagacctaacatgaagcaaaaatattgctggcttcactcccacttctgtactctttcttttcctagtacttactggaatgtggaaatggtggagtaaggctgctttaggtatagctggaagaaggcacagccaggaaaacaagaggtatggaagatggaaattttatctttaaatagcagtgagttgcctggatggcacctatccttgactccattcattgggcagattttagcttatgcaaaagaaac

SEQ ID NO: 397547 - DNA, 569 bp, Homo sapiens
tactcctgacttaaaacttgatctccttttttcctttttctttatacctataaataccatctagtctgctctctcaagaaaaaaaacctgggagtcatctatctcatgttacccacatttatttagccacatgtgctctgaaactagtcaccctggccatggtctccttatttctaatctatccccactccagtttcccaagaaatctgtaacacaagcgaaacaygtcactccactatgcaaggtcactgagttccacttggataaagtcccaattgcttccactatgtttattcattcatgcactcattcagtaaatattcagtgcttattgttcagaattacaggtgccaggaacagagtcaagaaaaatgaagcctctgcccttatagcacttacattctagtaggagaaacaggccaaaaggactgtcattcattcattcagtaaatattcattcactcattcagtaaatattcagtgcttactgttcagaattacaggtgccaggaacagagtcgagaaaaatgaagcctctgcccttatagcacttacattctagtaggaga

SEQ ID NO: 397548 - DNA, 569 bp, Homo sapiens
tactcctgacttaaaacttgatctccttttttcctttttctttatacctataaataccatctagtctgctctctcaagaaaaaaaacctgggagtcatctatctcatgttacccacatttatttagccacatgtgctctgaaactagtcaccctggccatggtctccttatttctaatctatccccactccagtttcccaagaaatctgtaacacaagcgaaacatgtcactccactatgcaaggtcactgagttccacttggataaagtcccaattgcttccactatgtttattcattcatgcactcattcagtaaatattcagtgcttaytgttcagaattacaggtgccaggaacagagtcaagaaaaatgaagcctctgcccttatagcacttacattctagtaggagaaacaggccaaaaggactgtcattcattcattcagtaaatattcattcactcattcagtaaatattcagtgcttactgttcagaattacaggtgccaggaacagagtcgagaaaaatgaagcctctgcccttatagcacttacattctagtaggaga

SEQ ID NO: 397549 - DNA, 627 bp, Homo sapiens
tcagacttacacatcgtcttggaaggccggttttgttgctatagtaactggatctctatcagaaaccaggaattaatgtagagaagaggagaggtacagaggcaatatgaagaattcagtctgagcattagtgaaggtattgggtcagctattcttcagcgggcacagtgatgtgcacaattcctggttcctggtgctggtcagtgaggtcagaattatgagtttcaggtgggtcccctaaggagctacaagagaggcttgctcaaggttgttgattaacttattttagttgcagacatttttttttattttattactattatactttaagttttagggtacatgtgcacaacatgcaggtttgtyacatatgtatacatgtgcagacatttgaattaattatatttctggacatattataataatcattttgtataagtacccactcctgttttgttttggatatttttttattacctagaccttcattcctctctttctcccttccaaagtgttccactgtaatgtgcttgatatggcttttcaaatacttttatataaattgttttaattggcataaatgacaatgttctattaattttattctactgtttattttttaaccta

SEQ ID NO: 397550 - DNA, 553 bp, Homo sapiens
aaactccaatgttccatgacaacgctggttattgctgtgatcactattaccagctgtagctggctctcatggagtcagacttggtgaaatgaccagtgtcctccaaactctgttggagtggctctgtcagtgctgctgggtacaagggtccacagccaccccacagagtccctagtttgagagtgatcttcaaagtacaaggggaagaaagagctctgttaggcaggtagagagcctcacacaggcaggaagattmtaagagacctttcagaggctttaaagtagctcaaaccagctggccttgatgaaagacatatctggggcctgtgtgatggaatcactgaattcctggggtggatcctagaagatccgtagacagcaggaagtctctagttagttctctaagatgtaaagtaatttttaaatgtaaatttgaccaggcactctttcaatggaacacttccgtggtgtgctcaaatgatgcactccatgttcaaaggataaagacaaatctctcataggagtagcacagaacttcctttcccccttggtc

SEQ ID NO: 397551 - DNA, 497 bp, Homo sapiens
tgcctctcccccttgcaatttcccctattattaacatcttgcattagtgtggccatttgttacaattgatgaaactgtattcatatattattattcattaaaatccatagtttacatgaggcttcattgtgttgaacattctatgagctttgacgaaggcatgatacatatccactatcgcagtgttatgcagaatagtttcactgcccttaaaatcctttgtgctccacctattcatctttccctctgcctgaatgttatatagttggaatcatacactagacagccttttcagattggcatctttcacttagcaatatgtttttgaggttatttcatatctctctgtggcttgrtagctcatttcatttctaaataatgatattccattgtatggatgtttgtttatccattcacctattgaataacatcttggttgtttccaatttggggcagctaggaattaagcttctataaacattaatttgcaggttttt

SEQ ID NO: 397552 - DNA, 498 bp, Homo sapiens
catgtatttatttcgtgttaggaataggtaacttatattttgtaagataatttgtctaaattcaaagaactgaaaagtagaaaaactggaaaatcaaagccaggtattgtgattctcagttcagtgcctaatccaccmtaaattaccttttccacatatttggacacttagaagaaataggaaaatatgcatgagcatattatgatggctcattttatgtgtcaacttgactggatccatagaatggccgaatattaagctaaaaacatttctgactgtgtttgtgagggtatttccaaatgagatttgcatttgagttggtagactggatgaatcagattgcctttcccagtgtggtgtcaatgtacattaattgaggtcctgaatagtacaaaaaaaaaaaaaatactggagaaggggagaatttgctcttcctgcctgacagcttgagctaggacatcagtcttctcctttccttggatggggatttacaccatt

SEQ ID NO: 397553 - DNA, 564 bp, Homo sapiens
ggaactatggacagtcatatcaacaagtgtttatagggacctgctgcagctgagcccagattgcagctgaatttaagatgaggacatggatatcaaccaaaggtataagccagagctaaagagaagaaawaggttagagcccaagtatctgggacaaattcatttgttaatttaactgctttaatagctgttcctcatctattgtggctttcataggattcactcatcaccttgacatccccgggcagaccacatgatagatgaattagcagtgaaacaagatttctcctctggcagtaatctgcagtgtgaccttggacaggtcacaaaaatctctattatcaggaacatcaacttcagggatatgactgaaactcaatattgtttcctcgtggactagccaaacacatttatcactgagaatttaacagcaagaatgaatccagtgtaattttgctggcatctccccactacaagtctaagattcaaggcagatttaagggttcacttccttcctagtatatttgggaagactaaggtccatcgagggagaaaagttaaaag

SEQ ID NO: 397554 - DNA, 564 bp, Homo sapiens
ggaactatggacagtcatatcaacaagtgtttatagggacctgctgcagctgagcccagattgcagctgaatttaagatgaggacatggatatcaaccaaaggtataagccagagctaaagagaagaaaaaggttagagcccaagtatctgggacaaattcatttgttaatttaactgctttaatagctgttcctcatctattgtggctttcataggattcactcatcaccttgacatccccgggcagaccacatgatagatgaattagcagtgaaacaagatttctcctctggcagtaatctgcagtgtgaccttggacaggtcacaaaaatctctattatcaggaacatcaacttcagggatatgactgaaactcaatattgtttcctcgtggactagccaaacacatttatcactgagaakttaacagcaagaatgaatccagtgtaattttgctggcatctccccactacaagtctaagattcaaggcagatttaagggttcacttccttcctagtatatttgggaagactaaggtccatcgagggagaaaagttaaaag

SEQ ID NO: 397555 - DNA, 591 bp, Homo sapiens
tacacattatttcatatttatttcatatttataactgtcttgatcaaaactgtgagactctacagacaggagccaagccttatttatccttagtccttaatatctacagcattgcaagcaatataataatatgtgctccataaatattgtttgaatttatttctgaagccattcattctgaaacagcctttgtcactgctatgaggtctcatgacagtttcctattgtgcctttgaaattgtcaaggtgagattaggaacacaattatctggctcatactccagagatctctccctatgaaataaggaggagggataggtccctactagatgatgctttctagccaggagaaaaactaacttgtagccaaaatatgtagtaggaaggagataamtaacttttgaatgactccataagctcaaaatctcaaatcaatttttattattttcctatcccctaccctaattccattgttcatccaacaaagattgattctgcaccctgcacctaccatctcacaagacagagtgagaaaggagaaaagaaaggggttcagaggttcctaaccattttttttgccatggattttct

SEQ ID NO: 397556 - DNA, 606 bp, Homo sapiens
gcactgagaattatataacacaagtaaataaaaaagtaaagaactttgctaatattgcctacatagacattgatgatttaaataaagaacaaaaggactcagaatagtcaactctgaatgtgaagggtgtttaggaaatctttaaccaaattatttatattcggtttccttttatttatgcaaaaaaacacattaagatttcttcctgcatgtctaaaatgttacttcataactgtaaaataaaaattatataataaaaaatgtttaacataatttgacattattttcctcagtggtacagaaaataatggggagttttacaatcagtggcattttagatttgtaaaatttccatgctatatccttggacaatatgcagagattacataaagccatatgtttttagagttgacttcattcaagctttaaagagaaaatactgtcaatgttattctattatagrccacaggaaaaaatgaagacgtcctcaattcacgtgatgatagtataactttattaacaaaacctaataacaatagtacaaagaaggaaaactatggttcagtttaacttactaagtacaataattctaaataaaatgttttc

SEQ ID NO: 397557 - DNA, 591 bp, Homo sapiens
tggctctcagtaaatgtcagtacacaaatttgagtgcccacttaaacgtgatttacccttgttaaactttcctctaggggatggtaaattgcaaataagtaggaattttgttttaggacgctagaaaaaaattctrttgatatgagtgtttatggagcaagagtttttgttttctgcttttctaattgatgtacatcttgacatttaataatctgcttctaaactgcacgtccatgtgttctgttggaatgatcagtggacttccaagtgcacactgttacccttttattgatgcactcaaaaatatttactcagagctgctgacctcctgcaatgtggaggtgtatctcacttattcataccgtatacatatgcatgaggtcataagacaatgggaatgagaaactaagccccagggaatctaagcaactttgtacttgatgcctgttaggagctcacatcctaatctccttgcactttccattacaccaaagtacatttgtttctttttcaatggcttagaaagtctcatctgccctctgatagcattagccacaaatagaagcaagtattcaagaccttaaagaaacc

SEQ ID NO: 397558 - DNA, 591 bp, Homo sapiens
gaacctgagttttttaaaaactggctctcagtaaatgtcagtacacaaatttgagtgcccacttaaacgtgatttacccttgttaaactttcctctaggggatggtaaattgcaaataagtaggaattttgttttaggacgctagaaaaaaattctattgatatgagtgtttatggagcaagagtttttgttttctgcttttctaattgatgtacatcttgacatttaataatctgcttctaaactgcacgtccatgtgttctgttggaatgatcagtggacttccaagtgcacactgttacccttttattgatgcactcaaaaatatttactcagagctgctgacctcctgcaatgtggaggtgtatctcacttattcataccgtatacatatgcatgaggtcataagacaatgggaatgagaaactaagccccagggaatctaagcaactttgtacttgatgcctgttaggagctcacatcctaatctccttgcactttccattacaccaaagtacatttgtttctttttcaayggcttagaaagtctcatctgccctctgatagcattagccacaaatagaagcaagt

SEQ ID NO: 397559 - DNA, 606 bp, Homo sapiens
gcagggtggtgtctcacttaagaaaattagctgtttgttgaaataacagaattgccatctctggaagggttcacaatggtctcatggaatgttactatttccttggattttgtaaaccacatagtatgcatttgtagtacatcaagagtctttctataaactgaatgtttatgtctactcaaaattcttatgttgaaatctaatcctcagcgtggagatatttgaagatagggcctttttggagatgactaggtcatgaggaagtggcctttgtgaatgagattaacatccttatagaacagagactgcraatagcttcctcacaccttctaccatgtgaaggccagcaaaacatggccatctatgaacaaggaagttgacccataccagtcagtgaatctgccagctccttgatcttggacttcccagtctctaggactgtgagaaatatttttgttgtttataagccactcactctatgacatcttgttatagcagctggaaggaactaaaaaaaattcctaaactgaacaacatctccagaacactaattctccaaactaaggaaatatgcacatttggctgatacactaaacagtgacaaca

SEQ ID NO: 397560 - DNA, 574 bp, Homo sapiens
cttgctgaattaaaaggagacatgatcctgtggaactaggaaattgagtaagtgaaagtgaaggagtgttctcccttccttccatgcctgcttctcctcygcacttctgctgactttcctacgactcagtgaaggtggccggagacacctgccctgcagctttgggattctatagcttttaagttccaaacatcaggctgtgctgtgattgaaatctctagccacaattccaaatgcttaaaaagtgactgggatctctctaggttgtgttaggtgtccatcctcagcctagttaaccttggccatgagaatgggatcttctatgtgacttgactgtagggagcccatttgtataaacggggtagatagttctaaggaaaatagaatgtctttgacccacagcctgggagaacacctgaaaaggcgtctactgctttatcaattttaagtttaagaataattgcactaagagagtagattttaagtgttttgaccacataaaatgattacgtatgtgagatgatgatgcatagttaattacctctatatttccattccacaatgtatatatatt

SEQ ID NO: 397561 - DNA, 574 bp, Homo sapiens
cttgctgaattaaaaggagacatgatcctgtggaactaggaaattgagtaagtgaaagtgaaggagtgttctcccttccttccatgcctgcttctcctctgcacttctgctgactttcctacgactcagtgaaggtggccggagacacctgccctgcagctttgggattctatagcttttaagttccaaacatcaggctgtgctgtgattgaaatctctagccacaattccaaatgcttaaaaagtgactgggatctctctaggttgtgttaggtgtccatcctcagcctagttaaccttggccaygagaatgggatcttctatgtgacttgactgtagggagcccatttgtataaacggggtagatagttctaaggaaaatagaatgtctttgacccacagcctgggagaacacctgaaaaggcgtctactgctttatcaattttaagtttaagaataattgcactaagagagtagattttaagtgttttgaccacataaaatgattacgtatgtgagatgatgatgcatagttaattacctctatatttccattccacaatgtatatatatt

SEQ ID NO: 397562 - DNA, 574 bp, Homo sapiens
cttgctgaattaaaaggagacatgatcctgtggaactaggaaattgagtaagtgaaagtgaaggagtgttctcccttccttccatgcctgcttctcctctgcacttctgctgactttcctacgactcagtgaaggtggccggagacacctgccctgcagctttgggattctatagcttttaagttccaaacatcaggctgtgctgtgattgaaatctctagccacaattccaaatgcttaaaaagtgactgggatctctctaggttgtgttaggtgtccatcctcagcctagttaaccttggccatgagaatgggatcttctatgtgacttgactgtagggagcccatttgtataaacggggtagatagttctaaggaaaatagaatgtctttgaccyacagcctgggagaacacctgaaaaggcgtctactgctttatcaattttaagtttaagaataattgcactaagagagtagattttaagtgttttgaccacataaaatgattacgtatgtgagatgatgatgcatagttaattacctctatatttccattccacaatgtatatatatt

SEQ ID NO: 397563 - DNA, 571 bp, Homo sapiens
gaggaaatgtcccaaagccagggataaaaccatctgaaaggattacagcaaacagtgcctcatgctcacgggatcagaaacagtacttactcttactagctagrctggaccacagagagaaaaagaaaaattttagaatctaagaaaatagaagcttttctaataaaatatacataatgaaaactggtttcagatgagatagcaaatccaaattcatcaattatcataagaaatagacaaagttaccaaagacagaggcagaaaaaatactacatttaaatgatttcacaagaaaattttgtcaaacttttaaaagcaagtatcttcagtacttaaactcttccagagcattaaaaaaaagaaatcttgtaaattcattgcatgaattttgcatgacactgatgctaaaaatctagcaaagataataagaaaaagaaaactgaagaaataacacttatgaatgttgatgaaaaataaataaaatattgacaattaaactatcgaaagaataatataccattgatgaagtacttattctagaaatgcgatagttagttcaatattagcaaaa

SEQ ID NO: 397564 - DNA, 571 bp, Homo sapiens
gaggaaatgtcccaaagccagggataaaaccatctgaaaggattacagcaaacagtgcctcatgctcacgggatcagaaacagtacttactcttactagctagactggaccacagagagaaaaagaaaaattttagaatctaagaaaatagaagcttttctaataaaatatacataatgaaaactggtttcagatgagatagcaaatccaaattcatcaattatcataagaaatagacaaagttaccaaagacagaggcagaaaaaatactacatttaaatgatttcacaagraaattttgtcaaacttttaaaagcaagtatcttcagtacttaaactcttccagagcattaaaaaaaagaaatcttgtaaattcattgcatgaattttgcatgacactgatgctaaaaatctagcaaagataataagaaaaagaaaactgaagaaataacacttatgaatgttgatgaaaaataaataaaatattgacaattaaactatcgaaagaataatataccattgatgaagtacttattctagaaatgcgatagttagttcaatattagcaaaa

SEQ ID NO: 397565 - DNA, 631 bp, Homo sapiens
atgaatgtggtgtttgcaggcatgaaaacaacatacaagagtaacatgaaaaatcactgatcactgggctgggcacggtgactcgtgcctataatcccaacagtttgggaggccaaggtaagtggatcacttgagcccaggaagtccagaccagactgggcaacatggcaaaacaccatctctgaaaaaaaaaaaaaaattaaatatgtctacagtcctagctttttgggaagctgaagttggaggatcacctgagcccagggaggtggaagctgtagtgagccatgatcgcaccactgcactccagcctgggcaacagaataagaccctgtctcaaaaaaataaayaaataaaataaaataaaataaaagtcactgatcacaaatcaccataatactaataaaaatgtttgaaagattgtgaaaattttgaattaccaaaatgtgacacaaaaatttgaagtgatcccaagctgctggaaaaaatggtgcccacagacttgctcaatgcagggttgccacaaaccttcaatttgtaaaaaaaatgcaaaaaagcaaagcacaataaaatgaagtatgcctgtacccccattctttttgtctccatattctgattgtgctttttctcctta

SEQ ID NO: 397566 - DNA, 613 bp, Homo sapiens
ttttgggaagctgaagttggaggatcacctgagcccagggaggtggaagctgtagtgagccatgatcgcaccactgcactccagcctgggcaacagaataagaccctgtctcaaaaaaataaacaaataaaataaaataaaataaaagtcactgatcacaaatcaccataatactaataaaaatgtttgaaagattgtgaaaattttgaattacmaaaatgtgacacaaaaatttgaagtgatcccaagctgctggaaaaaatggtgcccacagacttgctcaatgcagggttgccacaaaccttcaatttgtaaaaaaaatgcaaaaaagcaaagcacaataaaatgaagtatgcctgtacccccattctttttgtctccatattctgattgtgctttttctccttaacatcttgacatttccttagctccttaacatttccatctctactgattgacagaaattgtttttctaaagaaactcaatggggctataatctacaaactcactggcaagacctttcctctccttctcctctttgacccttcatagcatgtgactctgctgactatctgacccctgccacagctggagaggtgggcaaggggcagg

SEQ ID NO: 397567 - DNA, 631 bp, Homo sapiens
atgaatgtggtgtttgcaggcatgaaaacaacatacaagagtaacatgaaaaatcactgatcactgggctgggcacggtgactcgtgcctataatcccaacagtttgggaggccaaggtaagtggatcacttgagcccaggaagtccagaccagactgggcaacatggcaaaacaccatctctgaaaaaaaaaaaaaaattaaatatgtctacagtcctagctttttgggaagctgaagttggaggatcacctgagcccagggaggtggaagctgtagtgagccatgatcgcaccactgcactccagcctgggcaacagaataagaccctgtctcaaaaaaataaacaaataaaataaaataaaataaaagtcactgatcacaaatcaccataatactaataaaaatgtttgaaagattgtgaaaattttgaattaccaaaatgtgacacaaaaatttgaagtgatcccaagctgstggaaaaaatggtgcccacagacttgctcaatgcagggttgccacaaaccttcaatttgtaaaaaaaatgcaaaaaagcaaagcacaataaaatgaagtatgcctgtacccccattctttttgtctccatattctgattgtgctttttctcctta

SEQ ID NO: 397568 - DNA, 613 bp, Homo sapiens
ttttgggaagctgaagttggaggatcacctgagcccagggaggtggaagctgtagtgagccatgatcgcaccactgcactccagcctgggcaacagaataagaccctgtctcaaaaaaataaacaaataaaataaaataaaataaaagtcactgatcacaaatcaccataatactaataaaaatgtttgaaagattgtgaaaattttgaattaccaaaatgtgacacaaaaatttgaagtgatcccaagctgctggaaaaaatggtgcccacagacttgctcaatgcagggttgccacaaaccttcaatttgtaaaaaaaatgcaaaaaagcaaagcacaataaaatgaagtatgcctgtacccccattctttttgtctccatattctgattgtgctttttctccttaacatcttgacatttccttagctccttaacatttccatctctactgattgacagaaattgtttttctaaagaaactcaatggggctataatctacaaactcactggcaagacctttcctctccttctcctctttgacccttcatagcatgtgactcwgctgactatctgacccctgccacagctggagaggtgggcaaggggcagg

SEQ ID NO: 397569 - DNA, 563 bp, Homo sapiens
catctttcaaacatacaatatttaaaaaaatgaacatatatgaatccactaaatcaatataaacctgattaatatgattcataatttttggttacaagaattaaaatagtggaaggcccccttttttccactccctggtgccatctattcttcccattcccatgaggtaaccgttatcctaaattgatcaatattttttctttatttatatttttactctttatgaatgtatacataaaaatattatgtgtgtttttaaatgtatttatacattaccataaaatacatatctctgatggttaatattgagagtcaacttgataggattgaaggacacaaartattgtccctaggtatgtttgtgaggttgttgccaaaggatattaacatttgagtcagtggactgggagaggcagacccaacctcgatctgggtgggcaccatctgataatcagctgccagtgctgctagaataaagcaaagaaaagaatgaggaaggagctgacttgctgagtcttctgaccttcatcattctcccatgctggatgcttctgccctcaaac

SEQ ID NO: 397570 - DNA, 562 bp, Homo sapiens
tattttgtctacatatattattgataaggtaagatatatacttgccattttcctattcattttcttcatattttatttcttttttgtttttctgtttctccattactacctgtttttgtgttagatattttagagtataccattttactatatttttatagttatttcttagtgctttttttgaagattaaaactaatatctttaaaacaatttggttaaaacaaactatatttcaaaattatacaaaacttttactttgatatagcttcatttcctctccccttctttgtgctattgtttcatacatattatatctttataatcacatcaatgttattttataattattgctttaytcaaatttattttaaatccaatagcaaaagaaatctatttgtacttttttaaaaaaatacatttacttatgtagctactttaccatttatctttatttcttgatgtggattggagtttctgtctgataccttccttcagtctgaaagactccttatttctgtgggacagctccgcttgcaatcagttctcttagattttgtcaaa

SEQ ID NO: 397571 - DNA, 621 bp, Homo sapiens
taatcgtatagctgtgtgactacaattcagtaacattcagaggctcgagtgcagaagtgaagggagtagtagtcaaattaaccaggactgggaattaaaggtgtttatgatggagcaattacagttctgagccatggaatctgagctgtactgagggagtaaggacatgtgggaactgaaaatacaaagtcagaaggattggtgattgaggaattactcatgtgggatctatcgagtcaactggaaggatagagataacataacgggttgaagagagagatttacattttataggtcactttgtcatacaaactaacaactgtaatttataattttatgttcaagrtggctagactattctgtccagatgtttggtcagacacctgtctagatgttgccatgaaggtaatttttaaatgtgattaacatctaactcagtagactttgagtaaagcagattactctccttaatgtgagtgagcctcatagtagtattgctatcagtgttgaagagttaacacagatagtgcttaaagtagtgcctggatcatacaaagtccttaataaatattggatgccgtgtggctgcctggcatgttcttccctcacttctcatcgaat

SEQ ID NO: 397572 - DNA, 305 bp, Homo sapiens
agtgaatcaattaaacctatttaagaacaagccctaatgtagtgtttgattccaggtattttaattggagtgattgcatagccaggcaacccttttataaggctgtcattggtaaaagartatattaaatggcatacttaagaagaaagctttttttttactttatctattaaaattttgctaaatatttcttagataccaagtactaatgttaaatatggcaatacttaaatatgacaatacttgtttatccaagtgtttaatctgaaacctagctatgatttcttaaggcacctgtttggtca

SEQ ID NO: 397573 - DNA, 543 bp, Homo sapiens
gaagacaggcagtagctttttctcttctacagataccactgctttcattgtgtagatgagaaaacagagactcagaatggtctcattctttgcccagagtttcacagctggtaagaggcagagccagatttcaaagtcagatatgcatgattctaattgtttccaaatggccctgattgtctttcctcccttcactgtgcttttctctcaaattacttttcatttggcttcttaatttgcagcaattaagaaatgaaatataacaggtggtgaagacatcgctagaggcatgcacacagacaatgcccaaagggacagaaacgtcacacctgagtcatatgaatamtagacagcttccagtgaatttttttaaaaaatggaccaaagaagtacacatacacagacacatacatatacgtcactacttggcatttaatgtagggaaaaattactccatattcctcaatagcatctaaggttatccaccatattacaactcaaaattatattgatcggcaaaaatatattggtcacgaagaaaaa

SEQ ID NO: 397574 - DNA, 552 bp, Homo sapiens
attatattgatcggcaaaaatatattggtcacgaagaaaaatattcagtatatttaaaaaggcaggaaaagttataatatattttgttaagtatatttcatgatatagcagtccctcaaaaatgaatgaaaataagagggttttatggccagatgaggttttgcaatactgcattccatgtaaactttaggcgatttacactgcataatactrgcatgtaaaatacccctataataaacacaactttttatgttgtttttgcattgcttaaccctgcattgcccaaatttacttgactttgaaaacctttttatccacacttataatataagccatggaactgaatttcaacagaattcactatgtaaaacagagatacaacatgtggacatatttaaattaaaatgtgtgaagtaaattttccatccctggcagctaagacagtgcttgtgccacccttcctccaaatccaggctgcacactcagggctccataaaagaccccttccttccacttacagagaggagagggaagagtaatgaatactttatt

SEQ ID NO: 397575 - DNA, 474 bp, Homo sapiens
aatgtccagacaccaaagaacatctgctagcatcagtgtcatccaggaaagatgatctcatgaaataaactaagtaaggcaccacattagggcccaatcctggagaaacagagttatgtgacctttcaggaagataattcaaaatagctgttttaaggaaactcaaagaaattcaagataacacagaaaatgaattcagaattctatcaaataaatttaacaaagacattawaataatcaaaaagaatcaagcagaaattctggagttgaaaaattcaattgacctactaaagaattcatcagagtattttaatagcagcatggatcaagcagaaaaaagaattagtgagcttgaagacagactatttgaaaatacacagtcagaggagacaaaagaaaaatgaatagaaaacaacagagcatgcctacaagatctagaaaatagcctcaaaagggcaaatctaaaagttattg

SEQ ID NO: 397576 - DNA, 537 bp, Homo sapiens
tctcctattggttttttttctttggagaattagtatggtatggatgttytgtctcctccaaatctcatgctgaaatgtgattctccaacattggaggtagggcctggtgggaggtgttaggttcatgggggtggatccctcatgaagggcttagcgtcatccttgcagtaatgagtgagttctccctttgttagttcatgtgaaagctgcttgtttaaaggagcctggcatctcctcctctctctcttgttcctgctctcaccatgtgatgcacctacccctccttcaccttctgccatgattgtaaacctcctgaggtcctcgccagaagacaagctgatgctggtgccatgtttgtacagcctgcagagctgtgagacaaaataaacctcttttctttataaattacccagcctcaggtattcctttataacaggtattcctttataacaatgcagaacagactaacacaagaagtatgactaatatacatcacacacacacacacacacacacacacacacaaccagccttacc

SEQ ID NO: 397577 - DNA, 591 bp, Homo sapiens
ataaggctgctatgaatatttgtgtgcaagtccttacatggacatatgctctctttttggtaaatatggagaaraggagtggctgggtcatacattaggtgcaggcttaactttttaaaaatacctgccaagctatttaccaaaggcgttggaccattttatattccctccagcagtgtatgagagttcctgttactccacatcgtcactaacatttggcatggtctgccattacttttaaatcttctatcacaaatgcagtggtatcttttgctttcaatttatatttctctagtaactaaagatgacaaactttttttttgtgcttattttccattgttagttcttcttcagtaacgtgtctgctttaatcttttgccagtttttaattgggctgttgtcgattttcctactgttgacttctaaaagatctttatgtggattctgttatcagatacacagtttgcaaatatattttatctcagtctacagattgtcttttcaatcttttaataatttcctttaaggagactatgttttgattttgatgaagttcgtttgtcaatctgttcttttacaggtaatgttttt

SEQ ID NO: 397578 - DNA, 607 bp, Homo sapiens
gattgtattaccatccaagattgtcacccaaatctgtgctttgttttttaggttctgtagtttaaaagtttcattatatagatgagaaatgtgaggctttgagaagagatatgctcttttcctttcgtaaggtagagcctgttggattcaggttttccatagaaaaaatatatttttataagtcattaatgaaaattaaaacatggattctcttagtaacttcataaagttcaagacatcaaacaagcaggtggtgaatgtaatcagtagtttggcattttcacagctgtttggataataaatgccagggaggatgaataatatatctttattctgaattctaagaaatatatcattctgattcttcaaggccccagcttatgctagagaatatcctatacctcaggctctggccttgtccagcaggagaagagcacagcacascagcaactgtaaatgttcttcatgagatattcttactattctgttttcaaagctattcaataagagtgcaaaataaaaacctaagtgttagagatctctcctgacagtaaattctgtgtttattggtgcttttgtttaaagtggaccattcaatatggccagg

SEQ ID NO: 397579 - DNA, 571 bp, Homo sapiens
aaactttctattagtactgtgttcactctctggggtaacaagatcaatagaagcccaaactgcagactcacacaatataaccttgtgataagcctgcatatgtacctcctgaatctaaagtaaaaattaaattaaaaaaaaaagagtgtagaaataggaaacaatgagtgcaaagcccccaaggcagaagcatgtgatgaacaataaggaagccagtgtggttgggtcctagtggacaaaggaagagagcagaccacccatggtatgaaaggtcattgcaaytgacttttagactgagtcagatggaatgatttgagcagagaagtgacatagtgtcttttgctttgaagtgttcattctagctgctcagctgagaagagactggaagacagaatgaaagcagagagattgtttaggagatcattgcagtaatccagacacgggggatacatgctaggattagcataatggaaatggaggtggtgagaagtggttaaattctggatgtatttcgtaggtggagccaagataatttcaatagagactagatgtgaactgtgagaaaaagaga

SEQ ID NO: 397580 - DNA, 571 bp, Homo sapiens
aaactttctattagtactgtgttcactctctggggtaacaagatcaatagaagcccaaactgcagactcacacaatataaccttgtgataagcctgcatatgtacctcctgaatctaaagtaaaaattaaattaaaaaaaaaagagtgtagaaataggaaacaatgagtgcaaagcccccaaggcagaagcatgtgatgaacaataaggaagccagtgtggttgggtcctagtggacaaaggaagagagcagaccacccatggtatgaaaggtcattgcaattgacttttagactgagtcagatggaatgatttgagcagagaagtgacatagtgtcttttgctttgaagtgttcattctagctgctcagctgagaagagactggaagacagaatgaaagcagagagattgtttaggagatcattgcagtaatccagmcacgggggatacatgctaggattagcataatggaaatggaggtggtgagaagtggttaaattctggatgtatttcgtaggtggagccaagataatttcaatagagactagatgtgaactgtgagaaaaagaga

SEQ ID NO: 397581 - DNA, 587 bp, Homo sapiens
agggtgcgtcctactgacctactagctaaaggaagtttttgagatttttgtaagttgtttttctaaacatctcagggttttatttcagtattcttgttcagagtacaagtaggatacccrttagatattcaatcatcaatagtgagaaattaattctggcaataattagtgggtgttaaaggataagcaggatttcactcagcaaaataggtgacgagaagaatttctcaggcagagggagcatcctaagtgcagataaagaggccaaaaaatgatgtgatgtatttgtgaaatggtgaatgctccaggattgttaaaaccttaggcttgtagagaaggaaagtgatgagtgatgaatctggaagtaaagtttgaggcttgtactggtcaattgcttcattgtaagcaagagacactgtgattggctggcttatgcccaagaaaagaaagcatgtgtttaaatagatcaagagtaactcacagaatcttctaaaaacctggaaaatcaggcacagaacacaggcaaagaaaagagaaactaagcaacccaagccacagcaaattaacccccaaatcagcctcaggat

SEQ ID NO: 397582 - DNA, 599 bp, Homo sapiens
aacagttcctgacacatagtagacacttaataaatatttattaaatgagtgcttgaatgaattaattgattaagctgaagagttaggcaagaacaagatcaaaacaaggtcttgtggcctaagacaaggattattttaaaagcaaatcattttttagcaggcagattggcatgaccagayagtttgttaagaagctcatttggactgaaaaaggaagtatgggattcagggcaacagataaaagacaattgtgatgatcccagtgagtgatgatacaggcttgaactatgattatggtaggggagataaagagatgtgaggtatttaagaggtgaaatcaattgtgaaatattgaatattgaaggatgaagaaaaagaagatgtcagatatgacaacagaacaaaatagagacagaacactggaatgatgagattttgcatggatgatcatgagatcattcctgaccatatacagtttaaaattgagacatcaaggatgcagatggacaataatgtctggagttcagagaagaaatcctagatgattatataagtttataatccacctgcatacagataattattgaagttgtaggcac

SEQ ID NO: 397583 - DNA, 599 bp, Homo sapiens
aacagttcctgacacatagtagacacttaataaatatttattaaatgagtgcttgaatgaattaattgattaagctgaagagttaggcaagaacaagatcaaaacaaggtcttgtggcctaagacaaggattattttaaaagcaaatcattttttagcaggcagattggcatgaccagacagtttgttaagaagctcatttggactgaaaaaggaagtatgggattcagggcaacagataaaagrcaattgtgatgatcccagtgagtgatgatacaggcttgaactatgattatggtaggggagataaagagatgtgaggtatttaagaggtgaaatcaattgtgaaatattgaatattgaaggatgaagaaaaagaagatgtcagatatgacaacagaacaaaatagagacagaacactggaatgatgagattttgcatggatgatcatgagatcattcctgaccatatacagtttaaaattgagacatcaaggatgcagatggacaataatgtctggagttcagagaagaaatcctagatgattatataagtttataatccacctgcatacagataattattgaagttgtaggcac

SEQ ID NO: 397584 - DNA, 596 bp, Homo sapiens
aaatctgcagtgaaataccattacatgtctagtagaagactaaaattaaaaatacctactcaagtgatggcaaggatgcaaaccaacaggcactctcatatctcattagtgggaatgcaaaatagtacagtcactgtagaaaacaatttggaagtttcttatggaattaaacactctaagtcctctggaccctaagtactaactcatcttacaccccaagtccttgttctgctttgcccatgccatagtctgtcattcttttttcttgtctcttggatcttttgcatgatcctgctacaaatatcttcaatttgcactgactctcagagcttgcctgcttctataaattctgtaaccgactgtactgctttagttcaggctcgggcttggcacctggccaaatctctgtascttggcaaactgcctgctggccctgaactccataagaaggaatcagaccagacacacctgcaggaagtgaccttggcatataacttaaaggaaggaaaaagaaagatttcatttgctggacacacacacacacacacacacacacacacacaaagtcattctaaggaattaagatagccttgcaa

SEQ ID NO: 397585 - DNA, 580 bp, Homo sapiens
ctcatcagatgagtgttatacagattactaggcaacttgatccactgggtgtttcattacaaaagctaccagcttggaggcttaccatgtccagctggagctgtactacagggacataaaacaaggacaatgtaagaaattctaaggaaaaatgtacataagatacagtctaagttccagcatatttctgactcatgatcactactgctacacaaagataataataaaggaagacatctcacccaagagttctggyatttgaccctggaggtctagatagatgtaatttcatgtggcaatatccccatatatacacattgtggcccactcactgggcaaacaggcctttccttcccaatgagtgatttcccaatggctggagctttagaaagtatgaggatcaatcccatctatataccacggcctcacttgtctctgagtttttctttaccagaaacactcctagattcagtatactccctcccttaaatttgagcaaaaaggatcccatgcttagagcaatgtttctcaaattgttctcagaacagcagcatcagtattacctacagacttgttagaa

SEQ ID NO: 397586 - DNA, 545 bp, Homo sapiens
ataatttctggtcatattctaaaaaaactagccatgcccacytttactccttcttgagagctggaatgcaaaggaggtagtaaaagtaccaggccacactaacaaacacaatatcctggagttggtgggaagaaaagaaggagggcctgtgtccctgaaaacaaggaatgctaaagctgtctgtactgcttgcttaccttgggaataacatgtgagagagaaacaaatctgtcttgtgcacgctattgttttggctctctatcacatgtgaatctaatcctaaccagcacctgcctctcccaacactagatcctataattccacatgcttgagagcagaatttttatgaataggaagtgtggcatgtttgacaattagaaaaataagtaaatagagaataattatttttgttgggggtggagaagtcatttgattcttcccctgaacatagcaaatagaaataaaactttatagactgctttcgtttcatcaaaattttactctactcatttatatgattttctgcaaagttagaatgattgatt

SEQ ID NO: 397587 - DNA, 545 bp, Homo sapiens
ataatttctggtcatattctaaaaaaactagccatgcccacctttactccttcttgagagctggaatgcaaaggaggtagtaaaagtaccaggccacactaacaaacacaatatcctggagttggtgggaagaaaagaaggagggcctgkgtccctgaaaacaaggaatgctaaagctgtctgtactgcttgcttaccttgggaataacatgtgagagagaaacaaatctgtcttgtgcacgctattgttttggctctctatcacatgtgaatctaatcctaaccagcacctgcctctcccaacactagatcctataattccacatgcttgagagcagaatttttatgaataggaagtgtggcatgtttgacaattagaaaaataagtaaatagagaataattatttttgttgggggtggagaagtcatttgattcttcccctgaacatagcaaatagaaataaaactttatagactgctttcgtttcatcaaaattttactctactcatttatatgattttctgcaaagttagaatgattgatt

SEQ ID NO: 397588 - DNA, 494 bp, Homo sapiens
ggttttaggattatgaaactttactgttactgctagtaaaatataatttgttttaaaagtctgaagaaaatatgttgacgaaattgaattctttaaaagagtaagttttcwattggacttttctctgttttggttattgtgcttatcaggaacaaccacactgacacaattttaatatgattgtaataattgaggttaccacatcctttagcaaattattgctattctgaatgtaggtaggaattttctccaagtgtgaaaagtctgaactcttaattatacactttctcctgattgcttcaccttcatcctttggagtaccttgagagagctttcatcaatgcaaggcttaattttagtctaaccaagctgaccacctgcatgtatacaactgtgccatttccttgttttcattggttgcaaataggacagcaatgttcttttcaatttcaaatctgaagtctggtgtgaagagcagatgaggagctgagaga

SEQ ID NO: 397589 - DNA, 629 bp, Homo sapiens
gtgaatgacctttaaaaagtgtggagcactagacatgtttgaggtggctttcatattgatcaggaagctgattcgtaaatacagggataaaattgacacatttaaatatgttggtggttttgagcagtggtttcttacatgactaaatttcattgaattaattatcttcaaggtaaaagtgagtatgaaagtttctaccatcatgatcaggttgtaatttctttttatagtgtttttattatctaaattgagctagtatcaatatttatgacaaaagatgcagatattgatttaaagagcaaacatttggaagccagaatggtatgccttataatagtaatagatactatttatagcacttattatgcatcaaacactacaataaatgctttacatgaattagctcattgaatattcagaataactccataggktagattcaatttagattcattttatacacagactaaggtctagagaggttaagttggttcttaaccaaccctgtctcacctatactccttacagatgcagtgttgtgtaggagcatggacctgaatttgaatctcatcttcactacaaattagctaagtgactttgtgtgttttagttaaaatgtgtgagaatcc

SEQ ID NO: 397590 - DNA, 520 bp, Homo sapiens
tccaaagtcttaactaattccagcattaacgcagaagttcaaagtccaaagtctcactggattccatctacctttgagccaataaaataaaaaaacaagttatttacttccaagaaacaatgggggtatattcccattccaaaagagagaaattggccgatagaatggggcaacaggcgctatgtagtttcgaaactcaggtcagtcattaaatcttaaagctcctaaataatctcctctgactccatgtctcacatccagggcatactggtacaaatggtgggctcccaaggttttgagcagctctgccttgtggycttggagggtacagcctctgtggctgttatcacaggttgctgagtgcctgaagctttcccaggtgcaaggtgtaagctggtggtggatctaccattctcgagtctggaggatagtggtccccttctcacacgtccactagtcactgcctcagtggggaatctgtgtagggcctccaactccacatttttcctctgcactgccc

SEQ ID NO: 397591 - DNA, 520 bp, Homo sapiens
tccaaagtcttaactaattccagcattaacgcagaagttcaaagtccaaagtctcactggattccatctacctttgagccaataaaataaaaaaacaagttatttacttccaagaaacaatgggggtatattcccattccaaaagagagaaattggccgatagaatggggcaacaggcgctatgtagtttcgaaactcaggtcagtcattaaatcttaaagctcctaaataatctcctctgactccatgtctcacatccagggcatactggtacaaatggtgggctcccaaggttttgagcagctctgccttgtggtcttggagggtacagcctctgtggctgttatcacaggttgytgagtgcctgaagctttcccaggtgcaaggtgtaagctggtggtggatctaccattctcgagtctggaggatagtggtccccttctcacacgtccactagtcactgcctcagtggggaatctgtgtagggcctccaactccacatttttcctctgcactgccc

SEQ ID NO: 397592 - DNA, 620 bp, Homo sapiens
ggctgatctttgagaggaggagtgtagaggtattgaagtcttaatctgccatccaaagtaacggtcaaaatcagcaagtacttttacaccaacgtgatggagcttgaaatctcttgtctcaggactttttatttcgcaatagagtaggtggttgtgtcatcttttgagggtgagcaggtaggtggagtgaagcagtgagggaagggatttgaaggaattagaaaaggttcattataaccattgtgaagagtaggaawatgcgttcaccagtgcagggtagcagtattgtccagcagggtggcattttaagggctcatttgaagttggtcaatgtgaatttataaaatcacaaatctgcttatttctggcatcactcaactgttctggtaatggtgtgcagaaaaaggagctagaggagtgatgaaggagttggtcactggagataaaaaggtcaagaaattgagacttttgggagttttctatgttttttgtatgatagggacgcaagtggtccaggatgatgtcaggacttgcatgaggagggacactgagctagtagactagctaggccaatccacagtgggtgatttgggtttgaagttggctagaatgaagccttg

SEQ ID NO: 397593 - DNA, 620 bp, Homo sapiens
ggctgatctttgagaggaggagtgtagaggtattgaagtcttaatctgccatccaaagtaacggtcaaaatcagcaagtacttttacaccaacgtgatggagcttgaaatctcttgtctcaggactttttatttcgcaatagagtaggtggttgtgtcatcttttgagggtgagcaggtaggtggagtgaagcagtgagggaagggatttgaaggaattagaaaaggttcattataaccattgtgaagagtaggaatatgcgttcaccagtgcagggtagcagtattgtccagcagggtggcattttaagggctcatttgaagttggtcaatgtgaatttataaaatcacaaatctgcttatttctggcatcactcaactgttctggtaatggtgtgcagaaaaaggagctagaggagtgatgaaggagttggtcactggagataaaaaggtcaagaaattgagacttttgggagttttctatgttttttgtatgatagggacgcaartggtccaggatgatgtcaggacttgcatgaggagggacactgagctagtagactagctaggccaatccacagtgggtgatttgggtttgaagttggctagaatgaagccttg

SEQ ID NO: 397594 - DNA, 540 bp, Homo sapiens
ggatagagcagtgtgtggagatttacatcatgaacttttgctccaagaactattgcaggaagataccaggaaagccaagaaaatccacacactgtttgaaggaagcagattgctcctataggacctggaagacagcctaaatactgtgagtgcccaaagtgtgacagtgggaaagggtgattgtctacctctgaacacacaccctcactggggaacctgaaggttcagatcatgagagaagkatttgaccttacctggagctgagataatttagagagctgagagaaatacaggggtagagaaagcagtgggaagtgtcctgtgggctctctcggtccccagggaagccatttctgactttgctgagaggagtccttggggagggcttccagaggaactaagacaacaggcagaaggaaacctccagctgaactttgtaccaattccaacagtgcttgaagtttcttagacagaactcagaggagggggtgaatctggagtccagacacaggcaggcaaggaggagggaaacctacctaa

SEQ ID NO: 397595 - DNA, 540 bp, Homo sapiens
ggatagagcagtgtgtggagatttacatcatgaacttttgctccaagaactattgcaggaagataccaggaaagccaagaaaatccacacactgtttgaaggaagcagattgctcctataggacctggaagacagcctaaatactgtgagtgcccaaagtgtgacagtgggaaagggtgattgtctacctctgaacacacaccctcactggggaacctgaaggttcagatcatgagagaaggatttgaccttacctggagctgagataatttagagagctgagagaaatacaggggtagagaaagcagtgggaagtgtcctgtgggctctctcggtccccagggaagccatttctgactttgctsagaggagtccttggggagggcttccagaggaactaagacaacaggcagaaggaaacctccagctgaactttgtaccaattccaacagtgcttgaagtttcttagacagaactcagaggagggggtgaatctggagtccagacacaggcaggcaaggaggagggaaacctacctaa

SEQ ID NO: 397596 - DNA, 571 bp, Homo sapiens
aaaagcaatctgcaatcaatgtgattcccatcaaaataccaccataattcttcacagaactagaaaatacagttctaaaattcatatggaaccawaaaagagcctgcatagccaaagcaaagctaagcaaaaagaacaaatctggaggcatcatattacctaacttcaaactttactataaggccatagtcaccaaaataacatgaactggcacatagaccaagagaataaaaatagagaacccagaaataaactgcagtacttatagccaactaatctttgataaagcaaacaaaaacataaagtgggaaagaacatcctattcaacaaatggtgcgggataatcagcaagccaaacgtagaagaatgaaactggattctcatctctcaccttatacaaaaatcaactcaagatggatcaaagagttaaatctaagacctgaaaccataaaaattctagaagataacatcgtaaaagcccttgtagacatttgcttatgcaaagacttcatgaccaataacccaaaagaaaatgcaacaaaaacaatgataaataggtgggacttaatta

SEQ ID NO: 397597 - DNA, 571 bp, Homo sapiens
aaaagcaatctgcaatcaatgtgattcccatcaaaataccaccataattcttcacagaactagaaaatacagttctaaaattcatatggaaccataaaagagcctgcatagccaaagcaaagctaagcaaaaagaacaaatctggaggcatcatattacctaacttcaaactttactmtaaggccatagtcaccaaaataacatgaactggcacatagaccaagagaataaaaatagagaacccagaaataaactgcagtacttatagccaactaatctttgataaagcaaacaaaaacataaagtgggaaagaacatcctattcaacaaatggtgcgggataatcagcaagccaaacgtagaagaatgaaactggattctcatctctcaccttatacaaaaatcaactcaagatggatcaaagagttaaatctaagacctgaaaccataaaaattctagaagataacatcgtaaaagcccttgtagacatttgcttatgcaaagacttcatgaccaataacccaaaagaaaatgcaacaaaaacaatgataaataggtgggacttaatta

SEQ ID NO: 397598 - DNA, 571 bp, Homo sapiens
aaaagcaatctgcaatcaatgtgattcccatcaaaataccaccataattcttcacagaactagaaaatacagttctaaaattcatatggaaccataaaagagcctgcatagccaaagcaaagctaagcaaaaagaacaaatctggaggcatcatattacctaacttcaaactttactataaggccatagtcaccaaaataacatgaactggcacatagaccaagagaataaaaatagagaacccagaaataaactgmagtacttatagccaactaatctttgataaagcaaacaaaaacataaagtgggaaagaacatcctattcaacaaatggtgcgggataatcagcaagccaaacgtagaagaatgaaactggattctcatctctcaccttatacaaaaatcaactcaagatggatcaaagagttaaatctaagacctgaaaccataaaaattctagaagataacatcgtaaaagcccttgtagacatttgcttatgcaaagacttcatgaccaataacccaaaagaaaatgcaacaaaaacaatgataaataggtgggacttaatta

SEQ ID NO: 397599 - DNA, 571 bp, Homo sapiens
aaaagcaatctgcaatcaatgtgattcccatcaaaataccaccataattcttcacagaactagaaaatacagttctaaaattcatatggaaccataaaagagcctgcatagccaaagcaaagctaagcaaaaagaacaaatctggaggcatcatattacctaacttcaaactttactataaggccatagtcaccaaaataacatgaactggcacatagaccaagagaataaaaatagagaacccagaaataaactgcagtacttatagccaactaatctttgataaagcaaacaaaaacataaagtgggaaagaacatcctattcaacaaatggtgcgggataatcagcaagccaaacgtagaagaatgaaactggattctcatctctcaccttatacaaaaatcaactcaagatggatcaaagagttaaatctaagacctgaaaycataaaaattctagaagataacatcgtaaaagcccttgtagacatttgcttatgcaaagacttcatgaccaataacccaaaagaaaatgcaacaaaaacaatgataaataggtgggacttaatta

SEQ ID NO: 397600 - DNA, 553 bp, Homo sapiens
catgttttactcaaactttaaaagcacagttaatctcactctatttttctcatttccaatggagaaaaatttcaatttactgctttgcaatatgaagagtgtgatatttaatttcacagcaaatgagttttctattttcagataatattcattttttgaggtttttcttctaaagacattataaaaccatatcacaacattttcccccataatagtcatgaaatatgcttcctaactttgtgcacatctggggtggagttatcctgagggatgcagtctctatgctttgcagagtgggtactgagattgcccttcagagcacacagcttttttggcagcatccttgctattatactagacattagtcacaacartgacattcacaagatggaaatacctatgctcactaaagactggttcattggaatactattaccagaattattttccagtcagcatctgcctgtctatagactaaatatagtaatgctaataataaaaacaatggacatttttattggcctttggagtttccaaatgccatcatatatgt

SEQ ID NO: 397601 - DNA, 630 bp, Homo sapiens
ctattaccagaattattttccagtcagcatctgcctgtctatagactaaatatagtaatgctaataataaaaacaatggacatttttattggcctttggagtttccaaatgccatcatatatktcattttatttgatcctcagaaaatctcatcaattaggtgagattattatttcagttttacagcaatctgaataacaactccataagttgttaatatggaattaataaccaatatatataagtaacttaagtaactgctagtgggtgattgggtagggtttccaattaacttgttaagttttaacttttttgttacatagcttctttagaaatataacagagacaaattgggtataattttaacattaagattaagtgtactatttttaaaattgatttgatatgattatatggatagtaatcaaccaagattttttaaaatttttttaattgacaaatcataattgacaaattaacaaataataattgacaaataatgtgtatatattcgtggagtgtggtgcgaagttttgatataagtatacagtgtgaaattattaaatcaagctaattaacacatccgtcacctcacttatcatttttgtggtaagacatttgaaatttgct

SEQ ID NO: 397602 - DNA, 630 bp, Homo sapiens
ctattaccagaattattttccagtcagcatctgcctgtctatagactaaatatagtaatgctaataataaaaacaatggacatttttattggcctttggagtttccaaatgccatcatatatgtcattttatttgatcctcagaaaatctcatcaattaggtgagattattatttcagttttacagcaatctgaataacaactccataagttgttaatatggaattaataaccaatatatataagtaacttaagtaactgctartgggtgattgggtagggtttccaattaacttgttaagttttaacttttttgttacatagcttctttagaaatataacagagacaaattgggtataattttaacattaagattaagtgtactatttttaaaattgatttgatatgattatatggatagtaatcaaccaagattttttaaaatttttttaattgacaaatcataattgacaaattaacaaataataattgacaaataatgtgtatatattcgtggagtgtggtgcgaagttttgatataagtatacagtgtgaaattattaaatcaagctaattaacacatccgtcacctcacttatcatttttgtggtaagacatttgaaatttgct

SEQ ID NO: 397603 - DNA, 537 bp, Homo sapiens
tgcagtttcataggtacagagagctcagaattctgtgagaattgagtgatgagccactcattcctgccatagcttgaggtagtcataagaatattttataagccaaccttcaccagcatctttcttggtaactacctgcatcayataacagctgggaagtgtgtgagggtgggggaaagatacggaagagactgactcaagaagattctgatcctatcttttcagatctcgaatctttttaatattttaaatatgccatagctaaatgtctctatgccccatatcaaacattaaattcagaatgatcagaatgagccacataggacaaataagccttcttcactttcttatttcacctacactcatgtatggctctaagtaatactgaagcaggagaacattctcagggacatgctcatgctgttagctgtgactgaaaaatctatagaactggcaattacagaaattttcctttacaaaacttcagttcctggaggaagacatacttgtatttttctgcctgtttgtgttatttac

SEQ ID NO: 397604 - DNA, 560 bp, Homo sapiens
cttcaatttgttagtattttttgaggatatttgtatatatgttcctcagggacattgacctgtaattttcttttctgaaagtgttttgttttttttggctttggaatcaccataatgctggccttgtaaaatgcattaggaaatattccatcctttgaatttttggaatagtttgagaaaaagtgttattagttcrattttaaatgcatgctagaattcagcagtgtagtaatttggttcttagtttcccttaatgggagactttttattactgattcaatatccttacttgttattggtttgttcagatgttctttgtcttcatgtttcagccttaggttgcatgggtctaggagtttatgtattttttgtagatttttcagtttgttgacaatataattagagtttcttataatcctttgtatttctgtgttgtcagttgtaatgtctcttctttcatttctgataaatttatttgaatcttttctctttttttctagttagtgtaactaagggttcatcaattttcatttttttttcaagaaatcaatttcactgat

SEQ ID NO: 397605 - DNA, 537 bp, Homo sapiens
tgcagtttcataggtacagagagctcagaattctgtgagaattgagtgatgagccactcattcctgccatagcttgaggtagtcataagaatattttataagccaaccttcaccagcatctttcttggtaactacctgcatcatataacagctgggaagtgtgtgagggtgggggaaagatacggaagagactgactcaagaagattctgatcctatcttttcagatctcgaatctttttaatattttaaatatgccatagctaaatgtctctatgccccatatcaaacattaaattcagaatgatcagaatgagccacataggacaaataagccttcttcactttcttatttcacctacactcatgtatggctctaagtaatactgaagcaggagaacattctcagggacatgctcatgctgtyagctgtgactgaaaaatctatagaactggcaattacagaaattttcctttacaaaacttcagttcctggaggaagacatacttgtatttttctgcctgtttgtgttatttac

SEQ ID NO: 397606 - DNA, 618 bp, Homo sapiens
tgcttcaatattgggtgcatatattgtacagttgttatgtcctattgatgaattaacccctttaacattatgtaataaaattttgtctctttcatagtttttgacttaaatcttattttatctgagataaaaatagctacctctgctctcttttggttgccatttgcatggartatctttttctatcccttcactttattctatgtgtgttcttactatttaagcatatcacttatacctagcatatagttggttctagcttttaaaaaatttattcagccactatctgtctttttatttaaaaatttaattcatttgtattctaggtaattattgataggtaagaacttattactgccattttgtaatgctgttaaagaattcttgcttgaaaatattttttctttaaaatttaaaatatatcatttcactctttcctggtctgcaggatttgctgttgagaaatctgctgatagctgtgttggggttaccttgattgtgatggttcttatctcttgctactttcagtattctttctttgtttttgattttttataatttgattgtgatgtatcttggtaaacttctctttggattgaatatgattggtgacttgag

SEQ ID NO: 397607 - DNA, 545 bp, Homo sapiens
tgcaattacctcctggcctagaagagacttaactagcctttggtcattttataattgggttattttaaacctaaattattattcattctctactttccaggtaatagaacatttagtcttttattacatacgagttcaaatcagctttgtgatgaaaaaagtcactaacatrtcaggctgtcttaggcaagcaattgacctttggatatttcttcttgcccaagtgctggaaaaaagaaggtttggctgcttgtggaaattatttatctgaggcagagcagttaccaagcatattaagtgaatcaattttattcagtgtgcttattggtccaataaaaacttttatttccttcatgtttggaaggataatgagataatggcactaacacctggctgccttcagtgaaatttctgatcaaaagtagtttggtgatatggttggctatgtacccacctaaatgccatcttgagttgtacttcccataatccccacgtgtcatgggagggaacctgtgggaggtaattgaatcatgggggtggttacc

SEQ ID NO: 397608 - DNA, 622 bp, Homo sapiens
ctttggacttttgtgttaatgctggaatgagttaagactttgggagactgttggaagagcacgattgtgttttgaaatgtgaggacatgagatttgggagggaccggggtgcaataatgtgacttggctgtgtccctacccaaatcttatctagaattgtagttcccatagtacccacatgttgtgagagggaaataattgaatcatgggggttattcccatgctgctattctcacaatagtgagtgagttctcataaaacctggtggttttataaggggctttycccccttttgcttggcacttctatcttctgccaccatgtgaagaaggacgtgtttgcttcccctttgtacatttcctgaggcctctccagccatgctgaattgtgagtcaattaaacctctttcctttataaattacccagtcttgggtatgtctttattagcagcattagaacagactaatacatttggtcatttaaaaagataaactgggagaaggaataaaatactacacacaaacatatacacacacaaatgcacacatgcatacacatactctaatacctttctatacaaaaaaattcttatatacattatcctttacaacacacatcttcc

SEQ ID NO: 397609 - DNA, 622 bp, Homo sapiens
ctttggacttttgtgttaatgctggaatgagttaagactttgggagactgttggaagagcacgattgtgttttgaaatgtgaggacatgagatttgggagggaccggggtgcaataatgtgacttggctgtgtccctacccaaatcttatctagaattgtagttcccatagtacccacatgttgtgagagggaaataattgaatcatgggggttattcccatgctgctattctcacaatagtgagtgagttctcataaaacctggtggttttataaggggctttccccccttttgcttggcacttctatcttctgccaccatgtgaagaaggacgtgtttgcttcccctttgtacatttcctgaggcctctccagccatgctgaattgtgagtcaattaaacctctttcctttataaattacccagtcttgggtatgtctttattagcagcattagaacagactaatacatttggtcatttaaaaagataaactgggagaaggaataaaatactacacacaaacatatacacacacaaatgcacacatgcatacacatactctaatacctttctatacaaaaaaattmttatatacattatcctttacaacacacatcttcc

SEQ ID NO: 397610 - DNA, 622 bp, Homo sapiens
aggaattacatatccacgaaacaaatacattcctaaggcctatgagagatcagactgtaggtccataactcccagaaatttatgaaatagatgtggaagacagaatattaaacaagtggccttgtgttgtagataaagacaaattagcgtaaaagatatgactgtacagcctgggcaacrtaaaaagaccccatttctaaaaaagaaaataataatagaaaaaaattactggagtgtgatgatgtttatctgtagtcccagctactctgggggctgagataggaataccacttgagccctggaggtccaagctgaagtgtaccatgactgtgtctctgcacttcagcctgggcaacagagcaagactatgtttccccaaaaaatacatgattatatggtaatgtgacttaatattttttaaccaaatgcaccagagcttacacaccaaaaatgaaagcttcccccttcaaaatagccacctaggaaagttatgtaattattccagtgatgttgatattgctgtagacattttgtgagccactcttctgggcttattttaactttattttgaatatgtttaaatggtgctgaattacactttggaaagaagatttggccacag

SEQ ID NO: 397611 - DNA, 622 bp, Homo sapiens
aggaattacatatccacgaaacaaatacattcctaaggcctatgagagatcagactgtaggtccataactcccagaaatttatgaaatagatgtggaagacagaatattaaacaagtggccttgtgttgtagataaagacaaattagcgtaaaagatatgactgtacagcctgggcaacgtaaaaagaccccatttctaaaaaagaaaataataatagaaaaaaattactggagtgtgatgatgtttatctgtagtcccagctactctgggggctgagataggaataccacttgagccctggaggtccaagctgaagtgtaccatgactgtgtctctgcacttcagcctgggcaacagagcaagactatgtttccccaaaaaatacatgattatatggtaatgtgacttaatattttttaaccaaatgcaccagagcttacacaccaaaaatgaaagcttcccccttcaaaatagccacctaggmaagttatgtaattattccagtgatgttgatattgctgtagacattttgtgagccactcttctgggcttattttaactttattttgaatatgtttaaatggtgctgaattacactttggaaagaagatttggccacag

SEQ ID NO: 397612 - DNA, 551 bp, Homo sapiens
gatggtctgaccttatgggttagtttgttcaaytgatgtaacagaaatacacatttcttttaattaaaaaactgtttagattttagatatgtttcataatgtaatatgcaacaaatgttatcttcttagatgtaataaatacataagtattattacagaaagaacaatttgatttcattgggacgaattcaattttgtttttaaaatggaaattttttatccaagtaaatttgtgtttatcccatttgattcagaaactaagacagggtgtcattttctacataggttctctagtttccacttgaatctactgaataatatagagtcaaggaacattagattacaacccccaagtcacaactctaagagctggcatctgactttcccagtactgcgctaagctccatgtgagagctacagatgctagcattgtcccattctctccagatgctactgatgttgctatcctttacaggccactccccattttccctgagcatggccaagttttccactgttgggcaatatgcccaaccccagccatctactac

SEQ ID NO: 397613 - DNA, 596 bp, Homo sapiens
gtaatctcatctgggcactcttatttcctacagaaaaaggaaagatttataattcattttcagcaacaggaacactttaataaaatctgcttcagaaggttaaatgatcagacaaacagctgcagccccaagaccctatatccatctcattgattggagcaaccatgacaacaaaatgaccactccaaargttgtttaaattaaatctatgctaagagcttatgctactgtcatatgcctcttttcttgccagtgttttagagtcatgcacttaagtgttgagggagggtatgatgaaatgaggcagtgactgagaggactgggtccctgccatagttctgctacctggaaactggtgccaccttgaatttaagcttcggtttcattactaaaaataatgaagcaactacccagattaagaccaatggtaggctcatgagcaggtgctccttcagaactgtatatttcaaatgtcagcccaaagcatggatagaggagaggctggagaccatcatgaagcaaaagcacagaggaggaagacagaggtgattgtgccattctctctattattgactctagcagtccagcttcagtcc

SEQ ID NO: 397614 - DNA, 551 bp, Homo sapiens
ataaaatgtcacaaatacttgccatttgtagatgtgagccaattctgaacccctgaattcattgaatgaaggagaagtcaggtctacagtaggaaagtgtatatgatgatgatatacctgttattcagcaaagaaacctacagctgtttgcctgggtcattgyatactaggaaaagggaactatctggatattttgagaactcttagatacagggttaaagttcacattgatacaagaacagaaacatcattaagattccctgttagagtggccacatgttggggacagataataggtgggtcctgacatagtttgtctcacattgggcctaggaactcacctaatggtcatttcgttggtcctctgaatgtgtaactggagtggacatacctggccattggtagaaatttcatattcctttcttggactatggaggaaagatctattatagtgggggaccaagagggactctttgaaattttttacctcttccaaacatgataatagaaaacgataccatatcctaaaggaaatggtagagaatggtgtt

SEQ ID NO: 397615 - DNA, 551 bp, Homo sapiens
ataaaatgtcacaaatacttgccatttgtagatgtgagccaattctgaacccctgaattcattgaatgaaggagaagtcaggtctacagtaggaaagtgtatatgatgatgatatacctgttattcagcaaagaaacctacagctgtttgcctgggtcattgtatactaggaaaagggaactatctggatattttgagaactcttagatacagggttaaagttcacattgatacaagaacagaaacatcattaagattccctgttagagtggccacatgttggggacagataataggtgggtcctgacatagtttgtctcacattgggcctaggaactcacctaatggtcatttcgttggtcctctgaatgtgtaactggagtggacatacctggycattggtagaaatttcatattcctttcttggactatggaggaaagatctattatagtgggggaccaagagggactctttgaaattttttacctcttccaaacatgataatagaaaacgataccatatcctaaaggaaatggtagagaatggtgtt

SEQ ID NO: 397616 - DNA, 536 bp, Homo sapiens
acaatcaatgctccctccaggagtgatgggccacactcttctgtggtctggtgtaagaatggagagaagggggtgtttggaattgttgaggaactcgtcagaaaagcctgacgatcacgctcatgagttgcaaaagccactgaatgtacgtcwttacaattgcacgggaaaacatcatcctgcggtccaggcagctacgtactgactcacaaatccatgtgatgcccacaattcttaagagacaaggtgtcacccacttccatggtgattattgttcctcaggttgacctgtttgtccttgtcatgatggtttgtaaagccgtattttaagaagggtttgggggagatatcagaagggatgaaaaaagttcaaggagtttggaggtagttctcatattgtgagaagaggatattcgatattgagcacaatcagctaggtgtaacagaagagcatctagatgaaaatgtccagtgacagtggacatgcaagtgctcaggaaagtggcaaaagttcactcagtgcaaggggtaagagc

SEQ ID NO: 397617 - DNA, 561 bp, Homo sapiens
gtgatgtgcggaaacataattgcacacttggtatacaaataagagatgctgtcacaatttaaattcagggctagaacttctctagcagttaggatctcagttccccatacagacaaccaggtagactgcctctgtaactgcaaagtgctggtgtgcctatccttattccccgtcttctgtaactgcccccaaaacacagagcccctctagcagccatatttgtacagtttgattcctctggccaccactgatcagaccaggagtgaacatttgccccagagtgtcttctaggagaaactagaattggaagcaattgatagtcccactgagtgactagaatttgtgatatggtttctaatgtggccactttccacgcatttgtggactgaagggctgagaaagccttctgctgagaaagaagaaacagccacacagcatgagaagcaacartgacagggccaaataaaagtactccgtatagctttccattttctggttccagtccattcctgagacctccgttcattccttaaaacacttcattatccttataataaattc

SEQ ID NO: 397618 - DNA, 581 bp, Homo sapiens
tgtttgtattttaaaccttagggcaggaatgatgtcttttttaatccgtacagccccaaggatgctgttggcgctccacaagctgaaataaaatagtattatttatagtttgccatgtacattttgtcaagcctcttgagtctgatacatccagttgggatgactcctagcagctacttagacactaatttctaaggatatgacagagttttcttctcctttctttccagaactggttgctgtgggcatcctccaagtataaagaaatcactcaccatccagggagccctcctgaattatcagaggagctgccagtactcccagcccactttctctcgccatgaatctccrttggttgctcttctaatagccatctagaaaaaggtttatgcatgtctctcatccccataatataaaaattgctaaactaacttattgtgtataacaattaaactaatatgcaatatctaattactaggtaacatgtaactgcgagcagactatcatggttcaaatcccagctctgccgcttatcagctatatgactagcaagtcttccaacactttgtgcttcatttctt

SEQ ID NO: 397619 - DNA, 615 bp, Homo sapiens
agatatacaaactgccaacaatcatatgaaaaaatgctcatcatcactaattcagggaaatgcaaattaaaamcacaaagagatgtaactttacttttgcaagaatggccataattaaaaaatcaaaaaataatagttgttggtgtggatgtggtggaaagggaacccttttacattaccggtgggcttgtaaaactagtacaaccaccatggaaaacagtatggagattccttaaagaactaaaagtagaactaccatttgattcagcaatcccactactgggtatctacccaaaggaaaagaagtcattatacaaacacacacacacacacacacacacacacacactcgcacacgtttatggcagcacaattcgcaactgcaaagatatggaagcaacctaaataactattgaccaatgagaggataaaggaaatgtgacatacatacatcatggaatactactcagtcataaaatggaaagaaataatggcttttgcagcaacttggatggagttgaagggcattattctaagtgaagtaactcaggaatggaaaaccaaatatagtatgttctcacttataagtgggaactaaggtatgaagacacaaaa

SEQ ID NO: 397620 - DNA, 618 bp, Homo sapiens
gctcactgtggctttgaactcctgggctcaactgatcctcctccctcagctcccaagtaaacagggttacaggcatgagccgctacamccagcatcaagttttttgtcttaatttgattttaatatattagtattttgtaacatgcttttattaataatattaggtatttgagcaaaataatttgtggtgaaatttcataacaattcctaaaaattaaataacatattattctttaagcttattagatatattttcagttatttcaaacattctaccattatattaattgttaaattccccaaattccaaattcgaatgcacaagtatctataattaatttataaggaggtaaacaaagaggtgcaaaaaaaattacaaaaagcttgtgagacatttaagacaccaagcttttagttcctgacaccgactgctctctgtgtgcatatatgtatatataaattctttaattttatacatggatatttatttaaaaatagtttctctgaagatctgccattcaggactttcacaggattcacttaaaattgagagcagcactgttatagcttttctgatctaggccacagctgttcattcagctccagtttggcactctt

SEQ ID NO: 397621 - DNA, 570 bp, Homo sapiens
atgctttaagttatatagtattttatgtagaaatttaagatatgctttctgtaaataagacattgagtcaaattgaggcaaataatttggacaatttctattttatacagctgcataatccctttgccttcttacctaatttccattgtttatatatttttttcatggtggtggttgttcctatgtttctatgaataatggtctttttagattcagcaggcacttattgattgcttactatgtgaagaacatttacaaatcttttttttcttcaaacattatttacttagccatcccattaactcaaaatgtttaatagtattattttttaaaaattctctgtaaagaaattttggcttagagaacttttaagtgacttactacactcagaaagtgataacagaatttgaatttagtcttctgagcctatgttgagtgttttctcactgatccagagatactcgtatttaccatttctatatgacataaactttgacaaaacactgggaattactgccaaacrgatgaaagactccagatttggttttaccccaaattccctcctctttg

SEQ ID NO: 397622 - DNA, 423 bp, Homo sapiens
ctgctcctgatattgccctgtgattgacagttctccctctgacttccaccatgactgtaagattcctgaggcctcatcagaagccaagcagctgccyggcactgtacttcctctacagctcatggaaccgtgagccaattaaacttcttttctttataaattaccctgtctcagatatttctttacagcaatgcaagagctgtctaacatagtgaggatttcttccatttatttttttctcttaatgttgttttcttaaactcacacatttggattagtctttgagagcttttaagaattttacattactcccatatcttccttttctaactaactgtaacatatatttgaacgtgttgttcaagcctcaaacacgttgtatctaaaacttaaatatcttacaattccaagtcctgccacttc

SEQ ID NO: 397623 - DNA, 423 bp, Homo sapiens
ctgctcctgatattgccctgtgattgacagttctccctctgacttccaccatgactgtaagattcctgaggcctcatcagaagccaagcagctgcctggcactgtacttcctctacagctcatggaaccgtgagccaattaaacttmttttctttataaattaccctgtctcagatatttctttacagcaatgcaagagctgtctaacatagtgaggatttcttccatttatttttttctcttaatgttgttttcttaaactcacacatttggattagtctttgagagcttttaagaattttacattactcccatatcttccttttctaactaactgtaacatatatttgaacgtgttgttcaagcctcaaacacgttgtatctaaaacttaaatatcttacaattccaagtcctgccacttc

SEQ ID NO: 397624 - DNA, 423 bp, Homo sapiens
ctgctcctgatattgccctgtgattgacagttctccctctgacttccaccatgactgtaagattcctgaggcctcatcagaagccaagcagctgcctggcactgtacttcctctacagctcatggaaccgtgagccaattaaacttcttttctttataaattaccctgtctcagatatttctttacagcaatgcaagagctgtctaacatagtgaggatttcttccatttatttttttctcttaatgttgttttcttaaactcacacatttggatyagtctttgagagcttttaagaattttacattactcccatatcttccttttctaactaactgtaacatatatttgaacgtgttgttcaagcctcaaacacgttgtatctaaaacttaaatatcttacaattccaagtcctgccacttc

SEQ ID NO: 397625 - DNA, 557 bp, Homo sapiens
atagtgaggatttcttccatttatttttttctcttaatgttgttttcttaaactcacacatttggattagtctttgagagcttttaagaattttacattactcccatatcttccttttctaactaactgtaacatatatttgaaygtgttgttcaagcctcaaacacgttgtatctaaaacttaaatatcttacaattccaagtcctgccacttcttaactattttatttctgaaaggactgaattactttttagggcattagaatcgaatatttggggacgtcttcaactcctcctttctcccttacaggcaaccaatgagttctggtaattatgtgcttgcaatttcctttatatatactattcacattcccatttacattgtttaagttttcattatttcttatacacatggatactctgtaaacaaacagctctgcaattgattctctttatttcactctttccttattttaatccatcctagattgcaaatcagataaatctttctaaaatgtacctttaatatgccagctccactgcttaggaaaaaaaat

SEQ ID NO: 397626 - DNA, 604 bp, Homo sapiens
gaaaatacagactcttcagcctggttaataaagcgccaagctaatgttcctttgttatttaccctcatcccattatacctgctttttgcttccaattacactactcccagttctacggacacactatgcctcatatgccatcctcatcaatcttagactttaaagtmtatcttaagaagtgtcagtaaatccattttatcccagaactgtaaaacctgcttaacgaaaattaataacctccccctttgctattctaggccctttgtttgtagaagcacttgtaatactgtattgagttattgtataattatccgtattcctaattacactgtaaagctttgaaagctgaaactaatatttactcaactttgtatttcaattactatccagcttaatggctattacaaagaaggcatttaaataaatattttgaaaatgaattttgttagttagaattgggttagttagtatttttatttactgaagaagaatcttttgtgcctagtatcaatcttacaagtggattagctaaaaactgcaagatattttttgctggtatatacctaaagaagatattactaaaagatttgatgagtcttacacg

SEQ ID NO: 397627 - DNA, 604 bp, Homo sapiens
gaaaatacagactcttcagcctggttaataaagcgccaagctaatgttcctttgttatttaccctcatcccattatacctgctttttgcttccaattacactactcccagttctacggacacactatgcctcatatgccatcctcatcaatcttagactttaaagtctatcttaagaagtgtcagtaaatccattttatcccagaactgtaaaacctgcttaacraaaattaataacctccccctttgctattctaggccctttgtttgtagaagcacttgtaatactgtattgagttattgtataattatccgtattcctaattacactgtaaagctttgaaagctgaaactaatatttactcaactttgtatttcaattactatccagcttaatggctattacaaagaaggcatttaaataaatattttgaaaatgaattttgttagttagaattgggttagttagtatttttatttactgaagaagaatcttttgtgcctagtatcaatcttacaagtggattagctaaaaactgcaagatattttttgctggtatatacctaaagaagatattactaaaagatttgatgagtcttacacg

SEQ ID NO: 397628 - DNA, 604 bp, Homo sapiens
gaaaatacagactcttcagcctggttaataaagcgccaagctaatgttcctttgttatttaccctcatcccattatacctgctttttgcttccaattacactactcccagttctacggacacactatgcctcatatgccatcctcatcaatcttagactttaaagtctatcttaagaagtgtcagtaaatccattttatcccagaactgtaaaacctgcttaacgaaaattaataacctccccctttgctattctaggccctttgtttgtagaagcacttgtaatactgtattgagttattgtataattatccgtattcctaattacactgtaaagctttgaaagctgaaactaatatttactcaactttgtatttcaattactatccagcttaatggctattacaaagaaggcatttaaataaatattttraaaatgaattttgttagttagaattgggttagttagtatttttatttactgaagaagaatcttttgtgcctagtatcaatcttacaagtggattagctaaaaactgcaagatattttttgctggtatatacctaaagaagatattactaaaagatttgatgagtcttacacg

SEQ ID NO: 397629 - DNA, 604 bp, Homo sapiens
gaaaatacagactcttcagcctggttaataaagcgccaagctaatgttcctttgttatttaccctcatcccattatacctgctttttgcttccaattacactactcccagttctacggacacactatgcctcatatgccatcctcatcaatcttagactttaaagtctatcttaagaagtgtcagtaaatccattttatcccagaactgtaaaacctgcttaacgaaaattaataacctccccctttgctattctaggccctttgtttgtagaagcacttgtaatactgtattgagttattgtataattatccgtattcctaattacactgtaaagctttgaaagctgaaactaatatttactcaactttgtatttcaattactatccagcttaatggctattacaaagaaggcatttaaataaatattttgaaaatgaattttgttagttagaattgggttagttagtatttttrtttactgaagaagaatcttttgtgcctagtatcaatcttacaagtggattagctaaaaactgcaagatattttttgctggtatatacctaaagaagatattactaaaagatttgatgagtcttacacg

SEQ ID NO: 397630 - DNA, 503 bp, Homo sapiens
ccctaaatacaatggtaaatgtccttatgagagaggcagaaggaaatttgaaacaaaaagaataaggaaagacacagagaagaggaggaggcaatggatcatggaggcaaagcctggagtaatatggctgcaagaaaaggaatgcagagagccaccaggagctggaggagacaaagaacacatggagactccagatagagtgcagccctgtgaacggctttaatgtgaacatctggcatcaataattatgagaggatgaatttctatggtttaagtcaccaagattgtgataatttgtgatggaagccacaggaatctaatataacaaagattgtctgtatttttaattatgcaatgccatcttttactttttcaatctaggcctctatatgatgtccatacactgtttcatataatattgaatttgtaatacttatttaaatattctcagtctatgygaaagaaattccataattcactaagataggtattttggtattgag

SEQ ID NO: 397631 - DNA, 545 bp, Homo sapiens
atcttttactttttcaatctaggcctctatatgatgtccatacactgtttcatataatattgaatttgtaatacttatttaaatattctcagtctatgcgaaagaaattccataattcactaagataggtattttggtattgagaagatcctttaaaatttcttttcaggcaggcattatacattttgttagctagtttgcttgtttaggtggaagacagagggagaactagccataatatctgatttctaaatcaagtctcattgccagcttcttgcctctaggctaaacattcccaattactttaarcttttctaattggcaatatttccaaatatttatttgttattttgctcttctttgatcaattgattggctctttacagaaatcattctgaaattcatattcatagaatgtcaagcatttcagaatccactctaatcactgtcttgggtatgccctccgttaatcttattttttggtagtatacaaatatactataccccatctaaaatatattgatcaccagtcatgtggattgatc

SEQ ID NO: 397632 - DNA, 562 bp, Homo sapiens
atttatttgttattttgctcttctttgatcaattgattggctctttacagaaatcattctgaaattcatattcatagaatgtcaagcatttcagaatccactctaatcactgtcttgggtatgccctscgttaatcttattttttggtagtatacaaatatactataccccatctaaaatatattgatcaccagtcatgtggattgatcacatttgtttctctcctagttttcccaatgcttactgaaatatcgctgtgaaaaagatgaaagccaaagacaagaatgggagagatatctgttgacaaagactttatacacttttgacaaataaatgtagctagcaggaggaggaagatgtagaataaagtatactcacattgatgtgaataagaagaaagttaattagactcaccaaatcccagagatgttcccgtcacaaagatgctacttaaaacagagaacaggggcaagttaaatgatttaacatgagggttgttgaaagtcaatatttggaggagccatgttttctcttctattgctctatgcacggaataatagca

SEQ ID NO: 397633 - DNA, 562 bp, Homo sapiens
atttatttgttattttgctcttctttgatcaattgattggctctttacagaaatcattctgaaattcatattcatagaatgtcaagcatttcagaatccactctaatcactgtcttgggtatgccctccgttaatcttattttttggtagtatacaaatatactataccccatctaaaatatattgatcaccagtcatgtggattgatcacatttgtttctctcctagttttcccaatgcttactgaaatatcgctrtgaaaaagatgaaagccaaagacaagaatgggagagatatctgttgacaaagactttatacacttttgacaaataaatgtagctagcaggaggaggaagatgtagaataaagtatactcacattgatgtgaataagaagaaagttaattagactcaccaaatcccagagatgttcccgtcacaaagatgctacttaaaacagagaacaggggcaagttaaatgatttaacatgagggttgttgaaagtcaatatttggaggagccatgttttctcttctattgctctatgcacggaataatagca

SEQ ID NO: 397634 - DNA, 562 bp, Homo sapiens
atttatttgttattttgctcttctttgatcaattgattggctctttacagaaatcattctgaaattcatattcatagaatgtcaagcatttcagaatccactctaatcactgtcttgggtatgccctccgttaatcttattttttggtagtatacaaatatactataccccatctaaaatatattgatcaccagtcatgtggattgatcacatttgtttctctcctagttttcccaatgcttactgaaatatcgctgtgaaaaagatgaaagccaaagacaagaatgggagagatatctgttgacaaagactttatacacttttgacaaataaatgtagctagcaggaggaggaagatgtagaataaagtatactcacattgatgtgaataagaagaaagttaattagactcaccaaatcccagagatgttcccgtcacaaagatgctacttaaaacagagaacaggggcaagttaaakgatttaacatgagggttgttgaaagtcaatatttggaggagccatgttttctcttctattgctctatgcacggaataatagca

SEQ ID NO: 397635 - DNA, 531 bp, Homo sapiens
aattgatttgattaagaaaatatttttaaacatttcctgaatagatgaccattcctactttgccaatgttctatacttattcattattactatcattattgatattataaattgattctaattcatttggtctaacgtatgtcacagaaacttattttgtaacaagtccttcaaatgagtgattatcagcaaggtgtggaacctcaattaacttgagcttaactcgtcatttcacattgtatttctatttgctagaatattttcttttggatagaattcatatttgtgtttatatgataatatctgtaagttatttatattctgatcttctaagaatgtgacatatacatattataaatactagaaactacttagtcttgaagatagaatgagaatttaaggaaaaaaatcaaagtacccatgttttctattatcaygaaagtctcagttcttcccattctactttctattcacgagttctgtgatatgcatgattgcctggcaatctcacaatttctatatttctgacaa

SEQ ID NO: 397636 - DNA, 600 bp, Homo sapiens
agcttcataagaacattacaagtaccttaaaatggaagtaatgatattttatttgaaagatgatttggttaatcataaatgcctgtagttactcaaagatttgcaccttggccaatgcaagtttgagggcttatgcttagagatgctgagatgaacagatagaagcacaaaagaaataaagctattacaagtctcaaagcataatataaaatgttgagttaaaaaaatagggcttccacaatgtctcattatgtcagtagtttctatattttaatatgatratttactaaaatgtattaaagtacaaattcaatttctcagtcatgctaaccaaatttcaatgctcaacagctttatgtgactactagctaccactctggaaacacagatacagaccatttccatcaacacaaaattctatttgacagcgctggttgaaccaaaccaatcctgcagcattgaaaactgctaagatgataatctgtactagacaaactgcctttgataatgatattcagttgaattagaaagtttaatgaaatttctatgaatgttaataacagtttgaaatctaaattggtttaaaagtaatgattctaa

SEQ ID NO: 397637 - DNA, 530 bp, Homo sapiens
gtcattactttcccacaatccaccctttatatgcagttcttaggtgctttttgcttctctttttaagggttaaaattcatagcagtatatagaaaattcctatttgcaagcattgttttattataaattgtctttggttgaataaaactagaagtataatgaaatatatttaagatataattgaagtatattgccatctttatccatagattcttattcaaaaggtcaagagtagaaatgtatatttttggtaaatatctctgttattttgattgcagagaaacaagcaaatggcaaattcaaggttatagggacaaaagtactaaagacagacaacaatttacakaaacaaacagatttataaatctatatcttctaaagtaatcacatatctatagtagagatactatttaaattcataaagttaaattatacttgatatattccatttacgaagaaaaaattatgtgttatagctaagattttaatgtgaaaaagaatatttggaaaaaataaccttcaacagctga

SEQ ID NO: 397638 - DNA, 530 bp, Homo sapiens
gtcattactttcccacaatccaccctttatatgcagttcttaggtgctttttgcttctctttttaagggttaaaattcatagcagtatatagaaaattcctatttgcaagcattgttttattataaattgtctttggttgaataaaactagaagtataatgaaatatatttaagatataattgaagtatattgccatctttatccatagattcttattcaaaaggtcaagagtagaaatgtatatttttggtaaatatctctgttattttgattgcagagaaacaagcaaatggcaaattcaaggttatagggacaaaagtactaaagacagacaacaatttacagaaacaaacagatttataaatctatatcttctaaagtaatcacatatctatagtagagatactatttaaattcataaagttaaattatacttgatatattccatttacgaakaaaaaattatgtgttatagctaagattttaatgtgaaaaagaatatttggaaaaaataaccttcaacagctga

SEQ ID NO: 397639 - DNA, 599 bp, Homo sapiens
cagttttatgattaccagtggattaataaatgcttgtgtaacggaaagttttaattcaaggaacatatttaacctgggtatgcaatgagctgtatgtttaatgaacaattgtgtagaacttcactttaatttggttatgcctgcctgggcacttcagcatttcagcatgtcattagattgttattttcacacagttttaactattttcttattaagaaaataatggtataagagtactttgatgctgtccttttcaatgctagaaaaaaatcttcaaacatattgtgtttgttttaggtaaatctttatgcaaaaccacaatcttttcaatatttaggtaagaactatcgttctacatagagtgaagttcatgcctggtacaaaaagtggttggtatttattccacttaaagatgtagtaaatctgagaaaaatcagtgttgtaaggtccttaaatacctatatgtgttcatttgtgtattagcagagttatcttgttagattcattagtgttggcaaagtgaaactgctcttcagaggataagccataacattggcaaacytcaatagaaagagtaagtgggtaaagggaaagctagc

SEQ ID NO: 397640 - DNA, 529 bp, Homo sapiens
gaacagcctgtgttccatatttcttagcctggctgacatagaggtcacagatttactgtgggacaaggtagaatcacttacatattatcctaaatttagatttggcctagattttttgctgaaatgatgagaggcatggcaataaaatgaaactttgctgcttttatcattttctgctttccgagttaaaaaaaaatcataaaataaattgtgcttaaagaaaccactgaattcatcaaactctgactccttaaaatgattaagtcattttgtctcccaaccagtcctgaactgccttcttagtgacctgtggcatgtcctgaatagcctttctgagcaggcaggtaggatatrtatgaatatgacaataaacagctgtagtagtgttcagtttcagtcttcaatctttgacatcctttttaaatgctccccaatgacttccccaagtgttcactctagtcactattgtcctagaagagtactgagccaatttagtgtatatttattgatcactataaaaggcaatgta

SEQ ID NO: 397641 - DNA, 529 bp, Homo sapiens
gaacagcctgtgttccatatttcttagcctggctgacatagaggtcacagatttactgtgggacaaggtagaatcacttacatattatcctaaatttagatttggcctagattttttgctgaaatgatgagaggcatggcaataaaatgaaactttgctgcttttatcattttctgctttccgagttaaaaaaaaatcataaaataaattgtgcttaaagaaaccactgaattcatcaaactctgactccttaaaatgattaagtcattttgtctcccaaccagtcctgaactgccttcttagtgacctgtggcatgtcctgaatagcctttctgagcaggcaggtaggatatatatgaatatgacaataaacagctgtagtagtgttcagtttcagtcttcartctttgacatcctttttaaatgctccccaatgacttccccaagtgttcactctagtcactattgtcctagaagagtactgagccaatttagtgtatatttattgatcactataaaaggcaatgta

SEQ ID NO: 397642 - DNA, 593 bp, Homo sapiens
tactgagccaatttagtgtatatttattgatcactataaaaggcaatgtactgtgttgctggaggtgcacccaacttctaaaaaatttacagttgaagaggcaagacataattccatgaaaactttaataacaaatattagaagagctcaaccagtaatagactgcttagaaaaagaagagatcactttaagatggaatgactgattaattaataatgcctttaagatatgacaaaacaatacagatctggtccaccaaaagctattcgaggctaaagattccattcattctagtagtatctccctagtaaggttcctcatctgcttctgcctaagtaccagattttcgccttccacagacagacacctccacaatttacatcaaaacatatcccagtgaatatcacataattgactccaactaaccctttttaaccttacagcatagaccacacaacaaatccagtgagttatacatattggatttgagcctgaacatacaagtgcaactggaatgccttaaaaaaggcaycatagaatctgtatctatcaggatttagccctcaccagtcatctggtgcacaaagcaccag

SEQ ID NO: 397643 - DNA, 593 bp, Homo sapiens
tactgagccaatttagtgtatatttattgatcactataaaaggcaatgtactgtgttgctggaggtgcacccaacttctaaaaaatttacagttgaagaggcaagacataattccatgaaaactttaataacaaatattagaagagctcaaccagtaatagactgcttagaaaaagaagagatcactttaagatggaatgactgattaattaataatgcctttaagatatgacaaaacaatacagatctggtccaccaaaagctattcgaggctaaagattccattcattctagtagtatctccctagtaaggttcctcatctgcttctgcctaagtaccagattttcgccttccacagacagacacctccacaatttacatcaaaacatatcccagtgaatatcacataattgactccaactaaccctttttaaccttacagcatagaccacacaacaaatccagtgagttatacatattggatttgagcctgaacatacaagtgcaactggaatgccttaaaaaaggcaccrtagaatctgtatctatcaggatttagccctcaccagtcatctggtgcacaaagcaccag

SEQ ID NO: 397644 - DNA, 575 bp, Homo sapiens
gggtgggcctggtgaccaactgctggccaagtccccaaagcgagcactctcccacttcctgtgccaggtccccaaagcacagccccagctcagcaccccaggcccagcacccactttctgtgtgcaagtgtggcatgtgccctgggctcagctcgtgtgcttggggccgcttctcgtgcccagagtgcagctgcgtgccccagcaggtgggcaagggtcgcccagcgctgattgatggtggcccccgagcgcagcaggctcgcagggattatctgctttctccccacacccatcctcgcagcagcagcatgtgagagtagtggcatgggcctggggtccagagcgatggacactgccaggcctggggcaggtcccacgctggctatatgagggtgagggcagtgcagttggctcctcagggatgtgaagaacaggggatgtggggcacaggggtcccgctgccctcctcactgctcctcctgcagccattcctgcccccgacactcacgagcgtgccgctgcagcaggcacggtggcgttttcctctgagctgttctattgctcartaaagctcc

SEQ ID NO: 397645 - DNA, 566 bp, Homo sapiens
  misc_feature (1)...(566): n = A,T,C or G
nnnnnnnnnnnnnnnnnnnnnnnnnnngcacacgaatattgtgcagaggaatttcaaaccaatttcttctatagaatacagtgaagttaattttaaatatatgtcttaattataagagttacttcttttaaataaatgtctaggtaattctgcacatttgcatgattctgaatttcatgtttgccaattaaggtaattccatmattcatccactcatcctctcaaccatccatccatccatccaacaaattaagtatgtaccatgttcaaagcactacgccagaaaatctatttaaaataggatagagatgctgttgtcacggagttcattgtatagttgcagagacaaacacaaactaaatgatcacaaatagagagataggatatataaagtttcaataagagcctaaaataaaaggaattgacctggtcagggaaaacattattttaagaaatagcacctgacctaagatctgtaaatgagaaagcaataaatgcatttgtgtgtggttgttggtggaggaggactgtgataagctgtgatatgttgtaaaaagaggagcctt

SEQ ID NO: 397646 - DNA, 519 bp, Homo sapiens
aaataaaaggaattgacctggtcagggaaaacattattttaagaaatagcacctgacctaagatctgtaaatgagaaagcaataaatgcatttgtgtgtggttgttggtggaggaggactgtgataagctgtgatatrttgtaaaaagaggagccttttatacaagtacatgggaatgtaagagagaaagggatatatttaagtacctgactcaaggtactgaaaaaagatcagtatgattagattacagaaataggcagggaaacccagcagttttctgtaaaccatattaaagattttcatttttattctaaatgctattgggtaacacccaagccactagaatgcattttgagattactctggctgcaaggtagagaagagtttatatagtaaccagcacaaataaagaaagatcacttagtaaggtgttacaatagacttgaaaatatgaagttgatttaatcaagggtaagaaaggggaggagttggtgactttataagatatttaggaggttc

SEQ ID NO: 397647 - DNA, 450 bp, Homo sapiens
ccacagtgctatgttggcctcatttatactatcttcttattgctttaagaatcaaattatttctgattgtaattgttagaacagtagagtgtattcataatgataattagtaatagtcaaagcatttttgagtgttcaagaacaggtgaagtcacatttaggctctgctacttactggttgttaagttgtaagcaagtcacttaatgtttctgggattcatttttcctgatctgcaaaataaatttartaaatagctaccttgaagatttgttgttagaattactaaaaatatatatgggtcatacttactgaacagtttttatgtgtcaggcatttaaaatacattattgtgcaaaacatttaaaatatattattgtattctgttctctaaacaactctttggagtatggtgcatgattatttttgttttcagatggtgtattagggtt

SEQ ID NO: 397648 - DNA, 650 bp, Homo sapiens
tatttctccagaacctgagagccatgtctttggaatgtatgcaaggaagagagcatctctcccagtttccatgaaagagcagagcctaacttcagtgggcaccttgctccaagttgtaaaactacttcctatcacaaagatatgagaagtttgtttctcctctggatcaagccaattaactaacacagatggtcaccccaattaccagatcaattaaaaataaactatgtgtgactaatggtaccgtcatgtcctytttcctgagaactagttattgtttatcttgaaaacatgcacataataggttgtatctgcttgtctatataaaaaggtgaggtttacttttgtccttgcagtcccgtaggaagcagattgcctggtattgatgtttaagtgttatcaatggagtggcaaatatttacgatactaaagtaaatgtgaaaacaagaaaaagaacttaaatgtaagatggaagttttccaaaagcctttcacattttcactgtgagctattcttccaccctcattcaaacatatctgcttcaatatcttcatgttccaattaagcaaattatttggtggcttttacagacacctcatgcttctacttttgcactttagcacaccctctcttttcaaatgaatgtgctt

SEQ ID NO: 397649 - DNA, 650 bp, Homo sapiens
tatttctccagaacctgagagccatgtctttggaatgtatgcaaggaagagagcatctctcccagtttccatgaaagagcagagcctaacttcagtgggcaccttgctccaagttgtaaaactacttcctatcacaaagatatgagaagtttgtttctcctctggatcaagccaattaactaacacagatggtcaccccaattaccagatcaattaaaaataaactatgtgtgactaatggtaccgtcatgtcctttttcctgagaactagttattgtttatcttgaaaacatgcacataataggttgtatctgcttgtctatataaaaaggtgaggtttacttttgtccttgcagtcccgtaggaagcagattgcctggtattgatgtttaagtgttaycaatggagtggcaaatatttacgatactaaagtaaatgtgaaaacaagaaaaagaacttaaatgtaagatggaagttttccaaaagcctttcacattttcactgtgagctattcttccaccctcattcaaacatatctgcttcaatatcttcatgttccaattaagcaaattatttggtggcttttacagacacctcatgcttctacttttgcactttagcacaccctctcttttcaaatgaatgtgctt

SEQ ID NO: 397650 - DNA, 576 bp, Homo sapiens
cttactcctctttttctttaaatctatcccagaaacattaagaaaggcaaagtagtctcacaattctttcagtcaaagagaaaataaccttgaactcaaacaaagaacgtctatcatgtaaagcagagatgaaggagatctgattaaaatcagaattcccatcactacatcttcacttgccacaccaaaatcagaagctattgattcttttmattaaaaaagatctgatacagaaatactacattgagagcaatcccttatgaaaacgtctgtcaagatttctattttttggctcacacctcagagacagacatgcttaaatttgcaattaaatattacaggaccatgatgcatacctggccattgaaaaatcccaaggggaaagagaataaaaacaagagaagagaaatgcaagaaagtgtgtatatgcttatgtgaaaaagggaaaaggtgacaacagcccaaaacacagaacaatgaggcaaaggaaccaaataggaaaacaaaaagcaaggtaaaaactaatgaaaaatcaactatttaaaatcagggtgaattatgcaatgatcaatcaaa

SEQ ID NO: 397651 - DNA, 576 bp, Homo sapiens
cttactcctctttttctttaaatctatcccagaaacattaagaaaggcaaagtagtctcacaattctttcagtcaaagagaaaataaccttgaactcaaacaaagaacgtctatcatgtaaagcagagatgaaggagatctgattaaaatcagaattcccatcactacatcttcacttgccacaccaaaatcagaagctattgattcttttcattaaaaaagatctgatacagaaatactacattgagagcaatcccttatgaaaacgtctgtcaagatttctattttttggctcacacctcagagayagacatgcttaaatttgcaattaaatattacaggaccatgatgcatacctggccattgaaaaatcccaaggggaaagagaataaaaacaagagaagagaaatgcaagaaagtgtgtatatgcttatgtgaaaaagggaaaaggtgacaacagcccaaaacacagaacaatgaggcaaaggaaccaaataggaaaacaaaaagcaaggtaaaaactaatgaaaaatcaactatttaaaatcagggtgaattatgcaatgatcaatcaaa

SEQ ID NO: 397652 - DNA, 557 bp, Homo sapiens
aaaaatcaactatttaaaatcagggtgaattatgcaatgatcaatcaaatctccaaaggtatataaccaaaatactattgaagtttagaatgagtgcagacatgttccaaatacccccatgaatagattatctgtgcattagccctaatatgtgaatagaccttgtttattttgactctatgcctctctaatagtgtcattctacaaagttaatattaaagataggccttagctaaaagaaaaaatggaagacaatgtagttayaatattttttttactaaaaactggtaatacctattaatacaaaggaaatatcagctttacggcaatatccatatagacatcaattaatgactttttatagtcattttctcatgtattattcatacatatgtaaacaaagtaagaaaagggaataggaattggaagaacagagaatatagaagagaggtgaagaaaacaagaaagaaagaataaaagagccttcacaaataagctgggtcatttaattttcataagttatttcaattttaaatttaaaatatgtcaagtatttt

SEQ ID NO: 397653 - DNA, 584 bp, Homo sapiens
atggggaaactgcccccatgattcaattacttttcaccagcttcctcccatcacacatgagggttatgggaactacaattcaagatgagactagggtgaggacatagccaaaccatatcattctgccattggaccctccaaaatctcatgtcttcacatttcaaaacacagttgtgcctttccaacagtcccctaaagtcttagtttattccagcattaacccaaaagtccacagtccaaagtttcatctgggacaaggcaagtcccttctacctatgagtctgtaaaatcaaaggcaagttakttacttcctagatagaatggggaatgggggtacagacattgggtaaatacacccattccaaatgaaagaaataggccaaaacgaaggggctacaggccccaagcatactgaaatccaacgaggctgtaattaaatcttaaagctccaaaataatctccttagacttcatgtctcacattcaggtcatgggccctggcccagcccaagaagtcatttttttctcctaggcctccaggcctgtgatgggaggggttaccatgatggtctctgatatgccctg

SEQ ID NO: 397654 - DNA, 584 bp, Homo sapiens
atggggaaactgcccccatgattcaattacttttcaccagcttcctcccatcacacatgagggttatgggaactacaattcaagatgagactagggtgaggacatagccaaaccatatcattctgccattggaccctccaaaatctcatgtcttcacatttcaaaacacagttgtgcctttccaacagtcccctaaagtcttagtttattccagcattaacccaaaagtccacagtccaaagtttcatctgggacaaggcaagtcccttctacctatgagtctgtaaaatcaaaggcaagttagttacttcctagatagaatggggaatgggggtacagacattgggtaaatacamccattccaaatgaaagaaataggccaaaacgaaggggctacaggccccaagcatactgaaatccaacgaggctgtaattaaatcttaaagctccaaaataatctccttagacttcatgtctcacattcaggtcatgggccctggcccagcccaagaagtcatttttttctcctaggcctccaggcctgtgatgggaggggttaccatgatggtctctgatatgccctg

SEQ ID NO: 397655 - DNA, 584 bp, Homo sapiens
atggggaaactgcccccatgattcaattacttttcaccagcttcctcccatcacacatgagggttatgggaactacaattcaagatgagactagggtgaggacatagccaaaccatatcattctgccattggaccctccaaaatctcatgtcttcacatttcaaaacacagttgtgcctttccaacagtcccctaaagtcttagtttattccagcattaacccaaaagtccacagtccaaagtttcatctgggacaaggcaagtcccttctacctatgagtctgtaaaatcaaaggcaagttagttacttcctagatagaatggggaatgggggtacagacattgggtaaatacacccattccaaatgaaagaaataggccaaaacgaaggggctacaggccccaagcatactgaaatccaacgaggcwgtaattaaatcttaaagctccaaaataatctccttagacttcatgtctcacattcaggtcatgggccctggcccagcccaagaagtcatttttttctcctaggcctccaggcctgtgatgggaggggttaccatgatggtctctgatatgccctg

SEQ ID NO: 397656 - DNA, 584 bp, Homo sapiens
atggggaaactgcccccatgattcaattacttttcaccagcttcctcccatcacacatgagggttatgggaactacaattcaagatgagactagggtgaggacatagccaaaccatatcattctgccattggaccctccaaaatctcatgtcttcacatttcaaaacacagttgtgcctttccaacagtcccctaaagtcttagtttattccagcattaacccaaaagtccacagtccaaagtttcatctgggacaaggcaagtcccttctacctatgagtctgtaaaatcaaaggcaagttagttacttcctagatagaatggggaatgggggtacagacattgggtaaatacacccattccaaatgaaagaaataggccaaaacgaaggggctacaggccccaagcatactgaaatccaacgaggctgtaattaaatcttaaagctccaaaataatctccttagacttcatgtctcacattcaggtcatgggccctggcccagcccaagaagtcatttttttctcctaggcctccaggcctgtgaygggaggggttaccatgatggtctctgatatgccctg

SEQ ID NO: 397657 - DNA, 566 bp, Homo sapiens
tacagacattgggtaaatacacccattccaaatgaaagaaataggccaaaacgaaggggctacaggccccaagcatactgaaatccaacgaggctgtaattaaatcttaaagctccaaaataatctccttagacttcatgtctcacattcaggtcatgggccctggcccagcccaagaagtcatttttttctcctaggcctccaggcctgtgatgggaggggttaccatgatggtctctgatatgccctggagacattttctccattgtcttggtgattaacatttggctcctcattacttatgaaaatttttacagccagtttgaatttctccccagaaaatagagttttcttttctattgcatcatcatgctctacatttttttaatatattctgcttcctcttgaacactttgctgcttagaaatttcttccaccagaaactctaaatcatctctcacaagttaacattccacagatctctarggcaagggcaaattgcctccagtctccttgtagagcaaaagttactgttactccagttcctaacaagttcctcatctcca

SEQ ID NO: 397658 - DNA, 566 bp, Homo sapiens
tacagacattgggtaaatacacccattccaaatgaaagaaataggccaaaacgaaggggctacaggccccaagcatactgaaatccaacgaggctgtaattaaatcttaaagctccaaaataatctccttagacttcatgtctcacattcaggtcatgggccctggcccagcccaagaagtcatttttttctcctaggcctccaggcctgtgatgggaggggttaccatgatggtctctgatatgccctggagacattttctccattgtcttggtgattaacatttggctcctcattacttatgaaaatttttacagccagtttgaatttctccccagaaaatagagttttcttttctattgcatcatcatgctctacatttttttaatatattctgcttcctcttgaacactttgctgcttagaaatttcttccaccagaaactctaaatcatctctcacaagttaacattccacagatctctagggcaagggcaaawtgcctccagtctccttgtagagcaaaagttactgttactccagttcctaacaagttcctcatctcca

SEQ ID NO: 397659 - DNA, 518 bp, Homo sapiens
aaaagtcagataacaaaagcttaatattgcaataattggcaatgaaataacaacattaaatatgcataaataggcagggcacagtggctcatacttgtaattccaggattatgggaggccaaggcaagaggatcacttgagcccatgagtttgagaccattctggtcaacataacaagaccccatctctaaaaaaaaacaatacataaatatacacacaaatatctgaataatcccatgctttgcatgactttgatttctactattgtggcaggccaggtttccattagcaaccagaacagtcagtttccactaaccctttactataattttgatgaatgcaaaagttaaacattaaaaaactagagacactggtgcctgagtaccaaggctrgagtgtgaaaacaaacccattaagaccccgcctgggttttttcagacactaaaatctgatcaaataatataataacagcattctgacacatacacctcatcccagggcccacttaagattaacaa

SEQ ID NO: 397660 - DNA, 518 bp, Homo sapiens
aaaagtcagataacaaaagcttaatattgcaataattggcaatgaaataacaacattaaatatgcataaataggcagggcacagtggctcatacttgtaattccaggattatgggaggccaaggcaagaggatcacttgagcccatgagtttgagaccattctggtcaacataacaagaccccatctctaaaaaaaaacaatacataaatatacacacaaatatctgaataatcccatgctttgcatgactttgatttctactattgtggcaggccaggtttccattagcaaccagaacagtcagtttccactaaccctttactataattttgatgaatgcaaaagttaaacattaaaaaactagagacactggtgcctgagtaccaaggctggastgtgaaaacaaacccattaagaccccgcctgggttttttcagacactaaaatctgatcaaataatataataacagcattctgacacatacacctcatcccagggcccacttaagattaacaa

SEQ ID NO: 397661 - DNA, 552 bp, Homo sapiens
ataagatggaatgccatgaacaacaaagattcataacagacaaggaaagggttaggttccaaattttaaatggagagtggtaagccttggaaaggatgaagcctattctctgacgaaaattaagattgaggccaagcacggtggctcatgcctgtaatctcagcactttgggaggctgaagtgggtagatcacttaaggtcaggagttagagaccagcctggccaacatggtgaaacccgatctctactaaaaacacagcaattagctgygtgtgtgagtggtgatgggcacctgcaatcctggctacgcaggtggctgaggcaggaaaatcacttgaacacaggaagtggagtttgcattgagcagagatcttgccactgcactccagactccagcctgggaaagagtgagattccatttcaaaaaaaaaaaaaaaaacaacaaagaatgaagattaagattgagaaactagaaatccagagaaactatttgaaaatggggataaaaataagatcaatttaatcttttctgagcgtaaaggggggtaatca

SEQ ID NO: 397662 - DNA, 552 bp, Homo sapiens
ataagatggaatgccatgaacaacaaagattcataacagacaaggaaagggttaggttccaaattttaaatggagagtggtaagccttggaaaggatgaagcctattctctgacgaaaattaagattgaggccaagcacggtggctcatgcctgtaatctcagcactttgggaggctgaagtgggtagatcacttaaggtcaggagttagagaccagcctggccaacatggtgaaacccgatctctactaaaaacacagcaattagctgtrtgtgtgagtggtgatgggcacctgcaatcctggctacgcaggtggctgaggcaggaaaatcacttgaacacaggaagtggagtttgcattgagcagagatcttgccactgcactccagactccagcctgggaaagagtgagattccatttcaaaaaaaaaaaaaaaaacaacaaagaatgaagattaagattgagaaactagaaatccagagaaactatttgaaaatggggataaaaataagatcaatttaatcttttctgagcgtaaaggggggtaatca

SEQ ID NO: 397663 - DNA, 552 bp, Homo sapiens
ataagatggaatgccatgaacaacaaagattcataacagacaaggaaagggttaggttccaaattttaaatggagagtggtaagccttggaaaggatgaagcctattctctgacgaaaattaagattgaggccaagcacggtggctcatgcctgtaatctcagcactttgggaggctgaagtgggtagatcacttaaggtcaggagttagagaccagcctggccaacatggtgaaacccgatctctactaaaaacacagcaattagctgtgtgtgtgagtggtgatgggcacctgcaatcctggctacgcaggtggctgaggcaggaaaatcacttsaacacaggaagtggagtttgcattgagcagagatcttgccactgcactccagactccagcctgggaaagagtgagattccatttcaaaaaaaaaaaaaaaaacaacaaagaatgaagattaagattgagaaactagaaatccagagaaactatttgaaaatggggataaaaataagatcaatttaatcttttctgagcgtaaaggggggtaatca

SEQ ID NO: 397664 - DNA, 558 bp, Homo sapiens
gctgagttctaaaggatttgtaactgctatttatttggtgttagaagacttccctgacctgtggtattgtttagcatatttaaagagtttaagcttctctttttgatgtcacataaatgaaagcccccaaaaaaccctctcaccacttctgccggtaatataaaaataattrttcaggagaacttggtgaatccaatgcacaggttattttttttctaataccacagacttttcagacagaaatttcaggacagaataatttaaaggtagtacctaaaatttgctgctctcaggactctacattctgagataggcttataagccacctggttaagaagataagtgtcataaaaatgaaaatataacttacaaagcaataatatcttaaattctactgaatttttatgagaaataatggatgccagagacagtggaatgatgtcttgaaagtgattcatgaaattacaaacaaaaacaacaattgtcaatctgaattcaatatacattgaaaatgtcttgggagaatggaaacaaaacaaaggtgttccaggaaaagga

SEQ ID NO: 397665 - DNA, 558 bp, Homo sapiens
gctgagttctaaaggatttgtaactgctatttatttggtgttagaagacttccctgacctgtggtattgtttagcatatttaaagagtttaagcttctctttttgatgtcacataaatgaaagcccccaaaaaaccctctcaccacttctgccggtaatataaaaataattattcaggagaacttggtgaatccaatgcacaggttattttttttctaataccacagacttttcagacagaaatttcaggacagaataatttaaaggtagtacctaaaatttgctgctctcaggactctrcattctgagataggcttataagccacctggttaagaagataagtgtcataaaaatgaaaatataacttacaaagcaataatatcttaaattctactgaatttttatgagaaataatggatgccagagacagtggaatgatgtcttgaaagtgattcatgaaattacaaacaaaaacaacaattgtcaatctgaattcaatatacattgaaaatgtcttgggagaatggaaacaaaacaaaggtgttccaggaaaagga

SEQ ID NO: 397666 - DNA, 607 bp, Homo sapiens
tatagtaattgaaaacttttacaattacactctgagacagaatgaaaaataaaataatattgaggtatatattgctgtcaagtgacacacatataaaaagcaatagtgggactgaagataaagggatttaaaaaagaataggctaaaatgrcatcagcctagcaatcttaatatctgaaaaaaacaaagtcaaaaataacataaaacacagaaagatattatatgcttgtaaaccgaaaagtagggtagaaagatacaactaccatagtagcataggtacctaaaaattcagcttcaaaatacatcaagcaaaagttagtatgatagagagatgttaatacccttaaatcagagtttggcaaactatggactgtggaccaaatcctgcctgccacatatttttgtaaataaatctctattgggacacattgtctatatgtagtgctttacagtgcaatgatagagtagagtaggttccacagaggtaatttgacccacgtagccaaaatggttacaagttttcttttgagagtagtaaaaatgttctaaaattgattgtggtgatggatgtaaaagtctacgaatatactaaaaaccattgagttgt

SEQ ID NO: 397667 - DNA, 602 bp, Homo sapiens
tttttgtttactttttttgttttaatttatttttgagggtccttagtaggtgtatatatttatgggggggtacataaaatgttttgatacaggcgtacaatgtgaaataagtacatcatggagaatagggtatccatcccctcaagcatttattgtttgtattataaacaattcaattgcactcttttaattattttaaaatgtacmattaaattattgactatagttaccctgttatgctatcaaatagcagatcttattcattctattttttttaatccattaaccatccccactccccacaacagccccccactaccttcccaacctctggtaaccattcctctaatctctatgtccatgagtttaaatattttgatttttagtgagaacatgtgatgtttgtctttctgtgcctggcttatttcacttaacatcatgatctcaagttccatattcttatgaatttttggattccagtgagggtgtgatgatagtaaagacttatttttattttcttttttactgccaactttcttatgcccttgttcttaaatgatcattattaatagttcatgatttttgttgaaagaatagagtgg

SEQ ID NO: 397668 - DNA, 602 bp, Homo sapiens
tttttgtttactttttttgttttaatttatttttgagggtccttagtaggtgtatatatttatgggggggtacataaaatgttttgatacaggcgtacaatgtgaaataagtacatcatggagaatagggtatccatcccctcaagcatttattgtttgtattataaacaattcaattgcactcttttaattattttaaaatgtaccattaaattattgactatagttaccctgttatgctatcaaatagcagatcttattcattctattttttttaatccattaaccatccccactccccacaacagccccccactaccttcccaacctctggtaaccattcctctaatctctatgtccatgagtttaaatattttgatttttagtgagaacatgtgatgtttgtctttctgtgcctggcttatttcacttaacatcatgatctcaagttccatattcttatgaatttttggattccagtgagggtgtgatgatagtaaagacttatttttattttcttttttactgccaactttcttatgcccttgttcktaaatgatcattattaatagttcatgatttttgttgaaagaatagagtgg

SEQ ID NO: 397669 - DNA, 570 bp, Homo sapiens
tcaattgctatgaaggttgtggtttcacttcctggacaattggctacagaggttatgatttggcttcctgagctggttgctgcagactgtgggtctgggttctgttttcacatatagtctagtcacagtccattaaaatattcagtctctttgaaaacatcttagagacaccactgtattatattatataagacagaatgagacagtttaaaaatgaataaatttgataattctcccaatatattaaagatccacaaagtgaatctacaaaacaaggaataaaaacataacaaacaaggaatgaatgaagaggaggatgagagaaaagctgaraaattaaacaaaaatctatttttcctacaatagcctagaggccttacataatctgctctccaatgtcaccctgttaattatataaacatttctcttactactttaacatggcccattccactcctgctccactgggccactggtcttgtgaatttcttttgtgggtttagtatgaagttttagctttagtcgtggatcaggtaaagttttccgtccattcttgggaaccatttgttt

SEQ ID NO: 397670 - DNA, 596 bp, Homo sapiens
tgtcaaaaaatcattactatttctttcctctgaagaattaaagacattaaaagaattctgacatgcraaccaaaagatctcatctaagacctgccattctccagtcatgtaatctttgataagttttttatatatatatataaacttgatttatatatttgaaaaataagaataaaattaatagccctgtaagcactttagaacttgagatgcaaacagctatgtatttcaatgtactttaaaaattataatgtagtgtataaatttgaattatacttattatttattgcttgatatcttgtcacagaattaaaagataaaaataaaatagtcactatttaaacttaactcatatctacatatcaattttgttccaatggggaagcaagttggcagtagaaaagtaatgaagagtagactattcaatgagatgtattcagaaaataataaaaattttcttctttacaccactgcaattgcaatgatttccactctaggatgtttcatcttacaagcaaagtcagcaataggttttttaaaatatttttaatttatgtgggtacatggtaggtagatacattgatagggtacataag

SEQ ID NO: 397671 - DNA, 563 bp, Homo sapiens
catttgtctcatttctcttagagttttttccttcatgttgactttagacagcctgatgacttgatgccttggtgatgacctttttgcaatctatcttcaaggagttctttgaacttcttatatttggatatctaaatctctagcaaggcctgagacgttttcctcaattattccctcaattaaattttccaaattttcgctttctcttttccctcaggaacaccagttattcttatgtttggccattttacatatctcatatttcttggagactttgctcatttcttttgattcctttttctttattttgtctgactgggttaattgaaaagcattttctttggactctgaaattattttttctatttrttctattctattgttgaaactttccgctatattttgtaattccctaattgtgactttcattttcagaaattctgattggtttttatttaagacatctatctcttgacaaaatttttcactgataccctgaattgtgtttcaatttctttacgttggttttcacctttctctggtacctctttgagtagcttaat

SEQ ID NO: 397672 - DNA, 519 bp, Homo sapiens
tcatcttggtttccatccattgctggagggctagtgtgataattgagtgtgttacagaaccctgtttatcgtattaccagaattatttttctggttccttgtattttagttagattacttattctaattattcttgaatttgtttttcatttgattttttaaagtttctttttcccccttaagcatgtggttttaatctttggtacaatgtttgtcctgtcaatagagagtactggcgaaacagtataggaggaagggtcttcttttcctcttccggtttccctcttggtaatatggcatggctgcctgactcacagctkccaggtttctctaattatgatgtgtggtctcagtggggcacatactccagactttcattgacacctaggctagctgttttctgccctccagtcccagcggcagcacctcagcagtcttctctgccatccagtggatcacagccctatccccatcaaagagttgagatctcagcctggtgcagtgatttcagttaccatg

SEQ ID NO: 397673 - DNA, 643 bp, Homo sapiens
tacttcaaataagcagcatttgcatcaaaaatttataacaaaaatattaggaaaaaagcagatgtttttctttaaacattatttgattcagttatttatttttaaaggcattaaactcttctactacttgaaggatacttctccaaatattttggatgggtaaaaagatggtttttaaaaaagagttttatgtttaactgcgcgtaagttttattacaatgaaagtgaattagtctgctacaaaccagttttatagaagtagctttggtggttgagaaataacttattagtgttattaaatttactccttaataacgtattgatatttctaatggaagtactcaatatatactaggttttagctttaaagtatccaagaaatattaaccatgaacagatcataggcactgttgtttttggaaggctactgatgttcttgcattttaatttactagaaactgatcttgaaagagaaataagttattagatatagttcattttgtaacaagcatcaaaattagtcatgatcttgascaattcacaataacagaataatcagttcttcaaaaagagatctccaaactattaacagtttgatgtgaacattatttaaaattggaggtgtgccagttatcaatttttt

SEQ ID NO: 397674 - DNA, 643 bp, Homo sapiens
tacttcaaataagcagcatttgcatcaaaaatttataacaaaaatattaggaaaaaagcagatgtttttctttaaacattatttgattcagttatttatttttaaaggcattaaactcttctactacttgaaggatacttctccaaatattttggatgggtaaaaagatggtttttaaaaaagagttttatgtttaactgcgcgtaagttttattacaatgaaagtgaattagtctgctacaaaccagttttatagaagtagctttggtggttgagaaataacttattagtgttattaaatttactccttaataacgtattgatatttctaatggaagtactcaatatatactaggttttagctttaaagtatccaagaaatattaaccatgaacagatcataggcactgttgtttttggaaggctactgatgttcttgcattttaatttactagaaactgatcttgaaagagaaataagttattagatatagttcattttgtaacaagcatcaaaattagtcatgatcttgaccaattcacaataacagaataatcagttcttcaaaaagagatctccaaactattaacagtttgatktgaacattatttaaaattggaggtgtgccagttatcaatttttt

SEQ ID NO: 397675 - DNA, 595 bp, Homo sapiens
gagccaagtcagagggcagcagccagatgttgaaggacagtataggccatgcttagaagtttgggcttcatcccataaccaggatttgcaaactggcaggcagcagagaatcccttcttggtttggcaagtagaaaattttataagttttaaattagaattttctaggtgaggagggatcggtatccttgaaaagtacacatatatagaaataagtggaagatagatactttacatgagaaaaggcttgatttcagacaagcaaaatatatatatatgccaggagaagtgaggagttaaacatctaataaactccagtaaatatgggaggatgtgagaaatggtcctgttcaagtgtgcagaaaggacagcagagtagccagggaaaatacttyttttcaattagtatttaataaattgaatcttacagataaaattttcaggattaaaaaatacagctgtctaatcccttaaagtcactaatatattggcatcccagtcaaaacaataaataattgataagtaatttaatcaacaataaatatttaggaagtatttgccaaatacagatataactctctaaacttttgggaagt

SEQ ID NO: 397676 - DNA, 593 bp, Homo sapiens
gattttaagcacagaatataaataaatttatattttagaattatgactatggtaatattacagagactagactgtacagggttgaatgagataagaaaatatgaagctatttagggaaaccaatttagacgaaaaatgatgggagcaggaataatacagtggttacgggaattaagagaagaggtaggaaaagcctccaagagcaatttggaggatagattcaaaaagacttattcaatattgggtgtaaccaattaagcagaatggtcaacaatactcctgaggtcttaagtagggagaacatcatggatggtggtaggtattataatgtagaagtgatttatctacatgtatggaacagtgtcaagtaggagtcctttgtctacttgggacacatactgattgtgctgcatrtgagtttgtttgcatttttataagaactttctaacagcaaaatcaagaaaaatcagaagagaaaaatcaagtaaattaatctggtttcattcattcaatcatttattcaacaaataaatttggactgtgcactatttgtcaagcactgtgctagaaattgtgagaagtaaaataaaaga

SEQ ID NO: 397677 - DNA, 574 bp, Homo sapiens
ataaaagttgaaattattttttaaagccttcataaatgttgaaaaagacataaaatttagctaagcaaaacaaaaagagaagatatgtttaggcttacagaagtacatgcacataggttcaggaaaaaaatagaaatgtcttgattgaggattacaagaaagtaagtatgacctgagtaaggaactggagaaggattggcaagaaatagggcttatgaggtaagagttgctagaatatgaaagattcttacagtgtgtcataagcctcttaaagacttattagaagtagaaagttaaagtcacagaagaattcttggcagagaaatgacatagtcacatttgtgatttataaaggtaattcttacaatggtgtgaaaaatagattggataaaaacaggaccagaggcatgggatcctctcaaggcacttttagagaagtctagcagagaagccatagtggtctgaagcaaagtagttgcagtgagaatggaaaggmagggaggaattcaagaagtgttaagaggcaaaatggatagagtcttatctccaatgaaattaaaggctaaacaagagg

SEQ ID NO: 397678 - DNA, 480 bp, Homo sapiens
aactaccttaaaagaggtccttgaaggagtgctaaatatgaaaatgaaaacattactggccaccaaaaaacacacttcagtacatagaacattgatactataaagcaactacataatcaaktcagcatgataaccagctaacaacacaatgacaggatcaaatctgtccacaacaatattaaccttgaatgtaaatgggctaaatacccccagttaagagtggcaggttggataaaaaagcaagacccaaatgcatgctgtctttacgaaacccatttcacatgcaatgacaaccatatgttcaaagtaaagggtgggagagaaatctatcaagccaacagaaaaacaaaaaagcaaggttgctattctaatttcagacaaaacagattttaagttaataacaatcaaataaaaaaagaaaaagaaggtcattaaataatggtgaaggatttaattcaataagaagatctaactattcta

SEQ ID NO: 397679 - DNA, 564 bp, Homo sapiens
aaatgtttacatttccacatcaaaaaattagaaaagactcaaattaacaacctaacatcacacctagaggaactagaataacaagagcaaaccaatcgcaaagctagcagaagacagaaaataaccaaaatccgacctgaactaaaggatactgagttgcaaaagaaccacataaatgaytgaccaatctaggaattggttcattgaaataattaatatgatagacagaccactagctagactaataagaaaattatccaaataaacacaatcagaaatgacaaaggggacattaacatggaccccacagaaataaaaaaatgcctcacagactgttatgtacacctctatgcacacaaactagaaaatctacaagaaatggataaattcctggaatcatacaacttccaagatttaagtaggaagaaattgataccctgagcagaccaataataaattctgaaattaaatcagcaatacaaagcttgcaaagtagaaaaagctcaggagatggattcacagctcaattcaaactgatgagtaaagaagagctggcaccattcc

SEQ ID NO: 397680 - DNA, 598 bp, Homo sapiens
attactcattcatttaacacatttttgtaggaaacaatattatatttcattgtggaatagagtcaaatttccagagttcaaatcacatttcttccactgattagctgggatttcttcccaaattaatrggatttggggcaagttatttaaatgctctgaacctattatttctattccaaaatgtggaataataaataaaaaataaacaatcataggattgttgtatatgtaaaatatgctaataatttgtacaactcttgttttgtgtacaataatgtacatagctatatacatacatgtaagtattttatatgtaatataaaatttagaaagacagtgttcaaaagtgtggactgtggagtcagactagctagctttgaatttagtactgtgacttagctgaatggctttggacatgttatttaactcttctgtgactttatctgtaaatgagataataatactgatgattcatgtgttgttatacagattaaataagttaatctttttagtgtctagaatgtccattacataaaatctttatctctatttgttaaattaaattaatgtttgctattactacttaactaacagcaga

SEQ ID NO: 397681 - DNA, 598 bp, Homo sapiens
attactcattcatttaacacatttttgtaggaaacaatattatatttcattgtggaatagagtcaaatttccagagttcaaatcacatttcttccactgattagctgggatttcttcccaaattaataggatttggggcaagttatttaaatgctctgaacctattatttctattccaaaatgtggaataataaataaaaaataaacaatcataggattgttgtatatgtaaaatatgctaataatttgtacaactcttgttttgtgtrcaataatgtacatagctatatacatacatgtaagtattttatatgtaatataaaatttagaaagacagtgttcaaaagtgtggactgtggagtcagactagctagctttgaatttagtactgtgacttagctgaatggctttggacatgttatttaactcttctgtgactttatctgtaaatgagataataatactgatgattcatgtgttgttatacagattaaataagttaatctttttagtgtctagaatgtccattacataaaatctttatctctatttgttaaattaaattaatgtttgctattactacttaactaacagcaga

SEQ ID NO: 397682 - DNA, 573 bp, Homo sapiens
tgaaatcggcctctggtgccaaaaaggttgggtaccactgcattataggatgtttaacagcatccctggtctctatcctcaaagtgcccgtagagcctccccattcataacaaacaaaaatgtatgttgacattgccaaatgtcctcaggagagtagacagattacccctgatggagaaccactgctttagacaaaataaagtgaaataatctcagctttgaatgacagccaagcaattatatagttcagctctccaagtaacattaattttctcctttataccttcaactgstgttcatatagtcccctctttcaattctatctggctacaagctcactttctcacaatcaaattgtatgctacacattatgtagtagttcttttttgcatttactcctctggagatgaatttattgtagctacttctgctttctttctgctaaatctttttattaccaggggaggagggatataaattatctttttccctaaccaatcatggtatatcgcagctttgagccactctaacattctatcagtagaagatgcttgtaaacaaatactccagatt

SEQ ID NO: 397683 - DNA, 573 bp, Homo sapiens
tgaaatcggcctctggtgccaaaaaggttgggtaccactgcattataggatgtttaacagcatccctggtctctatcctcaaagtgcccgtagagcctccccattcataacaaacaaaaatgtatgttgacattgccaaatgtcctcaggagagtagacagattacccctgatggagaaccactgctttagacaaaataaagtgaaataatctcagctttgaatgacagccaagcaattatatagttcagctctccaagtaacattaattttctcctttataccttcaactggtgttcatatagtcccctctttsaattctatctggctacaagctcactttctcacaatcaaattgtatgctacacattatgtagtagttcttttttgcatttactcctctggagatgaatttattgtagctacttctgctttctttctgctaaatctttttattaccaggggaggagggatataaattatctttttccctaaccaatcatggtatatcgcagctttgagccactctaacattctatcagtagaagatgcttgtaaacaaatactccagatt

SEQ ID NO: 397684 - DNA, 568 bp, Homo sapiens
attaagggatcaaggaaaagtgaaaaacctcttttaataaggtcatcccaccccagtgatgtgtggccttccacagacattgagttatttcacatcccatgctttgcatatacctcatcgcggactccagtttctaatctctcctagttagccttcaagtatatcatagtttaaatcacactttcagaaaaaaaaaamtctttgattctgcccaactaacttccaccaaagtagcactgacccacaacctctttctgatccttttttataatatttacaagatgtgtcataattacccatgtatctcttattctatacaccatctgttaggaatagggcaaatgtctttatatagaaaaaaagctaaccaagttcttggaatatagtaggggctcagtaaatgctcagtgaatgattcaaattgaacataactagttatggttatgttctatttggtggttttcagtatctcatctggatatgatgtggctgtcttagtcaatggctgaggtacctccactcaaaaatgcagaccaactacatgaaattctgacatcaatgacttctt

SEQ ID NO: 397685 - DNA, 570 bp, Homo sapiens
agcttgttgggaactggagcaaaggtgactcactgttttagcaaagagactagaggaattgtgcccctgtcctagagatctgtagaactttgtacttgagagagatgatttagggtatccrgcagaagatatttctaggcagcaaaccattcaagaggtgacttgggtgctgttaaaggcattcagttttataagggaaacatagcataaaagtttggaaaatctgcagcctgacaatgtgatagaaaataaaaacccattttctgaggagaaattcaagccagttgcagaaatttgcataagtaatgaggagccaaatgttaatccccaaacaatggagaaaatgtttccaaggcatgtcagagaccttcatggcagcccttcccatcacaggcctgaacacctaggagaaaatggttttgtgggctgggcctagggtctccatgctgtatgcaagcctagggacttggtgccctgcatcccagctgctccagctgtgactaaaaggggcaaaggtacagctccagctgttgcttcagaaggtgcagacaccaaggcttgacagcttcc

SEQ ID NO: 397686 - DNA, 570 bp, Homo sapiens
agcttgttgggaactggagcaaaggtgactcactgttttagcaaagagactagaggaattgtgcccctgtcctagagatctgtagaactttgtacttgagagagatgatttagggtatccagcagaagatatttctaggcagcaaaccattcaagaggtgacttgggtgctgttaaaggcattcagttttataagggaaacatagcataaaagtttggaaaatytgcagcctgacaatgtgatagaaaataaaaacccattttctgaggagaaattcaagccagttgcagaaatttgcataagtaatgaggagccaaatgttaatccccaaacaatggagaaaatgtttccaaggcatgtcagagaccttcatggcagcccttcccatcacaggcctgaacacctaggagaaaatggttttgtgggctgggcctagggtctccatgctgtatgcaagcctagggacttggtgccctgcatcccagctgctccagctgtgactaaaaggggcaaaggtacagctccagctgttgcttcagaaggtgcagacaccaaggcttgacagcttcc

SEQ ID NO: 397687 - DNA, 570 bp, Homo sapiens
agcttgttgggaactggagcaaaggtgactcactgttttagcaaagagactagaggaattgtgcccctgtcctagagatctgtagaactttgtacttgagagagatgatttagggtatccagcagaagatatttctaggcagcaaaccattcaagaggtgacttgggtgctgttaaaggcattcagttttataagggaaacatagcataaaagtttggaaaatctgcagcctgacaatgtgatagaaaataaaaacccattttctgaggagaaattcaagccagttgcagaaatttgcataagtaatgaggagccaaatgttaatccccaaacaatggagaaaatgtttccaaggcatgtcagagaccttcatggcagcccttcccatcacaggcctgaacacctaggagaaaatggttttgtgggctgggcctagggtctccatgctgtatgcaagcctagggacttggtgccctgcatcccagctgctccagctgtgactaaaaggggcaaargtacagctccagctgttgcttcagaaggtgcagacaccaaggcttgacagcttcc

SEQ ID NO: 397688 - DNA, 471 bp, Homo sapiens
acacacaaacttctctgatttcaaaagggctgattcggtcattgcactccttagccacaaccccctattctaagttgcctgtgcaggttccattaaccccttttccctttgggacctctcatccatttaaggctctgctttcttccagtttctcagtttgtcatctttattcctttctctctctctttaatccagtttagagtccatgtagcttttataatttctaccatatcttgctatactttaaacttccttgcccttttgtctttacacgtatttattttatttaacaaaattccaaacctggttgaactcaactatccactttcactaygtatgcatgcaaatactctttgaaaagattaataggggaaactaataataccataaatcattataaattaataattacctgttatatttggaatctctatattgctcaaaattcttcttatgttcctatggtcaatt

SEQ ID NO: 397689 - DNA, 471 bp, Homo sapiens
acacacaaacttctctgatttcaaaagggctgattcggtcattgcactccttagccacaaccccctattctaagttgcctgtgcaggttccattaaccccttttccctttgggacctctcatccatttaaggctctgctttcttccagtttctcagtttgtcatctttattcctttctctctctctttaatccagtttagagtccatgtagcttttataatttctaccatatcttgctatactttaaacttccttgcccttttgtctttacacgtatttattttatttaacaaaattccaaacctggttgaactcaactatccactttcactacgtatgcatgcaaatactctttgaaaagattaataggggaaaytaataataccataaatcattataaattaataattacctgttatatttggaatctctatattgctcaaaattcttcttatgttcctatggtcaatt

SEQ ID NO: 397690 - DNA, 509 bp, Homo sapiens
ttaagcatttttcatgtacctgttgaccatttgtatgtcttcttttgagaaatgtctattgaaatattttgttcattctctaaattaaattatttgtttggttccttctttgctattgagttgtttgaatttcttgtatattctggttattaatcccttttcagatagatactttacagtattctctctcattctgtagattgtctcttcactacattgatcatttccttcgctttcaagaagctgctttgcttcatgtaagtccatttgtctgttataaatggtgctaggaaaactggatatacacagaatgatgaaactagaaccctatctctcayccttacaaaaatcaaacaaaaatggattagatacttaaaactaagaccagaaagtatgaaactactagaaggaatctttggggaaatgcttcagggcattaatctgtgcaaagattttcttgaatatgacatcaaaaacaaaggtaacgaaagcaaatatagggagtattt

SEQ ID NO: 397691 - DNA, 518 bp, Homo sapiens
gcagacactgagcctcaaacctgctaaaatcgccttgagtgagagtcttatctcctgcagaaaaaaagctgaaattgtggaaaaacagacacaagcacttatcatgtgagtggctgacctgtaacaaaaggtgcaggtacagctttgccaggtgtctactgttaaagtaagggcattgattggatcaggctgaatttattggtttggacccactcaatagggaatctgcatttaatgttgcagcttagggagttaaaaaacatttgaatagtttatttgcttggttagctaaaacatggattaaaagatggcccactgtgagtgagctggaaatgcctgatctctcttggtttaatgtagaggaaggaatccaaaagcttagggaaattgggatgctggagtggattagtcactkagacctactcatcccagctgggagggtccagaagatatacccttaaccaatgctttgctaaatagatttgtaagagcaggacctgcatctttgaagagccctg

SEQ ID NO: 397692 - DNA, 589 bp, Homo sapiens
tgtacaaaggatagttgtattatgttagtcataattaagatcttatcattgtatttatttgaagattatgtgtgctctcaggagatgtgcatgggttcragttgacaaggggtggacttgtgatgattagcactgagtgtcaacttgattggattgaaggatgcaaagtattcatcctgggtgtgtctgtgagagtgttgccaaaggagattaaccgttgagtcagtgggctcaggaaggtagacccacccttaatctgtgtgagcaaaatctaatcagcttccagcatggccagaataaaaagcaagcagaagaatgtgaaaatagcagactggcttatcctcgcagcctacatctttctcctgtgctggatgcttcctgtcctcgaacactggactccaagtttttcagttttggggcttggactggcttctttgctcctcagcttgcagacagcctattgtgggaccttgtgatcatgtgagttaataactccttaatgaccccccttttacatatatatgtatataactatcgtattagttctgtccctctagagaaccctaatacacatgttaaggcacagaac

SEQ ID NO: 397693 - DNA, 589 bp, Homo sapiens
tgtacaaaggatagttgtattatgttagtcataattaagatcttatcattgtatttatttgaagattatgtgtgctctcaggagatgtgcatgggttcgagttgacaasgggtggacttgtgatgattagcactgagtgtcaacttgattggattgaaggatgcaaagtattcatcctgggtgtgtctgtgagagtgttgccaaaggagattaaccgttgagtcagtgggctcaggaaggtagacccacccttaatctgtgtgagcaaaatctaatcagcttccagcatggccagaataaaaagcaagcagaagaatgtgaaaatagcagactggcttatcctcgcagcctacatctttctcctgtgctggatgcttcctgtcctcgaacactggactccaagtttttcagttttggggcttggactggcttctttgctcctcagcttgcagacagcctattgtgggaccttgtgatcatgtgagttaataactccttaatgaccccccttttacatatatatgtatataactatcgtattagttctgtccctctagagaaccctaatacacatgttaaggcacagaac

SEQ ID NO: 397694 - DNA, 589 bp, Homo sapiens
tgtacaaaggatagttgtattatgttagtcataattaagatcttatcattgtatttatttgaagattatgtgtgctctcaggagatgtgcatgggttcgagttgacaaggggtggacttgtgatgattagcactgagtgtcaacttgattggattgaaggatgcaaagtattcatcctgggtgtgtctgtgagagtgttgccaaaggagattaacmgttgagtcagtgggctcaggaaggtagacccacccttaatctgtgtgagcaaaatctaatcagcttccagcatggccagaataaaaagcaagcagaagaatgtgaaaatagcagactggcttatcctcgcagcctacatctttctcctgtgctggatgcttcctgtcctcgaacactggactccaagtttttcagttttggggcttggactggcttctttgctcctcagcttgcagacagcctattgtgggaccttgtgatcatgtgagttaataactccttaatgaccccccttttacatatatatgtatataactatcgtattagttctgtccctctagagaaccctaatacacatgttaaggcacagaac

SEQ ID NO: 397695 - DNA, 589 bp, Homo sapiens
tgtacaaaggatagttgtattatgttagtcataattaagatcttatcattgtatttatttgaagattatgtgtgctctcaggagatgtgcatgggttcgagttgacaaggggtggacttgtgatgattagcactgagtgtcaacttgattggattgaaggatgcaaagtattcatcctgggtgtgtctgtgagagtgttgccaaaggagattaaccgttgagtcagtgggctcaggaaggtagacscacccttaatctgtgtgagcaaaatctaatcagcttccagcatggccagaataaaaagcaagcagaagaatgtgaaaatagcagactggcttatcctcgcagcctacatctttctcctgtgctggatgcttcctgtcctcgaacactggactccaagtttttcagttttggggcttggactggcttctttgctcctcagcttgcagacagcctattgtgggaccttgtgatcatgtgagttaataactccttaatgaccccccttttacatatatatgtatataactatcgtattagttctgtccctctagagaaccctaatacacatgttaaggcacagaac

SEQ ID NO: 397696 - DNA, 476 bp, Homo sapiens
ggactggtttcttgtgtctggatttggtagcctctgtatgttaagctttctatatgattataaaactaatatttcaraaattattttattgttttgtagtctgaagttatgatgctttttcttgtccaattgaagagaaagagggataatttaacttttctctcaataagagtgacacttaaaatttgaaggttaagtttacacatctttgcatgaatcactgctatttaaaatagtcccttctcaatggactaaatgagttaaagagaaggtaagcataaactttacagagcaattacattattcaattgacatcatagttatatagatgtttttaaaattaatggtttaactatatcatgcaataatgcatagaggagagcatatatgtttgtatatagagatcctgccaaatatctaattgtccagaatacaaaaatgtattcaatacaaaaacttaactctagcagagcatc

SEQ ID NO: 397697 - DNA, 476 bp, Homo sapiens
ggactggtttcttgtgtctggatttggtagcctctgtatgttaagctttctatatgattataaaactaatatttcagaaattattttattgttttgtagtctgaagttatgatgctttttcttgtccaattgaagagaaagagggataatttaacttttctctcaataagagtgacacttaaaatttgaaggttaagtttacacatctttgcatgaatcactgctatttaaaatagtcccttctcaatggactaaatgagttaaagagaaggtaagcataaactttacagagcaattacattattcaatkgacatcatagttatatagatgtttttaaaattaatggtttaactatatcatgcaataatgcatagaggagagcatatatgtttgtatatagagatcctgccaaatatctaattgtccagaatacaaaaatgtattcaatacaaaaacttaactctagcagagcatc

SEQ ID NO: 397698 - DNA, 451 bp, Homo sapiens
tatgtgacccaagaaactacacttctcccattgatctttgcaaccctcggatcaggagatcccctcctgagcccatcccctcctgagcccagtcaaccagggccttgggtccaacacacagatctgtgtggagtcttggcagagcagctggtcaggcactgatagggacccaggagctttatgtactcggcctcgggatacctgacaaatgtgacttcaactcaggcaaggcaggagctccatatatactgttaagaagggggatgaatccaggggtytgagcagtgtcagtctgcaggccccacttccacagcacctcacaagataaaacccactggcttggaattccagccagccacccacaacagggcctgcctgagattggatggagctcctgaggtgagaagtgggccaccacctttgttgtttggatgactcagctattccagcc

SEQ ID NO: 397699 - DNA, 451 bp, Homo sapiens
tatgtgacccaagaaactacacttctcccattgatctttgcaaccctcggatcaggagatcccctcctgagcccatcccctcctgagcccagtcaaccagggccttgggtccaacacacagatctgtgtggagtcttggcagagcagctggtcaggcactgatagggacccaggagctttatgtactcggcctcgggatacctgacaaatgtgacttcaactcaggcaaggcaggagctccatatatactgttaagaagggggatgaatccaggggtctgagcagtgtcagtctgcaggccccacttccacagcacctcacaagataaaacccactggcttggaattccagccagccacmcacaacagggcctgcctgagattggatggagctcctgaggtgagaagtgggccaccacctttgttgtttggatgactcagctattccagcc

SEQ ID NO: 397700 - DNA, 641 bp, Homo sapiens
aggtcttacacatttttaataggtttatatttcagtgtttgaggtttttgacattattataaacatttactttctctaacattttacttctgggttgctcatggctcatttatttaaaaataaattaaatattacatttatatttttatatttattattttaatatttattttttatttgtataaattttagaggtacacatgcagttttgttacacagatatgttgtgtagtggtgaagtctgggcttttaatggaactrtcacccaaataatatacattgtacccattaagtaatttctcattcctcacctgttccacactcttacccttccaagtctccagtgtctaacattccacactctacatccatgtgtacacattgtttacctcccacttataagtgaaaaagtaaaaaagatacttaactttaatttctaatttgttttacttaagataatgtcctccagttccatccatgctcctgcaaaagacataatctcgttcttttttatgactgaataatattctattgcatatgcactagatataatatgcatatgcatattgcaaatcatgcactgatggataattaggttgattccatatctttgctattgtgaacagtgttgtgataaatgt

SEQ ID NO: 397701 - DNA, 641 bp, Homo sapiens
aggtcttacacatttttaataggtttatatttcagtgtttgaggtttttgacattattataaacatttactttctctaacattttacttctgggttgctcatggctcatttatttaaaaataaattaaatattacatttatatttttatatttattattttaatatttattttttatttgtataaattttagaggtacacatgcagttttgttacacagatatgttgtgtagtggtgaagtctgggcttttaatggaactatcacccaaataatatacattgtacccattaagtaatttctcattcctcacctgttccacactcttacccttccaagtctccagtgtctaacattccacactctacatccatgtgtacacattgtttacctcccacttataagtgaaaaagtaaaaaagatacttaactttaatttctaatttgttttacttaagataatgtcctccagttccatccatgctcctgcaaaagacataatctcrttcttttttatgactgaataatattctattgcatatgcactagatataatatgcatatgcatattgcaaatcatgcactgatggataattaggttgattccatatctttgctattgtgaacagtgttgtgataaatgt

SEQ ID NO: 397702 - DNA, 595 bp, Homo sapiens
atttcatcaaatgcttttctatatctatgaaaataatgatatagtatttgtactttattacttctatgtgaagtactacattaattgatgtgcaggtgttgaaagtctttgtattcctgtgaaatgttccaatgggtcatcatgtattatctttwtgatgtgttgctggatttggtttttcagcgttttgctgaggatttttgcatccatatttatcagggatattggcctgtagttttcttttcttgttttatccatgtcttgttcaggtatcagggaaatgctagccttgtagagtgatttaggaagatttttctcttcttcaatttcttggaatacgttgagaggaattcgtattagttcttctttaaaagtttgatagaactcagcagtgaaaccatcaagttctgggctgttctttgtcgggagactattactgattcaatcttattactggttattgatcttttctaattttctatttcttcctttttcaatattggtagattatatgtgtctaaaaatttatccacttcctctgggttttccaatttgttggcatatagatgctcataattgtctcaaatgatcattt

SEQ ID NO: 397703 - DNA, 593 bp, Homo sapiens
tctggcaatactctttaaagaataggatagaagataacaggaaccatcatacactgctgccaggaatctaaatagacaaaattatcccaggtaaaatggtattatctagtgaagtataaatttttcctttcacccagtaatttcaagtgagtgtttgtatatgtgtgcatgtgtgtggtgcataaataatagcaggaacaacaaaaagaaacctagaaacatttaaaatttccaacaacagaagtaaggatgaataaactatgatgtgtttatacaatgaaacacgtaaaggagtgaaaactgaacaaattactgccacacatatcaacaaaagcaaatttcaagatcacaagattgagtaaagaaatgtcattgaaatatatagagagtataatttcgtttatagcaatataaaaaagaaaatgaaatcatagatggttctcagtatatatatgtgtgtgtgkgtgtatatacatacatatggtaaaatagtttaaagggatggagaaactttcacaatatttagaataatgataacctgtggcaaggaggcagatacagccagggaaggattaatgagcactcttgaagtc

SEQ ID NO: 397704 - DNA, 436 bp, Homo sapiens
tattattattgaactgagtatttctcctttcaagtctatcaatttttgcttcatattttgatggtacgttattatgtgtataaatgtttataaatagtatctcttcttgctgtattaaaactttgcttaaaatgtgatgtctttctttgtcttttgtaaacttttatgatttcaaatatatttatctcatattattaaaaccactcctgctctttttgggttactacttgcatggaattttcttttcttttttttttattattatacattaagttctggggtacatgggcagaaagtgcagttttgttacataggaaattacatgccatggtggtttgctgcacccatcaacccgtcacctacattacatatttctcctaatattatccctcccctcgcccccyataccccaacacaccctggtgtgtgatgttct

SEQ ID NO: 397705 - DNA, 630 bp, Homo sapiens
aattctcctctctatttgcttttcttgatatattaagaatgattctttgacttctggcctgtgcaatagtttaattttttaatcagggtgaattatagcattctttcctaaataattatcacagggataagagcatacaattttgtggattaaatatgagttacattttgtacatgtttggtgtgagttggcaccctgaaaaattacattgtgatacccaagaggaagttcaataactctggtagtgatttatatttaaattttagtggaaggaaggctgctgttctgttagtttctgtctggccatactgggtaactacagatgacctttgttctaaacatattggcttgtgtcatactaattgttaattatttttaatatcttcttcaaatagaagattgtgaytggattttcctagggagaaattaagatgcagacagaaataggtgaggagtccaaaacaaatcccaatccatattctgctttacattaataaacaggaatgaatgcatagacttgtatggaaatggaagcctgccatctatacaatctgaagtttatgttcatttgaaaggcaatatctactagctctttgaaattaatgtgcctaatatcttaactgtaatctt

SEQ ID NO: 397706 - DNA, 443 bp, Homo sapiens
tcccttaactgattttacctcatttttagagtgtcagtggaagaaagagtaagagatgctctggtcctggtaatcagcttgtacttgtttttatactctctttctccagccagtcttggcatgactttgatgttacccctactgactacagttctcaactgcagctgttgtttgtctaccctagttgtgtgggagcaagaaataaaaggaaaaaaatgagcagaaataaaaagttctctccagacttcctgaccatattccaaattatgaaagttcactctgtctaccctgagctagtgtgttgctttccacaccaggtcacatttgcccttttatcctcaggagtttctcacacttaactgtaattactcaattccacatattttcatttcctcgctggcacyttcagtcttaagctgggagagagacccagcacactgggt

SEQ ID NO: 397707 - DNA, 571 bp, Homo sapiens
tctattttacataaactctggcaagtagaagtgccataaaacctacggagtgctcaaaaggttgtcattatccttgttttctcctcattcttagattatttgtttcccacttttttaaaaaaaggaggaactgagttgtggcctagggtttttgtgtggtgggtggatgtatgctctttgtgggcaggactccacattgcatcaccactgagttgtttccaccctcttgtgtgtctcaatttctctctccagaggtctataatctctgagaggactcaaaatgccaggtgatcagcctttatatgcatttcctggataagcctttttttaattaatttttttttgggatttccctgtagggcagctgcatgtcacagggatcaaccccccagacactcccacgaggcccctggtcacccagggcgacctttcagctgggagaaagatatgcctatttcttttgagctgagaaaactcagtctctcattgacctatgcaaacaacagttcagttgctcatagaaatgtgcacaracaagccaaatggagattaattttgggagaaaaaagcg

SEQ ID NO: 397708 - DNA, 646 bp, Homo sapiens
tagggttgttgtgagtatcaaatatgtagtacatgcatggtgctcaaaacagtggctggcatagggtttaaactttcaatgaatattatttatggtagccagaattgtctttgaaaacagaagtcttatgagaaccaatgaaatgcgataataccagctctcagctaataggtttgtctggcattgttcctgctcacacagtcytatgttgcaaaaggctccatcctgatacctgccctctagatactttgttttggtttatgctatttcatatttatccaagatatttgtaccaggaatactttaggcctcttcctgtctgttctctcagaaatgcccttttttctctatctctataatcgttgcctatttcacttctatccttcctcagttttcagtccaatcactacttttgcagagaagccttccctggcttgtatgactagattgattaaccctattttaccaattgatatatgttatacttcttttaaacattaattcatttgctattaattttttgtgtgattctttgtatgctttctccactagactataaattatttgagtgcaaagttttttttttttgtttgggtggtggttttagttttgcttggtgttagactcatgtcaagcataattatgg

SEQ ID NO: 397709 - DNA, 495 bp, Homo sapiens
agtgtttgaaggcacagttgaaactaagtcaatagtcttctttacccttgaggtttcttctgcaaatgagacagccaggtcagatcctaagtatgatccatgagtactgctcttttatgtattcaagtgaatagaaaacatcaaaacagcccaactctgaaggaaggggaggaggacccacatgaaagayaaggaaagcaggctgtggcaagttgatgcggacaccaggcacatgttcatgtgagaggaagaaacttaacaaaacatgagaaaaaaaatgcagcaatggcttcagaatactgattttgtcctggtgcaagtccccttacatttcattgactcagggtcttcatctgtaaaatgagttctaacattttctaattctacttttagttttatagcttgtgctagagagctcctcttcttatatgcatacataccccagttccttccagagacttttaggcaccttataaagaatgtgaatattaagat

SEQ ID NO: 397710 - DNA, 480 bp, Homo sapiens
gatttcctttcctttggttgtatacccagtggtgggattactgtattgtatggtagttctatttttaactctgaaaaattgccatactgtcttccatggaggttrtactaatttacatccccacaaacagtgtataagcattctctcttccccatatcctcaccaacatattttattgacattttattaatggccattctgaatggtgtgaaaaagtatctcactgtggttttaattggcatttttctgatgattagtgatgttgaacattttttcatgtgattgttggccatttacatgtcttctcttgaaaagtgtctgttcatgtcttttctccatttttaagggggttatttgttgttgttgttgttgttgttgttcttgttactcacatatttgaattccttgtagattctggatatactcttgttggatgcataatttgcaaatattttcttccattctgcagggtgtctgttc

SEQ ID NO: 397711 - DNA, 480 bp, Homo sapiens
gatttcctttcctttggttgtatacccagtggtgggattactgtattgtatggtagttctatttttaactctgaaaaattgccatactgtcttccatggaggttatactaatttacatccccacaaacagtgtataagcattctctcttccccatatcctcaccaacatattttattgacattttattaatggccattctgaatggtgtgaaaaagtatctcactgtggttttaattggcatttttctgatgattagtgatgttgaacattttttcatgtgattgttggccatttacatgtcttctcttgaaaagtgtctgttcatgtcttttctccatttttaagggggttatttgttgttgttgttgttgttgttgttcttgttactcacatatttgaattccttgtagattctggatatactyttgttggatgcataatttgcaaatattttcttccattctgcagggtgtctgttc

SEQ ID NO: 397712 - DNA, 547 bp, Homo sapiens
aaaaataaaaactaatcatcacttctccttattataacaatttagaaaaattattgagagatgtcaaaaacgggggcaatttatcagtgctgaactataggagacaagtattgtccagttctgcccagcatggttaagtcatcagatctactcttgaattgtgtacctggtaccacaatggggagttctgctttcttcgttgcactttactttcctcatttcttctccatgatctgaatttgtttttcatggaaggccttaggwtagtcataatagttaacacttactatgtgcttataatatgccaggcactgagtgaagtattacatcatttaagaaggacaaacaaatctaatttaagtctcacacacccagagaatagtagtgaagcaggtggacttcacattctgccaagatagaacagcctcagtcggtagcacctttacaactaattgaccaaaaataataataataataacaaacaagcattagaaatttctggaaggtgaaaagaggaaggcatgctgtttagggacttatgagcttc

SEQ ID NO: 397713 - DNA, 571 bp, Homo sapiens
acaggagcaaacttagctgactcttgcccaccaagrgagcatttaaaccagccctagccagaggggaattgcggatcccagcggtttgaacttgagttcccacaaaccttgctaccaagacccaaagtgctcttggtctctaagtaaacttgaaaggcagtgtaggccataaggaatgcaattcttagggaagtcctagggctgaactaggtgcaaagacagtggactagggggcaagcgacatactgagacaccagccaagagagtgctagcatcacccctcccctaaccacaggctgcacagctcacacctccaaaagacactctttccttctgcctcaggagaggagagggaagagcaggaggactttatctttcatctaggataccagctcagccacagcaggataggacaccagtcagacttgcaatgccgctcttccaggccttagcccccagacctttctagacacagcctgggccagattctgttgactcaagagcatgggaagtttttccatttgtctttgtcatctacaattactttcattggtgttttacagttttcatt

SEQ ID NO: 397714 - DNA, 583 bp, Homo sapiens
ctcagtgctgtcctgttaaagcagaaacaggagcaaacttagctgactcttgcccaccaagggagcatttaaaccagccctagccagaggggaattgcggatcccagcggtttgaacttgagttcccacaaaccttgctaccaagacccaaagtgctcttggtctctaagtaaacttgaaaggcagtgtaggccataaggaatgcaattcttagggaagtcctagggctgaactaggtgcaaagacagtggactagggggcaagcgacatactgagacaccagccaagagagtgctagcatcacccctcccctaaccacaggctgcacagctcacacctccaaaagacactctttccttctgcctcaggagaggagagggaagagcaggaggactttatctttcatctaggataccagctcagccacagcaggataggacaccagtcagacttgcaatgccgctcttccaggccttagcccccagacctttctagacacagcctgggccagattctgttgaytcaagagcatgggaagtttttccatttgtctttgtcatctacaattactttcattggtgtt

SEQ ID NO: 397715 - DNA, 635 bp, Homo sapiens
tgttttcaggcatcatttgtggctgtaattttgacatttcacaacctagcccttctaagtatatgagctaaatcagaaatttatctactattcactctctcaatggatttcagtattataaagaaaaaaattatctttatgctatgattttctctaagatctcagaaatttcaaagaggggagagcccagtccaggggcctcatttaactgttcagcaagtgtaattttctttgaactggtcatcactttataatcaccagtcagtctgtttgctttgaaaaagctgactgttccagagataattaccagcccagggttattctacagccctttctcagtcacaatttcattgaacaggctaatttgtttcttaggtattctgcttgtatttcagaatggaatgtgtctccatttttatgtttaaagtcccaatatttgagaacaatttagagaaataggctgtggagcctgagaatgagtatagaatttattttttaaaaagcctacttatccrtaacatttatagagaccatttgctttaattttggggcaggtgttactatgagtttgaacagtttgctttcacatccagtgtctgctgtgcattagctgtgtggtctgtgcatgggttagt

SEQ ID NO: 397716 - DNA, 578 bp, Homo sapiens
acttattactgttacagctataacatataactgtgtaataggctataccacttaactttgtgtaagtgcactctataatgttcacacaataatggaatgtcctaatgatgtattctcagaacatactcccatcgttaagcaatgcataactgtcttagcataacgtttatcaaaaactattcaagatgcccagccactgcgataagatttttatgtactttatctcataaactctttacactacctttctgtatctgttttgcagatcagaaaactgaggctatatgcagctaaatgagtaggtagtcgatttaaatttctaccaagtctgcctgattccaaactatatttcactgttatagctaaaawgtatctactgcccattttgcgccaaacgctgttctaaatatatttagaatatatatatatatatatatatatatatatatatatatatatgtatatgtgaattaactttttggtctcttataattaatgatttggtgtagttactattattatgaccctaatgtatgaataaagagaacaaggcacaaagaagacaagtagcattctta

SEQ ID NO: 397717 - DNA, 634 bp, Homo sapiens
tattatttgttctagtacattgatctgtatctgtctctttctagtaccaatcaactttgattactatagccttgtagtaagtttggaaataggagaaatgaggtcttcaactcttttctttttactcaacattcttttagctatacagaatcccwtgaaatttcatattaattttagagtgaatatgtttttttctgtaagaaccttgttgagatttttataggtttaacattgaatctgtagatcgctttgggtagtgttgatgttttcacaatattatatatttcagtccataagcacagggtttgataccatttactggtggttcttttcatttctttcagcaatttcctttttttttttttttcagtttttagtctataagccatttgctttttgattgtttttttttttctgaagtattttttttttagtgctatagtaagtagaattattcttgttcttttcttttctttttcttaaattttattttattttgagttccggggtacatgtgcagagaataccagtttgttacataagtaaatgtatgccatggcagttagctgcagctatcaacccatcaccttggtattaagccccacatgcattagctatttatcctgatgctctc

SEQ ID NO: 397718 - DNA, 622 bp, Homo sapiens
cactctggccttttgagttttcagcatttttctattgattctttctcatcttcatgagtttgtctagtttcaatctttgaggctgctgacctttggataaggtatttatggggactttttcattgatgctgttattgctttctgtttgttttcctttcaatagcctgatccctcttctgtagggctgctgctgttttttgggtgttcacttcagactctattcatctgggtccctctggcacctggagatgtcacctgaggaagctggaaaatagcaaagatgggtacctcttcctttctctgggatctctgaccttgaggggcactgacttgatcccagaaggaatgctcctacatatggtgtctggtgacccctttttgggkaatctcacccagtttgggggcatgggaatcaggatccatttatcaaagtactttggctaacccataggtggagggggtgtgctacactaggggtaaacccacttgtctgggctgcccggattcttcagagctagtaggggaaagactaagtctgctggtccacagagatcacagccatccctcccgctagggattcaggcccagggagatctgagttctgtccccagtcttctggctg

SEQ ID NO: 397719 - DNA, 622 bp, Homo sapiens
cactctggccttttgagttttcagcatttttctattgattctttctcatcttcatgagtttgtctagtttcaatctttgaggctgctgacctttggataaggtatttatggggactttttcattgatgctgttattgctttctgtttgttttcctttcaatagcctgatccctcttctgtagggctgctgctgttttttgggtgttcacttcagactctattcatctgggtccctctggcacctggagatgtcacctgaggaagctggaaaatagcaaagatgggtacctcttcctttctctgggatctctgaccttgaggggcactgacttgatcccagaaggaatgctcctacatatggtgtctggtgacccctttttgggtwatctcacccagtttgggggcatgggaatcaggatccatttatcaaagtactttggctaacccataggtggagggggtgtgctacactaggggtaaacccacttgtctgggctgcccggattcttcagagctagtaggggaaagactaagtctgctggtccacagagatcacagccatccctcccgctagggattcaggcccagggagatctgagttctgtccccagtcttctggctg

SEQ ID NO: 397720 - DNA, 460 bp, Homo sapiens
tttcttatttttgtctccactgccctggacatttccattaactctgacttataagacatcaactgctttcctccaggcttaaattttcctataacctaggaatatttgggcagtggttccattctggaaacctaatgggtgcataaaatgcactctgagttcctttaaccaatttctgagatataaagcaatctaggagtaggggtcgataggccgaaggacagggacttggccttagtgatggcctctgaagtgctcaggagaattactggctcatgctaggctcttaatgaatcatgaatatggtcaccagcagaactgagatagtatctaatacttgacmagaaaggaagggggatgttcagaggcaagcagagcaaatgttagcaggatgctggagctccacatcacagctgcaccatttcatctctaggtaaatgactgtggaaccaacacttgg

SEQ ID NO: 397721 - DNA, 625 bp, Homo sapiens
gtgatgtcccccacagagaagcttccttgtttacagtagagccattgatatttcaataagaatttcattgaatctacagattgctttgggcaatatggtcattttcatgatactgattcttccaacccataaacatgggatatgttttcatgtatttgtgttgtctctgatttatttcacagtgtttttttatttctcttcaaagtttctttacccttggttaagtatatttttagatattttctttttttgcagctgttgtgaaaggaataaagttttgattttattctcagcttggtcaatgttgttgtatagaagtgasactgatttttgtatgttgattttgtaacctgagacttttctgaattcatatgcctgtttttgagaagaggaatttgaagagtgccggtatgtgatgtccccatagacagagaagctaccttgtttacagtagagccaggcctggagtggctgactccagatttcagtctggatctctttctattaaccaggtttcactaaagataggctttgggccaaacctgaccactccagttgtttgcatagtggctatttcttttctcatgagtagtcagtagtaatgaggatagtaactttatggcat

SEQ ID NO: 397722 - DNA, 536 bp, Homo sapiens
aaaatatataaagaactaatacaactctacagagagaaaataattcgattaagaaggaagggacttgaataggcatttcttaaaagaagacatacaagtggctaagagatatataaaaaaaatgctcaacatttctaataattagaaagatgtaaattaaaacacaaggtgataaccttatagctgctagaatggctaatattaaaaagtcaaaagataacaagtgttggtgaggatgtggagaaaagggaacccatgtaccctgttggtgctaatggaaattagcatagccattttggaagacagtaggaaggttcctctaaaaactaaaaacagaactatcattatgatccagcaatcccrtatctgagtttgtacctgaaggatttgaaaccactatgtcaaagaaatatttgcactcccatgtttattgcagcagtagtcacaatagccaagttatggaatgaacgtaggtgtgcatcagcaatgaataagtaaagaaaatattatatacatatacaatagaatattatttg

SEQ ID NO: 397723 - DNA, 573 bp, Homo sapiens
aaggaaggggccattcaagggactttttgctactcttgagaaactttatgtttgagaaagaagacattgaatacttttatccatggatttacatactaagactagcattttagaaagataaaaatgcaaatgtcaagaaaaaatatatattagagaaaggaaaatgcaaatgaacatgtggagaaaatgaccacctctctaagtttaaaacctgmaaaatgataatatatagattttgccaacttgtacatggagtacaatttttaaacatacatggaaatgatgcatgctaacttcagaagcaagctatggaaaagatgagaggaaaattgcaattgagagagtatgggagaggacttcaactgcatacttctttaaaataaaaatctgaattatatatgacaaaataaaaatctgtgttatagctgcctggtattatttctaataatcatatgtttgaaatcatttgccatttgttgttgttgttgtttgtcttatagaagtcacagaaagtggattgagcttagagctggaacagtgaaacttaaagtagaacaatcaagtaggaggcaa

SEQ ID NO: 397724 - DNA, 623 bp, Homo sapiens
ttcctactaatgtgcttcagtgtaattcaatgggttggtttatatccactcctacagctcattgtgatgttagtctactctatttttattattctggtaactttttaaacaatctgtcatatggtttgagctgtgccccaccaaatctcatgtcaaattctaatccccagtattggaggtggggcctggtagaaggtgattggatcatggggacagagttttcatgaatagtttagtgccatccccttttggtactctatagtgagtgaggtctcatgagatctggttgcttaaaagtgtgtggcacctcccccattctctgtttgtattcctgccatgtgagacgcctgctccctctttgccttccaccatgcgtaaaagctccctgacgcctcctcagaagcagatgctgctatgccttctgtacagtctgcagaatcttgagccaattaaatatcctttctttatgaattacctttytttataaatagcctttcttcataaatctcatatatttctttacagcagtgagagaacagagaaatacagtctatatcccttcatatccgtggaaggaataagtatttgagtgagaaagacaaagtcagaccatgtcacaaaga

SEQ ID NO: 397725 - DNA, 623 bp, Homo sapiens
ttcctactaatgtgcttcagtgtaattcaatgggttggtttatatccactcctacagctcattgtgatgttagtctactctatttttattattctggtaactttttaaacaatctgtcatatggtttgagctgtgccccaccaaatctcatgtcaaattctaatccccagtattggaggtggggcctggtagaaggtgattggatcatggggacagagttttcatgaatagtttagtgccatccccttttggtactctatagtgagtgaggtctcatgagatctggttgcttaaaagtgtgtggcacctcccccattctctgtttgtattcctgccatgtgagacgcctgctccctctttgccttccaccatgcgtaaaagctccctgacgcctcctcagaagcagatgctgctatgccttctgtacagtctgcagaatcttgagccaattaaatatcctttctttatgaattacctttctttataaatagcctttcttcataaatctcatatatttctttacagcagtgagagaacagakaaatacagtctatatcccttcatatccgtggaaggaataagtatttgagtgagaaagacaaagtcagaccatgtcacaaaga

SEQ ID NO: 397726 - DNA, 623 bp, Homo sapiens
ttcctactaatgtgcttcagtgtaattcaatgggttggtttatatccactcctacagctcattgtgatgttagtctactctatttttattattctggtaactttttaaacaatctgtcatatggtttgagctgtgccccaccaaatctcatgtcaaattctaatccccagtattggaggtggggcctggtagaaggtgattggatcatggggacagagttttcatgaatagtttagtgccatccccttttggtactctatagtgagtgaggtctcatgagatctggttgcttaaaagtgtgtggcacctcccccattctctgtttgtattcctgccatgtgagacgcctgctccctctttgccttccaccatgcgtaaaagctccctgacgcctcctcagaagcagatgctgctatgccttctgtacagtctgcagaatcttgagccaattaaatatcctttctttatgaattacctttctttataaatagcctttcttcataaatctcatatatttctttacagcagtgagagaacagagaaatacagtctatatcccttcatatccrtggaaggaataagtatttgagtgagaaagacaaagtcagaccatgtcacaaaga

SEQ ID NO: 397727 - DNA, 564 bp, Homo sapiens
cttacttgttaatttgtgttttgctgccctgataaacaatcagggctatatctcaccagaagataagagatctatctgatgtggcaggtggtaaaatagcatggccaaaggaacagtaagactgtcaaattyggatttgaaaggtgagttgttatttagagattgtataagcagttcactgaaagaatgtgccgcttcactgcaaggttttgcctttcatcgtgtgtgtgtgtgtgtgtgtgtgtgagagagagagagtgtgtgtgtgtgtgtgtgtgtgtgtgtatttaaacttgctaccaggtttgtacagttttctattttgttcatttgccatatcattataaacagaacagctacttcagattgtgggaggaagattactagactaatgaaaaaagggaaaaaaataaaaaagatatcttattttataagcatgtgttttcacatgctgaattgttaacaaaagagaataataaaacattttaatcttaccaaaatgctatcctttggaacaatatgctattattttcaaataaaaaagagtgcatactcttgaatgaa

SEQ ID NO: 397728 - DNA, 487 bp, Homo sapiens
cggccacagcgtccaggatcatggctcaatccggaagacaatcttacttgttaatttgtgttttgctgccctgataaacaatcagggctatatctcaccagaagataagagatctatctgatgtggcaggtggtaaaatagcatggccaaaggaacagtaagactgtcaaattcggatttgaaaggtgagttgttatttagagattgtataagcagttcactgaaagaatgtgccgcttcactgcaaggttttgcctttcatcgwgtgtgtgtgtgtgtgtgtgtgtgagagagagagagtgtgtgtgtgtgtgtgtgtgtgtgtgtatttaaacttgctaccaggtttgtacagttttctattttgttcatttgccatatcattataaacagaacagctacttcagattgtgggaggaagattactagactaatgaaaaaagggaaaaaaataaaaaagatatcttattttataagcatgtgtttt

SEQ ID NO: 397729 - DNA, 564 bp, Homo sapiens
cttacttgttaatttgtgttttgctgccctgataaacaatcagggctatatctcaccagaagataagagatctatctgatgtggcaggtggtaaaatagcatggccaaaggaacagtaagactgtcaaattcggatttgaaaggtgagttgttatttagagattgtataagcagttcactgaaagaatgtgccgcttcactgcaaggttttgcctttcatcgtgtgtgtgtgtgtgtgtgtgtgtgagagagagwgagtgtgtgtgtgtgtgtgtgtgtgtgtgtatttaaacttgctaccaggtttgtacagttttctattttgttcatttgccatatcattataaacagaacagctacttcagattgtgggaggaagattactagactaatgaaaaaagggaaaaaaataaaaaagatatcttattttataagcatgtgttttcacatgctgaattgttaacaaaagagaataataaaacattttaatcttaccaaaatgctatcctttggaacaatatgctattattttcaaataaaaaagagtgcatactcttgaatgaa

SEQ ID NO: 397730 - DNA, 564 bp, Homo sapiens
cttacttgttaatttgtgttttgctgccctgataaacaatcagggctatatctcaccagaagataagagatctatctgatgtggcaggtggtaaaatagcatggccaaaggaacagtaagactgtcaaattcggatttgaaaggtgagttgttatttagagattgtataagcagttcactgaaagaatgtgccgcttcactgcaaggttttgcctttcatcgtgtgtgtgtgtgtgtgtgtgtgtgagagagagagwgtgtgtgtgtgtgtgtgtgtgtgtgtgtatttaaacttgctaccaggtttgtacagttttctattttgttcatttgccatatcattataaacagaacagctacttcagattgtgggaggaagattactagactaatgaaaaaagggaaaaaaataaaaaagatatcttattttataagcatgtgttttcacatgctgaattgttaacaaaagagaataataaaacattttaatcttaccaaaatgctatcctttggaacaatatgctattattttcaaataaaaaagagtgcatactcttgaatgaa

SEQ ID NO: 397731 - DNA, 572 bp, Homo sapiens
gcatcttttaagaatatttttctatctttcttttattgtggagcggcctgtcaagacccgcwcatagaaaggtgcacgttggaagagattttccattgtcacttggaaaatttactgggttactgaagaggatagttttaaattatgtcacttgattcctataacaaccttataggtgtggacttactactcctgttttaaatataaagtgtctgaggtgcagagaaattaacaatcttgcccaaagtcaaatgaatgtctaactcataagtcaaggggtgcttctgtgttactcagcatgaggcaaattggtgttgggtagaggtaccctgtttttcacagcaatagcttgaatgagaatgccgtgccatgagggctttctgagatactgaaaatggttccttttaaatgctagacataaatcttcgctaccaggtggtgctttgtaagtgtaaagagtgttctctacacccacacatagacgcctagtagcagcaacattgtatttgaagcatgggcccatgcaattgaagcatgtttaagggacagcctataaatgtaggcaccatttt

SEQ ID NO: 397732 - DNA, 475 bp, Homo sapiens
agaaataaacacatataggtgatgaaagaaatcaagggaaaataaaacctccactgagaggtgaaacagagtccagggctgtaaacagaaaacatgggttccagggttccaatccctatcccrttcaaaactctgtaatcataagaagtttacttaacctctgaaagcatagtttgtttagctatgaagtgtagataatagtagaacctactacacgaggtaattgtgagtattggacaagttaatgcaaaggaagtgcctgacctagtccctggtgggagaggtgtgctttgccctcccatttgttttcatcgtgtctccttgcactgtattattattaaatccacagggctaaggtagcacatctctgatgacttatttactttaagtaagtatttaaaatagttttataaaagcaaaaataatgatgttcttgcaaaacatgtaattcacctaaaatatgaaatacaggttt

SEQ ID NO: 397733 - DNA, 593 bp, Homo sapiens
catgcattcagtacagagcaggtggtcagtaaattttgattatgacctttcaggctctttatatttgttaccatgtttaacttttacaggtaagtgttgcattatgcttctctatccccaatttatgtaagggaaaagagaggctcaagagctccaaaaacttccccagggcactgcagttgtaagtgggctgaagccctatgctgttgctaaatgcctggcctttcatttcacatcatttttccctggaaagtgccctgggrtcagggctggcattgtggggaaagtgaccccatctgaatatagagaaaaagttttagggagaattctaaatttattttgcttgatagtgagttaggctatcagacataatcccttttctaaaatcaacctcactaagcagcaaaataaactcgaaaactgaaaaatgattattacagaccttgacaagcaagcattgctaataaaaatgataatgatcttcagaacctaattgtttctgattctgttatggggacacacggagagcatcaccacagacagaagaccactaggctacttctcccctctggtagaggacatgttcctgccag

SEQ ID NO: 397734 - DNA, 593 bp, Homo sapiens
aattgttcactctactggaaaagcacatcatgagcaacaatgctgtactatttaaattgctaataaaatacacctgtttcaagtagcttctattgctgttgctttcattatgattctatgtacagatgcatgtatttgtttctctctgtcttctattatagatctgcctgctaatttacatattgagaagcatgttatttcattatgaattactttcrttaagtttcccctttatacaattattagtgcaatattttaaaaatattgtattgatgaatcagactatctataaatttcatttcaaaatagtaaaggtgcattatgaagcattgattataaaaggatgtgttggttattataggattctgagccactgggctaagctctcagttacctacatggattctttaacttttaccttctccagtgttccaaaccaaaagaaaaaaaaaggcaaatgtggacttacatcttccccttgactggtacagtccttatttgttttattctaaatggaaagtataggcttttagtactgacaaagctgtaatccacgtaattcagtctaaacgtattgtgacagttaaaataac

SEQ ID NO: 397735 - DNA, 606 bp, Homo sapiens
tcttgaggcgcttcagggagatggtggtaacacaagctgtgggagggtgatggaggagatgtatggtgaataaatgttgtcttattatacagataaagcatctctcaggtaataaaagttgtcttggagcagcactcagaacaacaggtgattgtctatctgggcatggtatcaaacttcatcyttatctcctgggatcccagttaattttccttggttaatagaatccctggggaagagattcatgacaaatgggttaattttgcaggatctgttgttaggcagctaagcggagctcagagaaagattctgcttatatctgatcttccccaagtgcccttggttcaaagatatcagtatatactccaaagtggtatatttgggggtggcatttcctgaactccacttttaaccagcacagttcccagggccagaaagaatcttaatattggcaatgtaactacacaaagcccatgcatatgatgccatgcctaaattactagacagtcataaatagtttttgaatggtaaatgaggaaataactatgcatgcaagacataccattaatccctttacctttgatgaattattttacttaagttgca

SEQ ID NO: 397736 - DNA, 606 bp, Homo sapiens
tcttgaggcgcttcagggagatggtggtaacacaagctgtgggagggtgatggaggagatgtatggtgaataaatgttgtcttattatacagataaagcatctctcaggtaataaaagttgtcttggagcagcactcagaacaacaggtgattgtctatctgggcatggtatcaaacttcatccttatctcctgggatcccagttaattttccttggttaatagaatccctggggaagagattcatgacaaatgggttaattttgcaggatctgttgttaggcagctaagcggagctcagagaaagattctgcttatatctgatcttccccaagtgcccttggttcaaagatatcagtatatactccaaagtggtatatttgggggtggcatttcytgaactccacttttaaccagcacagttcccagggccagaaagaatcttaatattggcaatgtaactacacaaagcccatgcatatgatgccatgcctaaattactagacagtcataaatagtttttgaatggtaaatgaggaaataactatgcatgcaagacataccattaatccctttacctttgatgaattattttacttaagttgca

SEQ ID NO: 397737 - DNA, 476 bp, Homo sapiens
tcaggtaataaaagttgtcttggagcagcactcagaacaacaggtgattgtctatctgggcatggtatcaaacttcatccttatctcctgggatcccagttaattttccttggttaatagaatccctggggaagagattcatgacaaatgggttaattttgcaggatctgttgttaggcagctaagcggagctcagagaaagattctgcttatatctgatcttccccaagtgcccttggttcaaagatatcagtatatactccaaagtggtatatttgggggtggcatttcctgaactccacttttaaccagcacagttcccagggccagaaagaatcttaatattggcaatgtaactacacwaagcccatgcatatgatgccatgcctaaattactagacagtcataaatagtttttgaatggtaaatgaggaaataactatgcatgcaagacataccattaatccctttacctt

SEQ ID NO: 397738 - DNA, 606 bp, Homo sapiens
tcttgaggcgcttcagggagatggtggtaacacaagctgtgggagggtgatggaggagatgtatggtgaataaatgttgtcttattatacagataaagcatctctcaggtaataaaagttgtcttggagcagcactcagaacaacaggtgattgtctatctgggcatggtatcaaacttcatccttatctcctgggatcccagttaattttccttggttaatagaatccctggggaagagattcatgacaaatgggttaattttgcaggatctgttgttaggcagctaagcggagctcagagaaagattctgcttatatctgatcttccccaagtgcccttggttcaaagatatcagtatatactccaaagtggtatatttgggggtggcatttcctgaactccacttttaaccagcacagttcccagggccagaaagaatcttaatattggcaatgtaactacacaaagcccatgcatatgatgccatgcytaaattactagacagtcataaatagtttttgaatggtaaatgaggaaataactatgcatgcaagacataccattaatccctttacctttgatgaattattttacttaagttgca

SEQ ID NO: 397739 - DNA, 550 bp, Homo sapiens
agattaattattaacattttttgagacagggtctcgttttgtcacccaggctagagtgcagtggcctgatcaaggctcaccacagcctcaaccttcttggctcaagtgatcatctcacctcagcctccagagtagctgaagtacaggtacatgccactacactcagstaatttttgtggtttttttctttttttgtagagacagggtctcactatattgcccaggctggtcttgaactcctgggctcaagtgatcctcccgcctcagcctcccaaagtgctaggattccatatgtgagccactacccctagccaggttaatttatttttgaagaaagaataatatttgtataaactgagtatatccttagttcagtatttgtgaaggctatggcagtctacagtggtgtacagtaatgtcttagaccttcacattcactccccactcactcactgactcatccagagcaacttctactcctgcaagctccattcatggtaagtgctctctacaggtatactgtttcgccttttatacggtatttttactt

SEQ ID NO: 397740 - DNA, 563 bp, Homo sapiens
gaaagcagcagagaaatgtggagaatacaaacttgagatgcaattgtacatatgagggtcataaagtaacatttgggtaaagacccaaggatagtgatggtgccgtgcaggcctgaggaatggtgaaaagaccagtgtctgaaagaaaaggagcaagaaatgaagycagaaaagaaacagggttgggcccaacatcaagtcacacaggctccatgtcttacgaagcctgtggccgttttacaatctttggcttttattcctggtgacgtgagaagccactgtggagttctgagaaaagtatttgacttaaatgccttgacagagcctccctggtggcggatctgagaacagactccagagacaagactggcagcagagaccagttagaaggctactgcaaggaagagatgagcagaggggctggtggcagtggaggtgctaagatgtggcacacacgatactctgaaggtagagctcctgacattattggattggagtatgagaaaaaaatactcaaggatgactgagagatttctgccttgaacaaatggaagatggagctg

SEQ ID NO: 397741 - DNA, 571 bp, Homo sapiens
acagaatgaaaatgccatcaaccctgttatatacagatccacttcacctccctttatttgtttttatctgagaaggagtctcactctgtcgcccaggctggagtgcagtggtgcaatcttggctcactgcaacctccgcctcccggttcaagcgaattctcctgcctcagcctcccgagtagctgggattagggtcacacaccaccatgctcagctaatttttctatttatctcccgttatttggaggtyatttgtcactacaaaactttgaaagagttatgttttgtttcacagaggtttaatcttcattaaacctacccagctctgtgattgttttgggcttctcagtttccatagtgtctggattttctggcatttcttgaatatcatcttctgcaaatccggtatctgggctgctagttggcttatcatcatcttcatgactcagagatggtgaagcatctctcttacttatctccaagacagctgctagaagctcttcttcgctcattctgtcaaatcctgagttttccaattcagacttgtcaggctctattgggcataattttg

SEQ ID NO: 397742 - DNA, 489 bp, Homo sapiens
ttatcctaaatgtaacaagcacttaccaggaggaaatccaccaaaaggttttaagcaaagaaatatgttactactgaatgaggaagtcatatatggttggtttgggttttgggagagtgactaagagcaagaacagaagaaaataatgtaaccagatagaagagtattgagttgatcagcttataacaataacaattaatgcttactggccatttactctgtgccaagtgcttatcatggttatctcacttaatcctcataacaatccaataggctgaaaattactatttccattttacagatgataatacaggaagccaaggcaatcaagtccaggttttttaaggactgtggcttaaactagaaaagtgacagtgaaaatgtacagaaaaagatgcaagacacrtattggaagtaggatagaacttggagagagtagaagtcaagaatgcctcccaagtgtgtagcctgtgtcatgtgccacttaat

SEQ ID NO: 397743 - DNA, 502 bp, Homo sapiens
tctatgaacactaaatgtttaggagttccgtgggagttttatggaagcatgtttggatctatctgtctgtaaaattgcttttacagtgcaagtcaaggtcataacatttcccattctccatgatgtgcttatttcacattgcatgcctatatcaaaacatctaatttactgtataaatatatacacctactatgtacccagaaaaatttaaaaaaaawtttttttaattaaaaagataacatttcccattaaaagtttcattcactctcccctaaacctctcttgcaggcagcagacacgtcccagtctggaaccctggaaggagaagaattcgtacagttctataaggcattgactaaacgtgctgaggtgcaggaactgtttgaaagtttttcagctgatgggcagaagctgactctgctggaatttttggatttcctccaagaggagcagaaggagagagactgcacctctgagcttgctctggaactcattgaccgct

SEQ ID NO: 397744 - DNA, 552 bp, Homo sapiens
gtctacatagtttagactttccaacccagccctacacagtacttacagtttctctaggtcagatgcctggcagagatttcaagggaaggctcatctggggaaggatccccttccaagctcctgggattcttgggaggattcaatttctgtccaggtcaagaygacttcactggtgtgttattcaaagccttttgggaattaataacaatcaataaaaacagactagtaaagaacctttcctaatgcaatgtatgaagccagtgttccctgacaccacagctagacaaagacatttcaagaaaagaaaattacagaccaatgtgaaacaggcaaaaattatcaaggaaatactatcaaaattaactagtaacatataaaaaggagtatacactaggagcaaaactatttatccctgcaatgtaagtctggttaaacatacaaaaacaactggtgttataaactatactaacagaattttttaaaaagactcatggtcacctctaaagacacagaataggcatttgacaaattccaaacccattcatgataaaa

SEQ ID NO: 397745 - DNA, 712 bp, Homo sapiens
agatcattgctagtcacaaacgttcaggaaaacaatcctagcttgtacttcctaataactaattagaagtgtctcttctgcaatttgattgaatcatctccaaggaaaacactgttgtaaaaaatatatgtatataagtatatataattatgtatatatgggtacaattttaaatacatttcattacattgatgtgctctcaaaaataataaacatgcaaactaaactcctaactgttgcttagacaatactatagatacatgtagtcaataacctttctcctgaactgtaatctcaatgaaataaactgatctttaacccaaagaaatgtgaacatcatcagtatgggattatgtttcctttataatggctttaatcaagtgtcactatactgctgagttttaactacaattgcattaaattgcaatttacttaagaatattcaagagtccttaaattttcwaaatataaatacaacctaacttaaaactgattttcaacagaaaatgtttttaccttgtattaaaattattagacacactatgattacccaactgaaacctggttccagttagatatttttctgaatccagatgctagtaacatataatatctctgtacataacatctttacaagatatttaaaatatgacatatttacaatcacttattgtttttgctaccaattgactagtgaaaattcatacaatat

SEQ ID NO: 397746 - DNA, 461 bp, Homo sapiens
cactaacttgtctggagatgcagtcagctttaccttccaaatctcccattaagttatatatttctgcaataaatttcttaatttttaagaattctatttttttgaatatccattttatatcacaccttgttcttgttgtattatcttccctctctgaggaaattaataattacttttttcccacactgyatagactctgtttactttcagttgttttgtttattttttgtttctgtgtttgttattggctgtacctagaatctcgtgattgttggttatctgtttgtgttcaagagcaatacaataaacgtttccagtaagcttcaggttcttaggtaataattgtcaactgtggcttccagacagggcaatcaggtcgagaagttttcccagaaaagctcctcatgacatatccactggtctattcctttgggctgatcatgatcttccaactagagtct

SEQ ID NO: 397747 - DNA, 461 bp, Homo sapiens
cactaacttgtctggagatgcagtcagctttaccttccaaatctcccattaagttatatatttctgcaataaatttcttaatttttaagaattctatttttttgaatatccattttatatcacaccttgttcttgttgtattatcttccctctctgaggaaattaataattacttttttcccacactgtatagactctgtttactttcagttgttttgtttattttttgtttctgtgtttgttattggctgtacctagaatctcrtgattgttggttatctgtttgtgttcaagagcaatacaataaacgtttccagtaagcttcaggttcttaggtaataattgtcaactgtggcttccagacagggcaatcaggtcgagaagttttcccagaaaagctcctcatgacatatccactggtctattcctttgggctgatcatgatcttccaactagagtct

SEQ ID NO: 397748 - DNA, 461 bp, Homo sapiens
cactaacttgtctggagatgcagtcagctttaccttccaaatctcccattaagttatatatttctgcaataaatttcttaatttttaagaattctatttttttgaatatccattttatatcacaccttgttcttgttgtattatcttccctctctgaggaaattaataattacttttttcccacactgtatagactctgtttactttcagttgttttgtttattttttgtttctgtgtttgttattggctgtacctagaatctcgtgattgttkgttatctgtttgtgttcaagagcaatacaataaacgtttccagtaagcttcaggttcttaggtaataattgtcaactgtggcttccagacagggcaatcaggtcgagaagttttcccagaaaagctcctcatgacatatccactggtctattcctttgggctgatcatgatcttccaactagagtct

SEQ ID NO: 397749 - DNA, 379 bp, Homo sapiens
tcaagccaggcacatctaaaccagcaggtaaatttgttgcactcactcatcatccctcagcagcagaacgcaatggagagaaagctccaaactcccagctcatctctagggggagaaagaaaagtctagaccatatgtccaacattttgactttttgggagggcactagcacctatctaccctgaatctaagtgctaacaggaaaggatgccagattgcatgcctgctgataaagccacagtttggactgtcactcaatcaccatcrttcctcctgtgactcagtataacaagattgagagaatacaattcctgattcccccacagaagtgaaagagaatactgcaacacacattcagtgttcagacttcaggggagtt

SEQ ID NO: 397750 - DNA, 379 bp, Homo sapiens
tcaagccaggcacatctaaaccagcaggtaaatttgttgcactcactcatcatccctcagcagcagaacgcaatggagagaaagctccaaactcccagctcatctctagggggagaaagaaaagtctagaccatatgtccaacattttgactttttgggagggcactagcacctatctaccctgaatctaagtgctaacaggaaaggatgccagattgcatgcctgctgataaagccacagtttggactgtcactcaatcaccatcattcctcctgtgactcagtataacaagwttgagagaatacaattcctgattcccccacagaagtgaaagagaatactgcaacacacattcagtgttcagacttcaggggagtt

SEQ ID NO: 397751 - DNA, 608 bp, Homo sapiens
gcaggtgactttactagagaattctgccaacatttaaggaagaattaatgccaatatttctcaaacattcctaaaaaattaaagaagaaagaacaattctaaactctttttgtgaagctagcataaccctaatatcaaagccagacaatggcgctacaagaaaaaaaattaaatattcctaatgaatgtagatgcaaaatcctcaacaaatamcagcaaattgaattcaacagcactataaaatatcatccaccataattatgatggattttttcctggaatgcaagaagggttcaacatgtgaaaatcaatataatatgcttaattaacaaaacaattaaaataacgtgttcatctccgtagatggagaaagagcatttgatgaaattcaacattctctcgttagaaaaacacttgaaaaaataggaatagaaggaaattattccaacagaataaaggccatatgtaaaaacccacagctcacatcatattaatgaagaaaaactgaaatcccttcttctaagatcaggatcaggaacaaggcaaggatgcctttatgaagtacataaagtcctagctaaaataattcagcaagaaaaagatacaaa

SEQ ID NO: 397752 - DNA, 412 bp, Homo sapiens
caaaaattagctggccatggttatgggcaactgtaattccagctgctcgggaggctgaggtaggagaatcacttgaacccaggaggaagaggttgcagtgagccaagaccacaccgctgcactcccaccttggttacagagcaagactccatctcaaaaagcaagaatgaaagaaagaaagaaagaaagaaagaaagaaagaaagaaagaaagaaagaaagaaagaaagaaagaaagmaagaaagcccggaaataaacccacatgcatatagtcaaatgatctttgacgagggtgctaaaactatacaatggagaaaggacaatttcttcaacaaatattgttgggaaaactggatatccatatgcaaaagaatgaaagtgaacccttatcttacactgttcacaaatgtta

SEQ ID NO: 397753 - DNA, 569 bp, Homo sapiens
taattttgtatctttagtagagatggagtttcaccatgttggtcagcctggtctcgaactcccaaagtcagatgatccactcgcctcagcctacaaaagtgctgggattacaggcatgagccacagcacctgcccaaattgctgcaatcttaatggatgaagagttccttatgatgaatgagcaaagacagtggtttcttgggatggaatctactcctggtgaagatgctgtgaacattgtggaaagaacaacaaaggacttagaatattccataaacttagttgatagaggagtggcagggtttgagargattagttccagttttgatataaattctactgtgggtaaaatgctaccaaactgtacagcatgctacagtgaaatcttttgtgaaagcaagagtcagtcaatgcggcaaacttcattgtcatgttattttaagaaattgccacaccctctccagtcctcagcaaccatcaccctgatcagtcagtagctatcaacactgaggcaagaccatccaccagtaaaatgatgatgacttgctgaaggcccagatgatggttag

SEQ ID NO: 397754 - DNA, 569 bp, Homo sapiens
taattttgtatctttagtagagatggagtttcaccatgttggtcagcctggtctcgaactcccaaagtcagatgatccactcgcctcagcctacaaaagtgctgggattacaggcatgagccacagcacctgcccaaattgctgcaatcttaatggatgaagagttccttatgatgaatgagcaaagacagtggtttcttgggatggaatctactcctggtgaagatgctgtgaacattgtggaaagaacaacaaaggacttagaatattccataaacttagttgatagaggagtggcagggtttgagaggattagttccagttttgatataaattctactgtgggtaaaatgctaccaaactgtacagcatgctacagtgaaatcttttgtgaaagcaagagtcagtcaatgcggcaaacttcattgtcatgttattttaagaaattgccacaccctctccagtcctcagcaaccatcaccctgatsagtcagtagctatcaacactgaggcaagaccatccaccagtaaaatgatgatgacttgctgaaggcccagatgatggttag

SEQ ID NO: 397755 - DNA, 608 bp, Homo sapiens
aaatattttgttctgcccccttactactctggttaactccactttggggctattgaatataggaataacttttggtgttccctcatgaatgtattgactragaaggaaacatgcagtttaggattaagtgataaacccttagagtttacaatgtaggatgttgactgaaagtttacctagagaagtgcactccaggaattatgaattacgtgaacatgcagttatcatctcaaatatacaggccattcattcactgaacactaacttctgataagggtagagttttgggtaattgcttcatgatgtggtctgagaatctggcttgttttcatgacagcttcttgaaaaggcaagctactagtaaatctggtggtttaatatactgcggaaaatcataccttcctttctactggggagtttggtgctttgcttcactgtactttgtcatctgtgcatgtggcatcatattagtacagttttgtttactgcctgcttttttaaaattctgacctttataatttaattgatcctgatttgccacatttaaatgcatcccttccatctagatctactagtgtctcacttatggactgcctggtttttttttt

SEQ ID NO: 397756 - DNA, 608 bp, Homo sapiens
aaatattttgttctgcccccttactactctggttaactccactttggggctattgaatataggaataacttttggtgttccctcatgaatgtattgactgagaaggaaacatgcagtttaggattaagtgataaacccttagagtttacaatgtaggatgttgactgaaagtttacctagagawgtgcactccaggaattatgaattacgtgaacatgcagttatcatctcaaatatacaggccattcattcactgaacactaacttctgataagggtagagttttgggtaattgcttcatgatgtggtctgagaatctggcttgttttcatgacagcttcttgaaaaggcaagctactagtaaatctggtggtttaatatactgcggaaaatcataccttcctttctactggggagtttggtgctttgcttcactgtactttgtcatctgtgcatgtggcatcatattagtacagttttgtttactgcctgcttttttaaaattctgacctttataatttaattgatcctgatttgccacatttaaatgcatcccttccatctagatctactagtgtctcacttatggactgcctggtttttttttt

SEQ ID NO: 397757 - DNA, 608 bp, Homo sapiens
aaatattttgttctgcccccttactactctggttaactccactttggggctattgaatataggaataacttttggtgttccctcatgaatgtattgactgagaaggaaacatgcagtttaggattaagtgataaacccttagagtttacaatgtaggatgttgactgaaagtttacctagagaagtgcactccaggaattatgaattacgtgaacatgcagttatcatctcaaatatacagrccattcattcactgaacactaacttctgataagggtagagttttgggtaattgcttcatgatgtggtctgagaatctggcttgttttcatgacagcttcttgaaaaggcaagctactagtaaatctggtggtttaatatactgcggaaaatcataccttcctttctactggggagtttggtgctttgcttcactgtactttgtcatctgtgcatgtggcatcatattagtacagttttgtttactgcctgcttttttaaaattctgacctttataatttaattgatcctgatttgccacatttaaatgcatcccttccatctagatctactagtgtctcacttatggactgcctggtttttttttt

SEQ ID NO: 397758 - DNA, 567 bp, Homo sapiens
ataaatggaacataggctgggctcagtggctcatgcctgttatcccagcactttaggacaccgaggtggccagatcacgaggtcaggtgttcaagaccagcctgaccaacatggtgaaaccctgtctcaactaaaaatacaaaaattagctgggagtggtgctgcatgcctgtaatcccagctactcaggaggctgaggmagcagaatcacttgaatctgggaggtggaggttgcagtgagccaagagagtcagactccagctcaaaaataaataaataaataaataaatagaaatgaaacacagaattactatatcagtcagcaagtccacttctgggtttaaacccacaaaaattgaaagcagggacttcaacagatatttgcaaattcatgtgcacagcagcattattcatgatagccaaaaggtggaagcattcattgacagaggaatggataaacaaaatgtggtacagatatacagtggaatattacttagccttaaaaagggacattctgtggaatgtggtttgaaaaccacttctgttaggtgttgtgtaaatgtacaa

SEQ ID NO: 397759 - DNA, 608 bp, Homo sapiens
aaatattttgttctgcccccttactactctggttaactccactttggggctattgaatataggaataacttttggtgttccctcatgaatgtattgactgagaaggaaacatgcagtttaggattaagtgataaacccttagagtttacaatgtaggatgttgactgaaagtttacctagagaagtgcactccaggaattatgaattacgtgaacatgcagttatcatctcaaatatacaggccattcattcactgaacactaacttctgataagggtagagttttgggtamttgcttcatgatgtggtctgagaatctggcttgttttcatgacagcttcttgaaaaggcaagctactagtaaatctggtggtttaatatactgcggaaaatcataccttcctttctactggggagtttggtgctttgcttcactgtactttgtcatctgtgcatgtggcatcatattagtacagttttgtttactgcctgcttttttaaaattctgacctttataatttaattgatcctgatttgccacatttaaatgcatcccttccatctagatctactagtgtctcacttatggactgcctggtttttttttt

SEQ ID NO: 397760 - DNA, 633 bp, Homo sapiens
tagccaaaaggtggaagcattcattgacagaggaatggataaacaaaatgtggtacagatatacagtggaatattacttagccttaaaaagggacattctgtggaatgtggtttgaaaaccacttctgttaggtgttgtgtaaatgtacaaaatccaaaccaggttaataacccatataaaatttaacttataacattaagaccctgataaatttcactctctgcttcatagcaaataatttgttttgaatgcagatatatattttttaagtagaagactgtgcactaaactatagtccttaaaccaaaatcctatgtataaaaccacatattttctattgatttgcayttttaaatgtaaaaatggattcacatttctatttgtaaaatgccagactcaaaatacttttactgctatgattccatgttttatttactgaggaggcaaaccatactaacggagaatcagggttttgtgaccatccattttaaatataattgcctctactatttctaagtccctgttctgcaacgctgtggctcttttaaatttgagaaacagttttgatgggccccgtatggagtgttattatttcccagaggtactattaatagtttatggccagaccatcc

SEQ ID NO: 397761 - DNA, 555 bp, Homo sapiens
tggttttgttccagtctaaaggccagcaggcttaagatccaggaaaacctgatgtttcagtttaagtccaaaggcaagataaaagccagtgtctcagtttgaaggcagtcaagcaggaaraactctcttctacttaaaggagggtcagcagttttgttcagttcagagattcaactaattggaggaggcccgcccacattagagagggcaatctgctttactctgtctaccaattcaaataaatgttaatttcacccccaaacaccctcacagacagaactagaagggtgctgatcaaatatcttgggtaccccatcgcccagacataaaattaaccatcatagcagggaataagcaatatgtttatttcaattcatgagacactttatctttgagggttattctttcaaatctaagaactgttggtgatgtcctatttgggtaatgtgtgtgtgaacacgtgtgtatgtacatatatatatatatttttttgacaggaaacacaagatctctggatcagagaaaagaccatttattattcattgagcatcttaa

SEQ ID NO: 397762 - DNA, 517 bp, Homo sapiens
tctttcaaatctaagaactgttggtgatgtcctatttgggtaatgtgtgtgtgaacacgtgtgtatgtacatatatatatatatttttttgacaggaaacacaagatctctggatcagagaaaagaccatttattattcaytgagcatcttaaccttgtccccacagggcaactcaataagggcctgatgtttccttgcacatgcaccacatgcacacatatacacaggataggaaccctcaaattatgaagctcagagcttctatagactgctgacatatctgctcattcttccctccagagaggtagaaaaacctttactctggaatgtaaacaaatcttctctggggaggagaatcatttctacttttccttcaccatcctagaatataatcacaggtgccacaggagataaatccataaatctctccagagcaatatattgtctctaacttctctaacttaatgtttgcctttcaaacattaaatgaatttttttaaattatttcctcacagt

SEQ ID NO: 397763 - DNA, 608 bp, Homo sapiens
tctctgttgtgtaacactaatatggaaagtaagtaggtaactctttaaaatgctgtcaactatacggccactagaactttggccactatcggaactaatgccactacaactggctggaaaagacttagacattggcagcaaggtaacttaccagagggttgccatcaccttgcagaacatacagtgcagatgaaaaaatggttatacaagtcttatatcctgttccaaaggccaaattattaagaaacaaataagatacaatgatgacttcaaaggctaaagaattctgaaattatatgggatgccatttgaagacaggtttgttctgtccaatttgatagacactagccagtagcatgttggctactgggcaattgaaatgcagctagtccaaattgaaatgatctgcaagtgtaaaatatataccagatttgaagactcagcatggaaaaagaatgtaaaatatctcgataatttaaaaatattgagtgtgtgttgaaatattttttatatattggtttaaataaaatatattagtacatgtattttacctgtttcttgtagttttttwaatgtgactactataaaatttaaattgcatatgtagc

SEQ ID NO: 397764 - DNA, 520 bp, Homo sapiens
acccatgaggaaagaagtcatttgatcttcttctcaagtggcttgtgtttcctggaggctgcrggagccacaggagtttacacttttgctaggactcatcatctgacatagttcaatagtagctctaagaccttcctttgtttctggatgttaataacccaaatcagtagagaaaagagatgttggctacaatgttaccttttcttatgcatttgtttacccaaataatgtagaacatcactttataaggaagagttttttattttttacaatatcctgttacactggaaatcactgcagttttctccatctttgtatcaccagctccaacacactgagtacatgataagtgctccataaatgtcagtgaccaccatcttattactggacataaaggaaaaatgagtgcaatttaaatgtttgttgtaaaatgtagtttgcattcctaaaaaaaaacaataaacaaaaaactttcttttaaagtggggaagtcaaccttccacttaaaaccaaacccaac

SEQ ID NO: 397765 - DNA, 520 bp, Homo sapiens
acccatgaggaaagaagtcatttgatcttcttctcaagtggcttgtgtttcctggaggctgcgggagccacaggagtttacacttttgctaggactcatcatctgacatagttcaatagtagctctaagaccttcctttgtttctggatgttaataacccaaatcagtagagaaaagagatgttggctacaatgttaccttttcttatgcatttgtttacccaaataatgtagaacatcactttataaggaagagttttttattttttacaatatcctgttacactggaaatcactgcmgttttctccatctttgtatcaccagctccaacacactgagtacatgataagtgctccataaatgtcagtgaccaccatcttattactggacataaaggaaaaatgagtgcaatttaaatgtttgttgtaaaatgtagtttgcattcctaaaaaaaaacaataaacaaaaaactttcttttaaagtggggaagtcaaccttccacttaaaaccaaacccaac

SEQ ID NO: 397766 - DNA, 506 bp, Homo sapiens
gtgtggttgctttcagcttcaagtaacagaagacccaacatataaaggcttaaagaatgaagggatttgttctctcatcacaagaagtcccaaataagggagtctagagttgattaactcagcaactcaatcacattgtcaaagacccacgttctccccatgtttatactctttcatctgaatttctagagactgaaaaaagacagtgtaacagttagggttctctgagaaacagaactagaaggacataygtatcattccaagtaattggcttaggtgatttggggagctggcaagtccaaaatccagtgtgagttggcaggctggaaactctcaggcaggagctgatgctgcagtcttgaggcaaagtttctcattcctcatggaggcttcatttttgctcttaaagccattcaaactgattggatgaagcccacccagattatgaaagataaccctctctacttaaagtcaagtgcttgtagatggtaagcacatctataaaa

SEQ ID NO: 397767 - DNA, 616 bp, Homo sapiens
tagttattaagtgccatttggacaagatttgagaaagagcctgatgacctaggagtagaactgagactaagaaaggcaatctaggaccagagggggtatgtgagtggttcagacaacmgtgggatcacagatgaagagaggagtgagaaaaactcaagaagcaactgtgtatgggaatgtgtgaggctgtttttgcattgctataaagaaatatctgaggctgggcatgatggctcatgcctggaatcccagcaatttgggaggccaaggtaggcagatcacttgaggtcaggagtttgggaccagcctggccaacatggcaaaaccccatctctactaaaaatacaaaaattagccgggtgtggtggtgtgcacctgtaatccccgctactcagggggctgaggcaggagaatctcttgaacctcagaggcagaggttgcagtgagcctagatcactgcactccagcctgggagacagagcaagactcagtctcaacaacaacaacaacaacaacaacaacaacaaaaaccagaaaagaaatacctgagaccaggtaatttataaagaaaagaggtttgactggctcacagtcctgcaggctttacagaaagcat

SEQ ID NO: 397768 - DNA, 571 bp, Homo sapiens
tgctctacttattgggtgggagggaggggcaaagaagcaggccgggcaacaaatgcaaatgcagaggaagagttcctgcaagtgtctttctgttgatgctcacagagccttgggagagaagttgtgagatgaagtgcgtactatatgcactttccaagttggaacctatataaatcctaggccttcagttgtacagcaaataggaagcatttgtttgtctatacccttaatggatattgctctgcatttgtgcattcaaataaagcaagcatgcatactattactgtaccaatgactacagtaactggtcacatatttatgtacacacagtgtgatgctrtttcctttgtgatctttttgtgatgactgtgtaaggaattttcttctaaagaattaaatcctttatgtgtaattttagattgaaatacagtaatttatctgcaaaagacttttgcatatgtgatagctgctgctccaaaataagtaacagatgcatagggctccattgaaacacaaatatgtacaaggcattctttaaatatgaaaatttgccattataaaagatgtgtca

SEQ ID NO: 397769 - DNA, 565 bp, Homo sapiens
attttataagcaataaatccttaatctcttaaggaggcagcatgctatgttggaataggaatcagagagcagtttgtcctctaactagctctgtaatactgggtaaatgtggcaggcackcttgattgtctacccaaaagccattcttctaggctaatagctcccctcattagtcaactccccacagcttgacaaattctcaccccagggatggaatcatgattggtccaagctagtcaaaggacacccctgtcctttgtcaatgaatgggttagtggtgatcatgtgatccagtctggccaatgagatgagaggggaagacagctggggcctttcttcaaaaaacttctttgcactgtaaaaagatcccagcactttggcaggctgaggtgggatcacttgagctcaggagttccagactatactgggcaacatggcgaaacctcatctctacaaaaaaatacaaaaatttgccaggcatggcggcatgcacctgtagtcccagctactcatgaggctgaagtaggaggattgcttgagcccaggaggtggaggctacggtgag

SEQ ID NO: 397770 - DNA, 531 bp, Homo sapiens
ctgcatagtagtataaagcaacaacaatcagttataattatctctcatagttctggggtcagccaggtggttctccttgggagtctctcatgtagctgctattggacagtagccctggactcatctcaatggcttccttaccacatgtcagattcttgggctggaacaactaaggttccttgggtgtctctctctgtcttcatatggccgttccaagtagtctctgcagcaggacagcttcaggacagccagacttcttatatggatgctcaaagttccaaaaggtcaaatttcaagatagtgagccagatggaagccatatcaccttttacaacatagctttggaaatgtcctaccactattccaccatgaccctgttacttgaggcatttacaaaggcycacatagtttcaaaagtagggggcatagattctagctcccagtgtgggaatgtcaaggttcaggaagagtatgtaggatgtaaaatattgttgcagccaatttgggaaaatacaatctgccacagaaaag

SEQ ID NO: 397771 - DNA, 578 bp, Homo sapiens
tagattcctgaaccctattcatacacaatctttagtgtatgaagcccaggaatctgcattttaaaagcttcctttgtgaagctcttccttacatttgtgttctcaaactttaatgtaaatctgggatggggcacgtggtcctgcatttttaaggtgctccccagtgatgttgctggttagtgcatcacactttagtagcaagaccttaaacaagacctcaaactgtggtccctggaccagcagcatgagcatctcctggaaacttgttataaatgcagattcttaggctctactgcacacctactgttatggtttttctgtgtccccacccaaatctcatattgaattgtagctcccataattcgtgtgccaygggagggacctggtgggaggtaattgaatcatggggatggtttttcccatgttgttctcatgatagtgaataagtctcatgagatctgacagttttataaaggggagttcccctgaacatgtcctcttgcctgctgccatgtaatacctggtttcagtatgtctttattagcagcatgagaatggactaatacacctagtgaatc

SEQ ID NO: 397772 - DNA, 568 bp, Homo sapiens
tcttttctccctccctggatcaaaagtaaccttttatttcaagaccgtgtgcccaccatttagtcccatttcatgttttctcaaatgaaatggtcttcgagaccttatgtcttgattttgatagacacattttgctgatagagtaagaattttcagttgtctagctgagggacaggggattagwgtgcccctctatctttcttcagtactattacagcagtgccagtaataaatgaagaatgctgcctctctctaactgcctcttgctgacaattttcaggaactgattaaatatttgcatgatgtggctatagtcctgaataatgcctgagaggtcagtgaggagcaaccctaccctctccctttctatctatggctgctgaagagacattcagcattaagctcagtagcactgtaatacaaagatacaatatctttcctctaatgactcattactatctattttaaaatgtaagtacatttatataaaatgataatgtcatggtgtatctaagcttttcacattattgctttcttttctcttgccatgtagccatgcattatttct

SEQ ID NO: 397773 - DNA, 539 bp, Homo sapiens
aacatttcccaacaataaagtcattgatcaggtaccaggataacaggattaaccaaactctccagcttgcctcagttattcatgtattaatatataggacagraactcccaagaatgctactatttctcagatgaagtctcaataatgctgccttaaggagatgatgaagatgaatacataataatcattcacatttacatgccatgttagaatttttatttacttctttgtgttatatagaaaattaccaaccatgactgagaaggtggtcaatctgggttgcctatattatgaagtttgtattatgaatgagtttgaaaagatttgaggcctgtaatatttaaacatttaaaaacacaatagatgtgaatacattgttttatttcattgtaatcttcaagtgattccatgaataagaagagtaattatttttattctcattttatagatgaggaaaatgaattccacagggcataggtgatttggcaaatgctgtataagtgaatgaggcaataggaaactgaactttcctttgttg

SEQ ID NO: 397774 - DNA, 539 bp, Homo sapiens
aacatttcccaacaataaagtcattgatcaggtaccaggataacaggattaaccaaactctccagcttgcctcagttattcatgtattaatatataggacagaaactcccaagaatgctactatttctcagatgaagtctcaataatgctgccttaaggagatgatgaagatgaatacataataatcattcacatttacatgccatgttagaatttttatttacttctttgtgttatatagaaaattaccaaccaygactgagaaggtggtcaatctgggttgcctatattatgaagtttgtattatgaatgagtttgaaaagatttgaggcctgtaatatttaaacatttaaaaacacaatagatgtgaatacattgttttatttcattgtaatcttcaagtgattccatgaataagaagagtaattatttttattctcattttatagatgaggaaaatgaattccacagggcataggtgatttggcaaatgctgtataagtgaatgaggcaataggaaactgaactttcctttgttg

SEQ ID NO: 397775 - DNA, 539 bp, Homo sapiens
aacatttcccaacaataaagtcattgatcaggtaccaggataacaggattaaccaaactctccagcttgcctcagttattcatgtattaatatataggacagaaactcccaagaatgctactatttctcagatgaagtctcaataatgctgccttaaggagatgatgaagatgaatacataataatcattcacatttacatgccatgttagaatttttatttacttctttgtgttatatagaaaattaccaaccatgactgagaaggtggtcaatctgggttgcctatattatgaagtttstattatgaatgagtttgaaaagatttgaggcctgtaatatttaaacatttaaaaacacaatagatgtgaatacattgttttatttcattgtaatcttcaagtgattccatgaataagaagagtaattatttttattctcattttatagatgaggaaaatgaattccacagggcataggtgatttggcaaatgctgtataagtgaatgaggcaataggaaactgaactttcctttgttg

SEQ ID NO: 397776 - DNA, 523 bp, Homo sapiens
aaataagactgggggagggaactaggaaatgctttccaaagagtcaatctgagaagaatcttaaagaagtagaagttagcctggcagaggaggaaagggaaagaatggacaattcatgtacaaaggtgtgggggcaagtgagagcacagaagattcaagcaggtaccagtygtattagtctgtttttacactgctgatgaagacatatctgagactgggtaatttgtaaagaaaaagaggtttaatggactcacagttccttgtggctgggaaggtctcacaatcatggtggaaggtgaaagtcacctcttacctggaggcagacaagagaaaatgagaaccaagtgaaagaggtttccccttatccaaccatcagatctcatgagactcattcactatcacaagaacagtatgggggaaactgttcctgtgattcagttatctcccaacaggtccctaccacaacacatgggaataatgggagctacaattcaagatgaaatttgggtgggcacagagccaa

SEQ ID NO: 397777 - DNA, 612 bp, Homo sapiens
cctgcttgttcagaatctgaaggtcagtgagaggtgaaagcttagggtcttctcaagacttttctgaaccttcagccagctctaggtatgtgtgtagtcttttcaattcccctatatataggaaatgttaaaaagtctttatcttctcccgtatctcttttccctatgcatttcttccaagttttttagtctgtctgttgcttgtcctgactccttgctccaggctcctgtggtgaatagctttgtttttggaaacattgcccaagaagcctcctcagccctggggatgctctgcatcaagcaaaacaaaggcaaaccttgtaccttcagagagtcatcaaagargtcgaaacagacaaccacaattatttgacaataatatccaaattgcccccttttgcagtagcaacctgtacctggagtatgtgctaccatcttcatggctgctgctgactggggaggaggggatggtagatgaacaatccaaaatgccatagtactctcttaccacggtgcagcaacttctttcatcaagtttgccctggtggttgtaaacttttaattaaattccggagttctgcgaaggttgattctgacagtttttattagctt

SEQ ID NO: 397778 - DNA, 621 bp, Homo sapiens
aaagctggaaacgtgatgtgactaatcaccagaccagctttttctcctccagaacaaaagaaggtctgggaagatggtatcactcatatcaaatctcacataggaagccctggtgttcactttcccaaaaaaataattgttttgcattctttggatcatctgacaaactgctttctggtgtattratttgctgccacactaaaaaagtaataaatcaatagccagctttgtttagaaagcagggaaaagtagtgctcacttgaggaaccacataagactttagaaaagggattaagctcttgaaataaagaaaaataataataataatgcatttgggaggacctttaatgacccaagaagaaggccaaatagtaagaattggagagaaacttacatataattagtcccagacaagtctcattttgcacaggttggtattgcaggcaagatgctaagaatccttagctgtactggagtagtggtccatgaaccagataagatggtcagacatggccacttgggtgagaatggtaagttcatgaaagctcatggcataaagaaagaagtagctttgccatcagagaggcgtgattctgcattccagctttgttacatactaac

SEQ ID NO: 397779 - DNA, 286 bp, Homo sapiens
gatgagaactcacggacacatagaagggaacaacacacactgaggcctattggagggtggagggtgggaggagggagaggatcagtaaaaagaacaataatgggtacaaagcttaatagctgggtgctgaaataatttgtataataaactctcatgacakaagtttacttatataacaaacctgcacatgtacccctgaatgtaaaatacaagttaaagaaaattaggaagaaataaatactttcttaggcaaataaaaactgagaatttatcattagtggaactg

SEQ ID NO: 397780 - DNA, 585 bp, Homo sapiens
acttctgtcatttgaagtcaccaaatttgtgataattttttattccagttctaggaactcataaaatggccattccatttttgttgttattgtatatgaaattaacaaattcccaaaatttttttatatagaactcagagaacaattaaaacaaggtagagttgtccatstgtaggtttagagcccaaatcagacagtttttgcatcaaaacgaagcctgactcttgttttaagtccatgatacactccaacttatcaaaaaaaaaaatagctttccctcactaattgcccaaactgtggattcagtccagctaatttcccacttattgatccaggacaactttatcaggctgagttccaaattcagaccaattcctcttttcactgtgcctttcttaataaattttaatgacagcaatcccagctccccctgaaaatttaactccataccaagtatggtaacccaaaaagatttgaacaattaaatgtcccatttccagcctttgtctatccaaatccagtgtctcatgaccagttctttttgcagattggaaatctaataatcatctgttttttaacacaaat

SEQ ID NO: 397781 - DNA, 631 bp, Homo sapiens
ttccatttttgttgttattgtatatgaaattaacaaattcccaaaatttttttatatagaactcagagaacaattaaaacaaggtagagttgtccatctgtaggtttagagcccaaatcagacagtttttgcatcaaaacgaagcctgactcttgttttaagtccatgatacactccaacttatcaaaaaaaaaaatagctttccctcactaattgcccaaactgtggattcagtccagctaatttcccacttattgatccaggacaactttatcaggcygagttccaaattcagaccaattcctcttttcactgtgcctttcttaataaattttaatgacagcaatcccagctccccctgaaaatttaactccataccaagtatggtaacccaaaaagatttgaacaattaaatgtcccatttccagcctttgtctatccaaatccagtgtctcatgaccagttctttttgcagattggaaatctaataatcatctgttttttaacacaaatttaaagttattcccatgatatcatagtcacattctgatatgcattattgcgtgagaaagagggagagtctcagatgacaccttcaatgatttatagtcacatagaagtatgtcagagg

SEQ ID NO: 397782 - DNA, 509 bp, Homo sapiens
ggttcaattctacttgaaagaaacaccctccttttcttcatgtaggagtctcaaattgggccagagtaaggtttaatttagtgataatttggtctaactgttcaaaccaatctttgtgtctaaggtagtatgacactttgaatggtcaggtgtcagtcaccrcaggaactcagtcaccatgtgaaacaggggtacaattagccccacctcagtatgtggagtcttttgtcaaaaattggggagaatggatgtccattatactctatgacttgatacatacttttagagttttggcctaaagcaatagtttagacaccttataccttaaatgaaggttaaagaaaaatctgctttcctaaagaaactgcctttgcctgatattcctttctttgactgtaggaaaattttaaaaatgattttgtccaaaatgtattctgctaaaatcagttcttctgaattaaagggaattttttttttcacgagaatgagtttttctcactgactaacgt

SEQ ID NO: 397783 - DNA, 428 bp, Homo sapiens
ccaataatttatttttctgtcacactggggtattgtttccaatggcagtttcagtgccagggactctgaggcatgggcaaatggtgcagtttctccagaggacaccttagtgatacataccaaatacatatcaaagccctcaaaatggtttttcttttgatctgctcgttctacagctccatctctaagcatgcatcctaagcaaataatcaaaaacacttgtgtgcaaggatgacrtgctcttcaacgtcagacttgtttgctatcaattcacacccacctttgccattctgaggaaactgctcaggcttttcacaaggctgggaaactgttcccaggctctcttgtcctcaggtttctggatagtttttgctgtagaaggcactggcagaaaagcagatcagaggaagggagaacccaagatactt

SEQ ID NO: 397784 - DNA, 575 bp, Homo sapiens
atgttgggtcttaggaggcagagagcatatgggggataaagaaaggatacagatttttgaaacaacactcaggttttaaaattgtataaaaggtacaatgacagtgttgttacaagacaaagaaaactaatgttgtggaacagattttacagggggaaggagttgacttgtgctgaaacttgttcactatgaagtgatgtcaaagttaagttgagatatatggttgaaggcatggggtcaggaytgcaaaatgagatttgggacctaagggacagtggtgggttgaatagtggcccaaaggtgtttgcatcctaatcccctgaatcttcgaatgtcaccttatgtggcaacgggaatttgcagatgtgattaactcaaggatcttgaaatgagaagattatcttgcattatcctagtgggcctgatgaatcacaggcattcttataaaagtaatgacagagatcagagggaggtaagaggtaaaatgatggaggcaggagttgagtgatgtgaggtaggggtcatgagccaaggaatgcgggcaacctccagaaggaaccagcccagctgacacc

SEQ ID NO: 397785 - DNA, 447 bp, Homo sapiens
aattttaataattgtttcatttaacccaatagatccaaagtattatcatctcaacatgagaacagttcatacaaatcattaatgaaacattttactttctttttgttactaaatcttcaacatccaatgtgcattttatacttacagtacatctcaagtcgractagccatatttcaagcatccagtagccacacgtgggtagtggccaccatattggagagaacaggtttacaggacaagtacaactacaccaaacagagaactgtttggtttcagggctcaagggttctccctgaaggatcttctcttccaaacacagcagtacctgtttctgaacttctggggctcttcatagtgttgcaggaggcccccaaatctatagcctatgcatcaggacattgcagtacattatttactcagtggaggtcaaacagaatagaaaatca

SEQ ID NO: 397786 - DNA, 571 bp, Homo sapiens
cttgctttctgccgacatcacaaattatccaagtgatgctgtggagattaattttaaaagcggcacttcagacaacagtgaaaaatggtaatgtagctattttctcattggcatatccgaatataagcatcacagaatccctttctattcaatctcgttggtagtacagaggttcaaagtagtctacaaattcactgagaaactgagaaccaaataatttatagatgactataamtactataagttcctttgatctctcaactttaaggcaaagcaggaagaaaaacaataaaggaagggaaaggcattttgcatccattaatcaagtggctgctttacaatataacacttaactccttcatagtcactgttcaattaagtctcaaatctttcctaccaaagcctgatgatttcaagacaactgagattacaacagtggatgtagagcatctttagcaccatagcactgagcaaaaaaaacacccaagagaaatgagaattaaaaagccccagggccataatctaaagaagctaccaaagagcacaaaacatacaagttgaccccaaacaa

SEQ ID NO: 397787 - DNA, 472 bp, Homo sapiens
gctgctctgtggtggcttcagtcccttatggcaacctcagtcactagagactctcaccaaggcagagcagttggtatcacaggtctcacaggctcctaccccttctacatcttgctgccttagacgaccttccagaagactttttgctaccctccctttgtcgttattccattcctggcaggggcggggggkacggggtgccattccattggggttaaatcactcccttccttactctgaaagcacaaaacttccatttcatctggccttccagacaattcatcttaattatctctagagcaggagttgtaatttctattgagcaaacaggacagcagatgagtgaagctagctaggattaaaacagacaagttaggaactacataccctgtctacacgggcagcacccccccaacgataccaggtctttggattcaacaagaagccaagaatacacagtttaagggaattt

SEQ ID NO: 397788 - DNA, 573 bp, Homo sapiens
tgacaaagataaaaatagaatgaggtctatttggcttccaaatctgtattcattttagtgtacagatatgcctcaggatttcttatgtatactgcatactagaatttttgttaaattatttgcatgcccgttatcattgaacatttgtagggatctaaatagtgggcattctcaccccccatttgtcagataaggaagtggccctttcttgtacaccgtcttatgccctagatgcattacgcttaaagaagacattgctttgtagagaagggtgacctcacactgataaaatcaatgtggacaagtatggaaatgcaggcacaggataaygcaatatattgctagaaacaggagaacccagtgaccaattccattaactccatcttcatccttccacagtgtgactaattaagatatggtctggtactgaatagctcaactccttttaagagtagcttgtgaaactgtggaaactatctaaaaatatataactaatgtgagacaaataatgttgttacaagggaattgataaccaaggataatgggaaaagcaagaaatagcaagttggagct

SEQ ID NO: 397789 - DNA, 530 bp, Homo sapiens
ctcctaatctccctgttttaaggttcagaaccttctatctgcaaagttccttttgccatgtcacgtaacatattcatgggttccagggactaagggccaagctgaggagtttgaatgtgagacagaagataatagagaagcactgtagattattgaacagaggaaatgtacgtaggtacacaggacaggctgatgatatgacattccttcaaaccagtattatttaactattcgtgtaacatttatgtagaggagagactgagcaagacatagggaacagatgaggagaactactggtggctgtttttgacctctctttattagacccaagcaaattgactcaatcttgaaaactccactcagtagaagaagattcctatagttgattgtactyaccctccttcagggcagtttagccaacacccttgtgggagggtggctcatcctccccctgacttatgtggtttatccaagtattccctctataaacatttgcggaggaattctaaaataaatatcctttatctcac

SEQ ID NO: 397790 - DNA, 558 bp, Homo sapiens
attgtgtgaatacatgtatgtgtgtcttggcattcttggaatataaaaactacagagcaccataaaaaagatggaacagcctgctgaaatcacaaatgaaaatctgacatttgtaatctggaatgattgcctttatcatactcttagttatcctatgctggctccawgcaaactgtgtacatgactatctttcccattagacagtggttccttgagggggattactaagttttattcatatttgtacttctggtatatgaacacattatatttattcaatgcttctttcttcaaagaatagattttcagtgaggcccagaactgaagtgctttcagtagccaggtagataatatacatgtatgaaaagttctgttgtatgaacaactggaatggaatagtgagaactagtgtcaacatagagagggtatgccatatccattattatgtaataaaccactccaaaatttagtagaataaataattactttaataaatgatgattctgtggattgttggtttgttttgggctcagatgggtggttcttccattggtatgc

SEQ ID NO: 397791 - DNA, 427 bp, Homo sapiens
atattccttgattttgatttaaataaaagtaagccacatataatttcttatggttcattatatttaagtcaaaagagtaatttgtgtgttagcttttacaattatatatgaatatcatgttttgacactatgctacattttacatgatgtatttatattgagaccagaatattttactcaactgagggagaaacagaaaagtgttcaatcataaatacagtacaaacattgcatttgcacctgaaatgtgtagtaaaatatgattatttataaagttaatattaaatattagatgcattttagtactgccarctaggtttatgttgattgattttccaaatttactcctttcttactttaaattgtgttttttaaatgtttaatgactaatcttacttagcatcaaatatatgtcattttataccca

SEQ ID NO: 397792 - DNA, 582 bp, Homo sapiens
aataaataaaagagcataacaactctccctctctctgtcttactcctcctctctctttcttgcttcccctctcctcccccttcaccttctgccacgattgtaagcttcctgaggccctcacaagaagcagatgccaacaccacaattcctgtacaatttgcagagagccaattaaacctttcttctttattagttacccagtctcaggtattccttcatagcaatgcaaaaacagactaacacattcgtgatgtattacctttgtaatatattgcctgatcttgcctggtaaacatattatcatttttgcatctacgttcaagagggattttggcctataattttattttttgaaatggtattgtcaggttttcttatgagctttactggccttataagatgttgtggaaagtgcttgcttttgtttcttttgtggaagagtttgtgtgaaattaatatttatttattaaatatyttatggcattcaacaataaaataacctaggtctggagatttcttcatgtaaatgtttttgataaatcaaattaaatataagactatgttctttaatattgtatcaaa

SEQ ID NO: 397793 - DNA, 605 bp, Homo sapiens
agtctcaggtagttctttacaacagcatgagaatgaaccaatacattgttctattagttgctaaaagagttacctaatgtctctatgatggtaaaattatctttttctctgtataattttttaaatatattttgaactgtgtttttaggcacatatgcattcatttttatgttttttgatgtattccattgctgttatgaaatatcttcattatgttttataatgttctatatttaaaagttattgtatctgatataaacatatggaggactagtgtgacttgtgcagaatatcaaaatgattgcatctctgtataatacattgtaccagagaagatttgtctcagtcatacttcatgtatacttctgtctttcctatgaagcgyactacttttaatatttctaattgatggtgattgtgatacatgaactcttcacattagtagctctatactaagcactgcaactgtgttgatctctcttagtagatatcacaaccggtgtggcaactgaacttgaggctaccattatgttaaattgtagaaatatgacattattcatccatcttttgaatgtcgcagaggccaacaggaatcaaacagggat

SEQ ID NO: 397794 - DNA, 605 bp, Homo sapiens
agtctcaggtagttctttacaacagcatgagaatgaaccaatacattgttctattagttgctaaaagagttacctaatgtctctatgatggtaaaattatctttttctctgtataattttttaaatatattttgaactgtgtttttaggcacatatgcattcatttttatgttttttgatgtattccattgctgttatgaaatatcttcattatgttttataatgttctatatttaaaagttattgtatctgatataaacatatggaggactagtgtgacttgtgcagaatatcaaaatgattgcatctctgtataatacattgtaccagagaagatttgtctcagtcatacttcatgtatacttctgtctttcctatgaagcgtactacttttaatatttctaattgatggtgattgtgatacatgaactcttcacattagtagctctatactaagcactgcaactgtgttgatctctcttagtagatatcacaacyggtgtggcaactgaacttgaggctaccattatgttaaattgtagaaatatgacattattcatccatcttttgaatgtcgcagaggccaacaggaatcaaacagggat

SEQ ID NO: 397795 - DNA, 579 bp, Homo sapiens
caattaaaaatgagtatgtaatatgttgattagaaataagtgctgcaaaaaataaggattaaaaatagaaaattgatgacagttatagtaggaagggaaatcagaaaagccctctgtgaggaggtagtatrtaaacaaagacttgaataaagagggacataggtctacacatcagtgatttttcctatataattcaagaataaatcacagattttctgcccgtttactcctaaatatttcattgtacattgcttacaaagaacattcttttacttaatcaaatttatcataatcagaaaatgtgatattgatgtaatactattgtctacattatggtgtatatttgaatttagtgaattgtaacaataatgaccgttacaattgttttttccccaacttaggatctaatctatgatcaggtatttcatttagttgtcatgtctctttattgccctttaatctaaaaaacgttgtactgccttctactatcttcttatccttgtcgttttttaaagagtataggtcagttattttatacaatgtatccaatttttatttatttgctgcttcttcatgatt

SEQ ID NO: 397796 - DNA, 579 bp, Homo sapiens
caattaaaaatgagtatgtaatatgttgattagaaataagtgctgcaaaaaataaggattaaaaatagaaaattgatgacagttatagtaggaagggaaatcagaaaagccctctgtgaggaggtagtatgtaaacaaagacttgaataaagagggacataggtctacacatcagtgatttttcctatataattcaagaataaatcacagattttctrcccgtttactcctaaatatttcattgtacattgcttacaaagaacattcttttacttaatcaaatttatcataatcagaaaatgtgatattgatgtaatactattgtctacattatggtgtatatttgaatttagtgaattgtaacaataatgaccgttacaattgttttttccccaacttaggatctaatctatgatcaggtatttcatttagttgtcatgtctctttattgccctttaatctaaaaaacgttgtactgccttctactatcttcttatccttgtcgttttttaaagagtataggtcagttattttatacaatgtatccaatttttatttatttgctgcttcttcatgatt

SEQ ID NO: 397797 - DNA, 579 bp, Homo sapiens
caattaaaaatgagtatgtaatatgttgattagaaataagtgctgcaaaaaataaggattaaaaatagaaaattgatgacagttatagtaggaagggaaatcagaaaagccctctgtgaggaggtagtatgtaaacaaagacttgaataaagagggacataggtctacacatcagtgatttttcctatataattcaagaataaatcacagattttctgcccgtttactcctaaatatttcattgtrcattgcttacaaagaacattcttttacttaatcaaatttatcataatcagaaaatgtgatattgatgtaatactattgtctacattatggtgtatatttgaatttagtgaattgtaacaataatgaccgttacaattgttttttccccaacttaggatctaatctatgatcaggtatttcatttagttgtcatgtctctttattgccctttaatctaaaaaacgttgtactgccttctactatcttcttatccttgtcgttttttaaagagtataggtcagttattttatacaatgtatccaatttttatttatttgctgcttcttcatgatt

SEQ ID NO: 397798 - DNA, 579 bp, Homo sapiens
caattaaaaatgagtatgtaatatgttgattagaaataagtgctgcaaaaaataaggattaaaaatagaaaattgatgacagttatagtaggaagggaaatcagaaaagccctctgtgaggaggtagtatgtaaacaaagacttgaataaagagggacataggtctacacatcagtgatttttcctatataattcaagaataaatcacagattttctgcccgtttactcctaaatatttcattgtacattgcttacaaagaacattcttttacytaatcaaatttatcataatcagaaaatgtgatattgatgtaatactattgtctacattatggtgtatatttgaatttagtgaattgtaacaataatgaccgttacaattgttttttccccaacttaggatctaatctatgatcaggtatttcatttagttgtcatgtctctttattgccctttaatctaaaaaacgttgtactgccttctactatcttcttatccttgtcgttttttaaagagtataggtcagttattttatacaatgtatccaatttttatttatttgctgcttcttcatgatt

SEQ ID NO: 397799 - DNA, 600 bp, Homo sapiens
cctttttgattttttaattaacaaataaaaattgtatatatttatggtgtgcaacatgatgttttgaaataggtatgcattgtggaacggctaaatcaagctaatttacatacattacttgactttttttttgtagcgagatcacttaaaatctgttatattagcaactttattgtgtaaaatacrttgctattatctacaccaccatgccctgcaatagatctcttgaacttattccttttgtctagctgaaattttgtatcatttgactaacatttccccaaactaccaccccaattcccccagccccaggtaaacaccatttttctactcaatgcttttatgatttcacctttttaagatttcacataaaagtgacatcatgtggtatttgtctttctgtgcttggcatgtttcatttaacacaatgtcctccagaattattcagattttctaattgaacttgtgtcagatttcataacctgaacttgaaaaatggcttttacttaaatcattgactactgtgctatcctatagttgtttaaaatcgttctttcttattttttgatgtttgcaacgatctatagtgttatcctctct

SEQ ID NO: 397800 - DNA, 546 bp, Homo sapiens
tacagatcatcccatcacctagatattaagcccagtctccattagctattctttctgaatactctccctgctcctatcccccaccctcccacaggcccgagtgtgtggtgttccccatcgtgtgtccatgtgtccattattcagctaccacttataagggagaacrtgcagtatttgattttctgttcttataatagtgtgctgaggatactggcttctacctgcattcatgttcctttttaggaaacaacctcattcctctttacggctacctagtatttcatggtgtaccacattttctttatccagtctatgattgatgggcatttgggttgattccatgtctttgctattgtgaatactgctgcaaggaacatatatgtgcatgtatctttataatacaatgatttctattcctttgggtatagacccagtaatggaattgctggatcaaatggtatttctgcctctaggtctttgaggaatcaccacacagtcttccacaatggttgaactaatttacaccccccaagaagagtgtaaaag

SEQ ID NO: 397801 - DNA, 564 bp, Homo sapiens
gaaattatattttattgtctgtgaccaagaataccacaattaaaatgataattttaaagacaggaatctcaaattcatagatgatttctaaactcagattacttgtctccaagctgaaaatgttttaatgatcttaggaaaaaactacggcattccttcagaatatatgcaaaagaacaacaaaatgaaagttatggaaagatgtttgacacatggacatgtctattgatttcaaaattcacttaatagatgccacaaaggcagggaattaacaatcacaaaggagaaaagaaagaaaatatgtaacataaaaaatatcctgagctgagaaaagrtgtgaacttttgaattaaaagtccacactgaatgccaagtgggaataatcattttttagatttccaccaagacaaattcggataaaattttagaattttagaattttaagtaaaaaagggaaactctaaaatcatttgtagggaacataaaatacagaaaatagtgtatatatgtaatttatatgtaaatactatgctattatatatattctctgtatatatcatattt

SEQ ID NO: 397802 - DNA, 558 bp, Homo sapiens
  misc_feature (1)...(558): n = A,T,C or G
nnnnnnnnnnnnnnnnnnnnnnnnnnnnnnnnnnnnnttataataatgataataaaaataaagatttttatatattggtgacttacaatcttctgaaaattgtgctgccttctaattgarcttgtctttcattttcaagcactcaaaattttaggaggtaaaagttcattataatttccatatgagttataggttggtaacttctcaaattcagagaggaagtggcttttgtgagaattgaacttgcctatatcatacaatacatgttgctttataccttatttgatctacatgtgaacatgcttctctaattagtggtaatcctgacagattaaatacaaagactagattcagattgttacaaacctgagggtatggtacattctcaacgactttgcattgatgatccctgcattaatatgtgcttttaaaatgataggaatgtttagaaaaaataaaaaagtttttgcaaaggtcattttttccattaaatgtgttataattgacatgttcattttatagttattcagttcttagggtttaaaaactaataaaggt

SEQ ID NO: 397803 - DNA, 404 bp, Homo sapiens
aagtctttaatacatctggtgttgatttttgtatatgatgagagatagagatccagtttcatttttctacatgtgtttatccagtttttccagcaccrtttattgaatagggtgcctttcccccagtttatttattttttctatgcttccttcaaagacaagttggttgtaagtatctggctttatttctgggttctctattctgttccatttgtctatgtatctacttttataccagaactatgctgctttggttacgataggcttgtagtatcatgcaaagtcgggtaatgtggtgtctccagatttgttcttttcgcttaagactgctttggccattcaggctcttttttcattccacatgaatttgagattttttttctagttctgtgaaaaaaagtgct

SEQ ID NO: 397804 - DNA, 404 bp, Homo sapiens
aagtctttaatacatctggtgttgatttttgtatatgatgagagatagagatccagtttcatttttctacatgtgtttatccagtttttccagcaccatttattgaatagggtgcctttcccccagtttatttattttttctatgcttccttcaaagacaagttggttgtaagtatctggctttatttctgggttctctattctgttccatttgtctatgtatctacttttataccagaactatgctgctttggttacgataggcttgtagtatcatgcaaagtcgggtaatgtggtgtctccagatttgttcttttcgcttaagactgctttggccattcaggctcttttttcattccacrtgaatttgagattttttttctagttctgtgaaaaaaagtgct

SEQ ID NO: 397805 - DNA, 584 bp, Homo sapiens
taagtattgctacactgagtgcccccatcttcctcatctgaaacatgtaaaattaaataaygtcctagatttcttccattttgaagaatttgtaattttataactgaataatcaaaatattataaacataatttatggaaaaatctgtgaagaatttaacatgaaatgctgaatctttgtggggagaggttgaatcaggatcttatgaaagagcaaactttgagtacatttattgaaaaggggtgcattcttgttgggaagcccattgccgaagcaaggagcagatgaccagttctcttgcacagagttctaggacacagtggaagagtaaggtgcggttatcaggtcctgaaggctgactgagaagtgtgcacttgtttcagaaatccatggagttttcaagcaaatgagtggaaaggaatagtgtttattttattttttttccaacactggctctgataaatatgattgattgaagaaggaaaatggtggaagtttgtaaaacaaagcaggctagagataataaagccctaagcacagttattttaataagaactgagaagtggaaaagcaaagagagaaat

SEQ ID NO: 397806 - DNA, 635 bp, Homo sapiens
aatttatagtaaataaattcagatgcttttctcttgttaatctgtcttttgttatgtggcctcagccagtagcctaagatggaaaaaagagaggtatttttcctcccctatagcacyatatatattatctaaatatatttagattatctaaatatattatctagatatatatctaaatataatgacttgtatcattaaaaatttttagtttgatttatctccatgttcatactaacactgagttttatttatttttatttttattatttgaaaacaaaacatttattcatttacttgactgctgaatttcatgagaagggattgttcagggagggtcattgggctgaaaacccggacaggagctggtgcgaccgctgttcaaatctgagagtggtggagatggagccctggggaggagacgttgctgccttttaagtctgagagtcgttgagctggaggtccacagaggagccagtgctgccactgatgtcttaggttgtggagctgaagaccaatgaaggagctggtgttgctgttcttctgttagggtcatggagctggagatccagcggggagaggtgttctaattggagcgtcgtgcaactggagacccgggaggagctgatgttgtttta

SEQ ID NO: 397807 - DNA, 635 bp, Homo sapiens
aatttatagtaaataaattcagatgcttttctcttgttaatctgtcttttgttatgtggcctcagccagtagcctaagatggaaaaaagagaggtatttttcctcccctatagcaccatatatattatctaaatatatttagattatctaaatatattatctagatatatatctaaatataatgacttgtatcattaaaaatttttagtttgatttatctccatgttcatactaacactgagttttatttatttttatttttattatttgaaaacaaaacatttattcatttacttgactgctgaatttcatgagaagggattgttcagggagggtcattgggctgaaaacccrgacaggagctggtgcgaccgctgttcaaatctgagagtggtggagatggagccctggggaggagacgttgctgccttttaagtctgagagtcgttgagctggaggtccacagaggagccagtgctgccactgatgtcttaggttgtggagctgaagaccaatgaaggagctggtgttgctgttcttctgttagggtcatggagctggagatccagcggggagaggtgttctaattggagcgtcgtgcaactggagacccgggaggagctgatgttgtttta

SEQ ID NO: 397808 - DNA, 579 bp, Homo sapiens
gtcacatagtcattggcaaagctaggctaaaagccaggcttttgaggtttaatttggtactatattttatgatgccatcatgcttgccagattacttcttactcatttttatttttagcataatttgagagtctttactttttaacttctctacttaaaaagaagcccttatcatgtgtcatcactttttagaatagatattgagttttgtagatgtcatatatgaatatcatcattaaagataataaaattcttgttttaatatgtaaataagaattgtagaatgtagaatcatatacaatgatattgaaattagactacagttccagctatgatttgaaaatctcactaatattaccctgcatactgcctttatatgttaackcattttatggattttttacaaatatttctattttatgtacattgggaatttttaaaagaaacatttggttaggttataacagtcatatcagatcaacttgatgggcaacaactctaaataaaacctaattcatgatatttatttgaggccaaaatttttaaataagttatgcaagttcaaaattcatgaggcag

SEQ ID NO: 397809 - DNA, 630 bp, Homo sapiens
ctttacaaattggctgaaattaaggtaattaaggtcaaatcttaatttgatcaacactgagaaatttcctggaatgtgggattttcagtgttaaaacaaggacacacatgaacaaactgagatgattgctcaccctagattaaatacaagttttttcctacctttatcttcttyccaatgttattcttatttctatgtcatacctttccaactttaatctacaagtatttttacatatgaatctaataatccattaaacccagcaaatcaattgaagactttcccccttttgtgtgatctgcaagggtttaaccttcattgtcttcagaaagtggggtggagagatgatactacattcagactccttagcatggcaaaaacaacacagaaaggtaatgatgataagaataataatagctaacacaaattgagttattactaggggttgttctaagcatttcatgtatatttatgcatttaatacctataacaaccataagagatgggaatatctgtgaaattgttacagtgagaaaactcaggcattgaaatattaagtaacttgtccaagtgctgaaactggaagtaaaaaccaaagcaatatgacttcagcttcaatcctcttcatta

SEQ ID NO: 397810 - DNA, 622 bp, Homo sapiens
cttttaatactataactatacttccactctggatttgaatttccagcttcatcccaactctgtcactaagctttaaacccacgtgtctactgaccactggacacctctactcaggtgtccccagactcctcaaatccaatcccactcacccccaaaatatcttcctttttatattttatgtccttaaactccttctcctttgaaataaatctctgaatcagtcaacacttaccttgtctaaagctagaaatcctaataccattttaaatgttttcctttaccacacccctcatatacaattaatcactatgtctcatttcttccacctaaaaaatcttaaatgggcccaatccttttttatcagctcttcttcagttcccagaattcattttcttgcctcctgacttttgtatatgttattctcctgatagggaaatatataaccaactttacatgtcactaatttaatatcattgtgctctgctgtaaacttagaaataactgtttctrggaaaactttgctgttcacactggattcgttccctctccctgtgctctattcctgctgcactgcagctaccatgacacttagtgctctggattcttggggcctgaacaattg

SEQ ID NO: 397811 - DNA, 591 bp, Homo sapiens
gtagaaaattaggtaaaaataagcattactatttggccttgttctttattttatattttttcccagctgtcttcagtaaggcagcartaagaaagaggtgatagagacagtgtagagataggaattttgacattgatttccttaccaaggagaagatatgttgttagtattaaaaaatatatatcttaaatgtttgaatgggttggaaagagagggacctttttagaggttgaaaagaactttaacaatgtatatgtatgatagattctttacccatatttccaatttgccttttagatatatcatttttacattggtttagatccctaccagaaattgactggatggtccattggatggttctcattaccaagatgctgtctagaatgtattaaaggaggtattattgcaagaaaatgtacatatgcctaagtatttaacctctcagtgatcatcctccaatgccactttcggcttcaagttgattaggatagcccaggagaccatcaaataatcttcatttttaaacaggtttggcaattctaactttatctgccattctgctattctattgaaggagtcattttggag

SEQ ID NO: 397812 - DNA, 615 bp, Homo sapiens
aacagatatgtaaagtaataaacaaactagaaagagattctgaacacagggaacttcacaagcaactaaacttgcaatctaaccttaaatcatacatatgacacaaaaattagctagtgcttagggcaaagttataactattaacagcagattatattttctttacccaatttttgctttgtgaaaacaagttttaagattccctttcaatcagaactctgggtatataattgtgatgtatcaataaaatataaagctttttgtttggcaagtattttttaatgctatatcttaagtcagagcaataagaaagtttatgatatttaaagtcagttttataaaatattatatataaacacataagttaaatatatataatttatactgtcaaataataaaaatcatataaycaaatacacaaaaattttatcttcctaagtagttctgtaaattatgagagatattcatatatgtaattttagatatgcttgcataaatggaaatgtgaacatatctataatttgcatagtacaaatgattgccttgagttaatagttgacaattcatcaatatatatttgagaaattagtatttgcccacataggcattaacatt

SEQ ID NO: 397813 - DNA, 582 bp, Homo sapiens
ctggttcaagtctaagggcacttcaacctgaatgagcaaactgacagtctrtaaacacttaggagaagacttgagacaaggagtgctcatttctacatccaacagagagaagtagtaacatcacacaagactacattattttttgtaatatattattttatattcaagtagatttccaactctatgcttgggattttttaccctaactcaaaatggccagtaaataagtaagaaggatgatctcaccatgagttgattgtctaccatcttctaggtgatttacaggcatgatctcatgtgatcaccatcattctatgaaataagtacaattcccattatataggtaagtaaaatgggtgttaggttacatgacttagcaaaatcgggtttggtaagacatgaaaccagaataggctccagaaatgtatggtgactcctatgataactaactcccagttgttagtaaaaatatcagccccagttatcaacatctttattaagagtacatcaatcggtctgtttgataccttccactttatcatattgattctcagttacaaaaataatctgtatttcccaagt

SEQ ID NO: 397814 - DNA, 580 bp, Homo sapiens
cacatgcctataaccagagaaggcagggaatgatcctagattctagtgagaagaggcccaaggaaactgccaggtatcctgtattgcataggacagcctcccgcaacaacaacaaaacgttattcagtgcaagacatcatwaggggtgaggttgagaaattctcctctatttgatatctgaagctgatttctacccaaaattttattcctcatccatttcttttacctaacaacaacaacaacaaaatctcatctgctctgtggtttcaactaccacctatattctgaagattttcaaatttactgtgacagtactgaccctgatattttgactctaaatgcccaccagatacatttaattgactgtgtcacaagcggaactaaattaacatgtcccaaactgtagatagatttaatttccccatcataaatatcctccagtagccctacatctggcagtgggtactgccaggaccatatgataggcaaatccagaaactgtcccacatcaattcccaaatcctgtacatttcattcatatgcctttttatgttccaaagtattttacttacctcaataa

SEQ ID NO: 397815 - DNA, 486 bp, Homo sapiens
agatggaaaaacaaagagaagtataatggaaaaacacacacacaaaaacatacagaacagagcctttaagagttatgataccataccaagttgtcgagtcacatgtccaagaagctcagagataccaagaagaatacaaaaagagtttttaaaagtctagccatgtcaaattcaacatgctgaaaaaaaaaatacaaagaaaacatcttgatggcagccagagaaaaaagggacattacatcctgaaggatgaaggtaagaatyccacagactgctcttctggagtcatgaaagccagaagacaatggaatgacttactttcaaatgctaaaagaagagtccacacaaccaaaatattcacaaaagcataattttggctttcagttaagtctgattggctacacatgtttaccacttctccttcctgcaaattaaataaaataatgcaaaggaataaaaagaacataaatacactacaacagacag

SEQ ID NO: 397816 - DNA, 525 bp, Homo sapiens
ggaagagtcactgagaaaagttttcctaatggagacaattacatgatcatattttgattttagaaatacaatgtaacaatgtagaaacaacttgcaagctatgatattaatttaaacgggtaattcctcactaaactggggatggaaagaaatttagggatttaagaaacagttcaaatgtataactcataagactagtcattggtcaggtgtgtaggatgagggaagagagaagagtcaaaatgatgcctgggtttctgtagtgattgagagaatggtcttaccatttacttgagaaaaaaggaaaataagtatatttagtgttcaagatgatatattttcttctggcaagttttttgggggtaaatctgttagtagtatgtaggcatattgatatatatacctagatctcatgaaaaacatctcagctggcagtacgaattttgaaattatgtgatcacatgaggtcayccagtaaaaatatgtgaaataggtcttcctgcctctatataactggtaatgata

SEQ ID NO: 397817 - DNA, 521 bp, Homo sapiens
gaacactccatgaatgcacatggaattcagaaggatgagaaggttttactcaagagaagtagagagttttcttggaggagtaccagatttctgatatgagagaacatgggagactgttgcatagggagactgaggttggagctgtgcttgttgattcttaaatggggagtctggcagacataaagtaaagttttaggagaaggaataggatgatgttgtgtggctggagagcagaaagctgggggatagatggyaaatatccaagtcgatagctgaatgaaaggtaatgtgtttgaactggccacttagttgcctgtaaagaagcccctgatggatgtgagtgaggcaaggcacttggatttcttcttcagagtctaccagagcctagaaggagtatatctatctaaataaattgtctagacttccagagggtgtcagctgacatccattgctgatatccaatgacatccatatattcatgcacacgtgagtgcatgtatgtgtgtgcacatgcgtgcatg

SEQ ID NO: 397818 - DNA, 521 bp, Homo sapiens
gaacactccatgaatgcacatggaattcagaaggatgagaaggttttactcaagagaagtagagagttttcttggaggagtaccagatttctgatatgagagaacatgggagactgttgcatagggagactgaggttggagctgtgcttgttgattcttaaatggggagtctggcagacataaagtaaagttttaggagaaggaataggatgatgttgtgtggctggagagcagaaagctgggggatagatggtaaatatccaagtcgatagctgaatgaaaggtaatgtgtttgaactggccacttagttgcctgtaaagaagcccctgatggatgtgagtgaggsaaggcacttggatttcttcttcagagtctaccagagcctagaaggagtatatctatctaaataaattgtctagacttccagagggtgtcagctgacatccattgctgatatccaatgacatccatatattcatgcacacgtgagtgcatgtatgtgtgtgcacatgcgtgcatg

SEQ ID NO: 397819 - DNA, 616 bp, Homo sapiens
gttaaaatctattttatcaatatataaaatttttgttctaattatagtcaaacctcatcatatttcattttccaaaattgtgcaatattttaactttctattatccaaaaatagccttatttaaacctataacaaaatctttcacgtgtcagcttgtgaatatgcaaagaggagtacataaatttcaaatttattttatgaggtacctaagtaaaaaagtttgaagattgcagtttttgtctaattttccttatttcttggagacttagacccatgagctactgagcgatgggagattcccagtggttcttttttattttaactaagtatctttgttgtactgaatatagccacatgcagacagtggccttgtgctgttttattctggctttgtccttggtgtattttccttagcagtggaaattagttttctgctatttcttgatgtagagttatctataaggcattcattcacagggccctactctaagcccttygggtttaccctaggtaagaaattctgttttgggaccaaaaagtggcacactccaccctttttgtttctattggtaattaagagaggatgggtacaggccaacagatgacatgctggctc

SEQ ID NO: 397820 - DNA, 611 bp, Homo sapiens
tgttatgctatcaaatactagctctaatattaatgtgttcttgatttaagggtttgaacaagctgaaaataatgttcagtttcacattgcttggtatagtatcactagtggcatgatggttttgcctggatatatagttaaaattgtttttaatcttggtgatttattatctaattcagaactataggaaactcctaataataaaaaaggaaacattaagttgaaatttttctaatgataaagggaatatatattctgatactcttaaaatgcctaaaactttctattccatatttgctatttacaytaatttgattaaaattcctctagcacatgtaatgccatctttcatacttcagcaaaacaatgttaataaaagtaaaaatgcaataccatttcatactggctagaatggttacaatataaaagactgatgacactgaagattggtaaggactggtaaggattgaagctttcatatgttattaattagagagtgaaatggtacaaccagttagaaaatgtgtgtgcagtttctcataaaattaaacgtgtatctgctctatgaaccaacaagtcatcttacatttaccaagagaaatataagcata

SEQ ID NO: 397821 - DNA, 611 bp, Homo sapiens
tgttatgctatcaaatactagctctaatattaatgtgttcttgatttaagggtttgaacaagctgaaaataatgttcagtttcacattgcttggtatagtatcactagtggcatgatggttttgcctggatatatagttaaaattgtttttaatcttggtgatttattatctaattcagaactataggaaactcctaataataaaaaaggaaacattaagttgaaatttttctaatgataaagggaatatatattctgatactcttaaaatgcctaaaactttctattccatatttgctatttacattaatttgattaaaattcctctagcacatgtaatgccatctttcatacttcagcaaaacaatgttaataaaagtaaaaatgcaataccatttcatactggctagaatggttacaatataaaagactgatgacastgaagattggtaaggactggtaaggattgaagctttcatatgttattaattagagagtgaaatggtacaaccagttagaaaatgtgtgtgcagtttctcataaaattaaacgtgtatctgctctatgaaccaacaagtcatcttacatttaccaagagaaatataagcata

SEQ ID NO: 397822 - DNA, 602 bp, Homo sapiens
tgcatcttataaacttatgtttgcaaactttggccagtatctccctaacaccactataaccaggcttctggtatccgttattttgctatgtttgcatgagtttaactttttaatatcatgcggtatttgtctttctctgcctgacttacttaacttaaaataatgtccttcatccatggtgttgcaaatggcaggattcctttctttaagtctgaataatgttccactgtgtgtatgggtatatgtatatgcacaygcacacacacatacatatagtgtgcatatgtctgtatgcatatctatacctatataccacattttccttatccattcatccatcagtgggcactgagattgtttccatatcttaactattgtgaataatgctgcaatgaacatggaactgcagatatctttttgacataactgatttcatttctttggaatatataccctaaagtgggattgctggatcatatggtgttgtattttttattgcttaagaaacttccaaactgttgtccgtaatggctgcaccatttacattcccaccaataacatgtaagaattctcttttctccatctccttttcaacacttgtt

SEQ ID NO: 397823 - DNA, 516 bp, Homo sapiens
tattatactatttaaatttctaattattcacatttacaagaagaaaggaaaaagacacaaaagtgtattgtgtttcacatcttgcaagatgctggtgaaaaggccgagaaaccagacactaagaaaaagaaacctgaagtaaagaaagatgctgccagtggcaaggtgaagaaaaagcaccccagggccaaaaatgcccaataagggaaagccccgctgcagctgaaaccctgtcttggaaggatcaacagatattcctaatccgaggagtgccctgtggaagaggaagtgttcagcagctaaatgcaggattgaaaagaagaaaggagacggttcttgccactttcacaaagccagttkgtggtaacaagaatggtgatcccccagtgtgtaagcttggccgtatgcctacttattatcctactgaacatgtgcctcaaaagccattgagcctttacaagaaactgtttcatcagcatgtgagaaaacagagattgtgtcacttccaggtcccct

SEQ ID NO: 397824 - DNA, 599 bp, Homo sapiens
atgcttcatgtatttatatttcaaacaaattaaatggaatagttcccttgaccwcttcatggtactcgtgaagaggcggcttgcttactctgcccacagctctcaacccctcatgggatggggagcatgcaggtgagtgggtgcaggggctgggacaagtgcttctggctgctggcaggagaactccatgtggcctcgtgccagtgtctgggctggggggtacccatgacccctggagccccagagggcaagggttacagtgtattcttttagctttgctgtctatggacagcttaagtgtttaacagctcagtggaaggtcagggtgacagcctttgcacccacccttttggtacccaagttcttgtccagcatccaggaagagtcaggtcacatgaatgaattgaagagtggtgaatgtggaggattttactgagcaatagaagtggctctcagcaggatggggagctggaaagaggatagaatgggaaggtggtcttcccctggagttcggctgttaccagccaaactcttctctgaagtcccactatcaagccatccccctgaagttaagctgcttctctctgacattgagctgc

SEQ ID NO: 397825 - DNA, 599 bp, Homo sapiens
atgcttcatgtatttatatttcaaacaaattaaatggaatagttcccttgacctcttcatggtactcgtgaagaggcggcttgcttactctgcccacagctctcaacccctcatgggatggggagcatgcaggtgagtgggtgcaggggctgggacaagtgcttctggctgctggcaggagaactccatgtggcctcgtgccagtgtctgggctggggggtacccatgacccctggagccccagagggcaagggttacagtgtattcttttagctttgctgtctatggacagcttaagtgtttaacagctcagtggaaggtcagggtgacagcctttgcacccacccttttggtacccaagttcttgtccagcatccaggaagagtcaggtcacatgaatgaattgaagagtggtgaatgtggaggattttactgagcaatagaagtggctctcagcaggatggggagctggaaagaggatagaatgggaaggtggtcttcccctggagttcggctgttaccagccaaactcttctctgaagtcccactatcaagccatccscctgaagttaagctgcttctctctgacattgagctgc

SEQ ID NO: 397826 - DNA, 645 bp, Homo sapiens
tgttgtactttaagttctgtgatacatgggcagagcatgcaggtttgttacatagttatatacgtgccatggtggtttgctgcacccatcaacccgtcatctacataggtatttctcctaacgctattcctcccctagcctcccacaacatgacaggccccagtgtgwtatgttcccctccctgtgtccatgtgtcctcattgttcaactcccacttatgagtgagaacatgcaatgtttggttttctattcttttttgtttttctttctctctctctttttttttttttttttttggagacaaagtttcactcttgttgccctagttggagtgcaatcgtgtgatctcggctcaacgcaacctctgcctcctgggttcaagcaattctcctgcctcagcctcccaggtagctgggattacaggtatgtgccaagattcctggctaattgtttgtatttttagtagagacggggtttctccatgttggtcagactgatctcaaactccccacctcagcctcccaaagttctgagactacaggcatgagtcactgctcctggcctggttttcttttcttgtgttagtttgctgagaatgatggtttccagctgcatccatgtccctggaaaggatataaatgcaca

SEQ ID NO: 397827 - DNA, 645 bp, Homo sapiens
tgttgtactttaagttctgtgatacatgggcagagcatgcaggtttgttacatagttatatacgtgccatggtggtttgctgcacccatcaacccgtcatctacataggtatttctcctaacgctattcctcccctagcctcccacaacatgacaggccccagtgtgakatgttcccctccctgtgtccatgtgtcctcattgttcaactcccacttatgagtgagaacatgcaatgtttggttttctattcttttttgtttttctttctctctctctttttttttttttttttttggagacaaagtttcactcttgttgccctagttggagtgcaatcgtgtgatctcggctcaacgcaacctctgcctcctgggttcaagcaattctcctgcctcagcctcccaggtagctgggattacaggtatgtgccaagattcctggctaattgtttgtatttttagtagagacggggtttctccatgttggtcagactgatctcaaactccccacctcagcctcccaaagttctgagactacaggcatgagtcactgctcctggcctggttttcttttcttgtgttagtttgctgagaatgatggtttccagctgcatccatgtccctggaaaggatataaatgcaca

SEQ ID NO: 397828 - DNA, 604 bp, Homo sapiens
attaaacatttgacaatgtatatcatatttttataatgtacacaatacataattatgcaatttttattggtcaaaaattaatgttatgtacacatgcatatattcatataagtgtgtatatagacatayataaaacatatacatatatatcaattacatatgttgttatgtatataattgtgtgtgtgtatatatatatatatatatacatatatacacacacatacatatcaatgacaaaatcctagtaagcttcaaactaaacaaggcaaaattataaaatgataactatttaaaaatcaggaaacaaatgggtatttaatacatgctcagctatattttgagttcctcaatggcaaagtacatgttttaaatgtagaaagtagatacattaaaccatattacagtttaggaattatggcacagagtgtttacagtattagcctcaatacataccaaaagcttaaaattttgaagtaaaataacatttggttttattatatggggcagatgcttagtattctgataaaattattgagtatgaatttctgtagaatcacttttgaaaccttcacaagatatgaaattataaagcagaaaactt

SEQ ID NO: 397829 - DNA, 581 bp, Homo sapiens
gtttgcacttaaatggagaatttaaaaagcctgaacttatagaagcagagtgtacaatggtaatgaccaggcctggaggtagaaaaaatgagaagttgttcaaagagtacaaactttcagttataagataaataagttttgggggtctaatgtacagccttaagatgtagttaataacagtgttttgtatgcttaaaatttgctacaacagtaggagacctcaaatgctctcactacaaaaaacataaccatgtgaggtgacaaaaatgttcatcaacttaattgtattaaacatttgacaatgtatatcatatttttataatgtacacaatacataattatgcaatttttattggtcaaaaattaatgttatgtacacatgcatatattcatataagtgtgtatatagacatatataaaacatatacatatatatcaattacatatgttgttatgtatataattgtgtgtgtgtrtatatatatatatatatacatatatacacacacatacatatcaatgacaaaatcctagtaagcttcaaactaaacaaggcaaaattataaaatgataactattta

SEQ ID NO: 397830 - DNA, 604 bp, Homo sapiens
attaaacatttgacaatgtatatcatatttttataatgtacacaatacataattatgcaatttttattggtcaaaaattaatgttatgtacacatgcatatattcatataagtgtgtatatagacatatataaaacatatacatatatatcaattacatatgttgttatgtatataattgtgtgtgtgtatatatatatatatatatacatatatacacacacatacatatcaatgacaaaatcctagtaagcttcaaactaaacaaggcaaaattataaaatgataactatttaaaaatcaggaaacaaatgggtatttaatacatgctcagctatattttgagttcctcaatgrcaaagtacatgttttaaatgtagaaagtagatacattaaaccatattacagtttaggaattatggcacagagtgtttacagtattagcctcaatacataccaaaagcttaaaattttgaagtaaaataacatttggttttattatatggggcagatgcttagtattctgataaaattattgagtatgaatttctgtagaatcacttttgaaaccttcacaagatatgaaattataaagcagaaaactt

SEQ ID NO: 397831 - DNA, 251 bp, Homo sapiens
aaagcttaaaattttgaagtaaaataacatttggttttattatatggggcagatgcttagtattctgataaaattattgagtatgaatttctgtagaatcacttttgaaaccttcacargatatgaaattataaagcagaaaacttacgacatctggatgtggtgtttctgtgatttctaaaccaaatcccaatatctccactactctcacacattttagacaagactcaaaatggaaattagaaaatgtt

SEQ ID NO: 397832 - DNA, 251 bp, Homo sapiens
aaagcttaaaattttgaagtaaaataacatttggttttattatatggggcagatgcttagtattctgataaaattattgagtatgaatttctgtagaatcacttttgaaaccttcacaagatatgaaattataaagcagaaaacttacracatctggatgtggtgtttctgtgatttctaaaccaaatcccaatatctccactactctcacacattttagacaagactcaaaatggaaattagaaaatgtt

SEQ ID NO: 397833 - DNA, 645 bp, Homo sapiens
tgttgtactttaagttctgtgatacatgggcagagcatgcaggtttgttacatagttatatacgtgccatggtggtttgctgcacccatcaacccgtcatctacataggtatttctcctaacgctattcctcccctagcctcccacaacatgacaggccccagtgtgatatgttcccctccctgtgtccatgtgtcctcattgttcaactcccacttatgagtgagaacatgcaatgtttggttttctattcttttttgtttttctttctctctctctttttttttttttttttttggagacaaagtttcactcttgttgccctagttggagtgcaatcgtgtgatctcrgctcaacgcaacctctgcctcctgggttcaagcaattctcctgcctcagcctcccaggtagctgggattacaggtatgtgccaagattcctggctaattgtttgtatttttagtagagacggggtttctccatgttggtcagactgatctcaaactccccacctcagcctcccaaagttctgagactacaggcatgagtcactgctcctggcctggttttcttttcttgtgttagtttgctgagaatgatggtttccagctgcatccatgtccctggaaaggatataaatgcaca

SEQ ID NO: 397834 - DNA, 539 bp, Homo sapiens
ttgaagaacatcaaatactcaatagtctgtatgagagctgtattctgtccactcacagcacagctgtcatttagccttttcctgacgtgccctggaggacttgagctcctcttgcattgccaaggccaatagtgtttatttgttactaactttgtactgaaccccccaaaaatgaaaagtgattgaataatcatttataatagcaactagtaattttacttataaagagacaatagtggtaacgaatttaaatatttatggtaaagaatagatctttgttagacagtactggcaaaatttagaaagaaaaaataaggaatcagaaacataagtagttcagtattgtgaaaaaattctggatctgagatgcaaaagaacagagattatattgcgtttctactycaaacctgaagagtcaccttaagtgtgttgtgtttctgtgccaaagctgctgaatcaccttaggcaatgcatgccctttccctgaacctgttttcttttctacaaaataaagtgagctagatcatctctgaggtctc

SEQ ID NO: 397835 - DNA, 539 bp, Homo sapiens
ttgaagaacatcaaatactcaatagtctgtatgagagctgtattctgtccactcacagcacagctgtcatttagccttttcctgacgtgccctggaggacttgagctcctcttgcattgccaaggccaatagtgtttatttgttactaactttgtactgaaccccccaaaaatgaaaagtgattgaataatcatttataatagcaactagtaattttacttataaagagacaatagtggtaacgaatttaaatatttatggtaaagaatagatctttgttagacagtactggcaaaatttagaaagaaaaaataaggaatcagaaacataagtagttcagtattgtgaaaaaattctggatctgagatgcaaaagaacagagattatattgcgtttctactccaaacctgaagagtcaccttaagtgtgttgtgtttctgtgccaaagctgctgaatcaccttaggcaatgcatgccctttccctgaacctgttttcttttctacaraataaagtgagctagatcatctctgaggtctc
